United States Patent Application Publication US 2004/0214272 A1 - sequence listing, part 37

SEQ ID NO: 153795 - DNA, 327 bp, Zea mays
  Clone ID: MRT4577_71839C.1
gggggggcaaagcaaagttgggcaataaataaacagacccttttctgggggctcccacatgagtttggttgggggaaaaaccaaaacaaggtttatccctgctttttgctcaaaaacttttttgaaggtttaaaacccaaaacctttggtttaaggaaaagtttttttaccattaaccgggccctttttttaaaaggggggcaataaatttttcaaatttgcaacttaattttgcctggttcaatttaaggccaagcttttaagattccctgttccaacttgtttagaaccaaaagttcagcataagttttgcaactttactttttg

SEQ ID NO: 153796 - DNA, 2263 bp, Zea mays
  Clone ID: MRT4577_7183C.1
tttggccttgccggggagtcggggacggggagggaaacggcaacgagcctgcagctccagctaccccgaaaccccgtccaacgtccatggctatccacctccgggcccacgccttcgcggccaacccgctgcgtggcgtctccgccgccaccacctccatgtccccctccgcggccgccgaggcactccgctacctcctcgaccccagctccgccgccgccgccgccaatcccagccagtacctctccaagatccttcctttccgccggggccgcccgctcgcgcgctccacggaccctcccgcggtgccggcctggcgcctcgcgtggctcccgccgtcccgcgtccccggggtggccctggatgccttcgtcttcctgggcgcgctcgtcgagggggacggcaaggaagcctccgcgtactgggcggtcgacgtcagcgagggcgagggagccagggttggtgggccggcggacggggatgggccgtcggcgtttgtggacttgaggacgctcatggtggccacggactggagcgacaaggacgccatggcggagctcgccatcgcaggacatgctcgagcactgctagaatggcacagcacggcaaaattttgtggagcttgtggagcaaaggctgtacctactgaagccgggaggcgtaagcagtgcagcaacgattcctgcaagaagaggatataccctagaattgatccggttgtgatcatgttggtcattgataaagaaaatgatcgggcactcttaagccgccagtcaagatttgtgcctcgtatgtggagttgtcttgctggtttcatagagccaggagaaagcctggaagaggcagtgagacgagaaacatgggaggaaactggtatcgaagttgggcaagtcgtttatcacagttctcaaccatggcctgttgggccaaatactatgccgtgtcaactgatggtgggcttctttgcttatgctaaatcattggagataaacgtggacaagcaggagcttgaagatgcccagtggcacaaccgggaagacgtcaagaaagcgttaacgtttgctgaatacgagaaagcccagagaacaagcgctgccaaggtcgatcagatctgcaagggcgctgagaaagggcagaacccctctgccgacttcaaagttggaagcggcgagcctgctccaatgtttgtcccaggaccctacgccattgctcaccaccttatctcgtcgtgggctttcgagggagcaccgaagctgcctagttcattctcaaacctataagcctggaccctggtgttcagacagacgatgacaggaactggacccctgtgctgcgggctcatggatcacctgtgttgccgtgagtgtaattctgatagtgtgtgtccgttgccggttgtgataaaataaaatagcaatagagtactgggtacagaagacttgccggaggatttggcatcaatggacatgtatatccattgcctttttacatgttgatcctctttgtatcacacgtaatgttgcatacttgcatagatacaacaatgatatacatcacacagtgtactcatgcatttatacatgtattcagataactggattcaatagtagagtctttgtctgtctctcaaaaaaaaaaaaacaggagcttgaagatgcccagtggcacaaccgggaagacgtcaagaaagcgttaacgtttgctgaatacgagaaagcccagagaacaagcgctgccaaggtcgatcagatctgcaagggcgctgagaaagggcagagcccctctgccgacttcaaagttggaagtggcgagcctgctccaatgtttgtcccaggaccctacgccattgctcaccaccttatctcgtcgtgggctttcgagggagcaccgaagctgcctagttcattctcaaacctataagcctggctgcctggaccctggtgttcagacaaaacgatgacaggaactggatccctgtgctgccgtgagtgtaattctgatagtgtccgttgccggttgtgataaaataaaatagcaatagagtactgggtacagaagacttgccggaggatttggcatcaatggacatgtatatccattgcctttttacatgttgatcctttttgtatcacacgtaatgttgcatagatacaacaatgatgtacaacacacagtgtactcatgcatttatacatgtattcagataactggattcaatagtagagtctttgtctgtcccaaaaaaaaaaaaaaaaaagcggcc

SEQ ID NO: 153797 - DNA, 379 bp, Zea mays
  Clone ID: MRT4577_71840C.1
gggactccctttacgacgtccagtaaacatggggcccaccgttcgatgtggggaggtgttgctactcgccttcgttgatgcccgcatgctgatcgttgaccgcgtggagtgtggacggtgtccgaagttcacctgcttaatctgctgtgttttgttaggactgatgtgcatatataaacacatgaggtcggcggaaggagcaccaccgtaaatcaactgccaccgtcgtctactgaaccggcgaaaaataattaacaaggaacctcgccaattttacaaacgctctgcaaaaaattacgatggccgcatcaaaacgtttttgccatcgactgtcacctaatttgtctgtactctaatcattactgttttttgtttatag

SEQ ID NO: 153798 - DNA, 331 bp, Zea mays
  unsure (1)..(331): unsure at all n locations
  Clone ID: MRT4577_71841C.1
actattagttttttttcccttatttcttgtcctcttaacacaacacaccanagaggtctttcgagagtgtcttaaaagacaccgccccataccttccacttttttctctcactctttcacactctgaataatccactcttttttactaaaaagtactaatgactatatatttttataacaatgttttcatccttattattactctctccatcttcatctttgctcacaacattatatctctctttttatcaataccctcaatgcatctcttctctctctttatcttcatcttatttatttccataacaaatctttattcataacattacta

SEQ ID NO: 153799 - DNA, 263 bp, Zea mays
  unsure (1)..(263): unsure at all n locations
  Clone ID: MRT4577_71842C.1
gcagatcgtctgggctaacatcaaaccattttcagcagactgaaggaagccatcgcatagcgcatntctggaggaaaggagctctgccgctataaaggccttcgcgtgctcttgtgctactgttttgaaatacgctagtcctccctttttttatagggttgtttaagnaactacgtctctgcatncaggtataaaaaactatcaggggtgtgttgcaagtcttattaattccttacagagcgatgcatcggatattcttggtg

SEQ ID NO: 153800 - DNA, 371 bp, Zea mays
  Clone ID: MRT4577_71843C.1
ccacccataaaaagggggcccccgaaaatttattgaagcgcgcacccccggacccggcacggtatttggagcttggcgacgatgtgtagtgtattttagggcccccccgacgacgacgactttaaaaaagagggggcagcaacagggagcttccccaggggcatcctgagcgcgagagcctgcaacgcccggacccccttggggacctggtccttggggtccgggtcaacaaggttgcccccttcttcaaacttgctgggcggttggggcgccctggtgaacacctctggtttgttgacaaagggggggttaaggaaaacccccacctgtcggacgtggtactgggggaggttgcccccccgaccctgcca

SEQ ID NO: 153801 - DNA, 479 bp, Zea mays
  Clone ID: MRT4577_71844C.1
cctcgaggccggccgggcattgagcttgtcatcttcctgccagctctctgccgcaagatgggtgtcccatacgtcattgtcaagggcaaggcccgtctcggtacggtcgtccaccagaagaccgctgccgtcctggccctgaccgaggtccgctccgaggacaagaacgagctccagaagctcgtcaccgctgtcaacgacggttacctcgagtcacaccacaaggaggcttcccgccactggggtggtggtatcatgggtgccaaggccaacgctcgcatggagaagcgcaggaaggctgttgagaacgccatcaagatctaagcatgtcttggggtgtttggaagggttcatgatgactttatggcgtgtctcttatctctgcatgtatgcggttcacaataccaacggagtttaggagggttaaaagaagtcgctaacgactacattgactggaatcgatttgataacgcacgccc

SEQ ID NO: 153802 - DNA, 376 bp, Zea mays
  Clone ID: MRT4577_71845C.1
cgccacggtcctggacccccctaccagtgccgcatgtccaggaacgggttctggcagtgggaggacgagagcccgccgtcgggcgcctggaagggcaccagcggaggccacgccgtgctcatcagcggatacagcgagggcaaaggcaacttcgccatgccgcgcggggtcacctacggccacctgctcagctccatgagggccatcatgaagaaccgcggcgggggctgcgatctgcagggggccatcggcgcacccatccgcaccgtcgccaacttcagcggcgtgcaggagcctaacctgtcctcttcggagacgtttgacatttaccgcaagcagttcgtcctgtagacaccaccacaccaagggtttgccc

SEQ ID NO: 153803 - DNA, 706 bp, Zea mays
  Clone ID: MRT4577_71846C.1
tccggaaaggaacttcgccatggtcaggtacatgatacatacatacatactgctgatcgagctctgctgccttgcatctatctatataactaacaggcatatgggcatgcagatgcccgacgcccacgcgtcggtcgtcggggccatgacgcacagcttcgtccggacgctggagtgccagccgcgcggggtcacctacggccacctgctcagctccatgagggccatcatgaagaaccgcggcgggggctgcgatctgcagggggccatcggcgcacccatccgcaccgtcgccaacttcagcggcgtgcaggagcctaacctgtcctcttcggagacgtttgacatttaccgcaagcagttcgtcctgtagacaccacgccacaccagtgtttgccccgccggccgcttgtaatgaattgccgtcgtagtatcagaataatcaattatctatcggccatgatatgatatgatatatcaagaaagaaggaactaatacctagagtacttcgttcatctgtattagcagtgaacctctcaatggaataactaagcatgttcaatgtcctctttttattagagagagacagggagaaaacgcggaatttgtgagacgtgtgcaattgtgcatgcagtttacgtgatcaataaagttacatggaaattattttattcaaaaaaaaaaaaaaaaaaggcccctagggcc

SEQ ID NO: 153804 - DNA, 229 bp, Zea mays
  Clone ID: MRT4577_71848C.1
cggacgcgtgggcggacgcgtgggcggacgtgtgggcggacgcgtgggctgtattagcagggaacctctcaatgaaataactaagcatgttcaatgtcctctttttattagagagagacagggagaaaacgcggaatttgtgagacgtgtgcaattgtgcatgcagtttacgtgatcaataaagttacatggaaattattttatccacgtgcgatgcaagtggagctta

SEQ ID NO: 153805 - DNA, 917 bp, Zea mays
  Clone ID: MRT4577_71849C.1
ggcgctagcctcccctcgcccgctgtcagtggtcaggttcaccttggggtgctggaattgcgggggataaatgagcttagttccgtagcaagagagatggttcggttgatagagacagcaacagtacccatatttgcagtagatactgatgggtgtataaatggttggaatgcaaagattgctgagttgacagggctttcagttgaggaggcaatgggcaaatctctggtaaatgatcttatcttcaaggaatctgaggcgacagttgaaaaactactctcacgagctttaagaggtgaggaagacaaaaatgtggagataaagttgaagacatttgggtcagagcaatctaagggaccaatatttgttgttgtcaatgcttgttctagtagagattacacacaaaatattgttggtgtctgttttgttggacaagatgtcacaggacaaaaggtggtcatggataaatttgttaacatacaaggggactacaaagctattgtacacaatcctaatcctctgataccaccaatttttgcatcagatgagaacacttcttgttcagaatggaatacagccatggaaaaacttacaggatggtcgagaggtgaagttgttggtaagtttcttattggagaggtgtttggaaattgttgtcgactcaagggcccagatgcattgacaaaattcatggttattattcacaacgctataggaggacaggattatgagaagttccctttttcattttttgacaagaatggaaagtatgtgcaggccttattgaccgccaatacaaggagcaaaatggatggtaaatccattggagccttttgtttcctgcagattgcaagcactgaaatacagcaagcctttgagattcagagacaacaagaaaagaagtgttacgcaaggat

SEQ ID NO: 153806 - DNA, 167 bp, Zea mays
  unsure (1)..(167): unsure at all n locations
  Clone ID: MRT4577_7184C.1
attccactcacttttaggaaatctggttcccctgcaagttcccgttccgaatttatttccaggtccaccaaccttacttatccgcaggccgcccttncttttttttttttttttttgtttacaaaggatttggttaactttttttctangctatctttttttttttt

SEQ ID NO: 153807 - DNA, 655 bp, Zea mays
  Clone ID: MRT4577_71850C.1
cggaagctgtgatgaaaagcacctgcactggtgggtccagtgcgatcttctgatcttgtgatgtgtctcgctactctgagcttaggcaggcaggcagccaagaggcaagaggcaggaggtccctcagtcgctaggcgctagctcccggcttaactagtaggcagccagtgaatttcggtgggaatggcaacgcgacgatccggtgcaagtactgcagggcgagcctgagcgtgatccccggcgagcgcgccatccagtgcgcgcaatgcaactgcgtgacgcgcatccggcgggccgaccgcatcccgctggcgcggccggcgcacgtgccggcggcgttccagggcgcgctgggcaagaagcgcgccgcactggtcggcatcatgtacgccggcatgcgcccagggtgtggggacctgagggaccgcggaaccgtgggcggagaggagggcggacgcgtgggcccagcggtgggctgtattagcagtgaacgtcacaatgaaataactaagcatgttcaatcccttgtttttattagagagagagagggagaaaacggcacctcactggagactgcatggtttcttcttccagcctatgtgatcaataaagttacatggaaattattttatccacgggcgatgcaagtggagct

SEQ ID NO: 153808 - DNA, 320 bp, Zea mays
  Clone ID: MRT4577_71851C.1
cagacgcgtaggctcaacggcatgggcactattcccgtcatccctgcgacgatgctcgagggcgatcttcttggcgctagtagcactgcctgcttctgcgccaccgacaccgacaccgacagctccattcgtttccccagcagctatggtgctgttgttctaccgtgggagagctgtgactatcacaccaaggagccctttatcaaaccgtctctgttgcgctacaacgacttggtggacaagagctcctccaactgacaatagtgctaggatggtacgcccggcaacggctttttcagccgtgactggatcgttaacac

SEQ ID NO: 153809 - DNA, 425 bp, Zea mays
  Clone ID: MRT4577_71854C.1
cctaggcactcgccggcgccagccgtcatgactgccgttcagtgcggcaccgtagattaccacaacgcagtttctgattccgacctatacaacgggctgggcctcaacagggagtgcaccgacgcccctctcaaattagggcaccgtaggctcagcgttatgtggacttcgaacagacactgaatgtgctgaatacaagcgcgcgtgaagggaggcatgggcctgttcacatagatccatgccaattcactccggcgtatcaaatacatcgcgaaggatactgtacgctgaagctgaacaattgcttgacgtcgacaacagtcacatgcccagatttgatgaggcccgccactcgcacagaaagactgaagaagctatacaactgtaggagcggcttcaggcaacggtcggagacgtgctgcaag

SEQ ID NO: 153810 - DNA, 166 bp, Zea mays
  Clone ID: MRT4577_71855C.1
ttcttttgaacctgacagccgtggacccacggaattctacgaattgagcgcgagagtcacatacatccatacccacggttacatatggttaccgactacccttgcttatattttgtatacgaattgattatatctatttagttatttattttttctttttaatttt

SEQ ID NO: 153811 - DNA, 396 bp, Zea mays
  Clone ID: MRT4577_71856C.1
ggggtaattgatcctccgagagataggtgccttcggactcgtctacctccgcggctcaaacctttcccccttctcccaattcccgtcgccgctccatcccgtaacgctgcactcatgagggagtgaatttcgatgcacatcggccaggacgatatccatgtcggaaacgcgtgatgtgagctgtactgccttgacctatgtgattcaggctgactgttagatgcccgttgtaaatatgcattgggggaggtgatgatgctttcaacaccttcttcagtgagagtggtgctgttgaaagacgttgccccgtgctgttgtttgatgaccttgaacccaactgacatcgctgtaggtgcataactggcacccaccgccagctcttccaccatgataagc

SEQ ID NO: 153812 - DNA, 274 bp, Zea mays
  Clone ID: MRT4577_71857C.1
ccaaaaaaaaaaaacggggccattcaatttgtggggggcaaaaaaatggcaaaaacaaacaggattttttaagcggcatattccattctccttttaacaatatatatgacccccaccatgaacggatgcaaccttcaaacacttggggagcatggggaggccacgccttgcgccctgggggatcaagaccatgggctcaaggacccatatgagggacaggatgggggcaaacctctgaaggtaaatggtcaccacgggctttgcctaaatcatg

SEQ ID NO: 153813 - DNA, 185 bp, Zea mays
  Clone ID: MRT4577_71858C.1
gcgagggatgggtttttttttcccaacgagtaccaaagggttaaaaactgtgcgggtctgcgcatatggcaacgccaggaataaccacagggttgatccgcaaggaatgatggcacttttcgccgctacgggagcagaagctgcaattgcggagctccaaagaggccctcaacctgaggtccgct

SEQ ID NO: 153814 - DNA, 187 bp, Zea mays
  Clone ID: MRT4577_71859C.1
gggcccgggcggggggccttcctcgtgcatggcattcaggctggtggcctgatgcccggtgactctaccattgggggaggtgcgtatgctttcagcaccttttttattggtactggtgctgtgaagcacgcgctttttttttccggggctgaccttgagttgggtggggggtaggagcttagtacgc

SEQ ID NO: 153815 - DNA, 238 bp, Zea mays
  Clone ID: MRT4577_7185C.1
taaaaatttccccctatgaggggggcccgggcaaggaaaaaccaacttttttttttttttttttttttttttaataaatttttattctttacagacaaatatttcatgttctttcttctataattactttttatatttatttatttttttttgccacgattcatcttttcctatttaatatggaaagagggtcttatctcaagatgttttatttccaaatcacgcgtaaggaattatt

SEQ ID NO: 153816 - DNA, 1533 bp, Zea mays
  Clone ID: MRT4577_71860C.1
gccggccggttcgaaaccccccacgattgcgcacacactttctcttctccgcgtgcagcaaacttcgttccctatcccaatccgtccccgagcgacctgcgcgtgcatggcggcaaccctcctgtcccacgtcgtctccgacctctgcatcggcaggccgagggtgctcacgctgccaccctccacccccgtcgcggccgcactcgccgcgctgcgcaccggagccgacccattcgtcttcgtggacgacgaaccggctgcctgctgccacgcgaagaccacgacgtacgtgaaagtcaccgtcgccgacatcctctgctacgcctgcggcgacgcgggcaacctcagggacgtcgcggccgcgctcagccggcccgtggcagtagtggtcgcgggcgccgtcgctaggcggctattcctatactgtttggccaaacttttgcgcaggctgctcgacgccatcgacgtgctgctgaccgacggctgccaaggcctgctcgtccctctctctgcgcgcacccgcaagaggcaccaccagcaccagggccaggccccgtcctccgacgccggcgccttgttggccacgtcgtccgactgctgcgtgctgacgcgggaggacatcgtccgccacctcttcggctccatctcccacttctccccggtcgccgcgctcaccgtcgcgtccctcggcctcgtccgccgcgacgtcgtgcacgctgtccacgtcgacgacgacgggctcgacgtgatcccgcttttgcgcagggccgtctcggacggcacggccgtggccgtcgtcgccgacgacgacgcgttggtcggcgagatctgccccagcgtgctcgcctcgtgcgacgtcgaggcggtgtcggccgccttcgcggggctctccgctggcgacaccatggcgtacatagactgctcgctgtcgtcgcactctccgccagagttcttggtgcgcgccatcagagctcagctcgccggaaagggactggacgccatggccgagctcgtggaatgcgctggaaaggacaccgccgtccttcctttgtccccgtcctcgtcgttgtcgtcgacatcctctgacgaggactcaccgtcgggacgcgcacgacgcccaaggaggatgtcatctgggagcttcgggtggcggtccacggaggacgtggtggcttgccactctgagagttcgcttgtggcagtcatggcccaggcgcttgcgcaccgtgtagggtacgtctgggtcgctaatgagaccagcggcgcgctcgtcggggtagtgagattcgccgacgtgctcgcggtactccgggagcaactccggcctcagtcggtcagtcccaggtgctagctagtgctatgcagataaaccgtgatctgcgtgtcagctcgcgcaagaatcaagatctccgacgctaaaacagttgctagtggttctcttccgtgtcaatccgtctcagtcaagttcggactgaagatgtgcagagtttgtttgtttgtgtgtgtgtattttgaatgtgctaagtttttttt

SEQ ID NO: 153817 - DNA, 399 bp, Zea mays
  Clone ID: MRT4577_71861C.1
aaaggggaaatggtgggtggccaaaaattcactaacccattagagaggtgagttgccaaacaaaaacagggggttaaacaggggggaaccaaaatgtttgggggggccttttttccggcccccaaaaaaaacttggaccaagcccttgagggaaggggcatctccctttgggggaacagaaaaaaacagggtacaaagtggggggggttcaatttttgggttactttcgggcccaaggtgcctttttttggggggccccggggggttttttgttcattcccgtcaagggggagcttgccataggcccaaaaccccctaatttaattggggacctttacaacctttacagggggcttttcaccgggaggaaatggcatggcatcaccctggaccggggaa

SEQ ID NO: 153818 - DNA, 489 bp, Zea mays
  Clone ID: MRT4577_71862C.1
acattcctcaccctgacctcggcggctgggggaagagacccatgtgctgacgagaaggatactatgcccatggttggagggctcgggaagaagcatgttgttgtgtgtgaccacactgcagtaagtgatgaagactaaattggtggacttggagcgtatttgctcaacgcgctggcaaatgggtaggacgactacgaacggtcggtcaatacacgccacatagagaactgctgaggcagtggacatcattgtgcacgccgatgacctaattgtcaagatcaagactgggaaagcagacgccacatcaagttgcactaatctgcttacgaacttaggatgccatggccatgtacacctgcgagtcccatccgcagtgctggtcctatcccctggtccagctccaacactatgatcaaagctgccgtacacacgagggtgacctttgtatccgccgaggtgagtatatgctggagcagccgcttaccctga

SEQ ID NO: 153819 - DNA, 425 bp, Zea mays
  Clone ID: MRT4577_71863C.1
aattaaaaaacatatcagattgcagggaacgtggctagctcgctcgagacacaaacagggtacacacgaagcagttaatgtttgtgctatacaaaacgattgtttttacttttaactgtatagctaacatgaatcgaaaaacagtgtattctattgcccatatctctatggctacatagctctgagaccatctacacgataaacctaaggttaatcagcaagccataagttacacatgcctattctgaagaataataagaaacaggtttgtgcgtccgaccaataggatcacaaggccagccacatatgttggcgaaccacaacagcatggggaattgcaccatctccaagaagatcaggaagctttggtttcggccggggtgtctgtcgtagctccttggcccgcccagaacaaccctattgat

SEQ ID NO: 153820 - DNA, 315 bp, Zea mays
  unsure (1)..(315): unsure at all n locations
  Clone ID: MRT4577_71864C.1
ccgcgcacttatgcatgtatgtatttctgtgtgtgggggtcattaaaaaagagcttaancaatgaataaaagttacaggagttactttcaaaaaaaaaaaaaaaaaaaaaaaaaaaaaaaaaaaaaaaaaaaaaaaaaaaaaaaaaaaaaaaaaaaannnaaaacattttttaaaaaaaacggggggggggacctaaaaaatccaagctgtactaaaaaatccttccccctttaaagtttttaaattttcccacctaaaaaacaatgaaatactcaaaattttaaaccgtcaccaatttaaaaacccttgcccca

SEQ ID NO: 153821 - DNA, 379 bp, Zea mays
  Clone ID: MRT4577_71865C.1
atctctttcgctcgccttctctagctcctgcctcggttaatcttttgtcctccccacacccaggctctaagaaacgggggccaggaaaatgggggggggccaaacggtcctgcatctggccaagccttttcaaactttattgccagaggcgcaaaaaccgaaaaggaagacaccgttcgctgaattataaaaacacgctgctaaaaaactctgctgcttccagaccgggaccctaccacccactctatggtattggttcaaggtctcacagctgctactttctacccgaagaaaccaaacctcgcagccctccgcttctctaaggtggagaagggttggactacaattgtgacagccggcatggttccgcatcctgaac

SEQ ID NO: 153822 - DNA, 307 bp, Zea mays
  Clone ID: MRT4577_71866C.1
gtccatagaccatacataattggcatattgcaaggaattacatgatagatccgaacctatatggacttgtgtgagccatgggaccttctgttacacagaacacagccgatagatcataagcagtttttcacagaacccagtttataatggcattctaatccaccgtaataggccgggtgcatgatgcatgaacatgatggctagcgagcccgatccttgaactaatcaaggttgatttgacttgcatgaacagcctgcaggttcacctgaaagccattgagcccactcttgaatttttggtttgagc

SEQ ID NO: 153823 - DNA, 1178 bp, Zea mays
  Clone ID: MRT4577_71867C.1
cggtgccggattcccgggtgatgtttcagtttgatttttaatctctgttcacataaatcatggtttaaattatctaagttgaacaaggaatgcttgctgcctcttttactggaacagttttaccacttataatactcatttgccaatatatgtcatgtgcaaggttcttaaggagtcacctagccagccagcgaagcatctagggagatggcaatgcaaatgttgatcttgaaaaagacagaatcgagacccgtggtttgtcaaagcatgcaaagacttacaaggaggacgatgataagatgcgaactacagctgcaaatgttgctgcacgagttgcagcggggggagatgacatgctgtcaaagtggcaattactagctgaacggaataagcagagaagtgagggaggtgatggttcttctggctctgtaccaggtaacatgttgcaacacaggccatcactgaaatctgggaaagacttaagggaagaacatgaagttgaaaagagaggatactccacaatgcttggatctggtggtgttagaaggtcaccgctaacaaaagtggcgcggagtatttctatgaaggatgtggtagcggcactcgagcgagagcctcagatgtcaaaatcctcattacttttccgcctatatggaaggccattgacagaaccatctgcaaagtaatttggaggataatcattgcagttcatattacagaggggcaacttttggtcaatatatgaggaggcccaatccccaagcgatggggctgattggtcgacgatcaattttgcggggatttagcgattacttggaagccagcgtttccctggagccatttttgttttttcaagggaacagtctgcagatgttttttttttttcaatgtttttttctctatataatcatgtgttgatcccaatgcccagccagcttcagctggtatgaacatcgtgatcgtttttgtatagcagatggagtaggatgttccttgagatgcttatgacttgctaagtgtcctattcttttaaaaaaaaaaaaaaaaaaaaaaaaaaaaaaaaatgtatgtattggagcctccgatttattcatgaacaaaaaaaaggacgacctgctccgaccgctaccagagcatacgagcgcgcgcatgcgtgctcatagcttcataattgtgtc

SEQ ID NO: 153824 - DNA, 265 bp, Zea mays
  Clone ID: MRT4577_71868C.1
gaacgcgagggggaacaaggacgcacaacagcaaagcgccaaggacagcaaagacaccaccggcaccgaggacaaagaagggaaacgaacacagcaaccccgaggaagcgggaaagacccgggacaccaaaagaaccaaaagggagagaggcagaaaacaaggatgaattgggcaccaaggaagaggccacggcaccccggaaccacaggaaggcaaacgcaacccaaacgaaagagacggaagaagaaaacaccagaaccaccc

SEQ ID NO: 153825 - DNA, 607 bp, Zea mays
  Clone ID: MRT4577_71869C.1
ccccccctcgagttttttttctcccctcttctttttttttttctttttcttctttttttttttttttttttttttcctgggaaaattttggaaaattaaataggacggcccatagggcccttaaaagagtctccccccccatttacaaacggggaaaggggaaatttattctcggggaagctttttttttttataaccaaatcctttttacacggccggcccccaaaaaggcaaagggaaaaaaacctcccatggctccgggctaaaaactataaaaattaataccctggggaattcgggggcccctaacatggcgggggcggacccttggttttgggacccgggggagcccccgctttcaagaagctgggtgttggccaggggggggggctcgccgccgcggggtttattgttctccacgtcctgggggttaagaaagcagggttggtttgtaaagcacagacccttcgcccaaatgggggcggggatcaccactttgttttgtttttgggggaccctataaaagggaatgtaggcgtccctgcctttacccggagcaaccgtaaacccggggcccccccccaggggccctgggaggccgctgggg

SEQ ID NO: 153826 - DNA, 246 bp, Zea mays
  Clone ID: MRT4577_7186C.1
gagcaagaatcccaccctcagaatttggtccagcccccccggcccctttttgggttactttcctttctcagatacttttttggaattcaggtgaaaaggatttggggtttaatgccaaccagtttgcgaacaatgggggcgggggtcgacaacattctattacatatcgatccgggttcgcgatgtgcttttactggtcctccggcggcgccaagttcaagttgttgagcaagcagggccaaatgg

SEQ ID NO: 153827 - DNA, 254 bp, Zea mays
  Clone ID: MRT4577_71870C.1
ggaccttccgattagcaatgacctatagacaacccatgcaaccagacatatatacccgggcctgagaggcacaggtatgtgactgaagcgcatacatgagtgcgtcgcgcgggcggcccacgaacatcgaatgccgagacgggccggttcttgactaaaacctacctgggctagacagagcatagtctcattaagaagcagccgcggatggttgggtactcatacatggggccgaggcgctggtaaacatcaga

SEQ ID NO: 153828 - DNA, 1387 bp, Zea mays
  unsure (1)..(1387): unsure at all n locations
  Clone ID: MRT4577_71871C.1
cccagcgtccgccctgcgtccgcagctagcaaagcagcagtcgagcactccaccatccagcttcgcatcccgcaagttcccagtcagccgagcagccagcggcggtgccaagaaggccgagctgcgagctccactccccacacctcagaagaaaaaggtgatggcgcaactgccgccgcgggcgccgagcgccgcgccgcaggaccactggccgccggcggcgggggagttcctgggcttcgccgcggccaggcgcggcgcgcaccgccgctccgcgagcgactcggccgcgttcctcgaggccgtgcccattgacgacgacgtcgtcattggcggcggcggcggcggcggcgacgacttcgaccgcctcgaccacgaccagctcctgtccatgttctccgacgtcgacgtctccgtctccgtctccgtctccggcagcgccggggagagggcgcagctcatggacgcggggggtgcgggtgcggacgacggggtggcggactcgtcgccggctgccgcggacggcgtcgctgagcccaaaagggtcaagaggatattggcaaacaggcagtcggctcagaggtcacgagtgaggaagctgcagtacatctcggagcttgaacggagcgtcaccagtctccagatggaggtgtcggcgctgtcccctcgcgtggccttcctcgaccaccaccgctcactgctcaccgtcggcaacagccatctcaagcaaagaatcgcggcgctcgcccaggacaagatcttcaaagacgctcaccaagaggcgctggagaaggagatccagcggctgcgccaagtgtaccagcagcagcaggtcaaggtggccaccaccggcggcgccgacatcgccaccgccgcctcgccgtcgatgcaggccaggcaagagctgctcgcgtgcgagggcgctgctattcgatagcggaggcggcggcggcggcggcggcgttcacgcccctgttactgttagtagcttaattaacttttgtgcagtctgatcaatacgtgttggcttgtttgtttgctgcttcttaatttaattcgtatgtgatgtattctgctcaccctagcaaaaaaaaaaaaaaaaaatgcatcgatgccaagttgtgaatgaattgtactattcagttatttggaccggcttagtcggaatatagtgagacggagtttgttggtgtgagttatccgttcttaatttattgttgtttagattgattttatttaaaaaaaaaaaaaaaaaaaaaccaagaaaaaaaaaaaaaagaaaaaaaaaaaaaaaaaaaaaaaaaaaaaaaaaananntnnnnaaaaaaaaaaaaataaaaaaaaaaaaaaaaaaaaaaaaaaaataatgggggggggcctttttagg

SEQ ID NO: 153829 - DNA, 381 bp, Zea mays
  Clone ID: MRT4577_71872C.1
ttaaaagcccccccccccataatttccctttttttgccatttttttttttttttttttatttttctctcaattatttttttttttttttttttttttttttttttttttcgtccttcaaaccatctgatataatatggcatttctcgttgaagcaattcaggtgtacatcaaaaggcactgggttggttgaatctgtacatggtaacaaaacatgcactctccacacgagcatatgcagcaagcaagggcttcatgttttgcgtccccggactcctggtctttacagagaagaaatgaaatgtacacagaaaacttgttgtccgcaaaaccagttgcgtgcacttggcctaagggtaggaatgaacaaaaatcaaataaaa

SEQ ID NO: 153830 - DNA, 292 bp, Zea mays
  Clone ID: MRT4577_71873C.1
gccaaaacatcaaccatatcttctgtagttgcggtggggagacgactatgttgagatcctttttttacaaacacaagagtaatctggacgcatagctcagcataatagcactaccaagctaattcttaaacgataatgacttaatcatatgcctgttagacgaccatatgtgtaccagattaccttgccgcagtaccaacactttcgacaatcccaacagaaacagaccataattgttgctctcgcttaaacatgacgataacgatgacacatgtaactacaagtttaatat

SEQ ID NO: 153831 - DNA, 1853 bp, Zea mays
  unsure (1)..(1853): unsure at all n locations
  Clone ID: MRT4577_71874C.1
gtaccctncggagctgtccgggttattcagtgggagggcttgatgaggcacatgagagaaccatctacacagacattctcttcagcttgctaaagcagctaattaagcggagaaatgatctcaagttaatagtcacttcagccactcttgatgcggagaagttctctggttatttttttgattgcaatatcttcacgattcctggaagaacgtttccagttgagatactacatacaaaacaggcagagagtgactacatggatgctgcactgatcacggtattgcagatccatctgaccgagcccgaaggagatatcctattgttcctgactggccaggaagagattgatcatgcttgcgagcgtctccatgagaggatgaaggcattcggtggggacataccagagcttataatttgtcctgtgtacagtgctcttcctactgaagttcagtcaaagatattcgaaccggctcctccttgtaagaggaaggtggttgtggctaccaacacagcagaagcatctattaccatagatgggatttactatgttgttgaccctggcttcgcaaagggcacgagctataacccacaactagggttagattcactggttatcactccgatctctcaggcgtcagctaagcaaagagcagggcgtgctggacgcacaggtccaggtaaatgttaccgcctgtacactgagagtgcctttcgcaatgaaatgccaccaacaacgattccagaaatccagagggccaacttggggtggacggttctgaatatgaaggcaatgggaataaatgaccttttgtcatttgacttcatggaccctccagcatctcaagcactcatatcggctatggaacaactgtacagtcttggtgccttagatgaagagggtcttcttactaggcttgggagaaaaatggctgaatttccccaagaaccacctctttctaagatgctccttgctagtgtagaccttggatgcagtgatgaaatactgacaatcattgcaatgattcaaactgggaacatattctatcgaccaagggagaagcaagcacaagcagatcggaaaagatccaactttttccagccagaaggtgatcatctcaccctactcactgtgtatgaggcatggaaggcaaaggggttttcaggaccatggtgtgttgagaatttcattcaggtaaactcactaaggagggcacaggacgtgcggaaacagcttcttgagattatggacaagttcaagctcaatgtcatctctgccgggaacaattccaccaagatagggaaagccctcactgctggattcttcttccatgctgcaaggaaggaccccagtgacgggtaccggaccctagctgatcatcagcaagtttacatccacccgagcagtgccctctttcaccagcagccacagtgggtgatctaccatgaaattgtgatgacaacaaaagagtatatgagggatgtcacagcggtggacccaagatggctactagagttggcaccgaggtcgtacaagtcggtggacccaacgaagatcagtaagcggaagcgccaagaaaggattgaacctctctatgatagatacaatgaacccaactcgtggcgcctgagtaagcgccgctggtgatttttcatcatgtcttgcaggtctttgatgtaatgttactgtagtgtatatattaaggtgttctttcaatgcaaagactgggataatggcagcgcagtgatacatgtatagttttctcttaaatttggaagacttataaggaatatcttttcccttttaaactggatgccaactgatgatgaatttatcagcgatttgcttgattta

SEQ ID NO: 153832 - DNA, 442 bp, Zea mays
  Clone ID: MRT4577_71875C.1
gggggggtgtttttttgttaattggctcggcgcgggcatctacgtgttaggactacgggctctgacggtctcacagttacgccttattcggtgtgtgtgcatagcaggtccattgccgcgtttgctgttgagtatacacagcatggggggggggggggggggacatcatgcccatgttgctaagccagtgagcgcggaccaagagacgcgccgatcggtcactttgaggccggtggctcaggagggaagctcgcggccccgccgtggtctgctccaaacccttggccttcctggctgaagctgacgatcggaccgacatcccctggcccttgctggcagggcgggttcctggccggaacatgccaggcccgcctcatccgcggccggttgccccaacggggggtggttggagggcaccgcggcgggtggggctccggttggg

SEQ ID NO: 153833 - DNA, 1149 bp, Zea mays
  unsure (1)..(1149): unsure at all n locations
  Clone ID: MRT4577_71876C.1
cgagaagtttttgatggaactgtacaaaacatgcatttgcattggaagcatcgagagttggttaaaattgttgtcaggggaaagagctttgcacaagcgaaacatattgcaatctctctagaagctgagagtgaaggtgttctcatttcacttgacaagacaactaaaggatatgtaatcattttctaccggggtaaaaactacaggcgaccccaaatcatgaagcctaggaatctactaacaaggaggcaagcattggcacgctctatagagttgcaaaggcgggaggccttaaagcatcacatctcaagtctgcaaggcaagatctcgaagttgcagtcgcaacttgtacaaacaaaggttgcaagtgagaaacatgatctgaagctgcttcaaacagttgaggatgacttctcatcatcagatgatgatgtagaggatgatggggaagaagcttatttgcagacttacagcagcgctgatgaagaagatgccgaggatgatgctaatgaatatatttaggccatgtttggatcctcctagctaattgtttgctaatagctaattgtttgccaatagctaacaattagtcggcaaataattagctagcaacaattagctagtgtatgcttggagtcttggctaacagatttctttttctctttatatgatctattagcatttattagtaagatgccatgtttgattactaatgggtaagtgtttgctaatagctaattgtttgccaatagctaacaattagccggcaaataattagctagcaacaattagctggtgtatgcttggagtcttggctaacagatttcaagacctctttatacgatctattagcatttattagtaagatccaaacatgcatcataaactggtgcggntataattaatgaggcttaaggtgggcgtgttatgttctgaagcagtaaaagttcaaaggaatggnggaccaaggctgaggatcgggtggctagccaaacaaagaaagacttcaatttcttagggattctagtagcttgtgacctttagaagcatcatactgcttgtgnnnnnnccgagccatcctctagtgntnctaaactcttttagatattaaggccttgtggtacttaaattttccgagccatctctagt

SEQ ID NO: 153834 - DNA, 539 bp, Zea mays
  Clone ID: MRT4577_71877C.1
ttttgcctacacgatttggaattagctgcatgggaaggtgaaccattaagcaataagattagttatgcttgagttaatggctacattgctctaatttgttgcttctcatcttttcatctattgaaaatatgcagctgcttaatggccgtgattgaagaactaactcaatccctctgaaaagtagttgcgattttgtgtttgtgactctctgagttattccctgaatatgtgcaagtatagattctgaatctgtttgtagataggtgtaccttgatatggtatttagcaatgctactcattctacaagatttattttgcattgttcccagccatctatataccttttctttggatgactatgtaaagtcacaagtcaacttttatccatcattctagaatcataatagtttctattgcttagtttgatacacgtagaagatctagtaacaaatagtagattcctaaattccattactttgcattgtttcccgccatctataaaccttttctttggatgactatgcaaagtcacaagtcaa

SEQ ID NO: 153835 - DNA, 2050 bp, Zea mays
  unsure (1)..(2050): unsure at all n locations
  Clone ID: MRT4577_71878C.1
ccccaaaaccagacacgatccccacgacgaagcctatacaaaccaccccaaggaagccaaggtaacccacgaagccaccgaggaagcaggcaaggggggacccacaaccagcgcanccaagggacgcgntccaccaaatcttgaacggccaggcacggaagctcccgcacccaaagggcacgatancgcaacccggcgatcagggctacctcgaggccggccgggtttgggagattgagtaccccaggcgggcctgtcccgttccgttcccgtctcgctctcgtctcgcatcagccaacaacgcttcccggcaaaatccttccacaggcgggggagtcgcctcacttcaccccgttaatccccagcgaagaagcaaaatacttagcacaccagcgatggcggctacttaccaaactggccttgtggccgagccacagttgctgaacactgaaattatcactcggagggccaccaactgtgttgctgacactaacagaaaagacaaatgcgtcggctacttggatgtgtttgtacaccaggcacgcgacatccacaatgtttgtatctatcacaagcaggatgtgtatgcaaagctgtgcctcacgagcagccctgatgtttcgtgctcaaccaaggtgatcaacagtgctgggcgcaacccagtatttgaggaaagcctacgccttgatgtgcaaactgtggatgcttctctcaagtgcgagatatggatgttaagcagagtgaggaactacctggaggatcagctccttggctttgcccttgttcctctggtagacattgtaattggtaatggaaagctggtccaggagttctccttgacatctactgacctgttccacacaccagctggatttgtgcacttgtccttgtcatatgctggttgttccccagatgttgtcctcatctcatcacccaataattccccatcaacagtgtatgattctggaattgatcatgtggttccttctcagcttgagaagattgtgttcccagacctaaatgtggagaaggaagacgagattatggtctcaaagtatctcgagatgacttcagactctgaaacccctataaaagttgagaacggcgtgtcactgcattctgcaaatgatgatgatgttccttctaaacttgaaaagatcaagttcatagattctgagagccgtgcgaaagctgaaaatggcaagatgctactatttggtgtagctgtgcctagtactgcaatttgtgcagataaggttgaggaacaccacgatgaaagccctctaagttgtgtctcaaccacaggctcttccactaccctttctgcaacaacacaatcagtttctgagccttcggagaccagtgtcgaggcatcccctagacaatgccatagggagaaaagccaagatgttacaggtggtgaggctaattcttctgaaacaccaccaaaggatgaagttatcaagcctgtgatcagcgttaaccttcagccagagcagtcagttgtccaacaggacatagttgacatgtacatgaagagcatgcaacagttcacagaatctcttgcaaaaatgaaacttccattggacgttgagaatagtagtccctcaaacgaagattcatactccagtacagttgagaagacatccccatccccatcttcatctgcagcaaagggttctagggtcttttatggaagcagggccttcttttaagtttctaatgcaaagtagtacgctagctcagtagctcgttactatctcctacatacatatacatggttccaggtttatcatatatctgctggcatgtaatcacatactttctgtctccataatatgcttctaggactcactcctggtattgctattagtgttatgctttgctagaagataataatttcatctcatagttgtagattaatcccatgtactaatagatacccatgaaatataatgtcatgaaatcagttctgactcgaaaaaaaaaaaaaaaaaagcggcctccctgcactgtattgtgacctttcgattaatctaaattgtgacca

SEQ ID NO: 153836 - DNA, 207 bp, Zea mays
  Clone ID: MRT4577_71879C.1
aacaaaaataaccgatatgcagtagcgccgccgacatttaaaaaagcaaaatatggggggtcgcccttcacgaacctaccttgccctcgcttgcttacgagacgatatgtcttcttttgtggaaaccacgtaaaatcttttgcccgccgcccttcaacaccagaccggggaaaacaccgggagctgcaacctaattattgttgccca

SEQ ID NO: 153837 - DNA, 346 bp, Zea mays
  Clone ID: MRT4577_7187C.1
gaggtagaactctgctgcaggtgcctgcgactgcaactaacaaggacgacgacatcgccgattcggccccaaccacgccaggccatagccccagcggtggccatggcagcgctccgccgatgaacaaatgacgaagcgtacgtaccattgcatgaggcatgttgctagcttcccgctcaatcgctgtgcatctgccatcctcctgtcctgtgtgtacacctgtggttttcgagattgttccttacgtgtgctatgctttgctttgtggttctaatgcggtatgtatatgtagggcgcctacctataagcgttgttctgtaccgcatacatgcacgttgtaaaactc

SEQ ID NO: 153838 - DNA, 1952 bp, Zea mays
  Clone ID: MRT4577_71880C.1
tggacctcagcggcggctgtcccgttccgttcccgtctcgctctcgtctcgcatcagccaacaacgcttcccggaaaatccttccacaggcgggggagtcgcctcacttcaccccgttaatccccagcgaagaaggtaactaccgccatctcccggtaatgatcctcggtatcttccggccagaaaagatttgttttcggtacggatagggtttctgatcagcgcgagcccaggagctaagaatcccagttctttgttcgccgactcgagtctgacattatgcaaaatacttagcacaccagcgatggcggctacttaccaaactggccttgtggccgagccacagttgctgaacactgaaattatcactcggagggccaccaactgtgttgctgacactaacagaaaagacaaatgcgtcggctacttggatgtgtttgtacaccaggcacgcgacatccacaatgtttgtatctatcacaagcaggatgtgtatgcaaagctgtgcctcacgagcagccctgatgtttcgtgctcaaccaaggtgatcaacagtgctgggcgcaacccagtatttgaggaaagcctacgccttgatgtgcaaactgtggatgcttctctcaagtgcgagatatggatgttaagcagagtgaggaactacctggaggatcagctccttggctttgcccttgttcctctggtagacattttaattggtaatggaaagctggtccaggagttctccttgacatctactgacctgttccacacaccagctggatttgtgcacttgtccttgtcatatgctggttgttccccagatgttgtcctcatctcatcacccaataattccccatcaacagtgtatgattctggaaatgatcatgtggttcctgctcagcttgagaagattgtgttcccagacctaagtgtggagaaggaagacgagattatggtctcaaagtatctcgagatgacttcagactctgaaacccctataaaagttgagaacggcatgtcgctgcattctgcaaatgatgatgatgttccttctaaacttgaaaagatcaagttcatagattctgagagccgtgcgaaagctgaaaatggcaagatgctactatttggtgtagctgtgcctagtactgcaatttgtgcagataaggttgaggaataccacgatgaaagccctctaagttgtgtctcagccacaggctcctccactaccctttctgcaacaacacaatcagtttctgagccttcggagaccagtgtcgaggcatcccctagacaatgccatagggagaaaagccaagatgttacaggtggtgaggctaattcttctgaaacaccaccaaaggatgaagttatcaagcctgtgatcagcgttaaccttcagccagagcagtcagttgtccaacaggacatagttgacatgtacatgaagagcatgcaacagttcacagaatctcttgcaaaaatgaaacttccattggacgttgagaatagtagtccctcaaacgaagattcatactccagtacagttgagaagacatccccatccccatcttcatctgcagcaaagggttctagggtcttttatggaagcagggccttcttttaagtttctaatgcaaagtagtacgctagctcagtagctcgttactatctcctacatacatatacatggttccaggtttatcagatatctgctggcatgtaatcacatactttctgtctccataatatgcttctaggactcactcctggtattgctattagtgttatgctttgttagaagataataatttcatctcatagttatagattaatcccatgtactaatacatacccatgaaatataatgtcatgaaatcaaaaaaaaaaaaaaagggcggccgccgactagtgagctcgtcgacccgggaattaattccggaccggtacctgca

SEQ ID NO: 153839 - DNA, 318 bp, Zea mays
  Clone ID: MRT4577_71881C.1
ctcagtcgttacactacccgttgtctttcgagatacggttatttaaaatgatgcaggagaacctattggatcttacagctatgtagactaaggactgatatggtctcgaccagtggacactaacattaccatctgctgcatgaacgattgacttatgtatcaagaggatgatataatatatagtatacaatgaacgtcgatgcaatacagtcaaaatggactagataattaccgcacacatagcataattatatatacgattgaccgtcgaggaattgataaggatcaaccagaagttgaaaaatatcacttaatgaa

SEQ ID NO: 153840 - DNA, 427 bp, Zea mays
  unsure (1)..(427): unsure at all n locations
  Clone ID: MRT4577_71882C.1
acccacgcgtctctgacgcctgggctgatctggaaggaggggggggggggggctggtggatgcaattcggcaaggattacgtgctcggctactggccgtcctttctcttctcgtacctggcggacagcgcttcgatgatcgagtggggtggggaggtggtgaactcgcagccagacggngtgcacacggggggggggatgggcagcgggcacttcccggaggaagggttcagcaaggcgagctacttcaagaacatgcaggtggtggacagnaccaacaacctgaaggcccccaaggggctgggcaccttcactgagcagtcaaactgttacgacgtgcagaacggcaacaacggggactggggcacctacttgtactacggggggcctgggaggagctgcaactgcgcaggactttcaaggtgtga

SEQ ID NO: 153841 - DNA, 304 bp, Zea mays
  unsure (1)..(304): unsure at all n locations
  Clone ID: MRT4577_71883C.1
ggggaccacnacccgggggcgcggcggggacaaganagaacnccgngacaagggagcacnggaaanggngnnngcnacaacaagaaaagaagcngacaaacacnncgccggaaagaaagcngngggngaaagcgnacagaagccannacnnnnaaangacaacaacgncannggcggggggggggggacnagaagnnangnncngnncacggnggcaagaagnnggagnncacaacaacagcngcagngaaaggaccacccaaaaacgcacccngcacagaaaaacgccccccgacgccaaaca

SEQ ID NO: 153842 - DNA, 312 bp, Zea mays
  Clone ID: MRT4577_71884C.1
ggggagtactatgcatgatgttctggctccattaatctatgccgttattcagagttttgagaatctctggactggattcagatcaactgacagacagacaacactactgttgataggacattattggcaattatcagatcagatgactggattgaacctgtgctatgttttaactactgcttttgtaagggaacatagaatgtgggatgctttcgtctgtgcaaaagatccaccgtcaaaaaggtatgtttgcatgcgataggtgttggatgctgtatgaataacgagcgttcagatttaggaatctttccg

SEQ ID NO: 153843 - DNA, 532 bp, Zea mays
  unsure (1)..(532): unsure at all n locations
  Clone ID: MRT4577_71885C.1
acacctcgtcttccgtctcccgcttctcttcctcctctcgcccgccccgcgtggaaccgagcgacccacagacacccaaggccaaggggaaggccaaggggaagtaccgggcgctgttcaacttcggggactcgctggccgacgccggcaacctcatcgccaacggcgtgccggacatcctcgccaccgccaggctgccctacggccagacctacttcggcaagcccaccggccgctgctccgacggccgcctcgtcatcgaccacctggcgcaggaattcgggctgcccctgctgccgccgtccaaggccaatcgctccgacttgagtcacggcgccaacttcgccatcaccggcgccaccgcgctcgacacgccctacttcgaggccaggngcctcggcgccgtcgtctggaactccggcgccctcatgacccaaatccagtggttccgtgacctcaagcctttcttctgcaacggcaccaaggaggaatgcaaggagttctatgccaactcgctgttcgtcgtcggcga

SEQ ID NO: 153844 - DNA, 138 bp, Zea mays
  Clone ID: MRT4577_71886C.1
gcgctttacaaactccagcgcatactgggggccgagcccgacagatcgtcaattccctatttttctcaccgatcgacctttacgccggtctcgatctcttcctaatgctgttcgcactggtgtgtgagaggattagga

SEQ ID NO: 153845 - DNA, 193 bp, Zea mays
  Clone ID: MRT4577_71887C.1
gggaggtgtccacagcagaaacgcgtaagagccggcagactgacaagcggaagaaccggaatcgtggcgtcgtgaggatcctcgagatgtggtcgtggggtcgccatgagcgtcgctgtggtgctggtgtagacggcggcggaccagcgggttggggttgccgaagccagcgcggttggcatgcgtgcattgt

SEQ ID NO: 153846 - DNA, 150 bp, Zea mays
  Clone ID: MRT4577_71888C.1
agagcttgacggcgttgccgcgacgaggcttgatccttagagcggcctttttttttttttttttggcaagcatctgatacaggagcgccaaacatactcagtattctcatacattcagtctgagcatgccactcagaactcgcggcttac

SEQ ID NO: 153847 - DNA, 272 bp, Zea mays
  Clone ID: MRT4577_71889C.1
acccacgcgaccagccaagacgagcagcaacagactcagcgaggcaaggccggagacacagcaccgagacagggcaaccatgccaggggggccacggacagcaagaacccaagccagccacgccacggagaacacgccgaaggcgaacgaccagagaacagaaggcgacaacgggacaacaagcaagcacagggagcaaggcgagagcagaaacgagcgcaagcccaagagccaaccaacaacagggcccaaaacaccaggccaaacaaaaa

SEQ ID NO: 153848 - DNA, 114 bp, Zea mays
  Clone ID: MRT4577_7188C.1
caagacgccagtagaattatctcggcatcatctgcaacgcctgtgcggggtacaatgagagagcgagtgataggccagataaggagccgccggctttcggtggcagcttcattt

SEQ ID NO: 153849 - DNA, 353 bp, Zea mays
  Clone ID: MRT4577_71890C.1
cccacgcgtcgcggacgcgtggtgatcgcatccccattcgatgtgcctcctcctgtccgtcgtcgtctcgattggcgcgccgctcgcctgtaacaaagcccaccgagcgagcgagcggccaccctcccgcgcgtaccgccccgtccgccccactcgactcttctgaccgcggtgggtgccggcttacctcgctagaatcctcctgcgtgcgcgcctcttttttgttcttttggttgtagacgttcatttttctaacgttttttaaagtctattttttcacaactggatcctcattaacatacataggatttttttacttttcttattaattttataacttttttttgtatttt

SEQ ID NO: 153850 - DNA, 315 bp, Zea mays
  Clone ID: MRT4577_71891C.1
ggattagggagcaaaaaaggatggcctcttcaaaagccaaaaaaaagggccgggctgacaaaacacaaggaaggcggtaaggttgaatgcaaccaccaaccggaaaaaaaagtcaaggcccttccgaaaagaaatggcgcccgcccgtggtggtccgagataccataaaaaccgggggggcctactgcccctccccttgaggggggggggtgaccgggcggaaccaaaggaatacgggggggctcgaacaatcaaccaccgaaaagaagagcttccctactacccacccgggggggaaagattccaggacaggga

SEQ ID NO: 153851 - DNA, 625 bp, Zea mays
  Clone ID: MRT4577_71892C.1
attgggacctcgagccggccggtatctagatcgcaagatatgcgtcgtcgtactcacctacctccgcggctcaaacctttcccccttctcccaattccctccgtcgggcgccgctccatcccatacgacgacaccatgagggagcgcatttcgatccacagcggccatgccggaatccaggacggaaacgcctgctgcgagctgtactgccttgagcatggcattcaggctgacggtcagatgcccagcgacaagaccattgccggaggagatgatgctttcaacaccgtcttcagtgagactggtgctgagaagcacgtgccccgtgctgataatgatgaccttgaacccactgtcatccaagacgagaggactgccacctaccaccagctcttccaccctgatgagctcatcagtgataaggaggatgccgccaacaactttgcccgtggccactacaccattggcaatgagattgttgacctatgccttgatcgcatcaggaatgttgtacgacaactgcactggtgtccagggcttcctcgtcttcaacgctgctgtgggaggaacatcctctgggcttggctccctcctcctagagcgcctgtcgtgtgactactgaaag

SEQ ID NO: 153852 - DNA, 322 bp, Zea mays
  Clone ID: MRT4577_71893C.1
agtgcctgtttgatgcaggcggacacgggggggtcaagggttttttttttgtgtaactctgagttctctgctgttaatgtattagtatgtaggaactttcaagtgtccttttgttgctggcatgggactatagctttcttagaacccactcagaaaacatgtacatgctcataagaggggggggggtccaaatatgattgtagctatgtaaaataggattctattgtatcgaaagatactttggcacatcatccgtttgagatggtctcctggtgccaaataaaaaaatttatttaaatataaaaaactaattttgggcggc

SEQ ID NO: 153853 - DNA, 608 bp, Zea mays
  Clone ID: MRT4577_71894C.1
tataattcggcacgagggcagacagcggcgcatgatagaacaaagcaaacatctgcaaactgtaatggcggctccagtaggtgccaatgccataggagcgggcgacgagctgctcctgctgggcacatggtcgagcccatgggtgatccgagcgaggatggcgatggggctcaagggccggagcgtgacgagtacctctttgtggacctcggcaacaagagcggcctcctgctccggtccaacccggtgcacaagaaggtgcccgtcctcatccacggcggccgcccagtgtgcgagtcgctcgtgatcctgcagtacctcgacgaggcatggccgacggccggtcctccgctcctcccggccgacccctacgaccgcgccacggcacggttctgggcggcctacatcaacgacacgtttttcccggcgttcagggcgctgttcagatcgctgacggacgagcagagaggggaggcgctgcggaacgccctgcctgcggtggagacgttggagcgagcgctcgcggagtgctccggggggaaggccttcttcggcggcgacgccgtcgggatcgtggacgtcgcgctcgggagccacctggtctggat

SEQ ID NO: 153854 - DNA, 184 bp, Zea mays
  unsure (1)..(184): unsure at all n locations
  Clone ID: MRT4577_71895C.1
cggcgtaccagcattccctatactcaactctggggggggggggggggatcttntcaccctcctcctcactatcctntacccatccagattttcnacccactcatagcccctgcttacttttaccttnctctcnctcaaaccttatttcttagtgctggcgtcatcgtatcgggttctgtcttgt

SEQ ID NO: 153855 - DNA, 456 bp, Zea mays
  Clone ID: MRT4577_71896C.1
aatgccttaatttatggagcttgttagttggtccgttttccaaatggacaaaaaaaggcaacaagcttccacaaaaacggggggggggggggggacccccacacaaacaagtctaaaaaagggaaaaaaagaaaaaaaaaaaaacccaaagaaaacagaaaaacaggggaaaaccaaaaggaacacggggatacacaacaaaaaaacaccaggggcccccccgggaggccattaacaaaggcacaggggccaagggaacacccgcccggaacagcgggcaggacgcgggccggaggagccaacgggcgaggcaccgcacggggaaaaggggggggagcagaggcagggcccccacaaaaggccgggccccgaaaaccggaaaacaaacggggcaacaactggtaacaaagaccagaaaacaagggctaccagccggacacgggggcccacccggga

SEQ ID NO: 153856 - DNA, 1182 bp, Zea mays
  Clone ID: MRT4577_71897C.1
ccggccgggacccgggcctgcgtttccgtttactccggctcacgctcccccgcctgctctctcattctcgacgatggctgggcgaccgccgccgtcctacgccaggtatcccgcgcttcaaggcggcaggcccttcgccggcgaagagcacccatcagattcccgagttgtttatcccagttatcttgcacccgagggctccgtagcatcttattatgcttcaagacctgttctacctgttggatcagatgttcttagaaacgatgtaatttctcaaccaagaacgcatggttatgatggtccagcaagagtgaccaatcctgctttggctggcctgactggactacctgctggagttacggcacgggggcctagtgctctggaagacccgtctttggctggtctgagtggattagctccagtccgggcaacaggcggagctacggcacgagggtctggtgctttggaagacccgtctttggctggtctgagtggactagctccagccagggcactgggacctagagctttgaaagaagaactggatgtagttgggagaagttcttcagtaggcagaggtgctagcattccagatgttgagcaccacagctcaattccaaactttgatggaccctcagaaaatgaatccaacattctttttgttgattgtcttcctactgattgcacaaggagagaagtagctcatttgtttcgttgttttcctggcttcaaggacatcagagtagtgcacaaggaacccagacgtagtggtgacaaggcctatgtcctgtgctttgtggagtttgagaacgcgaaattcgcacgcactcccatgcaagctttacaagggtaccgcttcgatgaccggaagcctgacgaccggtgtctcgagatccatttcgcaaggttcccgttcgctctgcctggcgccggcgccggcgccgcccgggaccacaggaagcggtagctggtagcagcgtggcctgcgcagtgggcactgcagtagatggcctgcgatcaacatgtatcgtatctgtatgcgactgttttgttgggcagttagatgaagtcgcctactatcagtagtagtctcctgtgacaccaacacgtggaatgataagactgcctccttttttttcaaaaaaaaaaaattctttttaaaaaaaaaaaaaaaaaaaaaaa

SEQ ID NO: 153857 - DNA, 363 bp, Zea mays
  Clone ID: MRT4577_71898C.1
aagcagtggtaacaacgcagagtacttttttttttttttttttttttttttttcttttttttttttttttttttttttttttttttttttttttggaacacaaaaggggggaatttcggggcttttgccgcaccatacaaaatcaagagggaaaaggggaaaacgatgggggcccggctccagaagccccagagaattaaggggggagagggggacccccagggaaaaagggaacgggttaaacaacaggtcccgacccacccccttcaagggaaaggatgcctgaagctaacacacttttagcagggccacccacttccctcctgtgggggggcccgcggaccctgcgggggtaccaccggt

SEQ ID NO: 153858 - DNA, 421 bp, Zea mays
  Clone ID: MRT4577_71899C.1
attcggctcgagctcgtgtcaaccccctttttaataccagtatatccatgtataaaccgggcgggatgaccggtcgctgccttgacgaatgaaggcattcatgattcagccctgcctactttttgtgttgtcatacaatggacgaccaagatgacggaccacacagatgctatggagcactagctatttgacggcatgagcggaggatcataatactgataactcggtggacacttcactggtcttgcatgaattgccacttcctcagtgctgctgagatgtgctcccatcgcatcaggtttttctgagggttggtaggataacagaaacgttgtagttgcctgctcatcgagacggatggactaaggctctttgcaagattcagtgagtattctaatgcgttcagtttgttctgcgttta

SEQ ID NO: 153859 - DNA, 713 bp, Zea mays
  Clone ID: MRT4577_7189C.1
ccctcgaggccggccccggatcgacttctcctcaccagcaactaaacaaccaacctcttactattattccatataaccttgccagcctcgactccttcatctatccatccttctacatcaaccatcaatatgcaattcctcagcctcgtccttatggctacctcaaccctggccatccccgccaagctaccctccaaggccccagcaccaacatgtatggaaaagggcacaaaggtttctgaatggaaactcacagacttcgtctacaacgtccagaagagcacaaacaccgccacagtcgagtttgtcctccacaacgccgctctcgactacacggccaactgctacggcaagtcagtctccaagaaggccctctttgacggcaagaccgactacacctgcaaggtccccaacggagccgactctgccaccttcaagtacaaccacaagaagggcgtcaactccatcttccagcactgggcctgcgtccaggagggtggttggttcgaggccattggcaacaggacttctaccgagaccaagtctaactgccactctacgaccaagtccgagacttgcacaaaggcctccttcacggtccccgttctcgagatgcgcgcagtcttgtaagaggcggaaccgcgacatcatcttcttttcttttgcggcagcctttttcgacaaacatttttaaatatatctaagcgcaagct

SEQ ID NO: 153860 - DNA, 151 bp, Zea mays
  Clone ID: MRT4577_718C.1
cctatatgctccaacaagcattcttatcaagcaacatacctctatcaccctagccattttaacaatctccagccctatctatccttcactcatcattacaaaccatcatctcacatcacctccatcaactctttccacctatcatcaacca

SEQ ID NO: 153861 - DNA, 418 bp, Zea mays
  Clone ID: MRT4577_71900C.1
tattcaaccatcgccatgctgttttaagaaatcatgtagagagggctttgggtgtcataaagaagagatttccaatcctcaaagttgctacccttcacaaaatggaaaatcaagcaaaaatacctattgctgctgcagtcctccataacttaattcggtcacataatggtgatgagagatggctagaaaatgatcaaggaaatatcaacccgcaaagttttgtcagcctacccaatagtgaccatggaaatgatgaagggaatatggaagggaataacttaagagatatgatagcttatcatatgtgggcagattatgagcaacgtagaaatcagtgaatcatttctgtaatggatattgtgtaatccaataaatgtcatttctgtaatggatattttgtaatggatattttgtgaac

SEQ ID NO: 153862 - DNA, 388 bp, Zea mays
  Clone ID: MRT4577_71901C.1
acggacaccagtggtgactatctccctgatcgcgtggagtcctccgcattacctgtccgctcccagctggccgaagccaacacagcagcttttgttctggctgtatatattgcaatgatgactgtcatcatgcctagtgctgcacactaaacagacttgttcccaacgatattgtatgacgctgagcgctcgagacgacagataaggcaaattctgcaaagcttgcttacgctgttgacctgtaaggcatgaccataaagcaccccctcatctttatagacgaggccccggacctggacatttgtcgagcgcacaacgtttctattgggctttgctttcttggttgcgcatctgattgccacactgacagctgcgtactctcgagcgg

SEQ ID NO: 153863 - DNA, 1105 bp, Zea mays
  Clone ID: MRT4577_71902C.1
gggtacccccggccgggcggccgagtacctgagctgatcacgagtctctcagcgagtgctggagagcccactatgtccgccgccggcggcgacctgccggagactgtggaggtgacgctgcgcgccgtcggcccgtcccgtccaaccaccctccgcctccctccgcttctctcggtcgccgagctgcgcggctgcatcgcgcgcgaacgccgtctagcaggcacggaagaagttcgactccgcttgatcctgcgggggaagacgctcccgcaccaagacgacagccatgtcactctccgcgatggggatactcttatagtcgccgtggcacctaagcctcctgttaatcatcttcttgatgatgacgttgaggacgaagaagaggatgaactgaagttcagaataccacaaacgacaaccttgtggaagaggaaattttttatgtttcttcgagacaaattgagattgcctgatatcattttgatggcgctgttttctctcagtatgaaagcatggattatcattgcaatgtggttcctattggcaccgattgctcagaagtacgacattggacctttatatataattggtactggtttcttgatcatacttattaatctcggaagacgacagcaaggtgatgttagtgcatactccatattcaacgaagattttagggagctgccaggaacacttaatgcagatcgcattgatgcagacatccgggcaggtcaattttaagcccttactgggcattgcagagatagggaccatggtatgctgagatttgtacagaagcgtactgggcattgcatttgtttgtgcatggaaagcagtgtggagataaaggctgtgcccctctaaggttaaggtcaaataaatttctgacctgtaagtgaaaatgttgcctggttacaattggaaattaccgtgatactttgcagatctgtacttgtgaaaccaaaagagcagagtagcttaagactggcaacaaagtgattttattcctctcttgcaagttcttgtgtccgctatgagccacaaagtcctatatagcaacttgcatttatgagtttcatccaaaaaaaaaaaaaaaaaagcggcc

SEQ ID NO: 153864 - DNA, 410 bp, Zea mays
  Clone ID: MRT4577_71903C.1
aaaatcactttgttgccagtcttaagctactctgctcttttggtttcacaagtacagatctgcaaagtatcacggtaatttccaattgtaaccaggcaacattttcacttacaggtcagaaatttatttgaccttaaccttagaggggcacagcctttatctccacactgctttccatgcacaaacaaatgcaatgcccagtacgcttctgtacaaatctcagcataccatggtccctatctctgcaatgcccagtaagggcttaaaattgacctgcccggatgtctgcatcaatgcgatctgcattaagtgttcctggcagctccctaaaatcttcgttgaatatggagtatgcactgcgtggagggtagaacaagcagaaagttcaaactttgaagtcataaactgtt

SEQ ID NO: 153865 - DNA, 732 bp, Zea mays
  Clone ID: MRT4577_71904C.1
gggtacctcgaggccggccgggccggggttccagacctgagctgatcacgagtctctctgcgagtgctggagagcccactatgtccgccgccggcggcgacctgccggagactgtggaggtgacgctgcgcgccgtcggcccgtcccgtccaaccaccctccgcctccctccgcttctctcggtcgccgagctgcgcggctgcatcgcgcgcgaacgccgtctagcaggcacggaagaagttcgactccgcttgatcctgcgggggaagacgctcccgcaccaagacgacagccatgtcactctccgcgatgggggtgggtgccctaaatctgaaccccttatgtcttcattggcgatgtgcgagatatgttcctaacatcgcatactgatttattttcagtagttttgtcttttcgtctataaaatccgtgctgtctgttcaattgagtttgtcatgatccatttacacgcagttctgttcatatgagagtttatatatagaaatatatattttcgtgatttctacagatactcttatagtcgccgtggcacctaagcctcctgttaatcatcttcttgatgatgacgttgaggacgaagaagaggatgaactggtacaattttcttgcagtacttgcaaaagctttgtaatgttagatatctttgtgctcttcataaaagcccacctctctttccatttctttagaagccccgaacaccacaaacgacac

SEQ ID NO: 153866 - DNA, 311 bp, Zea mays
  unsure (1)..(311): unsure at all n locations
  Clone ID: MRT4577_71905C.1
acgcgtccgaaacgatcnacacacaacacnaatactttttattttaacacaaanaccaaccgtggagcagtgattattctgtcacaagggcatcacagcactgctccactgtccatgtcgaccagtacggcaacccattcggcggcgtaaagcacggcacctgcggcatgatgcacggtacgggaaccgtctgcattggccagctgtgtgagcactgcagcgctcgcatgggtggcaggcagttacagcctacgaggtaggagcacaagaccgaaggcattctgcatcgattctgcagcttcaacttcagc

SEQ ID NO: 153867 - DNA, 290 bp, Zea mays
  Clone ID: MRT4577_71906C.1
tcgcatgcacgcctaggtaaagctcggaattcggctcgagcaaaaactgctttctatatttttcccttcccccacatgattataaatttgatacgtctgaaattattcgttgggggaatccactaagaatcataccgtctccagatactggcgaagcaataagagggcgtcccccatcaaggaaaaccagatccttattaccacccaagggaggatgcaccaccacatatcctaccccaccggcttgcttcaagctctaaccaggatagattcaaagccatggggagggc

SEQ ID NO: 153868 - DNA, 250 bp, Zea mays
  Clone ID: MRT4577_71907C.1
gctacagatcgtagatactgctcagttttggtctagagtttagacctcagatcagatgcatagatcattatattcgttgtagctgtataggagaacaagaagttgtttgatgtgtgcgatttgtagtttgtctaaatacgttttggtcgatgtggtgtgtattggtgtttgaatatatgtggctgtgatgattcatttatgtgttacgaggatggttcgtggatggtattaatcgtttgttaaaatactt

SEQ ID NO: 153869 - DNA, 1173 bp, Zea mays
  Clone ID: MRT4577_71908C.1
atgctccttattgtggcgttgtacttagcggaacttgttcactttgacagccgtgtctgtgcgaaccctcatggactgatcaggaagtacgggctgatgtgctgcaggcagtgcttccgcagcaatgccaaggacattggcttcatcaaggtatgcaatataagcttcaaactcctgtgtgaatgatgcttagcatcattaatgctttatgattttgtattggatatttagtctgaaaagttgctatcaaaaaacacgacaagaaaaaagtgaaagaccgataaatccattagttaatatttgtgaaatagctccatttagacactattctgcttttagttagcctccatcgtaaacatggaaaaggctccaagattctatgatgtaaagtgtctgatacttatctgttgttttatcatctttaattctttaatgaattagttactgccagcttttaggcgacatcttgcagtttagggcattcctatgtatttagactgtttctttggcactttgttccctttcttgcaagtgcagctgtggtattttgttgaaacatgccctacactttgctggtagtctttttttattcaaagaatgaattgtggttacatgtttttcatgttgacatgaaaacattaatgtatggctatggcacataaagtgcctacaattattttgctgcccatggcaatatttttgaaatttctccaatttggttgacttactattgctctttaaccaatgcaatgcctatatttttgttgcagtaccgctgaaatcaggtgggaatggaccattgtggtagaggcgaggctgtagttttatttccagtaatttagatgttttgttcagaagtctgctagtaaagactgctacgtttatgatggagaacttagccatgttggtcatgttgctcatattgatcatgagttacctatgttgagcttaaactatcttgtgtccaaccatcgctgggtagtatgactactgtaatgtaggatggttaaggtcgcaaactaatacttatattgcatgtgtggaagatctattccaattgtactcctagcgcactatttgtgaaatgttgctggccctgtacggcattgacattaggtatcacaccaaaggattaatctgttccattgaacaattctgcaaaaaaaataaaaa

SEQ ID NO: 153870 - DNA, 423 bp, Zea mays
  unsure (1)..(423): unsure at all n locations
  Clone ID: MRT4577_71909C.1
gggccggccggggccatagactttnccattcctcccnncnccgcctcgccgcgntctccgtngcctccgtcgcgtcgngcctcgntcttgtcggccttctgcggnnnngtcngggtgnngctctcnngnntgctgccttcnttggcncccctggcnngggtntccttgctactgntgnngtccctggccccnttggcnggcgcctttccngcnntcttgtcgngnccgtagnggggnnccgncgtgccctccgtgngctccttttctgctgccctggtgctctccngtccttcngcggtgtgttcctttaaaaagngnccataaaaaaaaagtccnnggntggcnngccttttgttgntgtccttttggtgggnggcgtncttcaatacntnnnggttgncnngggcncctttgnggttgttg

SEQ ID NO: 153871 - DNA, 2495 bp, Zea mays
  Clone ID: MRT4577_7190C.1
cgggaaaaaaaaaaaaaaaaaaaaaagtgtggcgccaggcggtgcgctgtgcgcgcgtgtggagacaggggttaaaaggcatccagttggtgagatcagggttatcaaaaaaaaaaaaacataacaaacctgtattcatctgaactcttccaactcaagagcaaaagctgctcatcaccgacgatggtgccacggctaacacaagcaagcaagcaagtcactgagtagctagcagtatataccaccataaaaacaacacacacacacacgtgcgctaataagctaagcttaaggcggtagccgtagctcctctcgatctccggctcggacggacgacgttgccatggctgctcaactgcatcacgcactatacgagctgctgcacgaagcagcagcagcgcaacgagctctgctgctcgcgatccccttctccctgctgctcctgccgctcctgctccgctacctcgcagcgtcggcgtcggcgtcggcgtcggcgacaaagaacgacggagcggcggcggtggcggccagcgaccccgacaagctcttgagcctgctgccgtcgccgcccatgaagctccccatcatcgggcacctgcacctgatgggggacatcccctacgtgtccctcgccgcgctcgccaccaggtacggcccggacctgatgctgctccgcctcggcgccgtgccgaccgtggtggtctcgtcgccgcgcgtcgccgaggccgtgctccgcacctacgaccacgtcttctcctcccgcccgcgctccctggtgtccgacatcatcatgtacggcgccaccgactcgtgcttcgcgccctacggcgaccacttccgcaaggcgcggaagctggtcaccgtgcacctgctcaacgccagcaaggtgcggtcgcagcggcccgcgcgggaggaggaggtgcgcggcgcgctcgacagggtgcgccgcgccgccgccgcgcgggaggccctggacatgagcgagctcctgcactccttcgtcaacaacctcgtctgccgcgccgtctcgggcaagttctccatggaggaaggccgcaacaggctgttccgggagctcaccgacatcaacgcgggcctcctcggagggttccacatccaggactacttccctagcctgggccggatcgagctcgtcaggaaggtggcgtgcgccaagaccaggcgcgtcaggaagcgctgggacgacctcctcgacaagctcatcgacgaccatgcggccaggatggcaacccatcaggacgaggacgacgataaggacttcatatacgtattgctgtctcttcagaaggagtatggcctcaccagagaccatatcaaggctatcttgatagacatgttcgaggccggaaccgacacctcgtacatgacgttggagttcgccatgacggagctcatacggaagccacacctgatgaagaagctgcaggaagaagtgcggcggaacgtgccggcggggcaggagatggtcaccgaggacaacctccccggcatgacctacctcaaggccgtcatcaaggagacgctccgcctgcacccgccggtcccgctcctcctcccgcactactccctggacgcctgcgaggtcgccggctacaccatcccggccaacacccgcgtcgtcgtcaacgcctgggcgctcggccgccacagcggctactgggagcgcgagaacgagttcgtcccggagaggttcctcagcggggacgtggccggcggcgtcgacctcaagcccaacgagttccagttcctggcgttcgggtccggccggaggatgtgccccggggtccactcggcgtccgcgaccatcgagacgatgctgtccaacctcatgtaccggttcgactggcagctgccggcggggatgaaggcggaggacgtggacatgaccgaggtgtttgggatcacggtctcgaggaaggagaagctgctcctagtcccacaggctgcgtgaggatgatgatgatactagtgcaatgcgatacagggttttaaattagtaacaccaaaggctgtgttactggaccttaattaataattaataaatgtgctactactatatagccaggcttcacagtgacacatacttctattgcccatgctacatatatgtgttcttatttacatccccaataagtgttattgtgttgtatcacatttacctatatatatcaaatggaacatttctccaaaaaaaaaaaaaaaaaaaaaaaaaaaaaaaaaaaaaaaaatccgaggggggcggggcccaattagtaaccccaaaggcggtgttgcggggccttaattaataattaataaatgcgctactactatagccaggcttcacagtaacacatacttctattgcccatgctacatatatgtgttcttatttacatccccaataagtgttattgtgttgtatcacatttacctatatatatatcaaatggaacatttcttcaaaaaaaaaaaaaaaaaaggcccctagggcc

SEQ ID NO: 153872 - DNA, 327 bp, Zea mays
  Clone ID: MRT4577_71910C.1
aattggtgtgtttttttttgaccgagaagcaccatttttttccttaaaattaacttttaataaatcctgactggggtaacagctttcttttttcctaattaaaactaattgatgttcccccattttttaaacatgataaagacagcgacccaaaagatacaaaaaaacccctaaaaaaaaaaaatgtttttggcaacaacaaacacaacacaaacgaagataaactctttgcattagggtaaacatcaacccttcgaacaatataaaatcccctcgtttcttccaatggacggtctcaaataggtggggtgcgtttatatttttttt

SEQ ID NO: 153873 - DNA, 440 bp, Zea mays
  Clone ID: MRT4577_71911C.1
ctaggatcagtgaacaggtattataatgacaaaaggcaaacgacaacaaagataggatcaactatacacaagggaacaggtttcaccatctcatgcttaaaaaaactaatgaatgccgagctatgccacgacatctatgtcaaatagttaagtcccccaaaaatttcctgacaacaaaaaataatattaattctaaaatgtaaccatctacaaaataccaatgaggatatcacatttgataacacaataacatatcaaaaaataatataaactatcttcaacaaaaaaaaagatctcatttacatgacttcctattagtggcatttcggaatgctgccttatctactctagcgcacatcctccgcatacccataacgccaataggagaaattatcattaaggcaatggaagatcaaagggcacccattccaggaattgtc

SEQ ID NO: 153874 - DNA, 571 bp, Zea mays
  Clone ID: MRT4577_71912C.1
gggtacccgcggccccctctcgagttttttttttttttttttttttttttttttttttttttttttttttttttttttttttttttaaccacagaaaaaacagggttctttaaagggaaaaaaattttttccggcccaaagggaaaaaaaatacccccccttaagcccaaacccaaacttgtaaaattttgccccaccaccgttttttggggttataaccctttgggcccttaatttggggggccctaaaaaaaaaggggccattttacaaaaaattaatcccaccaaaccgggttcccaccttaaaaaaacccggggatgggggcatggccaccccaaagttcttggaattcactaaggcccattttgggggaccccccgggattttttttttgcaaagccggaaactccggtttttttaacacaaaaggaaaaaccctggggaccggatcttttgtttcggggaccggacccatggccttcattttggaaaaactttttgggacccgtttttaaggcggtttccgcccttttggcaaaaaatcgtattcttctcaaaaaaacttatttg

SEQ ID NO: 153875 - DNA, 817 bp, Zea mays
  Clone ID: MRT4577_71913C.1
gtaccctcgggctcgccgggggctttttgcattccacccctcatttttttccgccgccacaacagcctctctgtcttcttctccatcgcgcagcaggcatcccacggcagcagcagcagggagccgtgctcctctccatggcgcccaggcctgctccctctcctgctccatgggcgcgagctcctcccctcggccagccatggtgccccctgctccttcttcctccagcagcaagaagccaacgcccctccattttcgccagcgtttccctctattgtccgtgacgtgggcaagctctgatccatggcgccctcctccccttcttcttcctcaagccagcaggcgcctccctctactccctgtgcgcagcagccccctcccttccagacgcccctgctcttcctccttggcgcccagaaattacagcagcagctcggccccttcctccctgcgcccagcttttctctccactgcgcagcagcaccccttcccatggctgcgcccccccatcaggtcccattcttgttcatggccgaggcccccatttaggctgcccctgcctctgtccaagacgctagcagctcccaaatggcgcctagatttttttttccagtcatctccatggccgagcagcagctctgctcgcccccctccttctttttcccttgcgcagcagcaagaagcccctgctcgtagccttggcgtccaacttcgctgcgcagcggtgccgatccaaaacagcgtccccggatcccctccgcactgagtgctttaccgtatctgcgcagccccaacattgacgccgttcaccttggtg

SEQ ID NO: 153876 - DNA, 233 bp, Zea mays
  Clone ID: MRT4577_71914C.1
ataaaactcaatcaaccaaactagtttttcaaccattatatatagatataacacgcacacaaaaacaacaatctaacgctgaaaatgttaatgttccatttcatacatcataatccctcaccatgaatcattttgggagggcgggaacatgtttttctgggccactccaccaaataataaaaaaataaaaaaacaaaaccaagcgaattctcacctcaacttgcctcctctcg

SEQ ID NO: 153877 - DNA, 943 bp, Zea mays
  unsure (1)..(943): unsure at all n locations
  Clone ID: MRT4577_71915C.1
ttgggtacctcgaggccggccggatgtggccagcaccctcctccgctcaagacccaagtctgctagaacccgggcgcgctccaaattccccggtcacctacctcctctgccctctcactctcagatccgcgtcctcggctcctcctcctcctcccttccttccagatctccctcccagtcgagagtcgagatccaccgcctccgcgccccctcaccggagcagcgcgaggaagcggggggccagaggccagccatgggcaaggaaggggccagcgacggcggcatgtcggagtcggtgatccgcaaggtcctggtctcgtacatgtacgtggcggtgtggatcttcctctccttctccgtgatcgtctacaacaagtacatcctcgaccccaagatgtacaactggcccttccccatctccctcaccatggtgcacatggccttctgctcctccctcgccgtggcgctcgtccgcgtcctccgcgtcgtcgacctcccgtcctcgcccgccatgacgtcgcagctctacatctcctccgtgctccctatcggcgcgctctactcgctctcgctctggttctccaactccgcctacatctacctctccgtcgccttcatccagatgctcaaggcgctcatgcccgtcgccgtctactccatcggggtcctcttcaagaaggagtccttcaagtcctccgccatgctcaacatgctctccatctcgttcggcgtcgccattgccgcctacggagaggcccgcttcgacgcccgcggcgtcgccctgcagctcgccgccgtcgccttcgaggccacgcgcctcgtcctcatccagatcctcctcaccctccaagggcatctccctcaaccccatcacctcgctctactacgtcgcgccctgctgctcgnncttcctcgtcgtgccctggggtcttcgtcgagctgc

SEQ ID NO: 153878 - DNA, 1552 bp, Zea mays
  Clone ID: MRT4577_71916C.1
ccccgcgtccgccccgcgtccgccccgcgtccgctcgacagtagagatccaccgcctccgcgccccctcaccggagcagcgcgaggaagcggggggcaggggccaggccatgggcaaggaaggggccagcggcggcggcggcggcggcacggcggcatgtcggcgtcggtgatccgcaaggtcctggtctcgtacatgtacgtggcggtgtggatcttcctctccttctccgtgatcgtctacaacaagtacatcctggaccccaagatgtacaactggcccttccccatctccctgaccatggtgcacatggccttctgctcgtccctcgccgtggcgctcgtccgcgtcctccgcgtcgtggacctcccgtcctcgcccgccatgacgtcgcagctctacctctcctccgtggtgcccatcggcgccctctactcgctctcgctctggttctccaactccgcgtacatctacctctccgtctccttcatccagatgctcaaggcgctcatgcccgtcgccgtctactccatcggggtgctcttcaagaaggagaccttcaggtcctccgccatgctcaacatgctctccatctcgttcggcgtcgccatcgccgcgtacggcgaggcccgcttcgacgcgcgcggcgtggccctgcagctcgccgccgtcgccttcgaggccacgcgcctcgtcctcatccagatcctcctcacctccaagggcatctcgctcaaccccatcacctcgctctactacgtcgcgccctgctgcctcgccttcctcgtcgtgccctgggtcttcgtcgagctgcccaggctgcgcgccgtcgccggcggcttccagccggacctcttcgtcttcggcaccaactccctctgcgccttcgcgctcaacctcgccgtcttcctgctcgtcggcaagacgtcggccctcaccatgaacgtcgccggcgtcgtcaaggactggctgctcatcgccttctcctggtccgtcatccgcgacaccgtcacccccgtcaacctcttcggctacgggatcgccttcctcggggtgggatactacaaccacgtcaagctgcaggcgctcaaggccaaggaggcgcagaagaaggcggcgcaggccgacgaggaggccgggtcgctgctgcaggagcgcgactcgcacggcgaccgcaagactgacgaccaggcctagcgagtgtgacggatctcatgatccgattcgctcggttctgaacccagtgtactgccaatatgtgatccaacccttacacgtttgatgcaaaatttgttcatttcttgtctttgacttgatctggtggtaccaaggaaataagcacgggaaagatgcaagctttgtgtcgaacatgtgaaaaaaatatatatgtatgagcaatttttgtctttttttgggggccagttgtagctgttactatcattaaacagtaagcaaaactgtttgcattgtatctgtattgctgtgattggtcgattttgtcttgctaatacataaaaaattggacccactggggcaaaagaagtgcaattat

SEQ ID NO: 153879 - DNA, 159 bp, Zea mays
  Clone ID: MRT4577_71917C.1
gttgattggtattttggttccaaaattgagctcaaggacaataaggcaagcggttggggttgttggcagtgtaatcaatgccccacaatggtggttcttcattcagcactagtgcagtcaaggaaaatagatcggaattaaggatatcaagtcggtgaa

SEQ ID NO: 153880 - DNA, 1684 bp, Zea mays
  Clone ID: MRT4577_71918C.1
gccgggccgggaaaaaaaaaaaaaaaaaaaaaaaaggggattgctgggcgcgcgtcgaattccccggtgacctacctcctctgccctctcactctcagatccgcgtcctcggctcctcctcctcctcctcctcctcccttccttcgttccttccagatctccctcccagtcgagagtcgagatccaccgcctccgcgccccctcaccggtgcagcgcgaggaagcggggggccagaggccagccatgggcaaggaaggggccagcgacggcggcatgtcggagtcggtgatccgcaaggtcctggtctcgtacatgtacgtggcggtgtggatcttcctctccttctccgtgatcgtctacaacaagtacatcctcgaccccaagatgtacaactggcccttccccatctccctcaccatggtgcacatggccttctgctcctccctcgccgtggcgctcgtccgcgtcctccgcgtcgtcgacctcccgtcctcgcccgccatgacgtcgcagctctacgtctcctccgtgctccctatcggcgcgctctactcgctctcgctctggttctccaactccgcctacatctacctctccgtctccttcatccagatgctcaaggcgctcatgcccgtcgccgtctactccatcggggtcctcttcaagaaggagaccttcaagtcctccgccatgctcaacatgctctccatctcgttcggcgtcgccatcgccgcctacggagaggcccgcttcgacgcccgcggcgtcgccctgcagctcgccgccgtcgccttcgaggccacgcgcctcgtcctcatccagatcctcctcacctccaagggcatctccctcaaccccatcacctcgctctactacgtcgcgccctgctgcctcgctttcctcgtcgtgccctgggtcttcgtcgagctgcccaggctgcgcgccgtcggcatcttccagccggacctcttcgtcttcggcaccaactccctctgcgccttcgcgctcaacctcgccgtcttcctgctcgtcggcaagacgtcggctctcaccatgaacgtcgccggcgtcgtcaaggactggctgctcatcgccttctcctggtccgtcatccgcgacaccgtcacccccatcaacctcttcggctacgggatcgccttcctcggggtgggatactacaaccacgtcaagctgcaggcgctcaaggccaaggaggcgcagaagaaggcggcgcaggccgacgaggaggccgggtcgctgctgcaggagcgcgactcgcacggcgaccgcaagactgacaaccaggcctagcgagtgtgccggatctcatgatccaattcgctcggttctgaacccagtgtactccaaatatgtgatccaacccttacacgtttgatgcaaaatttgttcatttcttgtctttgacttgatctggtggtaccaaggaaataagcacgggaaagatgcaagctttgtgtcgaacatgtgaaaaaaaatatatatgtatgagcaattttttgtcttttttttggggccagttgtagctgttactaccattaaacagtaagcaaaactgtttgcattttaagagtattgcgttcttctagtagattaggtggtaaaaatgtactaattcagattgttaatttcgtggttattttcaaaatataatgagcttaccgt

SEQ ID NO: 153881 - DNA, 1141 bp, Zea mays
  Clone ID: MRT4577_71919C.1
cccccctcgggtcgaccacgcgttcgccggttcacgcaaaggccgggaccaggccgccagtcccgacctccccggctccagcccccgcgcacgaccagctctgacgaccccgctcctgcctcccacctcctccggtggcctcgcgcctgactccctcctccggcacccaggccagccgcgccccgcctctcgcacaggacggaaatgatgccttctcctttttgttagctgattctgatcaaactggttagttcgatagagaatatcagtaatatcttgctgcccaaactgcagcttcaactgattccgcgtcaggagcacttagagcaaccatgggggggaaatcggagcagaagtctcgaaaagagaggcggaaagaggcgagatcagagaagcacaagctgcgatttctttcttgggttgggcatcagggtggcaaaaagaagaagccgtcaatgtcagtagtagagccaagttcggttgaggagaagccaaagaaagagcctgatggcatgatgaagaagaagagaaagagggaagcagagggtaagcggaagcccaggtccaacttccaggaatatcttgagatggagatgggtggacctgtgagcatggaggaggatctagagatggagaggaagcttgcaaaaaagctcaagttgaagaaaggaaagttgggaggtcctgatgatggtatggatgacctttttgcggaccttgggtttggtggtgactttggttcagatgatggtgaaacaaaagcatatgattggaatgtggtggaggacactaatttagacaagagaaaaggtaaaaagaaaaataaggagaaaaaggatgacacagtgatggaggaaccagatgacattgatgaagagaatggtcggaaaaagaagaaaaaaaagaagaaggatggaaagagggaaccagagaaagagcctgatcccaggtccaagttgcagagaaagagggagatggagatgggtggacctgtgagcatggaggaggatctagagatggagaggaagcttgcaaaaaagctcaagttgaagaaaggaaagttgggaggtcctgataatggtatggatgacctttttgcggaccttgggtttggtggtgactttggttcagatgatggtga

SEQ ID NO: 153882 - DNA, 180 bp, Zea mays
  Clone ID: MRT4577_7191C.1
atggcttccgtttggtgcacgggtcttcagtcccaggcgcagttgcagtctacacactgtatcatcatcacgaaacgaaaacaacaaatgcatcagcaaacgatggtcggccaggaaagacagcggaaggaaggagagatagctaacacagataatcaatgtccgacaggatttagataa

SEQ ID NO: 153883 - DNA, 413 bp, Zea mays
  Clone ID: MRT4577_71920C.1
gtgtgtgtgttttttttttttttttttttttttttttttttttttttttttttttttgatacgaaaaatgtctataaatctaccaagaactgcaaactgctgctggggccggctgtctgggcttgctgcagctgaagtccatacacaaaaaaggggggggggggggcgggcatctagggcagagatttgacatgaaccgacccatgcacaaacagggggcaaaagcaaagaacaacaggagctacgcttccacaagcaacgggtagctccaaggcctaccaggggttgccacgctagctagagcgcccggcccgctctctgcaaaagccacaaaatcttcacaaaaaaacaccctttctccccttctcaatcacagactatcaccacatatccagggggaacattaaaatccc

SEQ ID NO: 153884 - DNA, 274 bp, Zea mays
  unsure (1)..(274): unsure at all n locations
  Clone ID: MRT4577_71921C.1
ggcctgcctgccgtttccatctccatccagttctccgcvvccacccasccasscactcsagtsstttcsccaacscakggssgccgccgccgccgccgccggcacccgggaggagatggtctacatggccaagctagcbgacagngcggacggtacgaggagatggtcgagttcatggwtwwtktcgcdgccgccgccgagctcaccgtcgaggagcgsaacctgctctccgtcgcgctacaagaacgtcatcggcgcgcgccgccctgcctgg

SEQ ID NO: 153885 - DNA, 1756 bp, Zea mays
  Clone ID: MRT4577_71922C.1
gatcgtctacctcgacgccggccgggatgtggccaccagcaccctcctccgctcaagacccaagtctgctagaacccgggcgcgctccaaattccccggtcacctactacctcctctgccctctcactctcagatccgcgtcctcggctcctcctcctccccctcctcctcccttccttcgttccttccagatctccctcccagtcgagagtcgagatccaccgcctccgcgccccctcaccggagcagcgcgaggaagcgggggggccagaggccagccatgggcaaggaaggggccagcgacggcggcatgtcggagtcggtgatccgcaaggtcctggtctcgtacatgtacgtggcggtgtggatcttcctctccttctccgtgatcgtctacaacaagtacatcctcgaccccaagatgtacaactggcccttccccatctccctcaccatggtgcacatggccttctgctcctccctcgccgtggcgctcgtccgcgtcctccgcgtcgtcgacctcccgtcctcgcccgccatgacgtcgcagctctacgtctcctccgtgctccccatcggcgcgctctactcgctctcgctctggttctccaactccgcctacatctacctctccgtctccttcatccagatgctcaaggcgctcatgcccgtcgccgtctactccatcggggtcctcttcaagaaggagaccttcaagtcctccgccatgctcaacatgctctccatctccttcggcgtcgccattgccgcctacggagaggcccgcttcgacgcccgcggcgtcgccctgcagctcgccgccgtcgccttcgaggccacgcgcctcgtcctcatccagatcctcctcacctccaagggcatctccctcaaccccatcacctcgctctactacgtcgcgccctgctgcctcgccttcctcgtcgtgccctgggtcttcgtcgagctgcccaggctgcgcgccgtcgcggcggctttccagccggacctcttcgtcttcggcaccaactccctctgcgccttcgcgctcaacctcgccgtcttcctgctcgtcggcaagacgtcggccctcaccatgaacgtcgccggcgtcgtcaaggactggctgctcatcgccttctcctggtccgtcatccgcgacaccgtcacccccgtcaacctcttcggctacgggatcgccttcctcggggtgggatactacaaccacgtcaagctgcaggcgctcaaggccaaggaggcgcagaagaaggcggcgcaggccgacgaggaggccgggtcgctgctgcaggagcgcgactcgcacggcgaccgcaagactgacaaccaggcctagcgagtgtgacgacggatctgaccgcccgattggtcggttctgaaccctgcctagtgtactccaaatgtgtgatccgtgcaacccgtacaagttcgatgcaacatttgttcattccttgtgtcgaacatgtgggaaaaaagggaaatatatgagcattttttgtagagaaaatccgaggtattaacgtttaggaaatatgcccctgcttggtggaaagctttgctttgttattttaaaccctttgttcttcagaaaggcagccatgcccttctactatctcacttgccccttgcctaaatttatttgtcccgctagtaaattagggactaaaaatggcctgctccaaattgttaatttggtggttattttccaaataaaatgagccttccgtaatttacgagctgt

SEQ ID NO: 153886 - DNA, 308 bp, Zea mays
  Clone ID: MRT4577_71923C.1
gacttatccgttatctgcagcaatggctacacccggggttggattgtacacactactaactggtacataacgtaccaagaagaagctgaagacaccgatgagcagtatgaccaatcagggccatccgtgacatactgaccaggatgcagacactgatgagatggatgaaccactgtcataacaacgccaatgacattggctgaatcaagaacatttacctttaactgatgcgtctattggaaggccttcacactaacagccgacatcaggcaacgccgcagtgtatacaactgctataaaactgacaa

SEQ ID NO: 153887 - DNA, 178 bp, Zea mays
  Clone ID: MRT4577_71924C.1
agttactgaactttatgcatgttgatctatattgatctgcatgcagttgaatgaacaaattatttcagtgtgacagccatgatcaagttccaattagtctgaacagggtactttggaattgtcccatattaatcagagatggcaaaagagaaagttctcatattaccaggttgatttt

SEQ ID NO: 153888 - DNA, 352 bp, Zea mays
  Clone ID: MRT4577_71925C.1
gggcaaaaaagggaattgatacaccgtttttataaagccacttgtttcctcgaaaaaaaactaaacatttggggagttccggaaagagggaacttggcctccactaaaaaaaatacaaggactttttaccctttacacgggggttttaaaaaaacttgcctccaaaaaaaaaaaggtgtttattttttgaacaggggtcaggggcgaaaaaaaagcaaaacatgttgatacaaaaaatttgaccccattagggcctgtacccgttaatagcaaaataaaaaacttctggtttgtttattggccgattggtttccaccttcctttgggtttttttttgagctcctactttggc

SEQ ID NO: 153889 - DNA, 413 bp, Zea mays
  Clone ID: MRT4577_71926C.1
cgcacaccccacctaccggcgccactacagcacacccgccgccatgccgctccctacgcccggaacgatcgcctccctacgcgcgggtgaccggcagcacctcgtctctctcgatgtgccaatggcgccgcctccatcctacccagtctccacctctgtcaccgcgttcgtcaaggaggaggacgccccaacccctttggtggcctccccgatggcgccgcctctgtcctacccgacctcgagttcattgagatccagaaggagcaggcgcaaacttctccatgcacgggaggtcaagcggagtatgcgcgaacttctttgtgttgtcgcccgaggctgactccagcatctccttcctggccagatccatggaggcatcgcaagcccagatcccgctgtcgttaggagctaat

SEQ ID NO: 153890 - DNA, 247 bp, Zea mays
  Clone ID: MRT4577_71927C.1
gggaagtattgataaatatgagcatgacaagaaaactggacggactaaggaagaccgagccctgtactcaacaagttgaaaaccctcacaaacaagggagcgacccaaggactcaatgagaagacaaagacccaatggacgcgtcagacctgatgaaggagcctgaagaaacaggtacgaacctgcgagcaagagcaatcggccttatgcccatgaatgaccagggtgaaaaaggacgaacaagaaa

SEQ ID NO: 153891 - DNA, 384 bp, Zea mays
  Clone ID: MRT4577_71928C.1
gaggctcggaattcggctcgtgggatctgcacagcctctattaaatgcaatgtcaatggatgcctgaagggggggcgctgcaaatgaaccactgattgtaaacaatcataacatcgtggaacagagctgatgccacgacctgcattcaaggaggtccgaccgagtcaggaatgctagactaatggcccgacctgatttagacaatgagctacagcgcactgctccttacaagatgcttactgttcccatggaccagctctcatcgcccattaatccaggcgaagtataacacaaacctcgttaaccccttgaaggtgttttgactatcatgtgaaccaatctccagagacttaacgggctggtgacagaagagatagaaaaatt

SEQ ID NO: 153892 - DNA, 230 bp, Zea mays
  Clone ID: MRT4577_71929C.1
acgctcactctttctcaaagaagtattgtatgagatggctgttgggggtaaatacaactttctggggggccttacccataggagccacatgttgcacgattcattaacttctgatgttgcctatccgtagactgaagataccgtacatgcattttaaaacttcttctccaaccgtgtaatctgaaaaatggtcatcgactgcccaacttttgcagtcactctcttgagaa

SEQ ID NO: 153893 - DNA, 427 bp, Zea mays
  Clone ID: MRT4577_7192C.1
cttgactgcaagatgaaactccttgtgctagctgtgctgctcacagtggccgccgccgacagcggcatcagccctcgggccgtgtggcagttccgcaaaatgatcaagtgcgtgatcccggggagtgaccccttcttggaatacaacaactacggctgctactgtggcttggggggctcaggcacccccgtggatgaactggacaagtgctgccagacacatgacaactgctatgaccaggccaagaagctggacagctgtaaatttctgctggacaacccgtacacccacacctattcatactcatgctctggctcggcaagctcctgtagcagcaaaaacaaagagtgtgaggccttcatttgcaactggcgaccgcaacgctgccatctgcttttcgaaagctccatataacaaggcacacaag

SEQ ID NO: 153894 - DNA, 394 bp, Zea mays
  unsure (1)..(394): unsure at all n locations
  Clone ID: MRT4577_71930C.1
cacaaggagggcccaggcggacagacagaagaagggaaacacngggcccaaccncagcggcgggggggggggcngaagcacaggcaaaggggcggggcaanccnacggagcgacaggaccgcggaaggaacaggccagaacccancaccacaggccaagccggaggcaaccggacgggcgaaggaggacacgccaggcggggcacccncgcccagacgaaaaggagaaccggcccaacaaacacggcgagggcgaagggcgcaccgaggcagaagggaagggccccaggccccgggagagggaagaaacgggagacacngcgcggggcgacggccccgaggagggggagcaccgagagagcagcgaagaaaaacgaggcagacgccaggcaggg

SEQ ID NO: 153895 - DNA, 339 bp, Zea mays
  Clone ID: MRT4577_71931C.1
cccatttgtgctgagatcggtagctggcagctatgcagcatgaacacacgggctagcagtagatcacaagccaatgaactagaggcaaccatatacgtatacgcacggacacgtagctcgactgtattactagtagtagcgcgacgatgagggctcaatgtgtggcggtcgctctggtcagggtggtgggcgaggtctgcctagacgggccgcgggtaggggagagctcacgctaagaaggtgatactcgggcatgtgatgcaggaaatacggcctggagaacttgacgacgccgacgcttatgggagggtgaaagctccgcacttggaatcaacgggg

SEQ ID NO: 153896 - DNA, 354 bp, Zea mays
  Clone ID: MRT4577_71932C.1
gtacgctcgatcctctcacataacccacgcgtactgttccaccgaaggcatgtcaaatattgcgggttcctgtgctggttggatgtctgcagtctcttctactcccacgataccgccacaatgggtcacgaccgacgaataactgtcctttttgcgagtgccgtgtgctaacagtggtctaagtgttactcaactgaagtctgtctcacctaacgatccatcgatggatatcttctcgcatcttacccttataacgcttgtttctccaacaatcatcaacactattacagcaattacctttggtgcatttattggcacaaaacatcatggcacaacaactacaacaacttgtgc

SEQ ID NO: 153897 - DNA, 267 bp, Zea mays
  Clone ID: MRT4577_71933C.1
tccgcccttttttttttttttttttggatttctgcaagctcaagagctcatacctttatgtgggggcaactactagtacgggcacatcttaacaaagcgacgtgtacaagtagaccttggcaagtgcacaaccaagtattctagcaagtacttactgtactgtactgtgtacacacacacaacgccaatggccaacgcccaagcgcggtgcttggcagccggcacatgcgggttctggatgtatggactggccggtaatgtcaaggt

SEQ ID NO: 153898 - DNA, 340 bp, Zea mays
  Clone ID: MRT4577_71934C.1
ctaccttctccttttccaaagtagaatagttacatctttatagggggacatgtaatttcttaaagacaattatctattcaccttaaacctacgaatacttattttaggacgcatatagagtatttttaggcataaactaacaatagtcctggtccttccaaacagcaaacatgttgttgccttttttttccgtatatatacagggaaatttatgaccgtttcgtctctgcaatatgcaagcggatgcagctcatgggagcttcctgaggttgacctgcgcgccgtgctctggcttgagcaagacgacggggaacggcgcgtgccaataggatgggggaga

SEQ ID NO: 153899 - DNA, 215 bp, Zea mays
  Clone ID: MRT4577_71935C.1
gctccaccgacgaactcacctcgatcgcccacctctaccagataacctccctctactattcaagcccaaaccctaaaaccacggttcccaaatgtcgacgccgccgactacgctgctgttgctcctagcagtgacagcagtattccacggtgcgacgatgtatacgatgatcgagccgtgctctagcgcaaatgcgtgcccgactcttctaggct

SEQ ID NO: 153900 - DNA, 273 bp, Zea mays
  Clone ID: MRT4577_71936C.1
ggtcgttgtggtttaatctccgtactggttagttgacagttggcgcggccgtggaatccttggagtaagaccaatctgtaggtttacttgtccattatgctctcgccatcgaggtcggtttaatttgttcttttatttagtagcctttcgttcttttaggcaatgtcttgtttgataagaatcacctgattgtagtatggaggggcctgtatttatttagtagtaacatatgatcatagataaaaaactgttgggtgcctgggttacatagaa

SEQ ID NO: 153901 - DNA, 481 bp, Zea mays
  Clone ID: MRT4577_71937C.1
gttccgttgtttttaaggcaaacgggggtacaaaattattaaaccaaagccttcaaatccccccaaaaagcatgatccatttttttaaaatcgaccccgaccctaggggggggggggaaaaacctttttttttttactacggaccagaacggatctccccccctgtcatgatccgaccagacgggggagaggagctggaagacccagggcttgggctcggagttcatgcccatgacgatgacgagggggaagaagccggagggggccaccaccttcgacttattgatcgtgcacgtggtccactccttcctgaacctaaggggggggggcgccgcggcggcgccccccccctttgtggtgttcttattgccccccttgcccttggtttttgacttcaaccacggacccgacgccgtgggggacccccgggacggggggggaccagcccagaccaatacccttgggacgccgagggggaggc

SEQ ID NO: 153902 - DNA, 712 bp, Zea mays
  Clone ID: MRT4577_71938C.1
tcgtgcctttcctcgatcgtctacaattagtcaatcacagcgccgctacctttcctcaactccactccaacccgcgactgaaatcaccgccagcccgaccgatctccggcccggggccagggagggaggaaatgccgaccaagaggagcgtgggcaccctgggcgacaaggacctcagcgggaagaaggtgctcctccgcgccgacctcaacgtgccgctggacgacggccagaggatcgccgacgacaaccgcatccgcgcctccgtgcccaccatcaagttcctcatggggaaggacgccagggtcgtcctggccagccatctgggccgtccaaaaggggtcaccccgaagtacagcttgaagcctcttgttccccgcctgtctgagcttcttggagtcgatgttgtgatggccaatgactgcatcggtgaggaagttgagaaattagctgctgctttaccagatggaggtgtcctacttctagagaatgtgagattctacaaggaggaagagaagaatgaccctgagttcgccaagaaaactagcatccgttgctgatctgtatgtaaatgatgcctttgggactgcacatagagcacatgcttcaacagagggagttaccaagtatttgagggctgctgtcgctggcttttttatgcagaaggaacttgacttcttattggagcagttgccacccgaaaaagcatttg

SEQ ID NO: 153903 - DNA, 325 bp, Zea mays
  unsure (1)..(325): unsure at all n locations
  Clone ID: MRT4577_71939C.1
gccacgcgtcggcccacgcgtccgcggacgcgtgggagaagttgaaggataggcgtgcaacgctgccaggcgttcggtgttatgcacgaacggatagtgtcgttgatctcgtggtttcaagacggatttagtttggtgagctacatcgctatccctattggttaatttgattggttgattgattagaatggggtcgatgattctctggctttttatgtgaggtatatgtggttagacttatgcgaggggtgattgagttagtgacgcgaatagtagggtagtatatcacccgtctangtgatggatgcgaccgttgattaagtgt

SEQ ID NO: 153904 - DNA, 775 bp, Zea mays
  unsure (1)..(775): unsure at all n locations
  Clone ID: MRT4577_7193C.1
cctgccgggccgaagctcgcccatcccgcaatccatctcctctccacccgccatgtctgccgcacgagctttcagcaccgctctccgggctggtgtcccccgcgctcccattgccgcccgcttcgcccgcggttacgctgccgccgcacctagcagcgccgcaaacaagcctccggtcgctctcttcggtgtcgatggaacatacgccagcgctttgtacaccgcttccgccaagaccaacaccctcgacaccaccgcaaagtcgctcgagcagctcagcgccgtcttcaagcgcgatgagaagctcgcccagatcctccgcgcccccactctctccgtctccgacaagcagcagatcgtccaggagctccagaagcacgttggccaggacaaggacagcatcgtcaagaacttcctcgacacactcgcccagaacaaccgattgggcgtgctagagggcgtcgtaaacaacttcggcatcctgatgggtgcgcaccgcggcgagatcgagctcgttgtcaccagcgctgctgctctcgataacaagaccctgtcccgcctcgaggccgccgtcaccaagtcgcagtacgtcgccaacggccagaagctcaaggtcgtctccaagggtcaaccccgagaatcaagggaggactcatcgntcgagatcggcgaccgcaccatcgaccctgtccgtctcctccaagatggccaagatgaacaagctcctcaaggacactnntgtaatatagcaatctgatatcccgagcggatagcg

SEQ ID NO: 153905 - DNA, 1239 bp, Zea mays
  unsure (1)..(1239): unsure at all n locations
  Clone ID: MRT4577_71940C.1
ccggccgggccttttccttttcttttctcccaccaccattgttgtattgtatcgccccgtcggttcgtcgtcgtgcgacgtctcgtcatctcccgacaacgaggagatgcttgctgctactactatggtactacctactgtggaaaaaaaggctgaggccacacctcaacggctcaacctcaactgctgcatgccgcctatacatactacgcacgcagccgcgcccggcccggcactgcactgcacgggcgcggcgggagatcgagaggagactttgctcgcttttggtgggcatccgcgcggagcgtgaccagacggtgtagagactagatagatcggaagggggtcggaaggggatctaggcatagagactagagagcgaggaggatgaccggcgttgttgcaggcgccggagggggcaacaaggcggcgggcgccacgctgcggctgcaccactaccttgtgatggccggggtggcggcggcggtcgtcctcgcctgcctccggtacgcgccggaccccgcggggtacggcttcctggccgtggcgccgcggccggtggaggccgatgctggtgcccggcgggacaccactcctccaccgcgcccgtcgtcgtcgtcgtcggtggtcatcttcaacttcggtgactccaactccgacacgggcggcatggcggcggtcaacgggatgaacattaacctgcccgagggacgcaccttcttccgccgccccaccggaaggctctccgacggccgcctcgtcatcgacttcatctgtgagagcctgcacacgcctttcctgagcccatacctcaaggcgctgggcgcggatttcagcaacggcgtgaacttcgccatcggcggctcgacggcgacgccggggggctctccattctcgctggacgtgcagctccatcagtggctctacttcagggccaggtccatggagatgatcaacctaggacagaggcctcccatcgatcgcgaaggattccgaaaggccatctacaccatcgacatcgggcagaacgacgtgtctgcttacatgcacctgccctacgaccaaggctgcttgccaagatccccggatttgttgctcagatcaagtacaccatcgagacgctgtactcgcacggggcccgcaagttctggatccacggtacgggcgcgctgggctgcctggcgcanaagctggtcatcccgcgggacgccgacgacggggaccagttggacgcccacg

SEQ ID NO: 153906 - DNA, 799 bp, Zea mays
  Clone ID: MRT4577_71941C.1
cggacgcgtgggcggcggcaggatccggtgcatgcaggtgtggccggcgtacgggaacaagaagttcgagacgctgtcgtacctgccgccgctgacggaggagcagctgctgaagcaggtggactacctgctgcgcaacaactgggtgccctgcctcgagttcagcaaggaaggcttcgtgtaccgcgagaactccacctcgccgtgctactacgacggccgctactggaccatgtggaagctgcccatgttcggctgcaccgacgcgtcgcaggtctacaaggagctgcaggaggccatcgcctcctacccggacgcctacgtccggatcctcggcttcgacaacatcaagcagacgcagtgcgtcagcttcatcgcctacaagcccgcgggcagcgagtgattaaactgctagctagctcctgcgtgagctaatggcatatggctgcctgctgctgcctctcaacctgttcgttcggttttgcatccttggggtcacacacacaccttggtttctttcttcttctttttttcaccttttgctgctgttggttcctttgcttctatatatgctgctgatgtatccattgttggcatcatccatctcgatcgatctctccccctacatatacctgctagaaaaaactactgcaactagcgttgggtgaggaacatatatgtgaatgcaagctccggctatcatgtatgtgtaatatatatggcattggagtttgctctggttattcacagagcaaagaagtacttatttacatccatataacatatactttccttccat

SEQ ID NO: 153907 - DNA, 404 bp, Zea mays
  Clone ID: MRT4577_71942C.1
caaaaccacaaaacatgtttcttttagtcgcaatagccacagcagattccccgggatgcaacacgcaaactcgctcgcacaatgccactggagctttcatttttgagccattttatggtccagaatttagtcaagtacatactggggctgtttggttcaactttttctgaccagcttttttgaaaatttggctggggaaagaatctggctggggggagaatctgagtattattaccattacgtggggagaaaaataaagttgttcaaagggcttaggatctaaaaagggatggatttctactattacaacgactcaaccgattatgggtttatgttgagtttaaaagggtgttggctaaccaaatttattaaaactggcttaaaaactgtacgtttggcaattt

SEQ ID NO: 153908 - DNA, 1881 bp, Zea mays
  unsure (1)..(1881): unsure at all n locations
  Clone ID: MRT4577_71943C.1
tgcacgagaaccgccgccacatcttcttacgtctccctcgctctctctctctcgctacaacgagtagagtagagtagaaggggtgcagctaatcggagcactagttcatcctctgtccattcattcatcagtactcccagccttttccggcacacgcatctatggccccgccatcacacttctacaacaacaatggcgccccgctggacgccgccagctacctccacgcgtccgcggacgcgtnnnnggaccaggaaatgcacctccacaggactcctgcttgctcgacgcagacgagttccgccggcagggccaccaagtcatcgacttcatcgccgactactacggccgcatggacgactaccccgtgcaccccagcgtcaaccccggcttcctgcgccgccagctccccgacaaggcgccgtcgcgtccggagtcgcccgacgcgttcggtgccgcgctgcgggacgtccgtgacctcatcctgccaggcatgacgcactggcagagcgcccgccacttcgcgcacttcccggcgtccagcagcaccgtcggcgccctcggcgaggccctcacggccggcatcaactccgtccctttcnnnnnnnnnnnnnnnnnnnnnnnnncggagctcgagatggtcgtcgtggactggctcggcaaggcgctccacctgcccgagagcctaatgttcnnnnnnnnnnnnnnnnnnnnnnnnctcggcaccacgtgcgaggccatcctctgcgccctcgtcgccgcgagggaccgcaagctcgcggacatcggcagcgggaggatcggagacctcgtcgtctactgttccgaccagacgcactttgccttccgcaaggcagcgcatattgccgggatccaccgcgacaactgccgcgagatcgccacgtaccgtgacgacatgttcgcgctctcgccagccgagctgcaggccgccatgcaggcggacgtggacgccgggctggtcccgctcttcctgtgcgcgacggtcggaaccacccagacgacggccgtcgaccctatcagagggctctgcgccgtcgcagcgacacacggtgtctgggtgcacgtggatgccgcctacgcgggctcggcgctcgtctgcccagagttccggcacctgatcgacggtgccgacgccgtggactccttcagcatgaatgctcacaagtggctgctggccaacaacgactgctgcgcgctgtgggtgaagaagccagctctgctcgtcgcggctctcggcacggagcaggagtacatcctcaaagacgcggccgctgaggggcacgacgtcgtggactacaaggactggtccgtgacgctgacccgccggttccgcgcgctcaagctatggctcgtgctccgctgctatggcgtcgagggcctgcgcgaccacatccgcgcccatgtgcgcatggccgcgtcgttcgaggacatggtcaaggccgacccacgcttccaagtcatggcaaagaggcaattcgcactcgtttgctttaggctccgggcgcccgaggagttgggcggccccaaggcggccaacgcgctcaacagaaggctcctagaggaggtgaatgcggcttgctctgggccctacatgagttctgctaatgtcggtggcgtctacatgctcagatgcgctatcgggagcacgcttacggaggagcgacacgtccgcgaggcatggacggttgtgcagaacgtagcttcttccctccttgctaaaatggagatgcacgaagactattagcagcgccataatttgcctaataaacagaactcattccactttgttgttgtttattnnnnnnnnnnnnnnnnnnncataaagttgtgtaacctattatatatacattacgacatgca

SEQ ID NO: 153909 - DNA, 696 bp, Zea mays
  Clone ID: MRT4577_71944C.1
ctcgaggccggccgggaattttctaccgccgacgaccccggtccccgattcgaatatgtgcctcgtaccatttctatcccctgctgccgactcccaacgtgtctacgtccatcaagggcgcttctgggggaacgcattaccatcgccgtgggctgtgggcgcataaaggccaagaacgggggcgccttcacctaggccgactaggatgtcgccgtcgttgtgaccaagttctagcctgccgacgacatcatatgccccgaggtgccgatgcccgcaagactatctctaccgagatcggggctagcatcacccctgccacggcggtgatcctcctcctaggacgctctgtggtcgaagagagtgagagctgctcaactacctccagttctgtcctcctcgcttatctctgtgcctttcaagatcgatggagtaccgatccgtcgtgggaaccactactatgttattgctacatctgccgaagtgggcctcgctggcgttgatgacgtcgacgatgatggcaatgactttgacaggtacaacaacttcaacgctaataataccagaggccgagtttgttcatagagaacatgatgcatccaagtctgtgtgtgacttcaagaaagatgaccagaatggtgtggattgtgctctgatcaacgctatcgacgactgtcccgagagctgaactactatctt

SEQ ID NO: 153910 - DNA, 576 bp, Zea mays
  Clone ID: MRT4577_71945C.1
ccggccgggaaactgccaaggttatcttccgttctcataccaacctaaggaattttccgcaggctctcaccctcaagagtcccgacctcccgtagccggcggacagatgcgacccaaggaggagaataagccgtcgcacaagaagcccgctgcgaggaggagcaccgtgacagagaatgtggataaggctccggcgcaagtataagcccatatgcgagaagtgcctcccgttggccatgctaatagtaggcgctgagggcaaaaaggctaaaaataaatgcgaagaaggccttggagacctacatgatcatacatcttcaatgcgctgtagcaggtgcaccccgacatcggtatctcgtccgaggtgatgtccatcatgaactccttcatcaacgacatcttcgagaagctcgcgtgcgagtccgccaagctgtggcgctacaaccagaagaccaccatctcctcccgcgagatccagacctcggtgcgcctcgtcctcctccgtagagctcggcaagcacgtcgtctccgactgcactaaggccgttacgaagttcacctcgtcttaagatcctt

SEQ ID NO: 153911 - DNA, 332 bp, Zea mays
  Clone ID: MRT4577_71946C.1
tctaatacgactctactataaagaaaactaatactcctacagataccattcctaaattccctattctacccactcatccaaatcactcacctcaataaacaatttaaatgaaaataaaaaaatatttttccaaaaaaaaaaaaaaaaaccacccctacaactactccctactactctcctcatatccatatcttacttcaacaatattaccaacacctcaagcagataaaaccactacacctataccaaccaatcttcttcttatacctccaatccatccttcaacatcaacctcaaaaactaccaatctcactaaactattaacaccccat

SEQ ID NO: 153912 - DNA, 219 bp, Zea mays
  Clone ID: MRT4577_71947C.1
ctcagggacaaggtctgccttcatatcgtcgaggatagcacgcaccttttcatgctctctgtttctccaagctgctttctcctatgcaagttacttgaacaagtgatcaagcttcttcctagccgaccgccggtccacttccagctcacttatcctatcacgtgcttgctggagctccatctggaggccagcaacatacactgtgtcctcgagccgaat

SEQ ID NO: 153913 - DNA, 264 bp, Zea mays
  Clone ID: MRT4577_71948C.1
tacgcgacgtcgctacgattcgcatcgagacgctgtcgaggcgctgatggctatagatcgactcgatggccgtgatgtggatgggaataacatcatgtcgcagtttgcatagtacatccgcaatgctgagccaatgctcataggaagggttaaactggcttttcagaacatcaccagacatatcaagaatcctcgagccaagttcatgacgcagagatagacatcatagaagccaaagttgcagcaggaacagagaaaggcatg

SEQ ID NO: 153914 - DNA, 511 bp, Zea mays
  Clone ID: MRT4577_71949C.1
ggaggaccgggcggaacacccgggacgacccacgctcctcaccacggccgcacagaagaccaggacgggaaaaagaagggcacgacccgggaaccacgaggaaggagcgcaggaggacgcgcccaaccgacgagcagcaagaacagccgccgcccccagcaaaaacgagggggacgcgcaccacgggaaccgcgcggagagcagccggccaggccacaaccacagcaaacacacggaccccgcacgccacacccacggcagcgagcacaaagcccccggcgccgaggaggccccggaggacgagaacggcaccgccgacaccgagaccaacggccaccaacaaaaggacaccggcaacaaggccggcaacaaagaggaccccaccgacgacgcgcccggggacgcccaccagaacaccgacagggcgcacgggcacaagggcgccaacaaacggcacgcacgccagagacgccaaaccccccaaggaggaggaggacgccaagggaggcac

SEQ ID NO: 153915 - DNA, 304 bp, Zea mays
  Clone ID: MRT4577_7194C.1
aagtgtgagtattattagtttgtacgtataagcaaactagctgtgaacctagtttctcaagtttatgagggcttagctgtggcagtcatgcaaagtttagatgtcaactgttaaatttgctacctgtcctccatgtagttttgcataatttggtttatagtgataaatgtgttaactaaaatacttaactaaagtaaatgcttatcatgtgttacctaagtaggggatgtcctaatcagtcacttcagctcttagaggataatcttagaccttcaatttaggtaatgctcaccattttgttgag

SEQ ID NO: 153916 - DNA, 226 bp, Zea mays
  unsure (1)..(226): unsure at all n locations
  Clone ID: MRT4577_71950C.1
cctccgagtcngtctcgaggtcganagaccccccatncgctgggtncaatnagtnacttgcncggcagtnactncttgaanaaactnagggtcgggctnatggtcataatcacgcgcttcagcancttcattactgcagancncncccnctggagcaaaancagcatnagnactgagcaccncttgcgcttagtaactaatgccccnatgtagggcattagtgtca

SEQ ID NO: 153917 - DNA, 450 bp, Zea mays
  Clone ID: MRT4577_71951C.1
gacctttgggctgatttagtgcttggaggccagtcacagtccgtatactcacccactcaatcaatcaatcggtcagtcagtctgacgtgtagagtaaagtgaaagtagtaagaagtaaagtaacggagaatttcgtgagcgcgtcagcctcattagtgtagcctattaaatctattcctggaaattcgcatacttgttgggttgggttgggtagtagggagacaattgaggagggtaggcgtgattcggataggagacatgcgagcaatccttttgctcatgatggttgtggttttgatgttagttccgcggtttgtgcgtaggggactattagtgaaactgggaatgtgtattaatcgcctgctgacgcgcctgatattgataggtctaagggtcttatgtctgctattaacggtgcgacaatggttgggctcgatgagcgggtgactc

SEQ ID NO: 153918 - DNA, 431 bp, Zea mays
  Clone ID: MRT4577_71952C.1
aggaacaaaactaggaccccttttggggtcaccagagggtgggttaagtcttaaaaaaccctttggttttaacgaaaataacagttttaaatcgaccaggcaaacggggggggcttagttcaaacaagggcgggaacaaaacgaaattttttatgtttccactagggatccctcaagcaaacccagaaccggccagacccatttttttttttttgggggagccttgggccccttggctccagggggggccttttttcccccccttttggggacccccacagcccccgtttgcctcttggtccggcccggaaagggccccaggggggggttttcaaaaaagggccccccccccctgggcttagggggaaccattttcaccataccaggaataccatttttggaaaaatggggctccttttaaagctccttgg

SEQ ID NO: 153919 - DNA, 1306 bp, Zea mays
  Clone ID: MRT4577_71953C.1
aaaatatccccaaccacacgcgaacgcgaagtcggcacgagggctatggatacaacattcggtctctccggcgccgatctactccggtggccgcttctcaccgatctactatctttcacttatgttcgggggggccgcttgtatgctccttcctccttcctctctgggctttctattaccaccgtctcgtcggctccgtccgctagaagtttcctctaggcagtagccgctcgagctacacgcggctcccacggagccacggccacgcccaacatggaaatatgtttctcaccgattatccctgcaccagttcgagttggagaagacgaacttccaccgtcttgggaccctatatcctctcctttagttagcaatggatgtagcactaagagatcaccttagacagaggagagatgatgatgatgacatgatgttgttttttctccctatgctacatatattgggttcgagttcaaacatagtaagggaaaaaagcgaaggcatacatcaaagttaagtggcgaagaacatgttcaggagttgctttaaggtcatttgaagaattgtcgggtagcgttcaggatggagcctgaaattttcaaatccttggcatgttatcttagaaggaggggttggtccgtgatataattaaggtcgaggaaaaagcattcttcttatacatgctctaattcatttgaatgatgatgcattgtgctttgtgctactgtaaaatatccccaaccacacgcgaacgcgaagggcacgcgacggctatggatacaacattcttctctccggcgccgatctactccggtggccgcttctcaccgatctactatctttcacttatgttctaccacgacaacaacgattgctgcttgctgctggcgcgcgtaaccgaggcctggtcatgcataaacaatggtgcatgtcatgaactctttaaccgtagggcatttcagtgcattggatggattactagtcctatcaaagtaatgaaacaggtagtgattatggtgaccttctatgtgacagctgctgcacgacagttgtgggtggattaactacattgcaattaatgaagcaatagaataagttttaatgttaatgggattgcaataagacatcacttgtctgctctttcttgtgtaaactgatgacagttatatgctgttgataaaactatatgcatgaacaaaagcctgacggttcctagccttgtatgctggccgctttttagcaaaaaaaaaaaaaaaaaaaaaaaaaaaaaaaaaaaaaaaaaaactcgagaagggggcccggtacc

SEQ ID NO: 153920 - DNA, 544 bp, Zea mays
  Clone ID: MRT4577_71954C.1
cggggtgcaacctgtgcaaactgtatttacaattgatgcacaaaatttccaaaatcactcagcattttttgatcggttgtaggtgttgactgtccccagcaaacatggcatattcgggctccacagccccttccacttattttgggcctacaggacactcaacaaactcgtttgttgtttctgatgatcaaaaaccaccttgtcccggctttcctagcctaccaaaggagaatacggtgatcaccctgcttcccgtgcggcttggccaccttattttccttagtctccatagcccatggggtccatagggttagcagggggcgcgtcctttgtctccttaatctcaacaaccacagcatgtaatgtctggaacgccttggccaccgactccaagtgctccatgcacaatttgaccgccttggtgggaccaatgatcccaacagccttcaactgctcatactggccattggcgccattcttaccatacttgaaggtatggaccgaaaggaccttgtcactgacaacgctgccattgtcaccggca

SEQ ID NO: 153921 - DNA, 1945 bp, Zea mays
  Clone ID: MRT4577_71955C.1
gttcaagctgaaatgaaggctgctaatgttcagcatccaatagtttgcattgatgttattaaagaaggaataatctctggccctcgtgcaggcctcatgaaggaagtgctctctgggaaaatgcttgagcagtctcaaacaagcaaaagcttaaggcactttttttttgctcagcgtgccacttcaaagattccaaatattaccaacataggtttgacagcacggaaaattaaaaaggcagctatcgttgggggtggtctaatgggatccggaattgcaacaatactgatattgaacaactttaatgttgtcttgaaagaagtaaatgaacagttcttatctgctggcattaacagaattaaagtgaatttgcaaagtcttgtcagaaagggtcaacttactgaagaagattatgaaaagaagctttctctgctatgtggtgctcttgactatgaacagttcagagatacagatgtagtaattgaggcggtaattgaggatatggtgctgaagcagcaaatattttctgaccttgagaagtattgccatcataattgcatatttgcaacaaacacttcaacaatagacctgaacataattggtcagaagacagcttctcaggaccgcattgttggtgcacacttctttagtccagctcatgtcatgtcactgttggaaatagtttgtactcatcatacttcctctcaagttattgtggacctgattgatttggcaaagaaaatacagaaaacaccaatagttgttggcaactgcacaggtttcgctgtcaaccggatgttctttccttacgctcaggcagcttcttttcttgttgattatggtctggatgtgtatcacatagatcatgtgatcacacaatttggaatgccaatggggcccttccgattagccgatcttgttggttttggtgttgctattgctacaagaaagcaatattaccaaagttatcctgagcgaagttacaaatcaatgcttcttcagattcttgttgaggataataggacaggtgaatcttcttgtaagggcttctatgtatatgatgataaacgcaaagcctctcgagatcctgattttgggaagtacattgaaaaatcaaggaacatggcaggtgttatgcaagatcctaagctgatgaaactaacagataatgacatcgtggagatgatcttctttcctgtggtgaatgaagcctgccgagtgcttgatgagggaattgctctcaaagcatctgaccttgatgtagcttccattatggggatgggtttcccttcttacaggggtggagtaatgttttgggctgactcgcttggtgcgaaatatgtgtatgacaaactggatgcatggtcgaaggattatggggagttcttcagaccctgtgaatatttagctgtgagagctcgtcagggtgcatccctggctgccaaggttgatggtgtcaaatcgcgactctagggttttgttgttcatttgtccggacatgcttatacggactttggcctcaatgacattgagatgttgtgaaaacccttgagcaccaactgttacaatcatgcagttgcaaaacctgcacaagtgaattatacggaggcctagcgaagtggaaattgcatgtgccttcgtgggattgctgaggatctgcagcaggaatttctctgaaatattatgtgcagttttctgaagtgatgctgacaactttgcatagaatagttacagggagtttctcctagacgttttgcgggaatatactttgttgcagtggattcttatttttttaaaaataaaactcgtgaaatccatggtcgtatgtaccacctaacccccgttctttttgaatatttgtcattcgctagttaattttttaactaaaacacgataaataaaaaataacggagggaatacaacatttcagttcgatcatctgctc

SEQ ID NO: 153922 - DNA, 324 bp, Zea mays
  Clone ID: MRT4577_71956C.1
cccagcccctacactcccggcggcggcgcattagcagcagcaccagcacccgaggatggggaagttcctcaagcccggcagggccgtaatcctcctgcagggccggttcgccggcagaaagccggtaatctgccccttgttcaagaaggcaacccgcaaccgcccttacggccactgcttcgtggccggcctggccagtaccccaagaaggtggtccgcaaggacttggccaagaagacacggaagaagtcgcgcgttaagtgcttcatcaagctcgtcaacttcacccacctcatgcccacccgctacaccctcgacgtcgac

SEQ ID NO: 153923 - DNA, 191 bp, Zea mays
  unsure (1)..(191): unsure at all n locations
  Clone ID: MRT4577_71957C.1
aactaggcattcggctccacgcgtaaagcctccgacttgcaccttccnaggagaagggatcctgtcttagggcaggcacncaccttctgcgccgagcaccgcagactcaactaccgcgacagccctgtcccctacgactaaacgcaccactgtgcgtcgctccaacaaaaccacaaacacgagcacagaca

SEQ ID NO: 153924 - DNA, 229 bp, Zea mays
  Clone ID: MRT4577_71958C.1
cctcccccttttttttttttttttctttgcaaactaaaataaaagaatcacatatatcgcgcctatttatattctaaacaaactatcataaaatttttcaccacagcaaatctaaccttgtactcaacccaaccaccgaaatctccaaccccaaccaataaatatcaacgtccaaacctcccattggtcacaaccatacccaacccagactttttccacgcccaccatc

SEQ ID NO: 153925 - DNA, 436 bp, Zea mays
  Clone ID: MRT4577_71959C.1
attctacagttccctcttcaagctccaggcggcggcggctcgcaacctcatcccgcctctacgaccgcctcatggccgccgccgcgtcagcaaaccccggcacagcgtacaagctcctcctctcctgccccgaaggcctccctcgatcccgagtttgtgtgaggtttgatccgtccttcgaccggatcccccacccggacgcatccctggaggagtctataggcgagatatggaatcaaaggctccagcagaacccatcgctgtacaacggaacgaaatttcggtatggagggcatgccttgcaccgcagtgatgagtcaaatcctgattattgtgtctcacttcattccggactcacagattataggacctttgttggaacaactctcagtccactgtgggagaaatttttggactcctctccagatgactctgt

SEQ ID NO: 153926 - DNA, 278 bp, Zea mays
  Clone ID: MRT4577_7195C.1
gccggccgggtccgggatccaccgtgctcgctacctcctgccgccggctccgcccgccggccaccgccgcctcgtcgtcgcagaatttctcctcgcttatcttttctccatctctttcggattttgaatctgggaggaaattccctgcccgggtgggaaatctgttggatttgttcgtttgaaatttccatgtgttcttcggtatgaagtagttgcaaagatgtatgctttctgaaatttttcgtctgaactaaaaaaaaaaaaaaaaaaggccccta

SEQ ID NO: 153927 - DNA, 294 bp, Zea mays
  unsure (1)..(294): unsure at all n locations
  Clone ID: MRT4577_71960C.1
ttcctcctcatcaatccgctctccagccttgttcggggggagagaggagctgggaacacgctaacaaggacaacaaggatcatggggatcgggcgcggccacctcctgctgccggcagcagccgcctgcctgtgggcgctgtcgtgcgcgctgctgctgcgcgcgtgccctcaccgcgctggcgccncctccgggggggggggggggggccnnctcancacgcgcggcggccggctctaccggcgcgcgctggcgggtgtccccgccgccaggcggctcggggccggcccgctt

SEQ ID NO: 153928 - DNA, 368 bp, Zea mays
  Clone ID: MRT4577_71961C.1
gcggaccgtggtctgaaactgaaacagccttcactaccattccccgctgacgctcgctgctcggaacacctgcttgtcgtttctactcccagcatgcttatgagccgtggtcgttccttcttctgtttcttgctttgtctttgttttctaattttttttttattgtttctttattttttttttcttctttttttttattatttttttatttttttttttcttttttatttttttttattctttttattataatttttttttttttttttttttttttttttatctctattttttttattattttcttctttatatattcttctttactgtttttttttttctattcttttttttttatttataatttt

SEQ ID NO: 153929 - DNA, 429 bp, Zea mays
  Clone ID: MRT4577_71962C.1
gaacatgctccaaacatgattcttggcgggccattgtaaggaaacatacccgggggggcaaaacaagcttaaaaacagggcaaaacgggcccaacgcagtaaatcaggggaaaccgcccgggagtctatacataggcctgcactatacacacaggggggaacactgggccacacacccaaactaaacacaggcaaatgaacccacaacaccccttcacaaaaggcccagggggtgacgtaaagccctggtgagtgccagacccaggaccaggggccaaaaaagcccggctcgggacaacctgtaaaccacctggcagcgaacggggggccctgaccccctggggggtgagcctaagcggaaaagccggtggcgaaattctagaaaatggcccaacactgcaaccctggcctcttggcccctgcccccga

SEQ ID NO: 153930 - DNA, 155 bp, Zea mays
  Clone ID: MRT4577_71963C.1
gccaccaatgggccccggggccagcgacctgacagttacaggactgaagtctttctccagcccctccctctgcagcctgaacaccctgctagcaggaacctcacgcctaccacatgcctcgagcacaggcaaccttggcctcctctgcagaagtg

SEQ ID NO: 153931 - DNA, 656 bp, Zea mays
  Clone ID: MRT4577_71964C.1
cattgggaccctcgaggccggccgggaagcatgtcttccagtcaatcttcagttctacatttgtctattctctcccgctgtgcggattactttctctctacaacactttccaaaaacaccaatccattaatcacaccctaaacaccacatttcgccaagatgcagttctccatcaccgccgttctctttggcctcgtcgccatctcctctgccgccatcaccgatgtcgagggcgtccgcaacactccccgcaacgtcattgagactcgccaggcacctgacggcacgtgctgtttccccaacaaatctttgaagcaggacgcttgcactgtcaacggtgccgctggcaagtgcgtgcctggaggtccagctgcatgcaatggcgccttgaactgcgttgcaaacaaccaattggtgtgcgacaacaacgttcccgagcgatctggtgtcctgtgccgcttcaaggcggccaatggcaaaatccaggacggtgctaatcagattaccagcttgtctcaggccaaggtcaattaaatggaaagatgttggtagacaaatgtatgtctggagttgacctgtaaatttttatagcaagtctcagtttatagacaataccacaacaacttgcaactaaaaaaaaaaaaaaaaaagcggcc

SEQ ID NO: 153932 - DNA, 667 bp, Zea mays
  Clone ID: MRT4577_71965C.1
ccggccgggcttgccgccagccagcccattaaccctcgttcctgtcgcgcagccacgacctccacttccgcatcttccccggcggcggcgcggtcagttgaaccatggcggactccaaggccacctcggcggtcaccctccgcaagcaattcgtgcttgaggtgatccaccccggccgcgccaacgtctccaaggcggagttgaaggagaggcttgccaaggcgtacgaggtgaaggaccccaacaccatctttgtcttcaagttccgcacccacttcggaggaggaaagtccactggtttcggcctcatctacgacaacctcgaggctgccaagaagttcgagccgaaataccgcctcatcaggaatggtcttgctactaaggttgagaagtcccgcaagcaaatgaaggagcggaagaacagggccaagaagatccgtggtgtcaagaagaccaaagctggtgacgccaagaagaagtaaacgttcgtttacatttgtattactgttctgggctctgggtggtctagctgcaatgtcataattatggtcgtgttaggttttgttccacctttggcactgaagtgatttttttgtaattcctcggcactgaagtgaagttttgtcagaatattgcctcgtaacaaaaaaaaaaaaaaaaagcggcc

SEQ ID NO: 153933 - DNA, 1041 bp, Zea mays
  Clone ID: MRT4577_71966C.1
cttgccgccagccagcccattaaccctcgttcctgtcgcgcagccacgacctccacttcacatctcccccggcggcggcgcggtcagttgaacaatggcggactccaaggccacctcggcggtcaccctccgcacccgcaagttcatgaccaaccgcctcctggcccgcaagcaattcgtgcttgaggtgatccaccccggccgcgccaacgtctccaaggcggagttgaaggagaggcttgccaaggcgtacgaggtgaaggacccaaacaccatctttgtcttcaagttccgcacccacttcggaggaggaaagtccactggtttcggcctcatctacgacaacctcgaggctgccaagaagttcgagccgaaataccgcctcatcaggaatggtcttgctactaaggttgagaagtcccgcaagcaaatgaaagagcggaagaacagggccaagaagaatccgcggtgtcaagaagaaccaaggctggtgacgccaagaagaagtaaacagtcatttaatatttctgtattactgtcctgaactctgggtggtggtctagttgcaatgtcataattgtggtcgtgttagattttgttccaccctcagcactgaagtgaagttttgtaatttctggatgtgaacctacccggattggctgtagcatgttgtgagatgagaaggctattttgtcatgcagttgtgtcatttgcaagccaatccattttgtcatgcagttgtcatttgctcacctctgatccatatcagctttgatcgtgctgcatttgcgccaaaaaaaaaaaaaaaaaaaaaaaaaaaaaaaaaaaaaaaaaaaaaaaaaaaaaaaaaaaaaaaaaaaaaaaaaaaaaaaaaaaaaaaaaaaaaaaaaggggggacatttaaaaggttcaatttttatgtaccggggtatgaaaaggtataatgtgtttaataaggtaacaaaaattaaatccaatggcccggggtttacaacaggttaaacgaaaaaaccctggggaaaaccaacttaatccccttag

SEQ ID NO: 153934 - DNA, 491 bp, Zea mays
  Clone ID: MRT4577_71967C.1
caaggcggagttgaaggagaggcttgccaaggtgtacgaggtgaaggaccccaacaccatcttcgtcttcaagttccgcacccacttcggaggaggcaagtccactggcttcggcctcatctatgacaacctcgaggctgccaagaagttcgagcccaaataccgcctcatcaggaatggtcttgctactaaggttgagaagtcccgcaagcaaatgaaagagcggaagaacagggccaagaagatccgtggtgtcaagaagaccaaggctggtgatgccaagaagaagtaaacattcatttacatctgtaatactgttctggactctgggtggtctagttgcaatgtcataattgtggtcgtgttagattttgttccaccctcagcactgaagtgaagttttgtaattcctggttgtgaacctacccagattggctgtagcatgttatgagatgagaaggttattaacttgcaagccaacctattttgtc

SEQ ID NO: 153935 - DNA, 979 bp, Zea mays
  Clone ID: MRT4577_71968C.1
ctcgttcctgtcgcgcagccacgacctccacttcacatctcccccggcggcggcgcggtcagttgaacaatggcggactccaaggccacctcggcggtcaccctccgcacccgcaagttcatgaccaaccgcctcctggcccgcaagcaattcgtaagtggcatccatcagaccaacatcttccaatcattccgtcgattcaccccgtgtcgtcccccatctctcactaaatctttgcctgccctccctgtcttgcaggtgcttgaggtgatccaccccggccgcgccaacgtctccaaggcggagttgaaggagaggcttgccaaggcgtacgaggtgaaggacccaaacaccatctttgtcttcaagttccgcacccacttcggaggaggaaagtccactggtttcggcctcatctacgacaacctcgaggctgccaagaagttcgagccgaaataccgcctcatcaggaatggtcttgctactaaggttgagaagtcccgcaagcaaatgaaagagcggaagaacagggccaagaagatccgcggtgtcaagaagaccaaagctggtgacgccaagaagaagtaaacgttcgtttacatttgtattactgttctgggctctgggtggtctagctgcaatgtcataattatggtcgtgttaggttttgttccacccttggcactgaagtgattttttgtaattcctcggcactgaagtgaagttttgtcagaatattgcctcgtaacataattgccccgtccctgttctatttgtggcgcagtctgtttgttttgacatttgttttcgaggttgatccttatttgcattgcatttgtttatcgcttgattttttatttggaacaagtatttgtcacggctcatgttgatggtgtaaaacatgatagttatgttgtcttaagtggaccgtgtacaataggggatttgcattatgatactgtttgcagagttaagtttg

SEQ ID NO: 153936 - DNA, 1068 bp, Zea mays
  Clone ID: MRT4577_71969C.1
ggccggggggcggtccatagatcgtttgcagacgacttaaaattccacggggcattgtaagtggcagagtggccttgctgccacgatccactgagatccagccccgcgtcgcacggattcgtgtgccgccacccagccccttaaccctcgttcctctagccgtctcgcgcagccacagcctccatttctcctccgacggcggtgcggctagctcaaccatggcggactccaaggccacctcggcggtcaccctccgcactcgcaagttcatgaccaaccgcctgctggcccgcaaacaatttgtgcttgaggttatccaccccggccgcgccaacgtctccaaggcggagttgaaggagaggcttgccaagatgtacgaggtgaaggaccccaacaccatcttcgtcttcaagttccgcacccacttcggtggaggcaagtccactggcttcggcctcatctacgataacctcgagtctgccaagaagttcgagcccaaataccgcctcatcaggaatggtcttgctactaaggttgagaagtcccgcaagcaaatgaaagagcggaagaacagggccaagaagatccgtggtgtcaagaagaccaaggctggtgacgccaagaagaagtaaacagtcatttatatttctgtattactgtcctgaactctgggtggtcgtctagttgcaatgtcataattatggtcgtgttaggttttgttccgcactcagcagtaagtgaagttttgtaattcctggatgtgaacctacccggattggctgtagcatgttgtgagatgagaaggctattttgtcatgcagttgtgtcatttgcaagccaatccattttgtcatgcagttgtcatttgctcacctctgatccatatcagctttgatcgtgctgcatttgcgccagtgaacagtgattgctcatgaactagttttgggttgcagttcggtagttgtttggacctttgttttcaaggctagtctatttttcttacatttgtgaatgccttaatggcatgatgttatcagctgttggaacaagtatttgttaatgtcaaaa

SEQ ID NO: 153937 - DNA, 439 bp, Zea mays
  Clone ID: MRT4577_7196C.1
attgccttgttttaccagaaaagggaaaggcatgaccattgtgccaagataaccctaatgtttatacaaccatgaccaaatctgatccatatcccccacggggctaaatcctttgagacaaaacaaacggattttttcttttatgcctgaacaggaacacgggagaccaaatgcagatagtcttcaacattaaactatctactaccatgaagagaggaacttgcttgaaaacaggaacatggtctcactttgccatgatgaccttaacgaactcttcggagttgatctggccgtcaacaaccacttcggctttacgaatgatcttatacacctcctgacccgtcagcttgtcacctaggtgggccatgacgtgtagaacatcatcaccgaagatgaagccgtcttggaccttgacaaacactccgaagggctccttaag

SEQ ID NO: 153938 - DNA, 258 bp, Zea mays
  Clone ID: MRT4577_71971C.1
cccgagtcgaccgacgggtccgaagggcaagtacatctcccttctcttaggctgggttttcgggcggctacagagctgaagcgaccgggtgacacggtaggttggaggcaccgtcgcactgtacactctgccagttctagatgagaaacatgaggacaacgtacatgcactcggtgagaaggctattaatgaactacagcggggttatgcagttcacgatgataattgcctgatatacatagctatgcacctgcttaa

SEQ ID NO: 153939 - DNA, 319 bp, Zea mays
  Clone ID: MRT4577_71972C.1
gccagatgctgggaacctgcgtcgagttcatgacgcataacctgagccagagcgtgaagttctagtggtatcatcacagccagacggtgacgccctactgttggcatcagctcaagcaggtgcagccgcagtaccgccaccagctgatgtaggtgtagccgctgcaccgcatccaggagatcttggcgtagagcctccagttcatgctgctgcagcaggcgcaaatcgcgcagcaactgacgctgatgtgcgggctgatagagcagaatctgagcgcgaactgtggtctgcacgatgcgactcacatgcacatactatg

SEQ ID NO: 153940 - DNA, 393 bp, Zea mays
  Clone ID: MRT4577_71973C.1
tttcgacgctctccattctcgttctgtgggtgggtctcccatctcacgtcttggttcctctaaacctttcgtcttggttcctctaaatcgctttgttcgtcaactccagatcatggacaagttgttaaacacaggtttgtttttcatcggatttccattttactagatccgcttgtgcggggggggaggccccatattttttgaaagcgattgaggcgaagtaaatcttctttctgaggccacaccgtctaccggcgcgccgccgcctttttttttgatctcgcccgaggaggccgcggcttgcgggtccacgacgcccgtgtgcttcgcggtcggtcaccattttgtccctggcgtctgggactactgtaagtgccggcctcgtggaatact

SEQ ID NO: 153941 - DNA, 675 bp, Zea mays
  Clone ID: MRT4577_71974C.1
ataccctagccgccacacgtaacgacacacacgatcaccatccctttccctactgtgctcggcctcagcggtgccgctgacctgggtcgacaattcctccgcttttactatttcgacatcaccctttcctctcgactgcgccaactccttgcctgcatcacatcctggacagcgcctcgctacactacctcctgtgagagcgcatcctgagccgacccgcagccaggacgacccacctccccaagtccggccccatctcccgggtataagaccatggacaccgaacacctagacatatcgttctctctgtctccaaggagtcatatgaagaacttgacccaaaacaatgatactaactgctacgctcaatattggctccgtatgattgctctgaacattgacctagctcggtctatgtagctgccactcttcgacattgcttgcaacaaatgcgattactaagatgacatcgtgacatgtgctacttagttagtagaactaggcctgctcaataattacatcactgcattgaacttatatctcatccccgaactcattgcacttcatactaggacccgtattattgcaaatgtccccatgttatgctctctggaatgttacaagtcccacgtatttaagaaatcctggctaatgagatgcctgtgaaagtgcccc

SEQ ID NO: 153942 - DNA, 460 bp, Zea mays
  Clone ID: MRT4577_71975C.1
gtgggttgacaccgcgctagaaagggcactcatagtagaggatgttcatgaatcagatcatgtgttttgaagaagctttcggagacagcaaaagaaaatacactcattacctgattttccgagagagctttttttttttggagggggtaaaacgccgggcacacaaagggaatgtttgtttagaataaattgttagagacccgctaacagacttatggtgctagaaggcgagaagggcacaaaaacaataaatgagctggaacaccccattctctaaacaggggaggctgccattgtggggcaaaaataccaaaatcaagctgcaaaaaagaatgtacatgccatactggcgctcaaatcattgaaatgcagaattccatgaatcccactcacccataagatggggacaatgttaggacgcataaaggacccttgagagggagctagctcgagcacacgc

SEQ ID NO: 153943 - DNA, 500 bp, Zea mays
  Clone ID: MRT4577_71976C.1
ccaaccccaagggggggggccaagaacattttcgggcccaacctttggccagaaagggcttttgggcaaaaaaaattttttggaagcccagccaaccatagggggggctaaaaccggcccccccccagggcaaaaaaaaaaaaaagggcccgggccggaaaaaccaaatttgggcttctaaagggcaaagcctttttataaaaaaaggggggggggcctgggggaaaccaaagaggggggcccccgcccaaccaaaaaaatccaaaccctttttaaagccaaaccccccggaggggggggggaaaaaacccccccaggtttggggggaacaaacagggcaacccctttgaagctttcacctatttggcccggcggccccgaaggttggaaaggaaaaaaaccaccctggggcctttggggggggggccacccccggtcctcccccgtggttaacccgagtaaaaaaagtaaacccccccggaagtggttggccctaaaaa

SEQ ID NO: 153944 - DNA, 337 bp, Zea mays
  Clone ID: MRT4577_71977C.1
tttagattaattgaatctgtctacctcttccgattccttatatgcagtctgcatgtccgagctttaggcagagttcctaatatgtgctgcacccccctgtccgagctttagcctgaatttgtctacctcttccgattccttatatgcagtaacaaattgtccacgatgattgtagcatattactcattaatatacacttgtctgtgaacctgtttgtttgcttgtctgctgcctgcccagctaagcttctgggttttggcctgtaagactgttgttccaagtcagtcagaccatcagttcaccgtaccgtattttctcatcgatctatcactttgaa

SEQ ID NO: 153945 - DNA, 374 bp, Zea mays
  Clone ID: MRT4577_71978C.1
tactaagtcgagagacttaatcctaggatgcccgcggcttgttgcgatgatgctccaagttagacatggtaaagcgatggctcctctccaggatggtcagggagttactagcatcacgatacagcctatccacattgtcatgagatgcaacgagtgctcgtttttcttcctgcaagcaaaaacatcactaagcattgaagcaaggagagcaaaaagcaggagcagccaaggaagtttacctcatgtgccatcttctcggagtcgagctgtgcattcagagaggaattcagggagcgagcaccgtccagaaaagcagaagtttggattaagtcggcctggctctgagaatacttctcttcaatgtcagagaaccg

SEQ ID NO: 153946 - DNA, 795 bp, Zea mays
  Clone ID: MRT4577_71979C.1
ttttacaataacataatttacattcataagtataatatagaaagagtagttattacataatcgggttctgagtgcttaaacttattacatcacaggaaggcaaaacaccttccagaggtagttcttagttttgttcctcctgtttggaacaaccttggagcagaaacaacaaaactcagcagtttcatcaccttgtgttgtaggagattctgtttccacaccgcagatgtcgaagtaaaaattgttctccaccggaggattctcggtctgagagacaacttcctcctctactacggattcttcctcttgttcgagattcatcgtgcacagacacacgctcgctgcagcgtgtggctccacggtggaaacacgatctccggtgaccaattacctgggtcccggccaacctttgttcgaatcaagcgcgcgtacaacatccacggggtctggagatcatccctagatgttatttcgaggcccaaaccgttgaggcaccgtgatcccccgacaaccgccgtgatggtccgcggtttcctccttctccctccatggcggtctgcaataggggttgggcgacaggtgtccgatttggatgggaatagcgggatcgaggttttatagatgcgaggggatgagcgcaggctcgagacggtcgacatgcgcgagcggcggagatctagcggagctcgcaacaaacagagcaaggagaatgacctgacaggggcggatccatgagccagcgaggaatttgttcaggcgcgcgcggtgttccccggccggcctcgaggtacccaa

SEQ ID NO: 153947 - DNA, 462 bp, Zea mays
  Clone ID: MRT4577_7197C.1
atgggaagctccacctcgcccgaccccagggctcggactcaacctcgaccccagaagacggactccgcctcgcccgaccccagggctcggactcagcctcgacctcgaaagacggactccacctcgcccgaccccagggctcggactcaacctcgaccccggaagacggactccgcctcgcccgaccccagggctcggactcagcctcgacctcggaagacggactccgcctcgcctaaccccagggctcggactcagcctcgacctcgaaagacggactccgcctcgcccgaccctagggctcagactcagcctcaacctcggaggagcctccgcctcgcccgacctagggctcggaccgaccacgtcacagggggggccatcattaccctacccttagctagctcaggctacggggaacaagactggcgtcccatctggctcaccctggtaaacaagtaa

SEQ ID NO: 153948 - DNA, 419 bp, Zea mays
  Clone ID: MRT4577_71980C.1
ctcagacccacagctacctacagccgagagagggaccgggcagaatcccacggctcggaacgacttcgagttggcatggttgctgcgcgcaggcatcggctgacatcacatagacaatgctgaaatgctgttgctagtgctctgtgctagcaacctgaatggtgaccaagtggcaaccatatgttttcacccaatagggagatggccctaccggtgtcaccggaagacgtctctggatctacaagcctggccttcatgggttacatgtacatgcactgggagacaccaccaatggatgcatgtcaacttgaccacactacactactgctagcaatgagcatccggcaccatacgatgagaaccgccatgctggtgatcatggcaacgagacagcttgagcatatggagctgcttgtatc

SEQ ID NO: 153949 - DNA, 332 bp, Zea mays
  Clone ID: MRT4577_71981C.1
cacgcgtccgaaagctcagggaaaccctaattaagaccttgcagtactacataaatattcacctccacaagaaggttatactttaccatcagcattttgaccctttaatacataatgcatcacacatatcttttctacaaaaatcccatatttcacacaggtgattaatatctcatcaacatctaacatctttttacatcgcaattcaaaacttaaacctagatataaaattccatctaacttaaaaaaaattacactatcaatccaaaatccacaaaaccttactcgctatatactctacaccgattcaactcgcttaaacataccttaac

SEQ ID NO: 153950 - DNA, 130 bp, Zea mays
  Clone ID: MRT4577_71982C.1
cgattcgtcgaccacgcgtcgcacctctacctcgcacctcgtttggacttatggcatgagaatgttgaatatcgcttacagagaggactttacgttcggcttatatcattaccagagtatgcggatattt

SEQ ID NO: 153951 - DNA, 375 bp, Zea mays
  Clone ID: MRT4577_71983C.1
ttccttaagcagtggtaacaacgcagagtactttttttttttttttttttttttttttcatttaatcaaaaaaaaaattgagcatttttaccattttatcacagcaatggaagaatatacaaatggatgactgcctacggttgccctaaatcgcaatttttgaacaaaatggtccaaaccttggggggcccacgaattgtaagcttctgggggggaatataagaaaacgagaaactaccgaaagaattcccggaaaaaaaaatggccggtttttggcttttgtaaggggttagcctcagcccttgtttgttagcccgcgtcccttgcggtgttaccactgtttaagggcgaattttggcgatatccctcacattg

SEQ ID NO: 153952 - DNA, 320 bp, Zea mays
  Clone ID: MRT4577_71984C.1
cacgggcggatcctacccggcgaaacacaccttggtttcatcagatacagccctcccttgagggcgggggttttttgacggacggagcgctcacaaagaacatgtgcaaccttatgggtatgccagagccataggaaagagcccaacgtgcccacatggcctggaaaggaaccagaataaggagctaaaccacatgagccaatctggacaaaaccaagcccaggggcagaagaacagaacccaagctctatccagggacgaagcattgctgagggaggagattaggacctgcacgaacagcctgagaaaggaaccaaact

SEQ ID NO: 153953 - DNA, 309 bp, Zea mays
  unsure (1)..(309): unsure at all n locations
  Clone ID: MRT4577_71985C.1
aacgggcccncagattttagnataaaacgccacagggaaagccaaaagaccggcgggcgcggcaaaaaacgacgaagagaacaccaccccaccaaagcgccccaaacacggcaagaagcagacaccgcaagacggacgacgaagaccaagaccgcacgaaagcaccagcgcgcgcccacgaacaanggggaggcgacgcggaggcaaaaacgccgccaaagaacaccancggggcggagacggcagaagcccccacaccccaacgaaccgccgggcagcacaaagaaccacaaacgggcaaggaccccc

SEQ ID NO: 153954 - DNA, 639 bp, Zea mays
  unsure (1)..(639): unsure at all n locations
  Clone ID: MRT4577_71986C.1
ttaattcggcacgagggtttcgtagggtctggttcggccgttggtcgataagtcggcgggcgatgggggaagcgccgcagcccaggtcgccgccgaggtacccggacctgtgcggccgccgccgcctgcagctcgaggtgcagatcctcaaccgggaggtcggcttcctcgagcaagagatacagggactcgagcgcattcagcccgtctcgcgatgttgcaatgagtaaataataaaaaccctctcttccccctcccgctctccgctttctctcgtctggaactggaactggaactcaaacatcgtcactgcaccattattttctgttatttcattttagaatcatttcacttgatattcagaaataagcagttgtaacagcagttaccacttcatttgtcgcgacaagaaaatagggaaaaaacaataaataaaatatcttcatttgtggcttgatattccttgaccccacgcattgcattcccccccgggaagaaaacaggctcacatgaacagcgacaagtacactgtagttnttcttgaacgtttgcttcgtgtactaattatatcttgtcctggtcgtctcatactccacatttggactgttcacacatagctcagattccatttacattcct

SEQ ID NO: 153955 - DNA, 226 bp, Zea mays
  Clone ID: MRT4577_71987C.1
tgggaccctcgaggccggccgggccgggctacctttcccgtttcaaattttatcatgtacttcctccttcaatgtttctgctgccagaggttttcccagtgatcgttgagtgctgatcatgttgtccaatgttcatgcctgcagtattaacagatggccactcttttcctgtgaaattgttaattgcatttgagcaaaaaaaaaaaaaaaaaaggcccctagggcc

SEQ ID NO: 153956 - DNA, 313 bp, Zea mays
  Clone ID: MRT4577_71988C.1
ctcgactccacgcatccgagctgatacatatcatctttgagaatgtcgatctcatgcttatcaaatttgaacaagaatgatcgtctggatcatttggtgatctataccatgtgacgtactgtactcaaaatgtacctatcaaagtactcaagccttagcgtattagcgttgatattctacgtgagtatccacagcaagattatataatgacacaattttttaacactacagtattccactttatttcaccattcacatcacatccttattactctattatcaccaacaataatcattccaattacatcaatta

SEQ ID NO: 153957 - DNA, 708 bp, Zea mays
  Clone ID: MRT4577_71989C.1
atgcatctgtctcctctcctcgcctcggcttggggggcgcgttttcgccgtctctagcgcctgccgcgttgatgtttctgccctccccgtcgctgacctagacggcgaacatgcggcaatatatcctattcaatacaagggcgatatttgctgacttgccgaacttcaagaccatcttgggccagcatcggcggccggccattgaatcagaggaacacgaaatccatttcatcgatgaagacctctgcaggaaccacgagacggccgacatgccaggcaggcacttccccaacgtcgtcaacatcggcgtcaattatgctgtggaggccagcgcggcactccaacatgcgcacttagcgagtcacatctagagcgtcgccaagggaccatcgtctcgtcacgacggagatgaggtgcgtgcacaaggcttcgaagttactgaaggccacctcttatgatgaaacatgcatcatatggaagtcgatcttctacaaggatatagatcggagccaacgacaacgttcactccactatgcaacttagactacgacaacaccgcggtatgcttgtggccgcctacaatgagatggatcggcaggtgcccgacttggatgaaccatgccattctatgcgactgtgttgcataagcggatcgatatctgctccatcgcacagctgtctgtccgccaacgatatttgaatgattca

SEQ ID NO: 153958 - DNA, 611 bp, Zea mays
  Clone ID: MRT4577_7198C.1
cagaaagcattctaccactagaccgaccgcaccaggtgaagtgggagctttgcgctaagggctcattagcaaccatgaagagcaccaagctcgcggcgatcctgatcctccaggccgtcctggtcatggggatcctctcacacgtgaacgccgactatttccccaagtgctgcaacagttgcaggtccttctcgggggtcgacgtctgcgacgacgcccacccccagtgccccaagggctgctcggcctgccgcgtggtgacgcccagccctcacaagacgttccggtgcgccgacatgaagagcaccgtcgacggcacctgcggcgggccatgcaaaaagcactgatccgttcagggcttcaggctcagacgaggtgtgccgcctaaaataaagctcagatgagatgagcagtcatggtgcctatgcttgtgtgtgggtcgtgctatacggccaacagtatgtataatgctatcgtcgtgtcttggtcaatgtgttttctctctcgagaaaggctggtggtgctagtacttgttcacctacctccgtgaataaacacatgtgatgattgtgtgtgcctactcaataacatgagaaccagttctcttgtcg

SEQ ID NO: 153959 - DNA, 184 bp, Zea mays
  unsure (1)..(184): unsure at all n locations
  Clone ID: MRT4577_71990C.1
cgggcctaccacacccgaccgttcaaacgtacaacaaagccagcnaccaggggaccccttatacanccttttcgacctaaaaccccangcaaactaatacacaagaaaaacctgacacaaaacaaagtaccaaactatgctacttgattaactaataactaacaaacatgcttccgctgcattg

SEQ ID NO: 153960 - DNA, 285 bp, Zea mays
  Clone ID: MRT4577_71991C.1
gtctggctttcagaattaacatacaaggttgccacacctagttctgcctagctttatgtcttttattccagtattccaccaaagtttgtttgtctgcattccagttctcaagtcttaagataaagattgtacttgacagtttagtatatccataaaactatttgaggtggttaaggttcttgggttcattttccttaatactttgctgaatattgtagattgtaggcaatgaaaaagtctactaaattaggaaaaccttgaataattaggtatcctaggtaagag

SEQ ID NO: 153961 - DNA, 159 bp, Zea mays
  unsure (1)..(159): unsure at all n locations
  Clone ID: MRT4577_71992C.1
cggacgcgtgggtggcggaggtgttctccgtgcgcagcanttgccgccgtagaaagatattattccacctttcgaccaatttccttcccctaatcctctaatgttccccatatactcattttttatttacatcattttctacctttttttttttacctt

SEQ ID NO: 153962 - DNA, 802 bp, Zea mays
  Clone ID: MRT4577_71993C.1
aaaaaaaaccgagccttgagatctctgttgacccggtttagaaccttttagggttaggtttttaaaccctaaccctaaaagtcgatctgtttttgctatctcaaatttcatgtgtttggccgagactaagtctctcattggccgaaaaccctagatttagggttatgtaaaccctaactcgagagttctaagattatttgtaatctattctaatctctctgttctcgggtcatgaactatgataaaaaaatgagttcaatcacatttatctgagacctttctgttatctcataaaactgattcggattaggagatgggtctgagaatgcctagaaatagataaaagctccttcgtgtagcaggaaacaacatgagtgctattggttagaagggatgagttgtgtttgctgtatgtgttggtcagagttcgatcactatgtggcgtcttttttggctattttatttattggctggatggctgttggcagaaccaggggaatgggaaaggcaaagggaaagagagggaatgggaatggcagcgggcgcgaaaaaggggacggggaatgggaaaggaaagtaatgagaatgtcagccctcacaaaaaaggggaatgggaaaggcaccggcgcaagacaggggaatgagaaagggagaacagggaatcagaatggcagaacaggtactggcagcctaccccttgctgccttaataagtagtagagaagtgtaaggtgcgcagtttgcttataaaatttagtgggccgattttatgtgattttgaatttattgacgctccattcttt

SEQ ID NO: 153963 - DNA, 2382 bp, Zea mays
  unsure (1)..(2382): unsure at all n locations
  Clone ID: MRT4577_71994C.1
tctttttgcaagcctgcatctacctcattggaagctcacgtggtgttcgatgaaaaggagcaaagctggaacttcattttcgcggagtacgctgcagcagctggacatcatcatctctcaattgtatggcaaatagcggaggattactcccattgcgaatttctgctccaactccccatatactgccccatgcctgctttccgtgctgtcacacaagttcagcaggatgctgttggacaaggacagtcggtgcctggggacaaagttctcaacaccctgtccatcaggtgtttgacgaattgctttagcatcatacagtgtcgtttcttgcactcgtgcaattgcagaacggatgcagtgcagcataggcaatcatggccaccgcctgtacagtatgggatactgggtgatggtgttcaagtctggcttccgccttggccaccacctgtttgggaattctggctgtcactgaagattactggtccacagatgatgcattcggtaggatactttggattgccagttatgccggcgacatgtattacaatttcagagattgtgtctggttcaagcgagcaaatatttcctgaaatatttctgcaaagcttacatgagtgcagagtttgtcttagtgaaaatactggcagaagtttactccagctcccatgccaccatttgttttgcttgatgtgtatgaagtctaattgcagaattcatgtaatagaagggaatttaacccaggtctggttaagagaagatgcagttgcttacttcaaaaatatgtttgatggtggcctgaggccaacctcaaatgcatttaacaaagttatagatggctgggtgaaggttgatatgctcaacgaggcccatgggttctttgatatgatgcttgaaaaggacatagatgatgttacggtggtcattttctactttggaggacaacatgtgggctgggaaatgaagacagaatggttgtctaatggttggctatgtttggtatgtggtgcatctgatactcaagagcttcctctacatttcattaaacttgcaaagtatacgtacacatctgactgcatgttcgaaaaaatcggatatggcactgtgataaaggctttggtttacatgctgtccttactatttgttcgaagagattattgcaacgaggaaccattttttaggaatgtgcttgagcattatcaatgtggcgttgagatgatacggagggatttatttattggccattggaaacattatcttattctggctataccacttcaaccctgctttgatggtctcataaatgttggcaaggtagccgcacgtaccctccaagacactgttgtagggaattcttgcattgtgtctagacagcctccatggccacccccaacgcgtcaccatttcagaactatgcatgctgaaactgtggcaaattggaaccacttattcagttggtgttttgcaaattcagatttgggtgaattactgactctcaactgccctgctgacagagcaatggtgctgctgatgtaccaaattgagttgagactgctcaattgggcctgggaagacgagtgtgttttcaacctgtgtctacttggattacacagtgctgttcatagcagcctagccaatgcttataaatcctggttgataacaatgattcaccgaacacactcaattggccaagatcatttttggcataacgtggataggtgtgtggtgtgtggaattaaggatagatgctgtgcaagattggcaaagctagttttatctgctacactgacacaagattctggcaagctttctcaacttgaattgcaccatccattgttgttgaatactcagtcaagcggcttgaggacaagccgcatttcaagcagtggggaatgtcagcatatcatcttctcctcaagtcaaagatggtaccagaagaatacggacaatgctgctacgacgacgatgaccatacatggagtatatgaagatggaggcatcgcgggaaaaggcacaggcgtgccaggagagcgggctcggtgtctaatgaaaactagcgtccgtctagcttgggctggagtgggccttgtaaatgttggcaggtcgattggtcgtgtggaccgagtggtcgtgtggttacaagtaacacccaaaccctggctgtaaggggtcatgaacaatttaggctatcagatatcaaatcaaatcgtcttcctcgctgctattcccttctccaagtcttattctcctctgagctctttctctccgatcccccttcccaggtngtgctaacactatgtgatcacgtcgctggagtagcagatttttagagagccatgtgctgcattgaaggtagcttancatanncatctttgtttatttatt

SEQ ID NO: 153964 - DNA, 411 bp, Zea mays
  Clone ID: MRT4577_71995C.1
gcaaaatactacattgctagttgaatattcctaacgtttttgtcccataggaaagaatgaattaaacaggccaaacagatcaactttaaattgaaaaaaaaaaaaacaaaaacaaacaaacaaaaaaaaaccttattgttgccaggaaagtagatgcataaatgccactctggtatcctggccatcttaaagggcaattcttcttgatatggaggtagtaagtataacatattcaaattatctaaacgataggaatcataatattttatgctttttctagcagaattattggtaaaacaagaatacttctaaacataccttcattccacgtgttagaaagcaatattcgggccaggcacggtggctcacacctgtaatcccagcactttggaaagctgaggcgggtggatc

SEQ ID NO: 153965 - DNA, 345 bp, Zea mays
  Clone ID: MRT4577_71996C.1
taccctccctgtccggccgggagaccctgcttctagagcaagtctgattctcctctcccactcggcggcatctttcggccgtacccatggcgagcggcgacctggccgagagcctactagacggaggcggcggcggatcctacgcctcacatgaggagttcgaggagcgcgcgcaggagtcggatgacgagctgtacatcgcccgatgggtttggaacggcgagcaccactgatcggcctcgtcacgcccgcccttcactttgccgaagttatgacacttcactgtcccaggtttcctgaggcgaaacgcgttcatgtacccttgcaatctggagggggacctac

SEQ ID NO: 153966 - DNA, 1410 bp, Zea mays
  Clone ID: MRT4577_71997C.1
gttcggcatcattgcttcctggatacacgtataccatcgttttcccccttttcttcgcgcggctgccaactggagtaaaccttagcccactgatggcagaagtcccacgtagccagctgtcagcatatcatcttctcctcaagtcaaagatggtaccagaagaatacggacaatgctgctacgacgacgatgactatacatggagtatatgaagatggaggcatcgcgggaaaaggcacaggcgtgccaggagagcgggctcggtgtctaatgaaaactagcgtccgtctagcttgggctggagtgggccttgtaaatgttggcaggtcgattggtcgtgtggaccgagtggttacaagtaacacccaaaccctggctgtaaggggtcatgaaccattttggctatcagatatcaaatcagatcgtcttcctcgctgttatcttcttcttcaacccttcttctacctctcttctctccgatattcccttctaggtgctaacaccagcttggctggccgcatcagcatcgcttgaataaataccgccatctgtatgaagtgaggaggtgatgccaagcagatgtgtaaccatttagaatgcttgtggtggaccaactgcggacaagctgggaagaaggcacgaacatgtagcagctctctatcatcgattgcggttgcggcttgcaagcattctactcggcacaggacacgtaccgagtgaaagcaactgttcctattgccgtgccggtaagtactacactgctactctccttttcccacgagtttgaccagctcggccttggcagcttccatgaccactgggaaatcaacctccaaatagcggccccagaagtggttcttggaccaggtggcagatggaaaagccgggcttgatatgccatgcataatcctagcaacggcccttggcgtgaatttcgcaaacgaattgcttttaaggaacacctttatgtcagcttgcaagaatgggctgcccctttgtggctgagtacattggccactgtctgaggtggagtagttcttactaaagtactgtatgatcttcttttgaatgcacggagtgtgctgggagccagaacagccatcagtcctttggcaacccttgacagcaaagtttgctagatcaaacatcgcatccaatttactgatcttcgagttttctacttcagaaagccatcttgtgatatctgctgaaagcgcattcaagtcatctggcttctttaagatcacgtaaatgcaggctggatcttttaattcaaatgaaatttctccagagaactgccaagcatggtctctatcaatcaaagtgtctttatcaaaggaaggagtatccaagacaacttcttgttggtgcagcagcttgccacccacgcgtccgcccacgcgtaaacga

SEQ ID NO: 153967 - DNA, 195 bp, Zea mays
  Clone ID: MRT4577_71998C.1
gttcagacaagctcgtcgtatcaacctcctgttagctcatgcacaccgctgtggatctggggagcgtgactatgcttgacagcatcattatctcttacctttccttctactacgaccttaacaccgtcgaggcccgatggtaggtgagcccttaactcgttctgagatagcattctcaggttctttacatattgt

SEQ ID NO: 153968 - DNA, 672 bp, Zea mays
  Clone ID: MRT4577_71999C.1
attagagctcctaacttccgcgacgacaccgctaccggtgcgaagaagagtgtgcgagaacgtcgctgcggaattccgagcagccgaggctggtgatccccctcctctcttcccagccaatagctcctcccggcacacgcggcgagagcctgcattcactaggaatgacctctacaagccttgccatctacactgacttcctgtggctactatgtctgggatgactcgatggactacagcggcatagaatccagaatccacactcgatgaagaaggatatccgtggaggctagttaccgtccttgaaactccctcctcctgcccttggtgggatcgcgtaatatgcgatgactcctcgaggactcctgacactcaggtctgctaggacccaacatcttagcgaagaagggaggagaatgcacgacaagatctggaggatgagcctaaatatcgctttcacaaagtagtgctctcaaatatgaatgtgatgatgaggataactgaaattcagctgcagcttgggaatatgaagaaatatgcttctgctatccgagacattgctcatacccagattaagaagatgaaggacttgaagcatgatagggctcacctgatgtagattcacgtcaatggtgctaccattgctgacaaggtggactatggctacaaatt

SEQ ID NO: 153969 - DNA, 538 bp, Zea mays
  Clone ID: MRT4577_7199C.1
gtttctgcttttcatctcatagctgcatcctaacccatgaaaagagaacatttttttttatgaaggataagataaccattgttaaatacattttgcattgagggggttcttatttttttaccggaaagatacctggattatactccctccacaccaaatcattagacattttggcttttctagacagtattttttgggctatgcacttaaatatacacaatgtttaggtatatagtaaaatcagtgtttctaaagaagccaaaacgtcttataatttggaatggagtgagtgagtgtttgtcttctgttttgttctgtgtttctgtgacctgcatttccgatccattacactgcattttcactatacatattgaaggataattaaatggtatccaatcaaagtattgtatatgtgttgatgttaacaaagttactcttctgcatttcatctgatatttgtatagcgtcttatgacaacgaccgtgacctctgttctggattgtgagggtctatatataaatgactgattaaacataac

SEQ ID NO: 153970 - DNA, 320 bp, Zea mays
  Clone ID: MRT4577_719C.1
cagaagcaaccatgcttggatcggtggcttcaggtacacactggcaacggtggttggataagtttataaacatggtccgtaggacggatgcacattatgcgtggtatcgaaaacctctaaccgagtacatgatttatttcctggtgaagtacaaggtaatcacagcgccggacaaaataagtgatgcgtgtgaatcctccttgacgaacagattttaccgggtcttggttttggactgcaacttggatcccacgatggcatcttctgacttattactgaccgtggtgaactttgcggtggaggaagccttaatagcctcc

SEQ ID NO: 153971 - DNA, 241 bp, Zea mays
  Clone ID: MRT4577_71C.1
agcagtggtaacaacgcagagtacgcggggtttagatcatggacagctttgggatcaatgtagcttgttgcttgtcatggtatcgtagtgtaggaaaatttgacatctgatgttaaatcactatcctgctttcccctcaaaaaaaaaaaaaaaaaaaaaaaaaaaaaaaaaaaaaaaaaaaaaaaaaaaaaaaaaaaaaaaaaaaaaaaaaaaaaagaactttggagttgttaccactgct

SEQ ID NO: 153972 - DNA, 721 bp, Zea mays
  unsure (1)..(721): unsure at all n locations
  Clone ID: MRT4577_72000C.1
ccggccgggactccgtctccctgtccaccggtgccgcttcccctcacccgctcgatttactgcccaatccggcccgcttcgccccgccacgaattttaatcaaccgtttggagcttgaatttgaattccagctcgaatcacccacccggccagctgggagcgagagcgttccagctcgaatcacccagcccgccagccgggagcgagagcgagctgggtgagctcgattcgatgcgttgctgagcgtggctcaaccgattcaggtcgggcggtggcgcagtcagagggatctgaaccctagcgccgtccggatctgtgacccgcgctgctcggcgcgtcggcggcatgagtgcctggaaaacgtggcgaggaggagaagcggcggggatatgagcggagccggcggcagcggggacgagttcgggcgggcggtggcgcgtgccgcagtggcgcaggcgctggaggccgcggggttcgactgcgcgcaccgctccgcggtggacgcggtcgtcgacatcctcctgcgctacatcacgcacnctgggtcggtccgccgccttccatgccaacctcgccggacgcgcgctcgccaacgagcttgacgtcatccaggcggctcgaggaggtcggcgccgacacggacggcttcgccggcgcggcggccacgggccactgcctcgtcagctccggcgtcgtcagggactttatggcgttcgttgac

SEQ ID NO: 153973 - DNA, 445 bp, Zea mays
  Clone ID: MRT4577_72001C.1
cgccaagtcagcagcacaaattgataggaatcggcagggtaatcttcaagatgaagaacctagggggattagcatctaggattttctagagtagctgctcgatggaaaggtaatccacgagcaaacaaagtccgactttcaaaaatgtcggcccgcctgaatatcttgagctgaggagtgctggactcattattcagttccctcaaaattaaagaagaaagacatcccctacctatccacagcggttctctctaaattgtccctgctatatcatttttttgtgtcacatcaacattccatctgctactttttcaatctccgcaacagttccccctaaatacttttcctataccttaattccaccattaaatattaattcccataactattcattatccgttacattttttcgtcaactaacaaaccataacttacacagaaatcg

SEQ ID NO: 153974 - DNA, 203 bp, Zea mays
  Clone ID: MRT4577_72002C.1
ttggaaatttcctacatacgcgaggagacgtttccctcttctatgaattgccgccggcgagcgaccggaccatcccgtacgacgacatcatgaggtggtgcattacgaatacagtccggcagcccgctattagatccggacacgcgcgccgagagctgtactgactagagaatgccatactggccggcgcccccacgcccggt

SEQ ID NO: 153975 - DNA, 264 bp, Zea mays
  Clone ID: MRT4577_72003C.1
gcgtacgctggctgagtggaatacgttatatttttgctggacacaacctttacgtgctgcgaaagataagtgccaatacgttagcaggcgtatatgttaggggggcggcacatcttggttccatatgtggagcttgagcagacctgggacacgtcattgcaaaggccgtagcaactgcgctcccacaacatgatatgcatgcaattcacaaaatgtccatgctgatgcaacgcgctagatcgttgtagtgacagctcagggaga

SEQ ID NO: 153976 - DNA, 611 bp, Zea mays
  Clone ID: MRT4577_72004C.1
gcccgcgtgagtggtaaccctagcttctcatgtctccgcgcctccacctccagtctccagccccaaggagtggcggcggcgcatcgtcagttagcttcgtcaccgttagagcccgaaggactctccctcggccctcgccgcctcgccggctcactgtcattggctgcatccgaagccggcagctcacaacgcctcttgtcaaacttcgacgactgctatctatctgtgctgctcatcgccttgttcgttgccgttgccggcgtgccccacggccacgcgccccacttcccggagtcctgagtgcctgctgaagttgcgtgtttgcgtagcgctcaaaatctgaaaggtcctagctcgcaatcgcaacggagtcttgccgatgaacaggatgtgttgactgctgttattgtgcttcaaacttcagagaatttgctgctgtgcagcctgctatgtcttaccgaagacttatgtccttgttaactctgtgaagactatgttgtttgctcgtcagtctatgtctaattgtcaatcatacacttgtgtattgtgaactgttctatttaaatttgtattattgcttgtggcaaaaaaaaaaaaaaaaagggggcccc

SEQ ID NO: 153977 - DNA, 661 bp, Zea mays
  Clone ID: MRT4577_72005C.1
tggtaagttgtaaccctagcttctcatgtctccgcgcctccacctccagtctccagccccaaggagtggcggcggcgcatcgtcagttagcttcgtcaccgttagagcccgaaggactctccctcggccctcgccgcctcgccggctcactgtcattggctgcatccgaagccggcagctcacaacgcctcttgtcaaacttcgacgactgctatctatctggtactagagttttcttcccaaagaccaatcctcttgtgaaacttcgagtctttgatgaataatgtctaatgcgttgctgcctctgcctgagtgcctgctgtagtgctgctcatcgccttgttcgttgccgttgccggcgtgccccacggccacgcgccccacttcccggagtcctgagtgcctgctgaagttgcgtgtttgcgtagcgctcaaaatctgaaaggtcctagctcgcaatcgcaacggagtcttgccgatgaacaggatgtgttgactgctgttattgtgcttcaaacttcagagaatttgctgctgtgcagcctgctatgtcttaccgaaggcttatgtccttgttaactctgtgaagactatgttgtttgctcgtcagtctatgtctaattgtcaatcatacacttgtgtattgtgaactgttctattt

SEQ ID NO: 153978 - DNA, 583 bp, Zea mays
  Clone ID: MRT4577_72006C.1
ctagcatccgcagttcccccgcccggacagcaaccgcgagccaggagtgagtgggttcttttatctgatattatcgatatggctagggcaggagtaatgtctacatggcacaactggctgagcacgcctgaaggtgtgaagagatgggtgtagtatataggagaaggtggctaatactgtctatggggaagagctcactgttgaggagcgcaacctgttgtgggccgcatacaagaatgtgattggggctcgccgagcttcatggagcatagcctcttctattgaacagaaggaggagtcccgtttgaacgaatagcatgttaaccttatgcaaggaataccgtgcgaacatcgtagctgaactgatcaatatctgcgatggcatcctgatgctgggtgactcccacctactgccttcttctactgctggtgaatcaaacgtcttctacctcaagatgaagggcgactatcacaggtatcttgcggaattcaagactggtcctgacaggaatgaatgtgctgggagcacgatgatggactacatggctgctccagacattgcgctggctgagctggcacctac

SEQ ID NO: 153979 - DNA, 572 bp, Zea mays
  Clone ID: MRT4577_72007C.1
gaagaaaaccgaaacgtcaactaagagctcggtttctatacaagagaagaaggaaagaagagcacgcgcactccatgcgactgtgcttctgcacagggcaaccaggccaccacctcccacctgctgccaccaggcgggccaaaccaagcacaccgaagcacagcaatggcgggcaacggaggccatcgtggagagcgacccgctgaactggggcgcggcgggggcggaactggccgggagccacctggacgaggtgaaacgcatggtggcgcaggcccggaagaccgaggtcaagatcgagggctacgcccctccgatcggccagggggaccgacgtcacctccgcaaaggacgcgggcggggacatcgactggctcgacaaggaggacacaaccgctgtataggccggaacagagtggatgcagagcaaggagtcttcagagcacagagaattgcgctgactcacccggagttggtgaggccgaacgccattggaggaaatgcgtgtgcatcagcctcaagcgaacaaatgagctatacctatgacgcatagaagagctatacaccagaaa

SEQ ID NO: 153980 - DNA, 217 bp, Zea mays
  unsure (1)..(217): unsure at all n locations
  Clone ID: MRT4577_72008C.1
tgtagtcngcacnaggccttggggggcgcggggggtatcacaacacctctccttttgattctaatctgaatatggcgatcatcaggtgggcaaccagctccaccgctctgttatggagagagaaccttcgcctctactctctgttcctcacctccccctaaagccccctcaccgggggatgtagggggctcttctttttctttcttctccccaacat

SEQ ID NO: 153981 - DNA, 605 bp, Zea mays
  Clone ID: MRT4577_72009C.1
cggacgcgtgggcggacgcgtgggcacaaacacacacaaatcagtagttcaatctctcctctcagctttacatctctgtatttacaagctgtttgcacaacccaaggcgagaagagccgaaggaatgtcggcccagcagatcgcgccggtgccggagcatgtgtgctacgtgcactgcaacttctgcaatacaattctcgcgctccagagaagaggcaacgtgttccttcagcatataacagatttattaaggaagagatacgaaggattaaagcaagcaacccagacataagccacagggaagccttcagcactgcagcaaaaaattgggcacattttccaaacattcattttggactagggccctatgaaagtagcaacaagcttgatgaggccattggtgcaacgggccatccccagaaagtccaagatctctactaagacctatatccacatcgtcctttgttttcctattgtaagtaatttgagataaaatgtatcttagttgtgtactagtttgtgagtggcgtacatatatatagatgagtgatatgatcatgatgtaaggaaataagacgtatatatatgtacgagaagaacatatc

SEQ ID NO: 153982 - DNA, 328 bp, Zea mays
  Clone ID: MRT4577_7200C.1
aaaaaaaaaaaccctggaaaaggggttttttttttgtttgggggtgggggcattagtaaaaaatttgtcaatttatccctggtggacagacagacagacccccggaagttttgggttttttggacaagcttaggaataagccttaagaggaaagagattttgggctgggagaaattcggggttgggggttctttaggtgccgcctggttttttaagctgcccattttcaggttgggggggggcttgggcagggggataagctaaaaaactggcttggggatttccggcaccaggtggaagatgaccccgttaacttccatgggggggt

SEQ ID NO: 153983 - DNA, 671 bp, Zea mays
  unsure (1)..(671): unsure at all n locations
  Clone ID: MRT4577_72010C.1
ttgggaccctcgaggccggccgggaaaaaataaacacattccttcttggttctcaaagatgctttccaacgtctttctcaccactgcgctcgcagccggcctggctcaggccctgccccaggccacgcctactccaaccgctgcgccctctggcaaccctttcgctggcaagaacttctatgccaacccatactactcgtctgaagttcacaccctggccatgccctcgcttccagcctcgctgaagcctgctgctaccgccgtggccaaggtcggatcattcgtgtggatggacaccatggccaaggttcctctcatggacacctacctcgccgacatcaaggccaagaacgctgctggcgcaaacctcatgggtactttcgtcgtctacgaccttcccgaccgtgactgcgccgctctggcctccaacggtgaactcaagattgacgacggtggcgtcgagaagtacaagacccagtacattgacaagattgccgccatcatcaagaagtaccccgacgtcaagatcaaccttgccattgagcccgattcgcttgccaacatggtcaccaacatgggtgtacagaagtgctcacgtgccgccccatactacnaggagctcactgcctacgccctcaagacactcaacttcaacaacgtcgacatgtaca

SEQ ID NO: 153984 - DNA, 1246 bp, Zea mays
  Clone ID: MRT4577_72011C.1
ggcgactccgaacgcaacgccgatcgtgcgcctcctccctcaccgcgcgccgccgtcgctcccatcggttcctttcaaccggtggatcaccccgctttccataaccgtttatccttggttgtgctcagcgtctggttccgccactggtcccatggctgccccgcgcgccgcggcggcgtcggcgaagcaggtgacgaggcagaactttgcggaggccgtgctggagctgagggcccacctggaggcatgcgactacgtggccgtggcggcgcagaagaccggtgccccgacgggatggcgccgcgcgttgccggtggacactgcggaaacggcgtatctcaaggccaagctcgccgcagagtcctttcagccactccagatcgccgtctgccccttcagacagcgcaactcttacccgtctaccctcgtcgcctacccgtacaattttcacttatttcctagagatgaactacagctcggaatgccttcatacagtttctcttgtcaaccatgttatttatcaactatagctaatgatggttttgatttcaatatgtgcatatatgatggtatttcttatctatcaagggttcaagaatccttagcaagggaaaagatctttactcgtcctcaccaattgttgtcatcaccaaacacatcagttgctgactcagttttcatgaatagaataaagtctaggatagtgaactggcgaaaaagatatgctgacccaagcaaaaaacatgatggctctttggttagttcccttagcagattaatattgggtgctgaaacgtatggttccaggcccagtatgagtattgatgtctgcagtgatcggcaagttcaattggtcttggaggcagtaaaccatatctctgatgaccttgtatctctcgttccacacaaagctggagttggtagggctgtgcgtgtgatctttactaattcgaaagaggataagaatcttctcctgatggatatccagaaattagaagatgaacaaaactttaaattccgtgggtttcgagaagttattgatctactatcatcttcacagaagccaatcatatcatacaggttctagatcgctctgacaatgctgcgcaccaaattcattgcacctcctccgccaaacatgcatgcatttatgtgttctctagaaatgggcttccctaatgctgttgatatcagccacctgtggaggcgaattggccctttgagagaagcgacgtatatacaagcc

SEQ ID NO: 153985 - DNA, 317 bp, Zea mays
  unsure (1)..(317): unsure at all n locations
  Clone ID: MRT4577_72012C.1
tttttctcccctttttttngcggccccgggggtccccccggtaatttcggaccgttccctgggggggtcccagttttccctatgggggggcgttttaaagcttgggaaaaaaatgggcatggttgtttcctgggggaaattgttattcgtttaaaattcccccaaaaataccggtcggtagcataaagggtaaaccctgggggccctaaggggggggcccacctacatttttttggttggtttcactgcccctttttcagtgggaaaacctgtgggcccccactgatattaaagaaagggccaccccccgggggggg

SEQ ID NO: 153986 - DNA, 183 bp, Zea mays
  unsure (1)..(183): unsure at all n locations
  Clone ID: MRT4577_72013C.1
tttattttttttnnncnnntttggggtttttttttttttttttttttttttttttttttttttttttttaattactgacccacataattattaagctggatttgttacacacaaaagccagagcaagcgaagcgaccacccaaagcgcttgcttagcatttggggatgggtttgcccgacgag

SEQ ID NO: 153987 - DNA, 295 bp, Zea mays
  Clone ID: MRT4577_72014C.1
ccggccggggaacgaacacagcaaagcatttagagtaaggcgggagagcacgacgatgggatccatcgttgataacattatggtacgtgggcgtccaaccttccgggccttgacgccggcgggacgagcaggcccccgaaggtgccgcccggttcccagcatcaagaccgaatacaacgggcagtggctgacagtcaggggcagatggtacgggcaatctaacggcagcctgtgctatggacaacagcgacaccgtgcgggaaaaagaactccaagcttccaccgtacagcgccg

SEQ ID NO: 153988 - DNA, 440 bp, Zea mays
  Clone ID: MRT4577_72015C.1
cccacgcgtccgtccacacgtgcgaggttctccagatgaacgctgtaaagggcacagttgtgtggtcgttatgcaacacgggactatgatagcgtgacaatgcgctcttacacttggtcttctcaggcctcctagaatgatgcaccggctaccacttcttaacaagcctttgaacatctatggcttgtctctggttactgagatcatgattgtgcccgagacaagcatggccagcatcttggactcgcacaacttgatgaacttcgacgccatgctcaggttcgtagcggtcatcaaactgatggacatcgactaacgtaatgtggccattgaacacgctcacataggcgacggcagggtccgcttcgttatcgacatcggtaacaccctcaactggtggacactagtcagcttgccgcgcccatgtctacagctgtggt

SEQ ID NO: 153989 - DNA, 311 bp, Zea mays
  Clone ID: MRT4577_72016C.1
ggcccgggttacccaaaaaaaacttttttttttcaggggaaaacaaaaaccaccggggcctggtccatttaaactgttttttttgacagggcgttggggggagggaacctttcccgctgggttggaaacccccccccccagggggaaaggcccccgggccccccaaaaaaaaacccccagtcggggttcgaaaccaaaattggccaaaaaatcaactagcccaggaaaccctgggggaaaactttttggagctcaagagccctttcaaaacttccccgctataaaggggttcccccccacgggcgaaccca

SEQ ID NO: 153990 - DNA, 559 bp, Zea mays
  Clone ID: MRT4577_72017C.1
cattgggtacctcgaggccggccgggatactcgccaaggcggtcttcgatctctctataatccatcaatgctggcgtcgtccgaccagcagcatctcaacactactggccaaaatgaagagaggacacaaagccctcattcaagatacgaatcctcgcatgctgaaggcgaacctgaacaatgaccattgagatctctcccgcatgaacgaccccttgcatgactatcgactacatgagctacatcgctctagtacgacactgtgcacggcaccgtggaagcaccatgaagcgaaagcgacactactccaaaagccttctctttgcggaaaaggaggcaggtgtatttggctgcaggaatgctgaggacaccacgaggagaacattacgaagctgaatatgctcgtagatcctactggagtgttaaataaccaagacaaggatgcaactcaatataatgccgaagcccagaacgatgaaaactctagttactagatacgatgccaccatgtgagcctctggaggcatgctagaaagagaacaagactgacattaacatc

SEQ ID NO: 153991 - DNA, 253 bp, Zea mays
  Clone ID: MRT4577_72018C.1
tgactctcctcttgtgcttctgctgtccccagtcgagtctcctcaaccctaggcactcgccctctgtcgcctcgcctcggctcgcggctccgatgccgccgctgctcctcgacccgcgcgactacctcggtgccggcgccacctcgtcgtggtgctcgtcgtcctgctcctcgggccgcgagggcgctggggcgctccgcgcgctgctgctcaggcttcaggggtgctatgacgctccctgccgctgcgcgga

SEQ ID NO: 153992 - DNA, 416 bp, Zea mays
  Clone ID: MRT4577_72019C.1
ctgatttcatctagccctctcgatgtggttaatgcacctacatacctgagacaacaggtgctgcaacagagtgtaccagctttgactcacctagctgtggcaaaccctgctacctacttgcaacagctgcttacattcaaccaactgactgtagtccaactctgctgcgtacctacaacagcgacaacagatacttaatccactagcggtggctaacccattgctcgctgcctttctacagcagcagcaattgctgtcatacaaccagttgtctttgatgaaccctgccttggtgaggcagcaccctatcgacggaggtgccatctcttcgactacatctgagatgtactcgattgtggcgccctcatagcgtcatgcgtgtcctagacttgctcaatatattgattgagatctat

SEQ ID NO: 153993 - DNA, 195 bp, Zea mays
  Clone ID: MRT4577_7201C.1
cattggtacctcgagccggccggaactttagctcctcccactgctataggcagcccatctgcgcgcgcactcctaagtcacaagtcctaagctagacatctgagctcgctcccattcaagcgccggcgccaccaccggaggtgctcgctggtcaccatgagctatgagaattaccaccgacgactgggatcctcc

SEQ ID NO: 153994 - DNA, 609 bp, Zea mays
  Clone ID: MRT4577_72020C.1
attcgccacagcgcgaatccgtctcccatgtcctcgacggctattccgacactgctgctgcccccgtcaggtcctccgatcgtcgtccccccacagggccaatagcagcatcaacgatccgcggagcatcgtcactctgcatatgctacagaacatgatcaacaacacctacttcattcaatgccaaccaagcacatacacacctacaacatcatcatcaagggcacctcgctgatacaccaacttcctaccacccaccactagcacatgcgcactagcaaggtcgccgtcgtctactcacagactttgcacgataccaacgtggattgcgatactgctgctgcattgccgctaagactggatatactggcaggttgaaggaacttacatcgatagacccgccctactattgacaacgtcccgtaaaggattatcccgtcatctactacaaggtaccactgcaagctcttgaactgaacctgcggtctatgccggatctgctagaaaccgacaccgggctagcctgccccactggcatcagaaacatgatcgacttacgcagagatcccaaaccaccgtggcgcatcatattaagctttgactggacgc

SEQ ID NO: 153995 - DNA, 269 bp, Zea mays
  unsure (1)..(269): unsure at all n locations
  Clone ID: MRT4577_72021C.1
ctttgtcgggngccgcgtccgccgnacaagcgctaagggggcaagtttacctggccgatgacgctcgcgtgccgcccgcccgctggtgggcgccgccaccnnggcgcctctctccaggnagaatcgatctagnactcttcacggctcatcctgactggttggtcgtacccgcgcttttcctcactctctttacgtttttgctacccaatgtgttagtgtgatacgaggtncttatgttatttgaaaaactgncctctgtgcctggatac

SEQ ID NO: 153996 - DNA, 491 bp, Zea mays
  unsure (1)..(491): unsure at all n locations
  Clone ID: MRT4577_72022C.1
acgcgcttgggacaggggggttggtactgggctatgtgcagggctcaaagcttcgtccgaattaccgccaagtgtctgccctttgtcaccagctccgccgctccctcggctgcatcaacaccatgagggaggcactgtcgcagccacattggtcaggctggtatagcaagcgcgcaaacgcgtgctgggagctgtactgcctcgagcatgggagtggagggtgatggacagatgcccggtgacaagaccattgggggaggcgatgatgctttcaacaccttcttcagtgagactggcgctgggaagcacgttcaccgtgctggatttgttgaccttgagcccactgggatcgatgatgcgaggactgtcagctaccgccagctctttcatcctgagcagttcatcagtgggaaggaggatgccaacaacaactttntctcgttgctactacatccattggcaaggagatatgtagagctgtgccaatgacc

SEQ ID NO: 153997 - DNA, 191 bp, Zea mays
  unsure (1)..(191): unsure at all n locations
  Clone ID: MRT4577_72023C.1
cggccgggncgggaattttataatttctacttgccagatgtattctgacgaacataccagagcgttacactttctcctctgagaaaagaagtcagaataatgatcctccttcccctagcgcaccgctcctgagtcctgaccaccctgccaccgccgacgccgcgccgccgcagcaattgtcaccgaccgct

SEQ ID NO: 153998 - DNA, 270 bp, Zea mays
  Clone ID: MRT4577_72024C.1
catcttctggcttcctcaaggagccagttaaaaaaccagagcattcctttttattgaaaaataaaattaatttgttatcaggttgtttcagttgtattggatgccctatctatctgctaaagcaaaaagtactaggccactaagtgcattttcatcacagacaagagttgcatttgtattaacaagaaatttgtatacccacgcttcagctactatctaatcatcacccgacgccccccgatacaccaaatttcagtctgtttgtaacat

SEQ ID NO: 153999 - DNA, 1047 bp, Zea mays
  Clone ID: MRT4577_72025C.1
atgagaaatcgtatccctgaggtcacggaagcagcagtgatcgaggacttctaccggggatccaatgactcgaccttcgtccgagccatattacaaaaggcaccaaccacttcggagcagctattccgggaagccgacccctacatcactgtcgatgaacgagctctagacctcatcggaggagcaaagcctgcaccgacagcaccgcgacgcgacacaaaacagcaacccgacaaacgctgggagaagaggctcgtgaagaggtccacgccgctgaaccgcccgcctctcgcgcccgaggaggacctcgcggagatactggtggcggctaccggtcctcccttcccgtaccgatggtctgagcacccgatcaccttcacccgagcagatcagtggctcaacttcgaccacctaggcaagtacccgctccttgtcgatccggtgatccgagagagaagggtaaagaaggtattagtggatgggggaagcagcatcagcgtcaccttcccccggacgctccaaggcttgagagttcccctcaaagagctccacgagtcggacacacccttcttcggcatcgtgccgactaaaggagtatatccgcctggccacatctatatgccggtcaccttcggaaccccagaaaactacaggaccgagttcctgaggttcgaggtggcaaacttcgactgcggatacaacgccatcatcgggaggcctggattggcgaagttcatggccattccacattatacatacatgatattgaagatgtcaggaccacaagggatcataactgtgcgcgctgacttccaaggcgccgcagaatgtttccgagtggccattcaagcggccctcaccaccaaaccatcgacgacttcttccgcgcaggcgaactcaaagcctgaagaagacctcgcggtacctgcgaatgaagctcaagccgtgacctctatatggctgactgaagaaaccaagagaatcaatcttgggttcgccgatgagcgcaagaccgctatcatcagttccagcctggatgacaaatag

SEQ ID NO: 154000 - DNA, 492 bp, Zea mays
  Clone ID: MRT4577_72026C.1
ttttttatttttttctatttctcttttttcccaatattttattttggctttgtttagttttcaaaaaaaaaaaaccccccccaaaaaaatatatataccaaattccttttgacgaacacaaaaggccggccttaaaaaaaaaaaaacccattaaatctccgcctttaaaaaaaaaaaaacggcacaaaagggaaaaatatgggatttctttttacccaaaacacatttacacatttctttgggtgaacccctctaaaaaacattatgtagctgttttctaaaaacaaacaatccttattttggggaaaaataaagaactaacataacctttttttaacccaaataccaatttaattaccccaccaaaaaaaaaaaaaatttttttatatggccacccaaattaaatttaatgcccccccgttacaaacctctgaccgggaaaacaactgccttacccaacaaaataccttttaaaaaaaaacccccttaccc

SEQ ID NO: 154001 - DNA, 181 bp, Zea mays
  Clone ID: MRT4577_72027C.1
tttttattagcattcgggacatgtttggtgtgatgacgcggtgatgagccttaccaaattttggctcttccgaaccctgtgtgatgcgaagatgttggcaagttctagattttggtttcttgccaatttgccatgccaacttgtgggcaatcacagaagcggtagactcatgtaagtttgc

SEQ ID NO: 154002 - DNA, 233 bp, Zea mays
  Clone ID: MRT4577_72028C.1
attcattatcaagtagttttggcttaaaagacggaaatagcacgaagctctaataaaactggtggacaatatgcgtgagatccaataattcaaatgggggctaacacaaaaaagtgaagtgactgtaatccggcaaatcagatttacttataacatgctgccgatcaaaactgacttgcaccagataagtgttacaaataattaacaaatctgatgctctgctgcttccaaca

SEQ ID NO: 154003 - DNA, 464 bp, Zea mays
  Clone ID: MRT4577_72029C.1
ccgcccttttttggtttgtttttttttttttttttttaacatgtttgttctagtagctttttgagactgagcgcatattactcggcgaacttcaagcttaccaccaaaaccagtaagcctcctcgaactaacataagagattacacatccatacttcccaaggctacccgccactaagagatccagatttcaaaacattacatttgaacgagactttggatgaatcacattagcttgcaaaatacgataaccagtaaatggagaacattacatttgaaccagactttggatgaatcacatcccacatggctttcaaaataactctgtttcgaccagatcagttgctccaacaaatatggtgatagccgaacaatcaagtgccaatatcatcttcgaagcatcggaccaggcttgaagtaccctacaaagttggggatgtgactgctccattgtttcatgtgaac

SEQ ID NO: 154004 - DNA, 673 bp, Zea mays
  Clone ID: MRT4577_7202C.1
gtaccggcgccccctccgagtttttttttttttttttttttttttttttttttttttttttttttttttttttttttttttttttttttttttaaaaaaattgcctgtttccattatacgaggggcctgaatatccctggaaaagaaacaattcctgaactaagggcccaaaaacgggaacatgtttcccgcccaaaaattggccccccccaaaaaagaaatcccttcccaacttatggggcacaacctccaacctagggcctaaggaaaaaatttgtttcatagggcaaaaagaacaaaaatttggcttattgttttttacagggcatgggaatttttttttttttttaaagcccagggcagggggtttgtcacatgttcccaaaattgggcgatttttaatcgggaaaaatgcccccaggacattttttaatcggggaaaatgccccaggggacccccccaaaaattttttttgggatttaaaccgcccgtttggggactgcataagaaaaaaaccgggtggggggaaaccccggggcattgggccctgctgttttggggccccttgggcaaccttggtgcataggggggggggggccccatgggggggcccttttttttggtgaaaaaaaaagggtaaagggcgggtttttttaaaaatacagggggggt

SEQ ID NO: 154005 - DNA, 504 bp, Zea mays
  Clone ID: MRT4577_72030C.1
aagcaggattttccaacaaaaggctgaaaagggtttcttacaacaagatataactattacgggaaaaaaaaattaaaagcttggctgttggcgtcaaaacccacttttgcttaaaattaaaaacctttcaacacacaaaactttacacactttgttataaaaaaaacatgtaaccaaatggggtttctgggtatccctgccatcattcctcaccaacttcgtctttttcggcatcatcttcatcaaaggcaccttttttctcctcttcatctccatcatcggctccataaaagtccttttcatcagcgtcattgttgaaataggggaaagggttgggccacaaatcttccttgatgaaatctgcaacctcgttttgcatttaatcctcaacatcctccttggggtgagcatcactaaaccaggtaaagaagctctcttcaggaagggcacgtttggttccattcttttcaagaatcactccattcgccaggcctttgccctttt

SEQ ID NO: 154006 - DNA, 800 bp, Zea mays
  unsure (1)..(800): unsure at all n locations
  Clone ID: MRT4577_72031C.1
gcctctccccgcgcgttggccgattcattaatgcagctggcacgacaggtttcccgactggaaagcgggcagtgagcgcaacgcaattaatgtgagttagctcactcattaggcacccctggctttctcgatgccggccgggccgggcgcgactcctgggcggacacagcaaccaacaagtcgtccaacgtccaggcttttctgttttgtttctctctcacgcaagtcgcaaagcaaagcgtcccccaccatggcttccacgacgacgacggcatccaacaacctggcgggcgtgtggctcggcgagctctcgtcggcgctgcatgggacgtggcaggcggtggccgtggccgccacccacgggctcggcgaggacgacgacccgcggctgccgtgccagcagcagcagaggccgtggcgaggcgacgacaggagcagcagcaacaacaaggcgttgcgaggagccgcggcggccgggacggacaggcgggagggggacgtcgcgaggtgcggcggcgccatgtccgacaccacgctctacctcctcctcgaccggttcgcgcccagctgagcgggccccttgctcacccgccgctgccgccgccgccgccgcgatcgatcggcgcgtgctgtactgtacaggcggaataactgcacgtctgcacgccatggtttctgtaaataaatgctgtatataaactgcaatggcatcttgtgttgctttctgaaaaaaaaaaaaaaaaaaagcgattcttttcgctacatcgccccgtgagcaaagacagtnaataacagtaaaa

SEQ ID NO: 154007 - DNA, 354 bp, Zea mays
  Clone ID: MRT4577_72032C.1
gtgtggatgcaatactgtgacataaaaagactatgaaatacatgattaatggcccatgcttcgcgtaagcataaagactatcaccgcctttaagcatggtacacggccggaatacgtagtactgaacctatgatagaaccaacaggcgcatccacagcacacatgcttgcaacgtacgacgggtaacactatctaactatacacagtgtgagcagcatacaaacaaagctgacatgctcaagggcagtgggctctcttttattgccagaagccaaccgaattacaacgaggcctgctgctcagatgaccattacctgagcgaaactgacctgattgacgtaacgtgaaaagctc

SEQ ID NO: 154008 - DNA, 487 bp, Zea mays
  Clone ID: MRT4577_72033C.1
ggggtctctctcccacacaacaatagcggtgatgccactccccggagctactagatgcagcgagctacctccgccactgacaaccgaagaagtgcggccacataacagacagccccatcattgcgcgaccggacgcgcagcgagaagaatgcgcacctcgaggggaacggggggatcgtgaccaagaccagcctcgtcttgaacaccagcagcatatgaggatccctcctcgacgggcgttctggagttcctcggtcgctgcgtcacctgccagattatcagctccgccggcatggaccctaagaccacatccccggggaagttccgccgggaggcgacgactgtagcaagtcgttgctgaaccccacgcctcttctgctgagcgagtaaccagctccgaatgacctcccacctgaacgcggtgaccgcggccatcaccggctgccagtatccgagagaacacccatgcctgccccgtcttcctcaa

SEQ ID NO: 154009 - DNA, 373 bp, Zea mays
  Clone ID: MRT4577_72034C.1
cccactcgtacagttttcaactattcattaaacacactcattctaatcgcactatcaacaacctaacaacaggggggttcctaaatattagccctccttgcgcttcttgcccttttagttagcgcaacaaatgcgttcattattccaaagtgctcatcttttcctattgccattattccacattttctcccaccagttacttcaatggtctacaaacattcatcacttcaagcctacaggctacaactaacgcttgccgtaagcgtcttacaacacccaatttcccaatttcaacaacaatccttgtcacatttaaaactacaaaccatttcaacccaacatcaacaaacatttttgccattacttaaccacc

SEQ ID NO: 154010 - DNA, 221 bp, Zea mays
  Clone ID: MRT4577_72035C.1
tgatatgtttcctcaaatacctatttttacattccaaccaacaagcattaaacagtgacacaaactggacattcatgggtggaaagttgaaacttcaatactttaatgctgggttttgggttggcaaaaatccaaattttttttttaacaagtaccggtggggaaagtacttgtcatttggggaaaaacgaactgggtgaacaaactgggttgggacccca

SEQ ID NO: 154011 - DNA, 174 bp, Zea mays
  unsure (1)..(174): unsure at all n locations
  Clone ID: MRT4577_72036C.1
atttcggcacgaggcgttcgttcagttcatccgtgttcttgtttgcgaggtcgagagagagaggatgtcgtgctgcggaggcaactgtgggtgcggctccggctgcaagtgcgggaacggctgcggagggtgcatgangatgtacccggacgtggctgaggtggtgaccaccac

SEQ ID NO: 154012 - DNA, 439 bp, Zea mays
  Clone ID: MRT4577_72037C.1
aagcagtggtaacaacgcagagtactttttttttttttttttttttttttttttttaaagcttatcacacttgctccttccgattctttttcttttactccgcacttttgctctttcgagccaaaatgaatgggtcttagggtcccgcgtactctgcggtgataccctggttaaggggggattctgccaatatgcaggaccgttgccgggcgatcggggatgcgtttagagggcccggtggaggctgctgtgattattgtttctggaaactgcggcgtcgtgtctgatcgtcgtgacggggggatccttggtgttgcccttctttgtgcccttggtgaatatacacggttgcctggttggcgctactgggacatagctccttccggctggcctttcgacctttggttgttcctgaggggcgagtggtctcccccctgac

SEQ ID NO: 154013 - DNA, 869 bp, Zea mays
  Clone ID: MRT4577_72038C.1
cctcgaggccggcccgccgccagctgggacatcgtcccgtttgattctcagccgtagtaggagccatggtcgaagctatttgatctatctctgagctgagctgagctgggccggcaatttgatgatgcttgtgtgtgtgatcatgagtggataataagagatgataagcggcaacctcaccaatgaagacctgggggccgggcgcacgcgcaccaaggccgaggggccgacgaccgcggccgtggccggcgccgtcgtcgcaaagagtcccgtgctgccgagctcccggcaatggccgccgtcaacggagtccaggatcgtgcgcgtgtcgcgggtcttcggcggcaaggaccggcacagcaaggtgaggacggtcaaggggctgcgcgaccggcgcgtgcggctgtccgtgccgacggcgatacagctctacgagctccaggaccggctgggcctcagccagccgagcaaggtggtggactggctgctcgacgccgcgcagcacgagatcgacaagctgcctccgcttcagttcccaccgcaggcagcgcaggacctcgtcgcccatctgccgccgccatccatggtggcgcccttcgcagccgaccgggccgaggccgacggcgacaaacgccactgccacgccggcgtcaaagggctcatgggcctcaacaattccatccgcctcgtcaacgccaccatgccgctggctcacggcttgtactacacgcccggcgagtcttggaccgtaatgccgatgatgccgccgccctcatcacggctcacgactcgcctcatctctgctgtctctctgctccgctcagctcgttatgtattgctatgctggctctgtgggagagagtgttgat

SEQ ID NO: 154014 - DNA, 1557 bp, Zea mays
  Clone ID: MRT4577_72039C.1
gagctagccggacgaattcgggcgtgcggcttcgagctctcgcttatatcagcgccgcgcgcgccggccggcggccggaggagccactatcatccccggcgtttgattcggccagagcagcggccatggtcgaatatatttgatctctctcgatctgatctgagctgagccggctggtggcccgggaaggacgaagtgtgtcgccacctataatttgatgatgtttgtgtcatcatgatcggtggctagcagaataagagatgataagcggcaacctcaacaatgaagagctggggggcggcgggtgcaccaaggccgaggggccgggcgcggccggcggcgccggcgccgtcgtcgcaaagagtcccgtgctgtcgagctcccggcactggccgccgtcgacggagtcgaggatcgtgcgcgtgtcgcgggtcttcggcggcaaggaccggcacagcaaggtgaggacggtcaaggggctgcgcgaccggcgcgtgcggctgtccgtgccgacggcgatccagctctacgacctccaggaccggctgggcctcagccagccgagcaaggtggtggactggctgctcgacgccgcgcaggacgagatcgacaagctgcctccgctccagttcccgccgcaagggcaggacctcgtcgcccatctcccgccgtccatggtggcgcccttcgccaacgttgcagccgaccgggccgccgccgccgctgccgccgcgaacgcgtcggccgcgatggccgaaggcggcaaacgccactgccacggaggcatcaaagggctcatgggcatgggcctcaacaattctatcggcctcgccaacgccaccatgccgctggctcacggcttgtactacacgcccggtgagtcttggaccaatggaggcaatgccgccgtccatgatcatcaggtgagccacggcggcacctcgcctcagacggtggctcaccactcgccgttctcgtctctgctgtctcttgctgctccggggccccagctcgtcttctactcgccggaaggcggcggcttcgccatgaaagaagccaccgatcatcagttcgctgtagatagcctcgatcactcgcaaggccagctctcactgagctcagctagaagcttccttcaccccggcaaccagggatgatattaggtcactgatctctactgctccaagaaggtacgtagaacaataaagcttggtgtagtagtaatcaagtactcgtttgaaggctccgtaaagcttgcaactgcagttttgagatgttattgtttggtatgatcgagtagaggggctctagcgtagagagctgctagcatgcatagtaattaaggttaattttgcaggacatgcaatgcaattcgttgcttcttttttatacaaggaagtaaccggtcatggggtgtgtggtgtgtgtgtgtgttggcaatgtaataacaattttataattcgttcttgaatttgtgcttagctagattgcgttcctttttagactttgttttcatatatactcgatcaatccataccaatatttcgaggccgggcc

SEQ ID NO: 154015 - DNA, 254 bp, Zea mays
  unsure (1)..(254): unsure at all n locations
  Clone ID: MRT4577_7203C.1
cacgcgtacgcaagctcggatcctctatactggccgcgcttcgtaaggcctgacttacacaaaaaaacnaacacatagggcagcctgtcgattccaattggacacttagctctccctccaacaacctaataaaggcacagtccaaccctattctaactcggcggattatccaagactgaagacaaacaccacctttttttttcgcgggggggggagaaggaaaaacgagcaccgccccctttttttttttttta

SEQ ID NO: 154016 - DNA, 431 bp, Zea mays
  Clone ID: MRT4577_72040C.1
ttttatttctttgctctttcagaagaaagctgttaggttgagagtgaggaggaagttttagttacatggtggatatgttagttccttggaggaaattgaagtcacacaaacgttagatgagatatgagcatatgacatttctttttgttttgaagcttatgccttctgcagttttatgttcacctacctactgggcagcgattcttatcaaaagcagaagtattgcactttgttaataagggcatggtttctacatgtgatatggatgtgctgtgcgacactagcactgatgataatatggatgggtgaaagaaacgatatctagaaagttcaatgatggaatcagaaaagaccagtactataccgatcctgttagtcaccgtgtatttcgcacacttaagtctgtattgagctaccttggaaccggagaa

SEQ ID NO: 154017 - DNA, 468 bp, Zea mays
  unsure (1)..(468): unsure at all n locations
  Clone ID: MRT4577_72041C.1
cccggggggactttagcgatggtgctgttcagggtggcgccgtgctgctcgtcggtgctgtcggcgccggcgctcacgaggtcgtgtggagtcatcatgacccgggccatgttccagagcatgctgagtcaccgtggcgtcagcgggtgccagggcgtcttctacacctacgacgcctttatagaggccgacagcatgttgctggggttgggtaccaccggcgatgagtatacgcgcatgggggagctcgtcgtctttttaggccagacgttccacgaaaccaccgtaggttgggtgaatgatacagatggaccttttgcctgttgatactgacggttgaaggaacagaaacatacagactcaccatactattgacgatgacccatacaggtaaataataagtacaagtacaggctatntggtcaagcgctgaacctgaacctggtgggtaatccgtacctggtggct

SEQ ID NO: 154018 - DNA, 327 bp, Zea mays
  Clone ID: MRT4577_72042C.1
gaattccctggccgaccgcactcatacgctcactcgtacccccactcattccatcgattccttcaagataatccacagcatgtgacacgtgatctaactctagctcaactacctttccaaatacctaccacatccactcccagactatcccaaacataaacccatgccaataaatgcacatgatcaaccaagtacaattccctctaagtcttatgaaccataagaaatgaaccctataccctgtacacttcctacaaatcataaccgttatgccactcaaaaaactcctattcccaatcagacactagcatcataaatatcactaac

SEQ ID NO: 154019 - DNA, 382 bp, Zea mays
  Clone ID: MRT4577_72043C.1
tttgtgaattgccatgacttaatttgtgtaggggcaggaggtataaatctttgctcgttcagaagaaagctgttaggttgagagtgaggaggaagttttagttacatggtggatatgttagttccttggaggaaattgaagtcacacaaacgttagatgagatatgagcatatgacatttctttttgttttgaagcttatgccttctgcagttttatgttcacctacctactgggcagcgattcttatcaaaagcatggtggatatgttagttccttggaggaaattgaagtcacacaaacgttagatgagatatgagcatatgacatttctttttgttttgaagcttatgccttctgcagttttatgttcacctacctact

SEQ ID NO: 154020 - DNA, 674 bp, Zea mays
  unsure (1)..(674): unsure at all n locations
  Clone ID: MRT4577_72044C.1
ggctctcaagacgccacataagcacagagaactatctgttgctcatgcaaaagttcgaattcaaggatgagctgtccctgcgagcagcagcatttcctctgagcttgctatccttccaacatctaatatatcccctagatgaaaaattgaccctggctggacttggatacgattatggaatcgatgaagaggttgcgcggagatctgcatcattgcactacaatggcaacatgaaaccttggcttgaattaggtataccggactacaagaagtactggaagaggtttcttgaccgaggagatcgatttatggacgagtgcaacgtaaatccgtgatgcagatggacccaagatgagaacaattgagtaaatctgggacgcagagctggacctgaaatcagaacaacatcagcaagccttaccgaagcttgtgtcgacgagaacgaatactagtggtgaagccaggattttttgagttggatattcccaacctgaaagtagtgtacacaagagtatatacggtagcataaatttgagtaaatgctggggactacgatccatcgacctccctctacggtaacnnnnnnnttcaaatcagtcgacttcatcttacaaaatcttcatgaaatacagataattgtacatgctacgaaacgagataacaatgtcaattgc

SEQ ID NO: 154021 - DNA, 435 bp, Zea mays
  Clone ID: MRT4577_72045C.1
ggccgctttttttttttttttttgcgctaagaataacactcatctgttacctgtttggaataaagccaactgacaacagccatattcaaaaaggtaacattttcaacaggctaatatccttttgttctcttgtgcaaaattgatccagtctcctaacatgcccagctctcacgcgtaatattaagcccccaaccaaaagactaaaattactgcaccgtgtttcatctaaagcgacttgacatactcctgcactatgttaagcgtcctcaaaactttcaccgacattccttgacagcgactcaacatcacaactacaaccattacttgccttgacctcgaaaagaatactgcatagcccatgccaatacccaagacacttagcatattgaacattagatctggtgtaacacagtgtataacacagctctccttgac

SEQ ID NO: 154022 - DNA, 1747 bp, Zea mays
  Clone ID: MRT4577_72046C.1
ctcgaggctcggccgggaatgtggaagggtcccctcacgtcttgaatgtagagccaccgtcgcaccttctcgtcgcatgtggaatgcctgccgtcgtagctcgcggatggatagcggacggagagagaacctctacgtttagcggtggaaggacgtcctctattatttagcggaccgtttaccggtcgttgctggagggaaaaagaacgtcaatatccgctaaatctaaggaagaggaccgtttacagatctttgctggagacagtcttagtacggagataatttgaatgacaagttgttttgtgatttcagtatcaacagaaggatgaagcagatggagcaaacaatagtgagagccaaatcttgcacagtagattgtagaagtgttgacaggaagcttcgccagattctttatatgactgaggatgaagctcattttcatatgcagcagagtgcattcctctacaatctcggtgcccagacattgccgaaaagtcatcattgcctttctatgaggttgacactagaatatttcaaatcatcttcattggattctgatgattctcctggcaggttcagtagtccagaatacaggcacttcgttatactatcaaggaacgttcttgcggcttctgtagcaatcaactcaactgtgagcagttgtaaggagccaggctactttgcttttcatatcctaactgacgctcagaacttctatgccatgaaacactggtttgccaggaattcgtataaaaatgcagctatccgtgtcataaactacgaagcaattattttggagaaacttccaaagtatactatccggcagctgtttttgccagaggagttccgtgttctcattaggagcattaagcggcctactgaaaacacaagaatgaaatacctgtcactgttcagccactcacatttcgttattccagaaatattcaagtatctaaacaaggtggtcgtgttggatgacgatgtagttgttcaacgtgatctgtctttcttgtggaatattgatatgggagacaaggtaaatggcgctgtcgaactttgtggtctgaaactgggtgagatgaaaaatgtcttgggtaaaacagcatatgatccaaagtcgtgtgcgtggatgtcgggggtgaatttgattaatctggataaatggagggagcataatgtcacagagaactatctgcggctcatgaaaaagttcgaagtcaaggatgagctgtccctgcgagcagcagcatttcctctaagcttgctatccttccaacatctaatataccccctagatgaaaaattgacgctggctggacttggatatgattacggaatcgatgaagaggttgcgcggagatctgcatcattgcactacaatggcaacatgaaaccttggcttgaattaggtataccggagtacaagaagtactggaagaggtttcttgtccgaggagatcgatttatggacgagtgcaacgtaaatccgtgacgtagagttggacccgaaacgagaacgattgcgtgaatctgtgacgcagagttggatctgaaatcagaacaactggaatagacatcagctagcctcactgaagtttgtgtcggcaaattgtgaacgagaatgaattctggtggtggagctaggatttttttgagtggagattccaaacatgaaagtagtaaacactaatatatatacggtagtataaatttgagtaaatgatggggactacgtgatccatccacc

SEQ ID NO: 154023 - DNA, 182 bp, Zea mays
  Clone ID: MRT4577_72047C.1
accgctccggaggaactgccgggacgccccacgcgtccttgttaggcgaaccagcagcctccaataaaaggggggacatttaaataaaaccgcgcgacctcagcccccaggcaaggagaccgaaaacttaccaccgggccaacccgggagaaagaaggacacgaacaaagaagatcctaaaa

SEQ ID NO: 154024 - DNA, 820 bp, Zea mays
  Clone ID: MRT4577_72048C.1
agggcgattggtttcatagaggccggccggtaatgttttatccccctcataagtggaactcaggattttgttcttggcaggaatcacacatacactctctaatgaatgtacttcgctattgcaatttagatgaatctctgaatggagaagagagtcttgtttgcagaagttctctagatctgctatttaaaacacgtgaactcgactacatgagttacattgtcttgcgtatgtttgaaaatacagaggtacctttggaagacccaaagagattccgtatagagatgacatttagtcgcggtgcagatataagttccttggagagtggaggcaaagaatctttgctgcctgatgaccacacaatgccgattatggagccagaaagattgcaggaagttggatcgtatatcaccttagacaaattcgataaaatggctcgcccatttgcaatgccagctgaagattttcctccagctgctcctcaacctttgcctgttcgcttctgcaaggacatcgaattacgaggaaaactgcagcataagtcagacatgatgagtggtgttttgaaaaggaagacaaaaaagcttcaggaatagcatgcagctgcgcagctgggcttcagtttgactgagtcgtcgtattttgggtgccgcaggtgggttttttcaggatttacaggaacgctgaatacaagaccatgtgtctttacactctatgtacattctttttttaataaaatgacgtgcggtgggtaactctaggagcataagttgaaaacatcaccatgctttgaatccaaaaaaaaaaaaaaaggggcggc

SEQ ID NO: 154025 - DNA, 3599 bp, Zea mays
  Clone ID: MRT4577_72049C.1
caaccttaaagtgctttgcagaaaggaaaaagaaagcgagagaacactatggatgcaagaggcactactcacccccctctctctctccactccttttttttcctctcatgcctctctctctctcttctttgttcggtgcactccacactcactcgatgttttgcttgtctccggccacttgatgaatctagtcctcacaattgcagaaaacggtagcaataagaacacaccaacacggactctagctatagtacttctgacttcaacgccacttttcctctccatcttaacacgatgtatatgtatatctctttctgttggtgcatgccgtcgctcaattgcatgccagaatttagtactcgatctattgatgcatgtctctaaggctgatttggtgaccgagaatcccgaggggaagaaatcctcttgctattcaaaattgaattgcaaggggattcctcccccatggatgcctagggatccctaatcaccaaatcagccctaccggccgggaaattccccgcgggcttgcggccaaacctttcaccgaggccgcaccctcccgtgcatgtcactcctgccggcgccgggcgtcctatggtagagactcgccgctcagcgcggaggagcggcagcggttcgctcccggccgacggagcgccgtccgagccggcatccagctcccctgcaacctccctccccccgcgggagaataatggcctggttatctctaatgacaacacattgaagcagaccgtggaggtagaaaaacaggggaggcaaggtaaggaggtcttagtggttcatgaattggatgagtcgaatgaggattctgggtcattggatgagccgccgggttggcttcctgacggttggactatggaggtttgtcaagaagacaatggctccatctacaagtactacacttccccaatgtccggatacatgttcacatcaaagatggagacattgcattatcttttctcaggggtggaagaacgcatgttggagttgcaggcaagcgccgaggacaacgagcttcatgagtcacatacatggcttccacgtgggtgggtgattgaagtcagagccggtgggaagaaaatggacaaaatgtacaagttttatgttcacctacctactgggcagcgattcttatcaaaagcagaagtattgcactttgttaataagggcatggtttctacttgtgatatggatgtgctgtgcgacactagcactgatgataatatacttgctcatgtggaattcaatcctgatggtttaccagatggattgggtgaaagaacggatatctagaaagttcaatgatggaatcagaaaagaccagtactataccgatcctgttagtcaccgtgtatttcgcacgcttaagtctgtattgagctaccttggaaccggagaaatatctaggcattcctatttaccaaggagaaatgtcattgacatgtattcatttgataagtgtgcagatctgcccaaaagcatggtgaaaagattgaaagcaaaaggacaagcaaagaaaaaattcatgagagcacaggttttagacaaggacttatctaatgggcagacttcaaatcactgtgaaggtgctattgggttaactcaatctgacccggaaggagataagtttggatctatggaagcggcatgcgaaaaggggaccagttcagagactatgaaacagcgaatagggaggccaaagaaaatcttgaagcaaacaaatgatagcatttcggatcgtgacaagggttcacatcaggagcacatcgaggccaaagaggaagttgatatctgtggtgggaaagacttgacgcatttgaaaactctggagcgtaccgaggctcagaatagcacaatgataaccaaggaagtaaacaacaacgacacagcagagaaaaacctatccaagatagagggagacaactcggatctggtaaccggcacgggtttgcacaagcaagagaatagcagattaactgaagttagtgagaaggcaacattctccacaggttacaaattttacaagaggagaagttgcaataagacatgaggttcaagaaaagcataaaattagatcaagttatctggtgagttttatgggtcgccgcccaaaagttgtatcatacttcttcagggaacaaatggaaccaaagttgatctggtgtgtccaggttttcatttttttcgttttgtttattcccttctgcatgcttctgcttctagttgatgtggagggtgtctagtggaagtaatctgtttgattcttgtatcataggaattaatactggttgtagagagcaggatttaacacttgacagcaggagcatcaaaggaatcaaatttaagaagctttcgttaacctgagggctgagacataaatgccgtcaatacggacataaatgccgtcaatgagcatattttctttcttcattatctgctccagagttcaggtgaaagaaaataaatagtaaacaaggtattgttaaaccatcacattcagagattaagtgctgacgatagtgacccagcaacacgtgcctttgaaaaggaggtgattctagattgcatgctgtacgaacttaaggtgcccagtgcacttccctgcccgaatttttttttgtattttagccattttttggaaaaaaattcaggtttagaccttaaaaaattttaatgtcagttttggaccctttgctcggcgtcatagcctatggcgccgagttaacacagctcggcgtcataggctggcgccgaggtacgtgctgcgttggcacaacccggacgagtgtcgtcgacgtggcactgagcttggcgccacagatcttggcgccgagctcggttgtgttatcaacatttttgctggagacataagcacaaagtccatctagcttagttggtagagcataaggcttctaaccttgtgggcgtaggttctcaagccccacagtttgcattttgatttgtttttttgtttatgtcgctggtgtatctgtccaaatttatttctcacctagattttttatctttatcactactcatttttttaaatcatcttcattggattctgatgattctcctggcaggtcagtagtccagaatacaggcactttgttatactatcaaggaacgttcttgcggcttctgtagcaatcaactcaactgtgagcagttgtaaggagccaggctattttgcttttcatatcctaactgacgctcagaacttctatgccatgaaacactggtttgccaggaattcgtataaaaatgcagctatctgtgtcataaactacgaagcaattattttggagaaacttccaaagtatactatccggcagctgtatttgccagaggagttccgtgttctcattaggagcattaagcggcctactgaaaacacaagaatgaaatacctgtcactgttcagcccctcacatttcgttattccagaaatattcaagtatctaaaccttgacgcatccacaacgttggaatatatatgtactcatattcggattatagaatacaggcttatctgtagaaaattaatataaaaataacaaatttgatgtttgtgt

SEQ ID NO: 154026 - DNA, 409 bp, Zea mays
  Clone ID: MRT4577_7204C.1
aatttatgttaaagtaaaagctcaccctttgttttatatcttttgcatgccccgggaccaacccggtaataccctcccggtgccttaagggattctaattttcaatataaagagagataatgaaccttggccatttaaccggatggagacattacagggataaaacaaattcctatataaaacccgctcaacagaggataccggaggttaaacacaccaaagcgcttggggtgcctatgagtgagacctacctcactttaggaggcttgtgctcactctcgtattaccagacaaaaaaccggatcctgctctcacaaaaacgacctacaccagacggtataggctttttgtcctttgagggcgagggcttattttcttttccccattgataaggaagaacagggattgg

SEQ ID NO: 154027 - DNA, 297 bp, Zea mays
  Clone ID: MRT4577_72050C.1
acactatcgaaagctaattcttgccgccaacaccgttttaatgggtccagccaacaagggggccaccacgcttaaacgatcatcgtcggccgaccttcgccgacgtcttatcgttcacagttccaccgttggcaccggacacgccggcagtgctatcacaggagtgctggccagcattatcgggggggcgcatctgctcgtgaagctgggcattctgctcgccatggacaagattcctcaagcaggcattcgtcgccgcgttcatcaagttcccgagtgcccttttggggatgttct

SEQ ID NO: 154028 - DNA, 413 bp, Zea mays
  Clone ID: MRT4577_72051C.1
aaccccacttgggggccccaaaaaccctaaaaaaaccaaaagggcacagggggaaccaaacgggcacggggtgaaaaggttgggggccggaaatttccaggggcatggattaaaacggggggaaattcttcaaacaaacaacagggcggaaaacaaataaataaaaaaaagggcgggcgggaaaaaaaaagggggggcaaaaccgggcccacgaaaaaaaacggggaaaaaaatgcccctggaaaggggagccgcccccgcaatggatcgaaaaggggggggggagcactggtttgggcaaggggaaattttaggggggcaaaaagctcaacactatctttaggtgggggggggggatttgggggctcctttggcatgcccaaccggggatatgcctaagatttttcaagggg

SEQ ID NO: 154029 - DNA, 428 bp, Zea mays
  Clone ID: MRT4577_72052C.1
ttgggtacctcgaggccggccgggagaagtctcctctcatctccgccctgaacccctctaaacatccccggggtgatggatctccgtctcgtccactatgccgccagcgtcaccgcgggtgtgaggtgttcacgaggatggcactcctctgtcgagggccgtggctgctgctcctctgcttcgcttccgcgggcggcgccgtctgcgggtaagcctgcctaggcaatgcatgatccgatctacagagcctgtgtgtaacgctgtgcaagaataaggctccctgaaggaggcttctatcaacactgaatggtgccaaccgatgccagaatgctgacaaatcgaggaacacgcacgagacgatggacttgctgtggtacggctggaactgctagatagcgtgccgatacccctgctttgtggaaatgtcc

SEQ ID NO: 154030 - DNA, 531 bp, Zea mays
  Clone ID: MRT4577_72053C.1
ggagaaacgagccgtcggaaacgacgtgcataatctcgaccccagcactgggatgaagatcacggaagcactacgcgtgcagctcgacgtgcagaggcgcctccacgagcagctcgagatccagaggaacctccagctgaggatcgaggtgcaggggaagaagctgcagaagatgttcgaggagcagatgaaggcgagcaggaccgtgatggagccacgacaggaggaggaagatgatgacgacgacgcgttcgacgatgtgcacgtgcagctgctggcgaccgcggcccgcagcgacgccgggttccagttgaagataagctagcctttggccgccgcgcgcctctagctggctcgatcggctttgtaatcgtagggtttaactacaaatatcagcctagtgacccatggatagtgatgactacaatgtttgtgaggaggagccgaggagtgctttgttgccaaatcgaccgagctgtccatttcatcttcttttttcgaaacaaaaaaaggaatttaaagtgttggaat

SEQ ID NO: 154031 - DNA, 580 bp, Zea mays
  Clone ID: MRT4577_72054C.1
tggaattaccgggttgacccacgcgttcgtgttcttgggcgatcgctgtcacagccctgatccgaatcgttgtccttgcgagcctcgccgatccggcactctcctaccctcggttcaagatgcacatctttgtgaagacccttaccggctaagactattaccctcgaagtggagttttctgacaccattgacaatgttaaggctatgatccaaggacaaggagggcattcctcctgaccagagcgggtttcttcacgggagcagattgtggactggcgcacacttgctgactacaacatccacaaggagtcaaccctccacttggtgctgcgccttaggggaggcatgcagatctttgtcaagaccttgactgggaagacaattacccttgaggtggagtcctcagaacaccattgacaatgttaaggcaaagatccaggacaaggagtggattccacctgaccagtaacgtctaatctttgtcggaaagctgctggaggatgtgaggaccctcgctggctcctcatcctgatcgagagcaccctctccttgggctgcttttaagggtggttacaaattt

SEQ ID NO: 154032 - DNA, 831 bp, Zea mays
  Clone ID: MRT4577_72055C.1
ttaatatctctgattcatggactgttatttcctttccattctgaagatgcaaggtcaattccctcactccatcaagcaaatgtgtttacttatgagattgagatgcgagcttaagttgctcacagtattcaaataaaatcacctacttattttgctcctgaagtaaaccatgggcgattctcttcattagttcaaacaaacacatctactcatgtacccttttctggtggagctagagaacaacaagttcactttactcctcaaccaaaccaacactttccatcgctgcattatattttatccgccagcttatatctttcactgccctttctcttggtaatggttaagccatctgaggctgaaaagaacttagctcaggcaaatgtgacatcaggtggtgccgcttcaggtggagcaagaaagttgtatgttggcaatcttcactcaaatattaccgaagaccaattgagatagatgtgggtccgacccatgctccaatgtcgttgcctcctatgagctcttggtcccatgagctgcatgtgggccatcctcgtcgtatcagcactatgcccctgctggccggctgcgtagcgaacacacagaggaacgctaaatgtagcacgtgtagacagcgtccggtattttaccgaaggctttaccgtctgttgctggaccagcaatagagctcggcgtcctgtaaatttggcggacaggaccacatacaggtccttgttggacacagtcttagtcctgtgagttccaggttttcgcttgtggtacctatgaacatgaaacctgtttactttgaggaatgtactttatttccatctt

SEQ ID NO: 154033 - DNA, 378 bp, Zea mays
  Clone ID: MRT4577_72056C.1
gaagcgcagagtggatcactcactacaggcgcgtgctcatgacgacgctgccgcggcgctggtggcgctggggtcttcggtgttcgtgcacgcggacaccgtcgacgtggccctgatggtgctcggtctggtcggcgcgataggcgacggcatggccacgccgctgcggctgctcgtcgccagccgcatcgccaacgacctcggcagcggccccgaccacctccaccacttcacctccaggatcaacgcgaacgtgatcaggatcatcctcatagcgtgcgcctcctgggtaatggcgttcctagagggctactgctgggcacggacggcggagcggcaggcgtcgcggatgcgggcgcggtacctgcaggcggtgct

SEQ ID NO: 154034 - DNA, 189 bp, Zea mays
  Clone ID: MRT4577_72057C.1
tgttgttgtgtggctgcgcagcgagctgcttgagcagcggcgtctctaggtagtcgtgtggcgtcccttccctacgagccccaccagctgtggtgggaccgtctggcgccgcgggccttggcaccgtcctccgtcgccaaccgcggcataggcttcgtggtggtcctccagatggcgctccatgggctc

SEQ ID NO: 154035 - DNA, 385 bp, Zea mays
  Clone ID: MRT4577_72058C.1
gccagggtgatggatatctccagaattcaggaccagcggccccccccacacactctcacacacaccctctcgctgcactgctgctttacaagccatctaattcctcaattctaatgtatgtcctctcattctttcccatgggatggcaagaaatatatatatttatatgacatggcaaatgctaagtttcagaagttacattaaacaaactttttctttgtatgctatacctctatattatctctaatcacgacctgtctttggctcattgtgctgaacattattttttatcaaggctaattcctctacacccaatcatatatactttcctctcatataatcccctacatcaccaaacacgtctcaaataccaatcctactctcc

SEQ ID NO: 154036 - DNA, 944 bp, Zea mays
  Clone ID: MRT4577_72059C.1
ctgtacttaagcttctattgaagttgctcttagccaaggctaaattacatatactgtacacatagtcccagactaatgggagggaagagggaacgaacgacgcgcaagaacagatcaacaaatgcatcgttctaaatgcatatatatctaagggctctaatctgaccagctgatacatggacgagcaatttgtatgtttcagttcaatgcagggagcgactgcccagcaagctgttggaggaaggggagctcccatcgctgaaccacctctcctgcacggacacaggagactccactgcactcttcgccgccgtctcttgcacgaccaatgcattcaccctgcccctctccgtccggcttctgttggcaccccacgacctgtcggtgacgcgcgtcgacgctacggacgaggagatcgacgatgacgtcgacaagaacgcggcgtcgtcagccgatggcgcccacccgctgcgctgtatctgctccagctcgtcggcgacctcggtcatggacggcctcatctcgctgtggaacgccaggcaccggaacgccagctcggccaccttatggatggacgagagcgtccaggcgtccctgtgaggatccaggtacggatcgacgatgtcgtcgacgcggcccctgccgatcctgtccacggcgagctgcgccaggttgatctcgctgggcaccctggtgaagtcgacggccttcatggcggtgatgatctctacaagcacgacgccgaagctgtagacgtcgctcctgtcggataggtggaagttctggtggtactgcgggtcgacgtagccaggcgtgccctgcggcgccgtcgagatgtgcgaggggtcgcccacggacgatggcgacgacgccttgcccatccgcgacagcccgaagtccgcgacttggagttgtatcgaagcgagcaggatgtgctggactgt

SEQ ID NO: 154037 - DNA, 356 bp, Zea mays
  Clone ID: MRT4577_7205C.1
taattttcgggtcgacggacgcatgctctcatttcgtcagcatcctctaggaccgtctcgattctttgttttaattaaactgtctgggtcccggtgtccgttccaggtctgagtcggttgttctactcccggggaaggccccctactggtccgttcctcttccgtccccacgtccggtactcttcgtaccgctttctcctttctagcagctcgaacattctctcagcattcaacgggttcggtgcctatacctcctgtcccaaccctcatagcctatccttttcccgaagttacagatcctcttttccgtctttccttgactacatttttccattggccatattcttttcaccttt

SEQ ID NO: 154038 - DNA, 253 bp, Zea mays
  Clone ID: MRT4577_72060C.1
aaagccacctgccgtcgggcgctccaccgccgtcgccaccatcttgtgcctgcccaggtcacttgttgtcgttgccatgccatcaaacgagaggagggccccgtcgccgccgccatctcggccgaccgcgtagccctgctggcgcacctcgccgggccactggacgcctctctccatccgtgcagcctcccaacgcccaagcagtgtggtatgcatttggaagctaacaactagaatgtctacattaataagt

SEQ ID NO: 154039 - DNA, 327 bp, Zea mays
  Clone ID: MRT4577_72061C.1
ccggactctcaaattcctgctctgtgggcttctacgccggcgcaatcccctcgccgttatgcgccaccgccacataccttgccgtgctcctgagctttggtgagagcctagaaactgatgcgcgagatagggttatggtctcgcaaatcggcatcgatctctgcacggcctactcttgcgactgtgtgcggcagaacgaccgtgacagcatcatcttctacgaccaggggatccagcaccacaccctatgacgtcgactattgcgactccgaccgcctgatgggtgatgcggccgtgaaccaggtcgacttgagaccccatcaacac

SEQ ID NO: 154040 - DNA, 258 bp, Zea mays
  Clone ID: MRT4577_72062C.1
tgctgtaccggtccggggtcgaccgacgcgtgcgcactgaacgatgtgtctgtcaaagaagaacactgtctcgatgatcgtccatatatgcgacagtgtgtcgctgtgtgtgaacactgaacaacgtgtcaaaactgaacttatgttgccaatttatttgcaagcaacaaggcgctcccagctgatcttgtgcctttatgcagtttatacagttcaaaatttcaaataaactatgaggctcagcctagaattcattac

SEQ ID NO: 154041 - DNA, 287 bp, Zea mays
  unsure (1)..(287): unsure at all n locations
  Clone ID: MRT4577_72063C.1
gggatgttaagaaagtgtcacatnngcctcagaatgctttnaagcagttgcactggctcaaactgttcantaagctcaaaccatatnccagctcatctgcttaccgcatatctgcggcatgtgacccgtgcgtcacatccccggtctcgtgggggcgcccgtggtttccggtctgggggcgggggcgttcctgcttgccctttgattgctgttttctggcggggtcgcacggcccttttgccggcgccccttttttcacgtttttgccctctcatctttcgctggtg

SEQ ID NO: 154042 - DNA, 345 bp, Zea mays
  Clone ID: MRT4577_72064C.1
tcgagcggccgcccgggcaggtataaaaaaaaaaaaaaaaaaaaaaaaaaaaaaaaaaaaaaaaaaaaaaaaaaaaaaaaaaataatcctgggccgcgcccacggctaaggtttgggttttgtttcttctccattgccctgggggtgggggtcgcttatgcatgggccggggccgggcccctccttatccttatttcgaattacattgacactggcctggccttttacatcgactggggactggccatggccttgacccttccccatcttaattgtagtggatgtccatttccctttttctgttggtggggtagaagaggaagaggaccggcccccttctccttt

SEQ ID NO: 154043 - DNA, 357 bp, Zea mays
  Clone ID: MRT4577_72065C.1
acacacacttgagccccacccgtgccgctcccgccccgcatcccttagcctgacgctggcgccgcctgatggccatgtacgccgccccagaacgccgcgtggacatatgcggcggccgcgtggagggcgcgtgcaccgactacttgctcgacacccacgccgcgtaacccaccgtcccgacgctagtccagaggtgcgccccggcgtgcgccgactgggggaaagacggccgcttactggcgctggactggtgcgactccacccctgagctgtccaggctcgcgcgggcctcatttgcgcttcaccgccgacgggctgccggtcatagaggagataccaggcgacaaagggtgctat

SEQ ID NO: 154044 - DNA, 273 bp, Zea mays
  Clone ID: MRT4577_72066C.1
ccgggccgacgcacgcgtccgaaaagccaaaagcatcaccgccgtgtctttctattgcagcctccctccaagacggggacgcgctgtttcattcggacacgacccgcatcctgccgccctttgcctacctgccatcccttccgtccacgcaactgaagtacatagtgttcacacacaacacctgccccgccagcatcacgaaataagattctgacatccgcaccatgtactgcctcctcgcgaaactatccaccaataaactcgccaccttgg

SEQ ID NO: 154045 - DNA, 321 bp, Zea mays
  Clone ID: MRT4577_72067C.1
tcggcttaagcagccactcaccctgttctgaagataatagtagtggaagcagagatcgagtgcttcacagaattacacaggagaggaagacttacacccaaaccaggctgcactagtgtgccgaaacagctgcatgcacaccattcatcacatctgttgacactctcaacttgtgcaaatatctaacatttacccataccttgagcaggtgataagtcaaattgcactgatcccaacgcacgaaaaaatctactctgaccctaattgatagtcattatgcaggatctacaatgtgaactgtatttgcacctgctgtgcctt

SEQ ID NO: 154046 - DNA, 392 bp, Zea mays
  unsure (1)..(392): unsure at all n locations
  Clone ID: MRT4577_72068C.1
atatttttatattattttttttaggtggtgagtaaaatttgatgtaggtgttatatttatgttagtagaagncnngatgtttttttttttttttttttagaaaggtagacaaaattaaaggtgggggaaaaggggtagtataaatattaaaaggggggggcgaaaaaacctaaccaaaaatgaaaaattgggggtgcatgggaaataaaatggagggggtccaaacaacccaaataggtgggaaaaaagggttaattttaagggcttttggggggggataatttttaaaatccttaacggtgggattaacaaaaaaaaagggggctttttatggggtgaaaattttaaaaattgagggggccgaatttaaaggggggggggggtaatttttt

SEQ ID NO: 154047 - DNA, 736 bp, Zea mays
  unsure (1)..(736): unsure at all n locations
  Clone ID: MRT4577_72069C.1
aattcggcacgaggaccgctctcgctctcctcctcgctctagccgcgaccacgcgacgccgtgggcacacgcacaagcacacggacccccctcccccctacccgctgcctccgccgcggctcgccggagatggatggctccggcagctgggacgctatagactggaaccaaatcgaggatccgaggccgcggaggtcgggccaggccgtcaaggagagcatggacgacttcttgctcgaggacgaggaggtgctcgcgcagggccatggagttgttctactaaacaaccgtgatgctggtacactttcagttacaaatttccgtcttctctttgtgagccaagcaaaaaaatgtgtcatagagctgggtaccattccactgacgacaattgagaagctaaatgacgatgtgaaactccaacccttgccccacctctctgataagaaccacccccgtgaacttcttcaagtaattggcaaagacatgagaatcattgtgtttgcttttatccccagaacacagcagaaaaatgaagtgtttgatgctttgaggagatacactaaacctgctaatttgtgggatctatatgcattttcttgtgatccatccaccattaagcatgattctgagccaaagtggcgtctcttgagggaatactttcgtctttttaggagaagtttaccgctacagggagtcnnaggaagtttctttgtgtaatgaatggtggaggctaact

SEQ ID NO: 154048 - DNA, 345 bp, Zea mays
  Clone ID: MRT4577_7206C.1
aattaagggtcgacccgcgcgggcaggaaaatacatgtcccaaggacgagaagcagacattaatcaatcattttcatgagaagcttgttaagctgaatgacatgatgaagacacatgcctctaaaaggatagctgataaaaggcatatgttcatggaggaatttgtggctgaattctactaagagtccagtgtcatggcttgaggttgaacaaccacattttgagcctgtttcaaatagtgcacttggcgaaccatttcttaacaacccatgatgatgttggatacctggcctacttttttttcgatgaaaccatgttaataaacaatcgtttgtgcaatctatt

SEQ ID NO: 154049 - DNA, 272 bp, Zea mays
  Clone ID: MRT4577_72070C.1
cttctgcatggaaaatcataaccaacatggctgcagtagacttcttagtggtatccagcaccacttgcagagggctgctttatcatattgtacttgggtgtaggactctagtgttcttgggtgtattgcatgggctgcattatctacagcattgtacaataacaactagaaaaggcagtatacttcactgatgcttgtctggtaataatcacttctgtgttataatggaaggttttttgtgatgtatgaaacttgtgttttttatatataaa

SEQ ID NO: 154050 - DNA, 1021 bp, Zea mays
  unsure (1)..(1021): unsure at all n locations
  Clone ID: MRT4577_72071C.1
tatccacttcatccagggaaataaaaaagcagggtggtttggaatccacatccgtagggcgagcggcacggcagcggaggggagcccacggcaaacggcatcccgcatccctatcttcctccctccctctctcgctcgcgtcgcgtggttgtctgcctggctggttgccctctcctccagagacctctcctgtctccacccctttggcctttgctcgtcgtggcgctctcgtacgcgcccaacgaggggagttaccgcccggtttcgcttcgtacggacggttgatacttgatagcgagttaatactctaagacttaaaggaggcgcggcgggcgtgggggcgagcgagcttgcttccgggggttggttcttgcgggaagctactagaaggaggggggacgaggaggagtgtggagtgtgtcttgctttgcctcgcctgtcctggtttgttagcctcccgctcgctcgaggccaagccgacggacaaatcttggtttgggacgcgccgccgcggtaggattcgggtgcccctattccctgtttctttccgaggattccgcgaggttcgctgccatggagccagcaggcgtggcgcattgaggcgtgcgtgcggggccggagagggacatggatctggagtccgcggacggagcggaggcggctgacgggaagcggcgtggggagtcattacgcgcgacgctgctgctcgcgtaccagagcctcggggtggtgtacggcgacgtggccacgtccccgctctacgtctacaagagcgccttcgctggcaacgacatccagcactcggagggcaacgaggagatctacggcgtgctctcgttcgtcttctggacgctgaccctcatcaccctcatcaagtacgtgctcatcgtgctccgtgccgacgacggcggttttatgtaatataaaataaagtataggtgaagtacatgtnnttagtantaaattttatcctgtaaatttatagttattgaatttatgactaagagttggtaatcgtgct

SEQ ID NO: 154051 - DNA, 313 bp, Zea mays
  Clone ID: MRT4577_72072C.1
aagaggaatcgaaattaagattattagaaaaagaaaaggttgtattagaaatagagagtaaaaatgacaggtaataaactaacagctagcaataacataagcagctcgcgtaaaaccagaacactctcatgagtgaaatattctgattttatatactacttgtggctccgcgtacaacttattgagaaaaaggttatattcggtcaatcaaaacaatcatctaaaaaccattagagcactggtatacttgccaggtaatgtacatggaacaacattgatcaggctggccagtaaccggataaagcttgtgatt

SEQ ID NO: 154052 - DNA, 327 bp, Zea mays
  unsure (1)..(327): unsure at all n locations
  Clone ID: MRT4577_72074C.1
cacatccaaatacacacattggtaaaattaaaatgcnngccgtgttatgtcatcgctgtctacgaaaaccaccaccacaccaaccaatccacactactgatttgatccctctccaacccgaccaaaaaggaatttgggggggggttgcagaaccgaacattaacacggcaccgcgctctaattgctgaatcaaactagcccgttgctcctttcgcctatccattcgtcaaggtatcctgacgaggacaccgtacctgccgccgngccaagccggtcttgatcggcatcgggagcatcgccaccgtcgccgggggcccgcctngcctt

SEQ ID NO: 154053 - DNA, 2132 bp, Zea mays
  Clone ID: MRT4577_72075C.1
cttcctccgcctcttcccgcgcgtgttcgacctccgcgccccgctcccgctctccctgtccctgacccccgccgccgcgggcctcctcgcagtcgccagctcccccgccgacgcagcgcggacgctccaccgcctcctagcgatgtcggtcacccgctccctgcccctccgcgccgtcttccgcgtctggcgcgagctcgccctccccgacgacttcgaggactccgtcgtcgaggggcacccacacctcttccgcctcgtctccaatcccgccgagcccaacactcacatcctccacctcgtcgccgaccaggcgaccgaggacttcaccccggcggtggagaaggcccgcccggacaggtacgccttcaaactgcagtttccgccggggttcaggctggccaaggaatatcggaagaaggtgaaggagtggcagctgctgccttacaccggaccgtatcaggtcgtcagtccgggcgctggaggtagcaagagggtgtcgaagttggcgaggaggaagatggagaagagggcagtagggattgcgcacgagttcctgagcctgaccgtggagaagatggtggaggtggagaagttcagtcagttcaggaagtggtttgggatcgaggtcaatgtccgggacgtgttcttggatcatcccgggatattctacctctcggcgaaagggaagcggcacacggtgtttctgagggagatgtatgatcgtggaaagcttctcgagtcgaatgatgtctctgaggcaagagccaaactcgttgagctcatgctccttcgtcggcgtggtctcgggaatgccaattcaagtgccaacatggcttcaggtgccactgctgatgccagagagagtggtgatgattttgttgatcatgaggattgtttgttggatgtatcagagaagtgatggtagaaggatgttgtcaacttcatgggaactcatgtcagtaagccatgttgaacggtgcttagcgcacttctgatggagaatggattaatggtaccacggacaggaggtttgtgtgctggagataaccaaatgagaaggtgcatggatttccagagtggtatgacttggtcgacaaagctagaggccatggatatgcttggaactcaaaagtcatgtttcaactgtgcgctaccatgttggtaggtcgagattcatgaggaaatgttgaacctttgaatttcggtccccttcagttctctgctcagattctttttcctgacaaatcattctgccaaggttgcttcattccatttgatttgtcaggattcatgagtttgctctacttcttcactttgatctggcagatgtactttttggttgtggcaatcgcctgaagtacaaccactggttggtgtcattgcctgaatcttattatttgaacaaagcattgcctgaattgaagagccaggcatcattcttcagcaatttttgcaacccgggtcgtttttgcaacattcttaggttcaacagaccagcaagatgtgcaaacatgcttcatgttgttggaccacttcaggcacctacatcgctagttcagcttttgagttccttattcgtacgatataactttatcctttcaacaattacgcctactctgatgtggggacattgagcacctatgaatcttaaggttttctgctggttgtcatcacaaaactagttcctgatgttcaaatatcaagaagagatggtggttgaatagccctatatgttggctaatggagagacagtccggcaccttgtgataggcagataggggtggagtaatggtactgcattgttgctagctgtttctctatatctaacaattttgtggcaaggaaacttaccagccagtctgtgtgctgaagattggtggttaccgtctgcctcgctgcagctgtatcttcaattcttcatacacattacttctgctgtcttttcttgcctggagttggttctgactcttcgctttggagggcaaaatgctagtattataattcagaaccattgttgcgataatttaaaattactttaggttattccagttatcagcctattattgttggagattggctgttaaactatgcctaaaatttgaaatggggagagaaccaagttttgttcc

SEQ ID NO: 154054 - DNA, 672 bp, Zea mays
  unsure (1)..(672): unsure at all n locations
  Clone ID: MRT4577_72076C.1
cgggatcantttcaagtagcaacggatcatggctagttcagttatctggatagtgtgaaaccatttgaattatataagcgattaagtggaaatcaaaatattgaagaaaaaggttaatatcatggagacttagcttgcatttcataatgaggatggaacaacacaaactagccatgctcttcttgagcctatatttctcatatggttgtaccagactactgtctgccaaagttgaagtttcagattttggaaattaataatctggaatatttgctcaacaacctttgatatgcattactctgatttgggactagataatgaatcatacatactagtaagatttgtagtaattatgtatgatgccctgacgcaattcattttgttttggcaacccgcaatacagactttataacgatcaggatgtggtcttctaacagttatattcaccctatctttattatattattctcagatgagggcgtttacaggtttggtggacaccaactacatactagatgctatccgtggttctgagttattggaagtgcaggttaggctataatttctacagcactttgttgactactgaggtaatatgctctgacattaccgtgtctacacttttttttttgaacttgtattgcctcaatctatgctacagggagataatgt

SEQ ID NO: 154055 - DNA, 436 bp, Zea mays
  Clone ID: MRT4577_72077C.1
ctttgccaccttcgcgcgccccacggcgctcagcggagggatctagctcccggacgcgctccgcctacgttaccgcgttcaggacttcaccaaggaggaacaggatgagatgtatgtcttctcgacaagccagaagcgggtctcggttgaatttgttggcacagacaaagttcaggagaagctcaacaacttcaatgagttggccagtgcatccgtttcttacatgggagtgagctcaattggagcgcccaatgaactaaacagtttggttccaaatctcaaacttcttgacttaactggaaatctgttctcacagtggcaagtaagaattcccacagaatggttcttgttacttcaatttgctatacttagtcacttacaattggtgtgactttatataacatcaaagcaacaagagaaagtcttggtggtacta

SEQ ID NO: 154056 - DNA, 205 bp, Zea mays
  Clone ID: MRT4577_72078C.1
attcggctcgagggggaccctcacgagcttttagcctggctggccccatactacaattggggggtggtccaagaatccagagccatagcaatcattgctcaacatacgcgtgaatccaacgaagtatgactgcactgctcctaatgacaatcccgtcctgtaggctttttgaaagcagatgccgtacctggtatagccatgcaaa

SEQ ID NO: 154057 - DNA, 2217 bp, Zea mays
  Clone ID: MRT4577_72079C.1
cccagttccggccgcctctcgtgctccgagcctccgacggccgttgtggccctgtggcgggcggaagcaccctcgggcgctagccttctgtttctcctcttcgcggctgacctgcaaagaatccccgaaaaagagttgaggagagtgtacgagttgggtaaagcagaggaagagatggtctgggtgttggaccccgtcgacacagtgcgcgggattcagaagcgttacatcttcgctgccgggacgcattaggtccctcgaggcgggccgggtgtcattgttcaaactgacacatctatatcccgagtccatgcggagattgcaattgaaaagatggtgcctgggatccacattctggtgcacctgccagtccatcatttgttcgtgtaatcgaccgatcaaagtatggcacatttgtcaacaaagtacatggaacccagggcagccgtctgcataaagatgaagatatgatgcttactgatggggatgctgtgacgtttggaactggtaatgcgacctttaggttgtcatttgttcccatagtggttttttttcatggcgcaaaatcgacacgaattgatccatcattacatgcagtcatgaaatctattggtgcatatgctactcgtaagtggagcaatgaatgtacacatgttcttgttgacggatcatgttcgttgacacctgagctcctcgatgcagttatggcaaagaagcagatcatgttgggagactcttttgaggcaatggctgaaaagaacatacacacagagatcccttcttgtacacgctacattccaaacttgactctagacccggctttagatcccaattttgtatatcacccaaagaaagaagataattaaatacttcactgttgattaatttattcatgtgcagtatcaatttggtgagaagctccatggattactggaatcaactggagcaaaatacgtgcacattgacgacttttgtgcaaacagccaggactcagcagctggagacactgatcatcaaattcttgtagttcctgcacgatatccattggaattcagcaagatacgtgtgctgtttactttgtcaaagatcagtgatattaagctatttgcagctatattgtctggccgcctggaagcaacttctattgaaccacctgctttcatcgttacatcctcgaattccacggatgccactattgtggcggattcggatgttgaaatggagacagcaacttctaatcctactggtgctgccaacaagtctcaacatcacaccgagaatatctctgacgatgaaaaacaaaccacaaatataaccaacgaagttgcaaggaagggtaacgttattcacccaaaacacccagagagcgttgaagatttgaaaccgatggaggaggatgtgaaggtcatagagaaaacagcaacgtacaggtccacgggtagagacgaggatgctcgcattctaagcaaggcgccaaaggatgaaaaattagacaccagcagggatggggcttctgatgtcatatttagtcagaatctggtcgtcagaagaagcctcccccagtcagctcctgccgcaccagcagaaatcggaggcgttaacttcaagcgcttcaggaagagggaaatggtgtctggaaacagcttcaaggacctcattccgtttgcgcgggaaccatacagagagtcggaccacgaacgtggcagcacgatgaccgatttcatgcgggaggagaagcggcagaaacaaatggaggccattgcggaggatctcttcaacaacgcaaagtccaagaaaagagcagccgctggaagttcgattcacaccctactcaccggccacagatgatgagagccaggcaggcagcaggagatcacctctatatgcgatctgcatgctcatctgttagccacggcgttagaagccgaattagtgtaggacggctgtcggatatggattgtacctgaggtcatgttagatatgaatggttctgagggaaatattagctgtgattttggcattacgcgtcgggcaagtttagcgttagtctagaatttgaccaaacaagaggattttctccggttggatgttgcgagcacgagggttttcttgggttgaatgttgcatggttagttcaccaagggctagtttgacaaccccattttacaacggaacgctacacctacgagattatgatgtttgatgtgttcagcagcc

SEQ ID NO: 154058 - DNA, 405 bp, Zea mays
  Clone ID: MRT4577_7207C.1
cgggggcgtcggcactggaacggcacaggatcccaaaatactcaatgacttcctggccgcccgacccagcccggccacgccgggatcttgccgggcgacccccacttgcagcttttcttcctccagcgtgatcttatacctgacaggctgaggcacggtgatgagaccattggggtaggggttgatgatttgaaccccttgtttagagtgactggagctgagaatcacgttcatcaaggtgtacatgcgcaccttgaacctactgtgatttgaccagagaggaccgccgcatactgccaggagtaccagcctgctcgaaacatacgacgagggcatgagctgggcaacatgcttattgcgtgaaggctgctccattaacaagagctaatggcgacccgggccttg

SEQ ID NO: 154059 - DNA, 632 bp, Zea mays
  Clone ID: MRT4577_72080C.1
cctggccgggatttggataaacagtcagtggtacagtcatatacgtccgccaccatgtccgaagtcgccttctgcaagtcgttcctcacagccctcgatgcgcgcccagcgaagctctcctcagaccacatagcagatgcgcgccaattcgacgctggaggttctttcaccctcccccgcctcccccatcccccgcacccccaacgtcccacacccaagacctcgcaaaacgcctcctcatccctcagcatatccctcaagcccatgaaatccaccttccccaccgtgcccctctccaacatcgacacagcgaagacgagcatattcgacctcaaatcccagtacgcgacacagtccagcataccggctgccaagatcaagatcctttacaagaagaagccagtcacggactcgaagacggtgggagaggttattgggcaagatgcgggtggggaggttgagtttggggtcatgatcatgggcggcgcaactgcttcacctgctgctgctacgccggtgacgagtccgcctgctgttgcgccgagtgaggcggacaagggccttgctggagcgagtgcagatggaggacctgcggctcaaggtccgagcgggaaggaggtcgtcgccactga

SEQ ID NO: 154060 - DNA, 268 bp, Zea mays
  Clone ID: MRT4577_72081C.1
gccggagagggggcggttgccaatatgcagatcccccagaagaccctgacggggaagaccatcacgctggaggaggagtcctcggacaccatcgtcatccagaaagccacgatccaggacaaggaaggcatcccgccggaccagcattgcctcatcttcgacggcaagcatctcgaagatggacagacactgggcgactacaacatgctgaaggagtacacgctggaccgggcgctccccctaaggggaggcgccaagaagcgcaaga

SEQ ID NO: 154061 - DNA, 489 bp, Zea mays
  Clone ID: MRT4577_72082C.1
caccaaagagagacttgcagcaccaatgggaaaaccactcccagggccctccgtccattgggttgacccttggacacccttcaccaaaaaacactgggtccaaccctgtgtcctggaaactgggttacccttgaagtacataccctgaaattggaaatacgggggtttacctcaaatacacacgagggaagggcttacaaggctactttttagtaatatactttagggcccggaaacagggttttcagggaaattggggggctgcttcactcccaaaaaagagggctttttgggactaaagtcaccagctgggggtttttttggattttcctggggcttggcgacattttcgtccaaaccgaaaaaacctgtgtttgaaccacaaactggtgggggtttaatttgcatgggggcttccttaactttgggtggggggcccgaagtcattttcttaaaattaaaagcctaccgcgcctaactttaatgggg

SEQ ID NO: 154062 - DNA, 751 bp, Zea mays
  Clone ID: MRT4577_72083C.1
ccggccgggatgggtgctatgagggagtcagggagctagtcgtggggacgatgcatgagaccgcggcgagattgggtgggagagagatcctggacgtcgcaaaatcacctcgttccgtcagcagcggaaaccaaagtcaggattccgttatgcttcgcgggagagagaagtcgtgattacagtcgagcatggagccacgggcattcccccacccaaccgcggcatctgccagtctgcgacactgccgccccagcagtggggcaaacactgtcgtcggcgccttggagctttggattggctgggcgcgcgaccggcctctgtctccaggctgcgaggcagcagcaacctccttcgctggctgatgaccgtcttcgccgcggatccaactcccaacgtggtcggcttgcttcccgtcgtcaccattgtgaggtcacgaggatttgaagaatcaccctggtaactggaatctcgagtgccaggcaagttgtgcccttgaccacttctattacccaataatgttctttataatcatttattcatgcaaaattttaattttgatgggacctaataggttaccctagtctgtttatactttttaccttgtttacccctgattcacatgggtagtttgctattgcttatttggttttgggatttttatttcattatatccatgttccaattattctgttatgttatttttggtcatgccaaaaaaaaaaaaaaaaatttgcggccctcgagctccagc

SEQ ID NO: 154063 - DNA, 427 bp, Zea mays
  Clone ID: MRT4577_72084C.1
cctcgaggccggccgggacacattttcaaacgctctcctgaccaacaagcctttcctcggacccctcgtcgagaactcaactactgaacttatacaacattgaaaaaatgttgtggccccgcacaatttcggctctttctaaatatgatgttaccttcgataaaacaacaaacaaggacccgagggctagaggttgccaaatttcggccaatggacgcctgacaacttcaaccatctcttagaacaacccactcaattgtatgccggggccctcaaattgagggttttggacgtcaaggacaagggcacggtgttcgttgaaaagaacgtatgcaggtatgagaaagatacacagtcttatccaccgggctaccaacaaccctatcatccgcttgggggcctggggtgaaaactccttcgggggacc

SEQ ID NO: 154064 - DNA, 228 bp, Zea mays
  Clone ID: MRT4577_72085C.1
cccacgcgtccggcaaatttgagaaagtttctataacaaaaaatagataaattttctatcggacacatcatttattctacatttttattagtggataataatgaaatacatgcaatatcaacgagaaggacttgattcggttacggtttagacaagacaaacctttatatatgcttgtcgtactatggttcagaaaaaagttagtttggtgttttattagttattagt

SEQ ID NO: 154065 - DNA, 263 bp, Zea mays
  Clone ID: MRT4577_72086C.1
aaaaaaaaaaaaaaaaaaaaaaaaaaaaaaaaaaaaaagacaatcaaatataaagggttccggcttacatacacctgcggtacggcttaaaaaatctttctctacattcactttaattcaattcactttccacttttttacatcgttattaccttggcataccctaacttaacctaatttaatcacactttcactttctcctcctttagtcatactttataataccgaacagatccgcattgatcacacctttccaacattta

SEQ ID NO: 154066 - DNA, 452 bp, Zea mays
  Clone ID: MRT4577_72087C.1
tcttgcttgttaggaatagtcccactcctggtgcccctccgactcgtcggacccgtccgagtccacgtcgccgtcgacgagcgcctgtaagaggcgcgcgaggaagctcatcgacgagttcgaccgcatctccgcggagcagcagcaccagctggtcgtggagaagaagcggaaggcgggtgcggccacgccggtgaggaagcaggcttctgcacccgccgctggggcgcctgcgagggcgtcgcccaagaggaaggccgacgcaccggccgctgtgccctcatcggcagatggggcaaggaggacctcttcgaggaacaagcactgtgccctacacaagtctggagtttgatcacacagcaaatgatgtgcttagggtggatggacagtttgcttatctattggggattgaaatggacctgctgttgtagtttagaagaagtttatgagca

SEQ ID NO: 154067 - DNA, 491 bp, Zea mays
  Clone ID: MRT4577_72088C.1
acggaccagcagactctagaaaacgcagggtaaagcggagcgccgatggccacagcgcgactactgctccgaagcgcctccctgctccccctccgccgctcgcccctgcactcgtcccgcttccagccctgagccgccatggcctccgatgccgccagccagttccagaagatccagatccagcgcgaggacacgacgtttgatgcctatgttgttggcaaagaaaacgctcctggagttgtagtgttgcaagagtggtggggtgttgactatgaggtcaagaatcatgccatccatatttcccagatcggcgatggatacagagcacttattccagatttgtaccgtgggaaggttgctttggaggtagctgaagcacaacatctgatggaaggactagactggcagggtgcaatcaaggatattcaggcttcagttaaatagctgaaggaaaatggatcacccaaggttggtgttactggttattgcat

SEQ ID NO: 154068 - DNA, 132 bp, Zea mays
  Clone ID: MRT4577_72089C.1
gcatcgcacgcctgtacgggccgggccgtaattgctggttggaccagctagctaattattggccggacgacctttcttttctttgacagaccctacacataattaggctccgaacatttccgtcaacaataa

SEQ ID NO: 154069 - DNA, 252 bp, Zea mays
  Clone ID: MRT4577_7208C.1
tctaagaactgtatctcctacctaaaaagttttctatttcactgacacatattttcacctgctatcgggacttgcacaatgtctttactctcttattaaaagtcttgttgcacaaaccattttgagagatctacttttgcaatgttacattgatcaagcatctgatgtcttacaatattccctcgcacttcatttacacctttctaggaattgccaaatacattttcatccacacctttaagaatttcttac

SEQ ID NO: 154070 - DNA, 417 bp, Zea mays
  Clone ID: MRT4577_72090C.1
ttccttgcttcagcccccgcctacagaccaacgcgtggggagagctacaaaacacgccgaggagggcacggaacaaaccacgaagaggaggagacggggacaaccacagcgagacagaacacagaaagaaccgaccgcccgcagccctgcacgggacgggcaccaagaagaaggcaaaagggcggaagcaggaacgcaccaggacgagcacagccagggagaaaagtaccacagccacgagggagaagagcacgccgaagccaccaaaacagccaagaacccgactgagctggacaaaaagcaaaggaggacctctcgctacaaatatgactacaattgtcttgaatgttgctaatactaaggcaaacattgatacaatgcagtagagggctattgatctgctgtctgatgatgtca

SEQ ID NO: 154071 - DNA, 253 bp, Zea mays
  Clone ID: MRT4577_72091C.1
ctattctaaatacaaaacaaacgggggtaaaaacaacatttttgggcttttacaagacacactacaaaacgaaccttaaatcaattgatgtctgaggcactacattacagctcccagctcatgttattgaaacaagagacaaaaaaggcaccatactcgacagtgatactaccttgacataccttccataactcgttttcaaacaaataattgatctggtatttagcaacgcataaaatatagccttccataa

SEQ ID NO: 154072 - DNA, 614 bp, Zea mays
  Clone ID: MRT4577_72092C.1
gcaaggttaaaaaccaactttgggggggcaaataaaaatggacccttccttttcctttaaaataacaattttgtttggccgggttcacttaaagcccaactttaaagggtacccggccccatttaaataaaaacaaacccctaaggatagggggggcccctgccattaacatttttggggggccattaagcccggcccaggatctattggacttttggaaaagctaagggaaacaaaaccctgtttttattattttattggaaaacttttggccagtttttggcaaaaggggccagggctttgcaaagtgaaatccctggcccttaaaatggctccccgggaaaaaaaatcggaccttgttgggggaagggaaaaaaaactgggctggctctttggggggtataaggccctcccaaggggaaccttgtttaaaagcttttgggggagtctaatacttgggggccaaaaaaaaaaacccctgttttgggtcccacggaaaaaaaaacaaagggccgcccaaaaggttaagggtaatgcaaccctgggggtggccgggggcctcttttgggacccagttaaaattcaaaatctaaccggaggcagggggggtgggg

SEQ ID NO: 154073 - DNA, 189 bp, Zea mays
  Clone ID: MRT4577_72093C.1
ggataggggcctaccatggtggtgacgggtggccgtcgtacctgtcgtcatctcagctctccgggccgagatagcgaagaatggacacgggatactttctagcttagagtgtactccgacgaatctattcttgattttgttctggtggtaaaaaaaaaaaaaaaaaaaaaaagtaaaaatataatctat

SEQ ID NO: 154074 - DNA, 249 bp, Zea mays
  Clone ID: MRT4577_72094C.1
caagattgaagcagtttacgcatggccctgagattgcattaactctttctcagaatgatattgagctcctggccctactgttggccatacgagaatgaggtgtataggcagtggtccaagagaaacatccataggcggatggggatgtccggatctgagctgccacatagctgctgggatttcaagatggcatgccagctgctcgtgcataatcagtgggctttgcatgactggggtgatggtgattgt

SEQ ID NO: 154075 - DNA, 421 bp, Zea mays
  Clone ID: MRT4577_72095C.1
cgaaatccccgggccgaccacacccttccgttaaaaacctacggccctttcgaacctttttttaccggaagtaccactccttcccgggccgcgcttccataaaggaatggcgcgtgctccactttctttcaacaacctggaatctacctcaacccatttgccttttacttccaacccttgtaatattaactaccaccatatccagttacctgttttgttttcctttgtcttcttcaaccgctttaatcgcccggttccaatcaaccaaccttttaatttccaactccaccattttttttcccttattttttaaatatttccaataaataaagacctcaatcccctaaaaattgcactttaattcaaccaaaaaaaaaaaaaatggccgctcttttttataaaatccaatttttccttcccc

SEQ ID NO: 154076 - DNA, 539 bp, Zea mays
  Clone ID: MRT4577_72096C.1
tggaggtccactgctcaccatcggggatctactcagcgacctcgccgtcgacggcggtgacgaccccctcgtcggcgtcggagatgcgtccgccccctcctctccatcggcgacgcagcaagcggggaaggccgatccgtccgatctcagccggctcttcgaggaacactacaacaatttgatgaaagctctagaagagaaggatccttcatggccctcgctgatgctgaagctgtgcgcagcattgaagactgcagataagctggtgagttgcgcgaacatgaacgcggaacagctgctggagaaggtgaaggcgctggagggcgtccttgagaggagcgatcatgcggtggcagagattgtagaagctctccagaagtctggcctcgccaaggatcgtcaaggttcccaataaaaaacggctagcaagtagtgacatagtgctgtactgtactggtgtcacttttttgtttatcatatatcatgcaaatctctgggtattaatagttgtatgtcgacctgtgcctccacagctttgc

SEQ ID NO: 154077 - DNA, 386 bp, Zea mays
  Clone ID: MRT4577_72097C.1
aaaaaaaaaaaaaaaaaaaaaaaaaaaaaaaataaaaaaaaaaaaaaaaaaaaaaaaaaaaagagaaaaaaaaaaaaagagaaaaaaaaaataaaaaaaaaaaaaaaaaaaaaaaaaaaaaaaaaaaaaaaaaagggcggactttttaaaggacccaaacttacaccccctaccattgcaacttaaaagtttttttatagggccacctaatttaaattaactggccatattttaaaaaactgtgaaactggaaaaaccctgggtttcccaaattaaattgccttgtacaaaatccccttttactcagttgggctaataacaaaaagccccgaacaaatggcctttaaaaaaaattgccaaccctaaaaggcaaatgaaacccccct

SEQ ID NO: 154078 - DNA, 312 bp, Zea mays
  unsure (1)..(312): unsure at all n locations
  Clone ID: MRT4577_72098C.1
tatcttattttttccataatcacacctcggtgcggtttttatcccaacgggccagggaaactcnnnntcttttttaaaatattatttacacttactctctacacaactacatattatgacatcatttttcatataaataactcatatactacattcaatgcttattcaacaaaacttattattccaaaaatcaattctactatcattcattaaaaatatacaactagaatatcacttttattgcacattaatacacatcatctcttccaaaaattctcacatatattatgctttttactattaaaaataatc

SEQ ID NO: 154079 - DNA, 619 bp, Zea mays
  unsure (1)..(619): unsure at all n locations
  Clone ID: MRT4577_72099C.1
tttttaattgctgttgtacctttctacttgtcagctgtttacatgtatttatatagtaaatctagaatcttgaaataaacatgaatcaggaaatgctagcattcgttgtttgcatgaaattaactttgattgtgaacagttnaccacaaggcctgaaaaaatttgtgacaagaatatgaccctgtagactactaaaacttctctcctgtcactgtaatgattccactgttactgcactaaggagctgtatttagtattgttggttctgttaacatgtgcatagtttcctgctttctgtgtttctgtaaggtccaactgaggaaaaaagctgtattgaaatttaagagcagttagttattggtgctctgatagtagatctagctgtttaatactgaactttgtcaattagttctattttcatgtgtggttgcttcagtaggggtatggaaaattcttaattttctatacataaagaattttcaaatgatttttgagaagtttttccgtcaattttaggtgcatgggactaacaaaaagatctgtatctatttatgcagctgaattttttcaggacagaactgaggttcaatgtttgcatcgttggcagaaggttcttaat

SEQ ID NO: 154080 - DNA, 219 bp, Zea mays
  Clone ID: MRT4577_7209C.1
aaaaaaaaaaaaaaaaaaaaagaggaacggaagtgcggagacgaacagacgagagaaggagcggacgcgaagcgaggaccgctggcggaaaggcacaccgcgccaaaggagagaagctaacccggcccggccggcgaacgaaccagaaaatcaacgctggacaacaagggatcacggtacatccctaaacaacgcctgacacacccgaaaacctcgcca

SEQ ID NO: 154081 - DNA, 293 bp, Zea mays
  Clone ID: MRT4577_720C.1
cttccaaccggttgaagatggcaccggttgcctttattccttaaaagcgctggagagtttaaaggattggtccaaggcctctggcacgcttgccgtataattcacctgcgcaagttttgggcgctttagaaaagccagcgcgtgcccctggtgtgggaaagttttaaaatgtggtaaagttcacatttagagaggtcgacacatctacgggagactctgatgatgatggtgaggatgaataccacctgttagaggtcttaaaagtttgatcagctgattatctgctgagggtt

SEQ ID NO: 154082 - DNA, 399 bp, Zea mays
  Clone ID: MRT4577_72100C.1
caatgctaattggtatagactgttccttttattgtttaaacttttttttttttccccgaaaaaaaatgctcacatagaaacttaagaactactacaaagcataccaaaattaaacgtcaggctaaaacgggggccaaaaaaaaaacccccaaaaagggttccaccccatgcaataagatataaaggggaaacctcacgccaaccaaaaaaaatatccacatgacattaagtggttcttgaagcttcaggcaactgtaaattgtccaaaaaagcgggttgacccacattcacggttttgggaccggggccccctttttaagggggggagtcctcttataagccgccagggcccccaaatttttcacccgcccccgggaacattttggaaaaaaggggggg

SEQ ID NO: 154083 - DNA, 559 bp, Zea mays
  Clone ID: MRT4577_72101C.1
cgagtttttttttttttttttttttttttttttgaaatcaaaatatagattcatgacgtaatgagatatgtgtagtaataaaatttatcattacttaaggtaaggtttcactaggtactgcatactgaaaacacacggaggtaaaacggaaaaaaacaacatgtgttgagcgctgaaaatgaccatcgaacggtctggtcctgtaggtcggatagtccacggttgggacgattcgcatgtgcgcagaattagtttggattccatatttctagcgggattaactcggtaacctacttagtcgattaaacccccacaatcgaaccaatcaaatctacttaccaaatttaccttatttacattgttctttccattccttagaaatagtaataatttagtcttagcttagccctagtcttagtcttcctcgacctattactttacctctccttggctcgatgtcgtctagaggtgtcttgggtggcctgccagccccaagacaatccctggatatctcctccccggcgggatccctcctcggaggcgagattcaggctgggcc

SEQ ID NO: 154084 - DNA, 335 bp, Zea mays
  Clone ID: MRT4577_72102C.1
aaaaaaaaaaccccaaccggaaccaaacggcaaaaagggggaaaaacacaaaacccggggcaaaaaccccaaagacaacaaagggggtcccccggcaaaatagaaatagggggggcacaaaaggaaaaaaagggttaaaaacctacacaaaatcgggttcctaacgggaaaaaaggaatcacaccctgctgggcagggcctaaaaaattttaccccagggtttccccccttggaaggggggttcttacccaatcccgggggttttaacccctttgcccaagatacctttacaaagcccctaagagacgagacggcccccccaagaaacgggggcc

SEQ ID NO: 154085 - DNA, 250 bp, Zea mays
  Clone ID: MRT4577_72103C.1
gatgaaactgtcagcctatgatctgttccaacgggggggaatagatagagatgcccgaggatcaactaagatttcggggcaaaaaaggggccgcggagaaaaaattctgttttgtgtaaaatgtgctagggattgcacaccgggttcacgattttgaacccccctgttttggttaacaaatcatctccaactgactttctccgctgagggggtctgcattaacgcacggcctaggccaaaactcattttt

SEQ ID NO: 154086 - DNA, 143 bp, Zea mays
  Clone ID: MRT4577_72104C.1
gacatcattatatttctatgaacattatgatgtttcatgggctagtttctctcatttcctaaagaacacacacgatcctaacacagtgtccagcctccgtgaccatccttctgctgtttctgtcattctagggggctccccct

SEQ ID NO: 154087 - DNA, 297 bp, Zea mays
  Clone ID: MRT4577_72105C.1
ttgacaccatcggtattcttatgatttggtgctaatgaaacccccctgctcagagggggatcttgcgcgatatcttatataacctgattcggtcatgaaaactatttttttcctaccaaaccacattataatgagaggtcgttgccatttctgatgctaactgctttattttacaccaggtatcgcaatgcacatgtatgggacacattgacgggccttttcgattatttcgctataacctgtatcatggaatatgggacctcctgccttcatggaggcttacccccctcactagaa

SEQ ID NO: 154088 - DNA, 304 bp, Zea mays
  unsure (1)..(304): unsure at all n locations
  Clone ID: MRT4577_72106C.1
ggtccggnaatctcccgggncaaggcaccaagcgcacctcttagcagtgcggttcatggggctggccgccgtagagatgcccagcgactcaaggcacaagccgccatgatcgtgcgggtcagcctgtcctacccacgcccctggcactgaggcgcgccgaggagcttgggatccatactggggatctacccacatggcggggctgcctcagccgctgagactgggcacggggctggctctcgcctacactaagctggcattcctccgccccctgctgcggctcctcactacgtagggcgaggtc

SEQ ID NO: 154089 - DNA, 364 bp, Zea mays
  Clone ID: MRT4577_72107C.1
gcgtccaaccacacgtccgggcagaagcaattcatcttctccacaaccaacaggaggaccggcggcggaaggaggcacggaggggcaaggaccttcaagttcccttgctccttcaaaaacccgttggtaattggcctgccggaaaactcaggttgcggaaagagcaccttcatgcgcccggtcaacaaacttctttccgtgggccccccgagcccgcccaaagggccggaaccccggactcaaacacgctcaacagtgacaccaagacagtgatatgcctcgacgactaccatttcctggaacaggaacggcatgaacgataaaggtgtgaccgccctccaccctaaggccaacaactttgatc

SEQ ID NO: 154090 - DNA, 491 bp, Zea mays
  Clone ID: MRT4577_72108C.1
gcattccccacaaagccatttgaaccccccacgtctcctccactcgttccccatttgctgagtatacatagacgggccgacgttcggagttagatcctcctctcccgatggcggagctgtatgctgcatcttagctgcatcaacaatggccgttggatacatagtaggatcactgggcggatcctttgccaatggatacctgggcgacacttttatctctcgaaataaggtatttggaggaacaaccccccagactgattatgataatgacgcggcgtcatgtacacagacaccaaattccaccgtactgggctcccactgctgttgcaccgcttgtcatgaacccgatccttcgacataacatttgtcgagcacatgcccactcgggtatactggtgctgaagaaacagtctctgcgacttgtcgccgccatgaaaccaaatctccttttctagggactgaatccaatgtaataaaacgaaatacacttc

SEQ ID NO: 154091 - DNA, 159 bp, Zea mays
  Clone ID: MRT4577_72109C.1
tgttttttcagagtggccaaacctgagcgagtttgcggagagtatgcagggtggtgagctccctcaagatgctgcgtttgaagcggtatcccagaattactgtccttccaggatatctggtcgacctcgcttctttcaaaatactattcattagcattt

SEQ ID NO: 154092 - DNA, 1042 bp, Zea mays
  unsure (1)..(1042): unsure at all n locations
  Clone ID: MRT4577_7210C.1
gcgcgcgcgcgcgttcgcgcgcgcgcgcgcgcgcgcgcgcgcgcgcgcgcgcgcgcgcgcgcgcgcgcgcgcgcgcgcgcgcgcgcgcgcgcgcgcgcgcgcgcgcgcgcgcgcacatatatntatgtgtatatacacacacacatatatatatatntgagcgcgcacacacnaanacacacacncgcgcgcgctctctcactctctcgtgtgcntacacacgcgcacacacanaaataaananagagatgtctctatgtgtgtgtgtatanangcgcgcgctcgtcgtctctatatatgtgtcgctctctctctctctcacactctttatatatatatntctctcgcgagagcgagggganattgcgcgcgcgngngnatcactctcgcgcgcgcgcnctcactctctcactgtgtgtgtgagagagatanacactctctctgattatactcgcgcgcgcnactatatatatggctctctctctctatatatgcgcgctcatactctcagagagacgctcncncacacacgcacactatatacnatatatactcccgcgcgcgcgcgcgcgcacagagagatataggggggagagagacacaananacatacgcgctatacacgcacacacacacacacgctctctctcacactctcacacacgacgctctctcgcgctctcgagngngatattattatagtagagtgtgtatctctctggtgagcgcgcgcgcacacactcncgcacactctcactcgcgctctcccactctcacaaaatggcactctctctctcnanacacacgcgcgctctctctctcnngcgctcccgcacacacacacagaganatgattctcgctctatatataaanaatatacagaaagaatacgcacgggcgcgcgcacacacanattgtctctatactntcacgctcgtcgcgcgcgcnggagtgagggggagananagatttagcacgtgagcacgtnanagactcattttatatatacacggtgggcgcgcgcgcggggcgcgcgcgcgc

SEQ ID NO: 154093 - DNA, 881 bp, Zea mays
  unsure (1)..(881): unsure at all n locations
  Clone ID: MRT4577_72110C.1
gggcaagnatgttctatttatatcggtctcaggtaattgtgagcagcagtagagactaagcagttctgtaattgcatttgttctaagatcattttctgtagttgcatggaagcaataactgaatcaagaatgctctatttatttcgatctcaggtaattctgaattcctaagcagttctgtaattgcagttgttcttagaccattttatgtagttgaatggatgcgatatctgaatcaagaatgttctaagaccattttctgtaattgcagccattttggaggacgaacgagcaccggggagagtccaggaggaggcagatactgctgggacatgtccaagccagtggagatgcagtggagatggagatcaacattggcatggagaagctgtgaaacccaccgcagcagaaccccacccagaggaaggtacgagcaacacattattatctttaccacacatccttgcccattcagtgtattggctgttggacgtgtttgcacttgtaggttggattaggataaaaacaataactggctgggaatagagccacaaattttcttattagtcttcttcactataattctttttttagcaatgctagatcatccttcaatatagagctaatgaagcacctggtttagtattattaagtttagatgagtgacccatattttgaaactattcttggaaaactgcaccaatagccaatctcgttaggagaaacatagactgagtcttcataatctttgtttttcctctgccttacgtcaattntcacccattatctaaaagcaaatgttntatcttgttcctgagatcctgcttatgttttgtgaggggtcctccccttggctcttcatttaagcttgtgagcacatg

SEQ ID NO: 154094 - DNA, 143 bp, Zea mays
  Clone ID: MRT4577_72111C.1
caaagatcgatgctacctacagtgatatgttcactggcacagtactagctgtagagagattggaagtaatgctgattggatcctacttgggagctgcttcagcttctgctaagcctctacatttcatccatcagtgctgcaaa

SEQ ID NO: 154095 - DNA, 1066 bp, Zea mays
  Clone ID: MRT4577_72112C.1
gtgaaggctacttgattatagcatgattcgttaaactgtaaccggaaccagcgaattacaccacctgaagtccagaaaggagcaaccagcatgcaaagctgtttgtacgcgagatgcatgcaagggacggatagacagtataataacaaccggaaattcacgtcgatcagctagtcactgcctttgcagggtaatcgaacggcagtggctgcacgtcgtcactgagcgaactggcgtgcctgaaaccgtacgccctcagcacctggtcgtcggcgaagttgagcgcgcggcgcatgccctggtcgcagctgtccccggagtagtgctcgttgcgctgcccactgcacggctgacaccccgtgaagtgcgtcacgaacgggcggcgccacccgtgcaccccggtctccgccagcccggccccgcccagggcggcgttccttgccaccgcgtactccgcgtgctccctctccgcgtgccgcctccgcagcgcggcagctcccggccgccgctccatcgcctcgtacctctccgtcatgttggcgagccgccccacgatctccatccagtagccctcgaagtagtagccgctctccaggaacaccttgtcccgccaccggctgccctcctgcagcagcatgtacacgagcgcggactggtcgtccgactcgtcgaacaccttgtccttgaacgtggacttgagcacggcgccccagtgctggtagtccggggagtcgggacccatggcggcccacgcgtccatgaagtcgagcgaccactggcagttccggatgaggaacacgccggcgttgaggctggtccaggagctggcctcgaacacgaggctcggccagccgtggacgacgaggttgtgggcgcggtaccggcgcagcgggaggcggaagtccatgtcggtgagcacggcgtcggagtcgacccaccacacccactccgcctccgggtgcgccaccatggcggcgcggatcaccggtatcttggcccagtaccggtccatcgacggccgcagccggacgatggggtacagcagctgcacgcccggacgcgtggg

SEQ ID NO: 154096 - DNA, 2116 bp, Zea mays
  Clone ID: MRT4577_72113C.1
ccgggcgacgcgtacgaggacatcccggtcgagatgtccggccgcgacatcccgccccccgtctccaccttcgccgacattgacctcggcgacgcgctcaacgaaaacatccgccggtgcaagtacgtccgccccacccccgtgcagcgccacgccatcccgatctcgctcgccggccgcgacctcatggcctgcgcgcagacgggctccgggaagaccgccgccttctgcttccccatcatcagcggcatcatgaaggccccgtccgcgggaaggccgcagcggggcggcggcatggggatgaggaccgcttacccgtccgcgctcatcctctccccgactagagagctctctatgcagattcatgaagaggcgaggaagttttcgtatcagactggtgttagggtagttgtcgcttatggaggagcgccaattactcagcagttaagagagcttgagagaggtgttgacattcttgtggctacacctggccgattggttgatttattggaaagggcaagagtatctttacagtcaattagataccttgctcttgatgaggcagatagaatgcttgatatggggtttgaaccacaagttagaagaattgttgagcaaatggacatgccacttccaggtgccaggcagacaatgctgtttagtgcgacgttcccaaaagagatccagaaaatggcatcggatttcctggataactacatcttcctggctgttggaagagttgggtcaagtactgatttgattgcccagcgagttgagtttgtgcaggaggcagataaaagaagccacctgatggatcttcttcatgcacaaagagatacaggaaagcaaactctcacgcttgtctttgtggaaaccaagaggggcgctgattcattggaaagctggttgtgcatgaatgggtttccagctacttctattcatggagatagaaaccagcaggaaagagaatatgctctgaggtccttcaagagtgggcaaactcctattttagttgcaactgatgtggcagctcggggcctcgacattcctcatgttgctcatgttgtcaactttgatctccccaatgatattgatgactacgtacacaggattggaagaactggaagagctgggaagagcggacttgccactgccttcttcaatgataataactcatcactggcaagatctcttgctgacctaatgcaagaatctaaccaagaggtacctgcatggctattgcgctatgcagctcgtccttcttatggtggtggtggtggtgggaggaaccggcgatcagggggagggagccgctttggtggccgtgacttccgcaatgattcttcgtcatttggcaaggggggatcccgtggtggtggtgactactatggtggaggcagcagtggtggttatggtggtggctcctcatatggtggtggcggacacggtggagctggggctccgagtgcctgggattgatgttacagttgctcccaagtagaggggtctgccaagtttaggtcactttttactctagttctatttaggtatacatttttggtaggagctgttatacagcaacaagtacaaggtgaatgtggtcatcccctttcttcttctggttgctactggctgcagtcttaatcttgcagatgttcattacgaagagggtcttgaggacattcaagcacacgagattcctagttaggtgaaattccttggtagggatagtagctaggctctgacaagtagtgcttggtgccctttgctctttttccctttgtcagcgtcgaattttggtggtcggttgtaaagcttgtgttgagggggcttttgcggcttgatttttgtcctggattcgagttttgacaccggaggttgaagaagcggtaggatgatggtagtcctttagatcctgttgtaatgtatttaactgtgaggtgaggctggacacaataaattctgtaggcgtgtttagaggaagaagggggaagttgtgtgtgatggtttcttcagagaagattcctgctactgtgtacttcgaatctgtttttggatggagttaaattgacattatcgatgtcgtccaaaaaaaaaaaaaaaaaaagagacggcc

SEQ ID NO: 154097 - DNA, 161 bp, Zea mays
  Clone ID: MRT4577_72114C.1
aggccggccggggaagcttatcgcttgccatccgcgcctctacctttcttctctctctgatcctccgtctcctcctgatccatcctccacacggcatcgccgtgactcagtcggatgaaaccacttctaatctaacggcgacgctggagcgtgcaagagct

SEQ ID NO: 154098 - DNA, 456 bp, Zea mays
  Clone ID: MRT4577_72115C.1
tttgtggtattctcgcttatttttatcggggaagggatgcttatttaaataaacaaagggatgtttgagaaattaaacacgtccctgaattgctatcaagggccgaattgcaacttttataaacggtggaattgtttactaggccaacgttgctagcattgaaaagggaaacggggcctacaacaaaatttaaatcgcggactgaaacatcatttgaccctcaatggaagcaggcaataagaacttgcatggcacgtgccggaaaaaattgcccagcacgtggggcacgctctggcagaacctcgggagccgcatcaccgacaaccccggtaccaggaccaccgtctggaacgggaacaggaagggggggacccacatgaacagggctgccaggagggacaaggccatggcgcagggggcacgccacgtgttggcccaccccgcaccctccatgtg

SEQ ID NO: 154099 - DNA, 1101 bp, Zea mays
  Clone ID: MRT4577_72116C.1
atgatgggtttccagctacttctattcatggagatagaaaccagcaggaaagagaatatgctctgaggtccttcaagagtgggcaaactcctattttagttgcaactgatgtggcagctcggggcctcgacattcctcatgttgctcatgttgtcaactttgatctccccaatgatattgatgactacgtacacaggattggaagaactggaagagctgggaagagcggacttgccactgccttcttcaatgataataactcatcactggcaagatctcttgctgacctaatgcaagaatctaaccaagaggtacctgcatggctattgcgctatgcagctcgtccttcttatggtggtggtggtggtgggaggaaccggcgatcagggggagggagccgctttggtggccgtgacttccgcaatgattcttcgtcatttggcaaggggggatcccgtggtggtggtgactactatggtggaggcagcagtggtggttatggtggtggcggacacggtggagctggggctccgagtgcctgggattgatgttacagttgctcccaagtagaggggtctgccaagtttaggtcactttttactctagttctatttaggtatacatttttggtaggagctgttatacagcaacaagtacaaggtgaatgtggtcatcccctttcttcttctggttgctactggctgcagtcttaatcttgcagatgttcattacgaagagggtcttgaggacattcaagcacacgagattcctagttaggtgaaattccttggtagggatagtagctaggctctgacaagtagtgcttggtgccctttgctctttttccctttgtcagcgtcgaattttggtggtcggttgtaaagcttgtgttgagggggcttttgcggcttgatttttgtcctggattcgagttttgacaccggaggttgaagaagcggtaggatgatggtagtcctttagatcctgttgtaatgtatttaactgtgaggtgaggctggacacaataaattctgtaggcgtgtttagaggaagagggggaagttgtgtgtgatggtttcttcagagaaagatcctgctact

SEQ ID NO: 154100 - DNA, 118 bp, Zea mays
  Clone ID: MRT4577_72117C.1
acacgtccggtgcggacatctaacggacctgcacctgacgctgaacctttacaagcaaggcctgctctgggggaagatatcgaccgccaaggggggcaatcagttcaaggcaagggtg

SEQ ID NO: 154101 - DNA, 357 bp, Zea mays
  unsure (1)..(357): unsure at all n locations
  Clone ID: MRT4577_72118C.1
gcgatataacacntattttttccacacttcaccacaaacccatcctccgcctccttgggacccacttcacatcctcccaacccactcacgccactcacgccaccatgcactatacatcccatgcctctaagcccaccccaaaggagatcaatgatccacacgctctctttcacctcacacccaactatcacactgcactgttcctcacactacctaaatctaatccattgcacacacctgaatatcagattaaagctatcgcatagccttccaagaataacccgccgttttctcaattcataaaccactctccacctccaaaagctaccactgataatgctatacaccaaatatctt

SEQ ID NO: 154102 - DNA, 2856 bp, Zea mays
  Clone ID: MRT4577_72119C.1
atggcgcccaagcgaaaggcctcgagttcattcgctgcggtgattccccctatcgaccccaacagtcagttgcctttcgcaggtaaccatatgtctgttgtttctgagcctgaccttctccatctcgtgtccatcggggtccttcctccgaaggagctctgttcttggcggatttgccacggggtcactgttccaacagaggatacccatgaatccgtgatttatgttccttttcttctccgcggtctcgctcttcctatttctccctttttccgcggtctccttgatttctatcgccttaacttgacccatctgaatcccaattccgttctgcaaatttccatttacgttcatttatgcgaagcttttcttggcgtccggccacattttggactgtggaagtacttgtatcattgttgccctgggatggctggggggcagcatcagctggtggggggtgcgagtttggagatgcgccgtgggaggaagactgactatcttgaaatctcgctcaaggatagtatcaagggatggcgcttggagtgggagacagccggatgttcgtactccaagttggaccgagtccccacggaccaggaggtggctgaggcaggggctttgctggctgaagttggactgctgaaggagaggggtctgactgtagaggctgtggttgctgattttgtctttaagaacattcagcctttgaaggacagggcatacccggcttatctgtaccgaggtctagctgactcaacccgggtcaccaacagaagaattctcgctgtagacttggtgaaccggcttgaaatgatacttagaggcaaggtttcaaacgttggcgcccctatcgcatactcggtctggaacctgcctccttccaaggcctttgcccattttgtgtcgaatcctcctgctgctgatggcggtttgggccttagagtgcgaccctctgccgaagaagttagtgctttggttgcttcgattgaagaaattcctgacgatgaacggcaggtccattttgaggtgcctttggatcctagtgatgcagagataagtgctatgcttgatatgctggctgaggactcttctgatgctgctcctgctgggacattggtggtggcgcctctcccggaagctggtacaaccttggatattcagaggcctgtcagtgttcgcccgaaacgcccttgccgagccaatcaacttgattctcctgttgatgagcagaaaaagaaaaagagacgtcttcgacgagtatctagtttggatcgggatgttggtccttcggttcctgctgctgaggaggtgcctgtgcctgaatttaccgacgctgaccccaatgggtgtgatccatctgtcgctgaccccaatgggggtgctccatctgtcgctgaacccaatgggtgtgctgtctgtgttgctaatgaaaacgagggggaggaagaagatgaggtccctttgactcggaagaacggtcggcaatatgttgccagtggggaaagtagtggagttccttctcctgctctgtctgccctcattggtctacaagaattgtccctggcgaactttgataagactcttgaagatatggttccagaggatctgttatcagagccagcggatggtggtgagacagatgtttgtgctgatgtgctcgacgccgagttggggtcatcccgggcagcgtcccgcgcctcatcgaccttggagcgcggtcttgagggtcaggaaactgacttggatcgtcttgttcccatggaagtaactgagggacctttagccttagaggcggctactgcagagaacttgttcctcaaggatggtgttgacacttacccagccctcgagggtgtttccggggatgattcggctcgggtgggaagcgcaagccgcggcccagcccccgagggtattgccggagatgatccggctcaagtgggtagcgcaaactatgacccagcccccgagggtgtccgagcggggtctccctcttgtacttccatggatgttcacgcaggatctcctccacagtctggttgcatggtggtagcccaagctttgggtcagggagtcgctttagaggctagcgttcctgccgaccaagttttgggctctgctgatgacactgaattggttcctgctggttcattgcgagctgcttcgggtggtgaccctatgccaagccatcaattgatctctcacgatttgggagtcccttcattcttctccaacctccaggcattggtggacgggatggctagtcagctgtggttgcaaggtgcttctgttccagaaggagcttcgtctctggcacgttggaatccggtgttgcttcaacagcgtgtctctgacttggaggcgacgaatgctggagctgattcttgtttgcaggaagaaaaacgtgcccttgttgcttctcgtgacaatcttgacagactatatcgtgattctagcaactcgttgaccatcctggagaggagtcatcgcttcaccatggaggagttagacaatcatcacagtaagctgcaggaatccacggatgacgtgatccgtctcaggcagttgatatcagctaaggatgctgctatcaaggagctgcgtgcttccaagaagtccatcgcccaggagctagagaccgctcagttggctgtcaaagttgctgaagaaacttccattactctgagggcccagcgtgacagagccatggataaagccattcgcgcggggcggatcttgatgaggagacccagcgtggttgttcccgacgatataagggctgatgtgaacgctgctcctaattcctcaagtcgcccttcttcgtcggttgctcctgagaaggatattgcaaaatag

SEQ ID NO: 154103 - DNA, 795 bp, Zea mays
  unsure (1)..(795): unsure at all n locations
  Clone ID: MRT4577_7211C.1
ntcggccgggacgacgaccgcaaaaccgacgacgcccacccaatactaaccgcacgcacatcccacagtcgcccaacatggcctcccagagtgtgcaatgcttcggcaagaagaagactgcgactgctgtcgcccactgcaaggccggaaagggtctcgtcaaggttaacggaaagcctctttccctcatccagcccgaggttcttcgattcaaggtctacgagcccatcctgatcctcggtgttgacaagttcgccgatgtcgacatccgcgtccgcgtctctggtggtggtcacacctcgcaagtctacgccatccgccaagccattgccaaatccatcatcgcctactaccaaaagtacgtcgacgagcactccaagaaccagctcaagcaggccctcattcagtacgaccgcacactgctcgttgccgacaacaggcggtgcgagcccaagaagttcggtggtccaggtgctcgcgccaggtaccagaagtcttaccgttaagcggtttttttcttctggcttactggcgcgaggaggaggagaaagagaggacaaggggtgtatgggagcgagcatggagcggtgttcatcctgggctttttcatggggtcttctactgtctgctatctactcctcaaggacgaggttacgtgacatggcgcgcaacggctgcctgatacgatcccgcggcttgtgacgataaaaatgaatacattggttgcaagaacacggaaagcaaagaaaagcccatggagtgaggagtaccacgacacatacacatacacatatg

SEQ ID NO: 154104 - DNA, 394 bp, Zea mays
  Clone ID: MRT4577_72120C.1
ggaaccacaaacatgggggccattttattaaaaaaaaaatatttttacgggggggtacataacatgcatgtcaactaggggcaaatggggagggcgttgcaagaatgggaacacttgggggcccccttgttgggggcggccatggggcactttttggcgcacaccaaccgtttgagggggcagtccttgcttgtaacccacttggccgggggggacggttttttcggggacgtcgcccccccaccccccttgggcttttcctttttttttggtggtgctcctggggagggggaccaccacggggaggatgatccaccgctgctgctgggggttgttgaaaaaacatcccccttcctacgggtagccccccccttggcagaacaagtgcaagctc

SEQ ID NO: 154105 - DNA, 2640 bp, Zea mays
  Clone ID: MRT4577_72121C.1
atgggcaagaacaacaaacgcaagcgcgagccgactcctccatcagaggactttggcgactcggaatactcagaggagttctcctctgagtccgaggggtctccagctcccgtctctcccccagcgtcgtccgatgactcggacgactctcaggggattgccgcggaggtctggacttacatccgggccgtcgagtgctccgggctcgagggctcggatgagttggagtactcctcggatgaggaggacccgcccgaggaggacggcgaaggtgacgacgacgatgacaacgacgacggcgacgacgacgccgcctctgctttccgtgccctagttcttgctttcctgcctccagatcttctctgcaatttggctctcgctctgttcgtcagtagagttgagatggcgcccaagagaaaagcctcgagttcatccgctgcggtgattccccccatcgaccccaacagtcagttgcctttcgcagacttggtgaaccgacttgagatgattcttagaggcaaggtatcaaacgttggtgccccagtggcatactcggcctggaacctgcctccttccaaagccttcacttattttgtttcgaatccacctgttgctgatggcagtttgggccttagagtgcgaccctctgctgaagaagttaatgccttggttgcctcgctcggggaaattcctgatgatgaacggcaagtccactttgaggtacctttggatcctagtgatgcagaaataagtgctatgcttgatttgctggctgaggactcttctgatgctgctcctgctgggacgttggtggtggcgcctcccccagaaactgatacaaccttggatattcagaagcctatcagtgctcgcccaagacgcccttcccgagccaatcaacttgattctcctgctgacgagcagaaaaagaaaaagagacgtctccggcgagtatctagtttggatcgagatgttggtccttcggttcctgctgctgaagaagtgcctgttcctgaatttactgacgctgacctcaatgggggtgctccacctgctgctgaccccaatgggggtgctccacctactactaaccccaatgggtgtgctccacctgctgctaaccccaatgggtgtgttgtctgtgttgctgatgaaaacgatggggaggaagaagatgaggtccctttgactcggaagaacagtcagcagtatgtcgccagtggggaaagtagtggggttccttctcctgctctgtctgccctcattggtctacaagagttgtccctggcaaactttgatcagactcttgaagatatggttccagaagacctgctgtcagagccatcggatgatggtgtgatggaggtttgtgccgatgtgcttgacgccgggttgggatcatcccgggcagcgtcccgcgcctcatcgaccttagagcgcggtcttgtgggtcaggaaactgacttggatcgtcttgctcccatggaagtaattgagggaccctcagccttagaggtggctactgcagagaacttggtcctcaaggatggtgttgacacttgcccagcccccgaggatgttgccggggatgactcggctcgggtgggaaatgcaagccactgctcagcccctgagggatcttctccgcgctccggttgcatggtggtagcccgagctttgggccagggagtagctttagaggctagcgttcccgctgaccaagttttgggctctgttgatggtaccgagttggtccctgctggttcattgcaagctgcttcgggtggtgaccttacgccaggtcgtcaattgatttctcacgatttgggagtcccttcgttcttctccaacctccaggcattggtggacggaatggctagtcagctaaggttgcaaggtgcttctgttccagaaggagcttcatctctggcacactggaatccggtgttgctccaacatcgtgtctctgatttggaggcgacgaatgctgatatggctcgacagatttccattcttgaagaaaaacattctcaaggtcaggctgagctggtccaacggtgttctgattttgaggaaaagtattctcaaagccagactgaactggcccaggtctctgctgctctaaatgacgctaaaacgctgaactctactcttcgcgctcagcttgattctgaaaaggaaggaaaaagtgcccttgtcgcttctcgcgacaatcttgacagactgtatcgtgattctagcaactcgttgatcatcctggagagaagtcatcgctttaccatggaggagttagacaatcatcgttgtaagctgcaggaatccacggatgatgtgatccgtctcaggcagttgatatcggctaaggatgctgctatcaaagaactccgtgcttccaagaaatccatcgcccgggagctagagaccgctcaattggctgccaaagttgccgaagaaacttccattactctgagagctcagcgcaatagagccatggataaagccattcgcgcgggtcgaattttgatgaggagacccgacgtggttgttcctgaagacataagggctgacgtgaacgctgctcctgattcctcaagtcgcccttcttcgtcggttgctcctgagaaagatattgtgaaatag

SEQ ID NO: 154106 - DNA, 274 bp, Zea mays
  Clone ID: MRT4577_72122C.1
agtacacgcgcgcggagccggagtatgccgaggagcattgtttagaattcgtgttcgacatcgggcgcagacttaagcgtattaactatcgtgtagagatccatcgggaggacgatctgatcgacctgcttgtgagcgccgacggctaccacaaggacggagcataaggggtgggaggagagctattcgacagataggtgaagccggaggaggaggtgacctacttgctccggtcgcaggagcaacggttgaactctacaaataacaccctggg

SEQ ID NO: 154107 - DNA, 1848 bp, Zea mays
  Clone ID: MRT4577_72123C.1
atggcgcccaagagaaaggcctcgagttcatccgctgcggtgattccccccatcgaccccaacagccagttgcctttcgcagaaccacggaaattctctcccccacgatcggggagacagccggacgttcgtaccccgagttggaccgagccccccacggatcaggaggtggctgaggctggggctttgctagctgaagttggactgctgaaggagaggggtctgactgcagaggctgtgattgctgattttgttttcaagaacattcagccgctgaaggacaaggcttacccggcttatctgtaccgaggcctagctgactcgactcgggttaccaacagaagaattccctctgtagacttggtgaaccgacttgagatgattcttagaggcaaggccttcactctttttgtgtcgaatccacctgtcactgatggcagtttgggccttagagtgcgaccctctgctgaagaagttagcgccttggttgcctcgctcagggaaattcctgatgatgaacggcaggtccactttgaggtgcctttggatcctagtgatgcagagttaagtgatatgctcgatatgctggctgaggactcttctgatgctgctcctgctgggacattagtggtggcgcctctcccagaagctggtataaccttggatattcagaagcctgtcagtgttcgcctaagacgcccttcccgagccaatcaacttgatcctcctgctgatgagcagaaaaagaaaaagagacgtctccggcgagtatctagtttggatcgggatgttgatccttcggttcctgctgctgaagaagtgtctgttcctgaatttactgacgctgaccccaatgggggtgctccacctgttgctgaccccaatgggtgtgttgtctgtgttgctgatgaaaacgacggggaggaagaagatgaggtccctttgactcggaagaacagtcggcagtatgtcgccagtggggaaagtagcggagttccttctcctgctttgtctgccctcattggtctacaagaattgtccctggcaaactttgatcagactcttgaagatatggttccagaagacctgttatcagagccagcggatgatggtgtgatggaggtttgtgctgatgtgctcgacgccgggttgggatcgtcccgggcagcgtcccacgcctcatcgaccttagagcgcggtcttgagggtcaggaaactgacttggatcgtcttgctcccatggaagtaattgagggaccctcagccttagaggcggctattgcagagaacttggtcctcaagaatggtgctgacacttgcccagcccccgaggatgttactggggatgactcagctcgggtgggagacgcaagccactgcccagcccccgagggtactgccggaggtgatccggcccaagtgggtagcgcaaactatagcccagcccccgagggtgtccgagcggggtctccctcttgtacttccatggatgttcacgcaggatcttctccgcgctccggttgcatggtggtagcccaaactttgggccagggagtcgctttagaggctagcgttcccgctgaccaagctttgggctctgtcgatggtgccgagttggtccctgctggttcattgcaagctgcttcgggtggcgaccttatgccaggtcatcaattgatctctcacgatttgggagtcccttcgttcttctccaatctccaggcattggtggacgggatggctagtcagctgaggttgcaaggtgcttctgttccagaaggagcttcatctctggcacgttggaatccggtgttgctccaacatcatgcactacaggaattcacttaa

SEQ ID NO: 154108 - DNA, 441 bp, Zea mays
  Clone ID: MRT4577_72124C.1
accgcccacgcgtccggcagagcacccttcactttttgctgcgcctcaggggaggcatggagatgttcgttaagaccctgggcggccagactatcaccctccaagcgcaatcttcagacaccatcgacaacctcaaggccaagatccatgacaatgatggcattcccccacaccagcatcgtctcatctttgctggaaagcagcttgatgacagtcgcactcttacctactacaacatccagaacgagagcacccttcacttggtgctgcgcctcagacgatgcatgcacatcttactgaagaccctgaccggcaagactatcaccctcgaagtggattcttcagacaccatcgacaatgtcaatgccaagatccaggacaaagagtgcatcccaccgtaccagcagcgtttgatcttcactggcaatcagctggatgatg

SEQ ID NO: 154109 - DNA, 2397 bp, Zea mays
  Clone ID: MRT4577_72125C.1
atggcgcccaagcgaaaggcctcgagttcgtccgctgctgtgattccccctatcgaccccaacaaccagttgcctttcgcaggcttttcttggcgtcctgccacattttggactgtggaagtacttgtatcgctgtcgccctgggatggccgaggggcagcatcagctggtgggggtgcgagtttggaaatgcgccgtgggaggaagactgactaccttgaaatcccacttaaggatagtatcaaaggatggtgcttggagtggtttattattgagaaccacggaaattctctccccccacggtcagggagacaaccagatgttcgtactccaagttggactgagtcccccacggaccaggagaacattcagccattgaaggatagggcttacccggcctatctgtaccgaggtctagctgactcaacccgggtcaccaacagaagaattcctgctgtagacttggtgaaccggcttgaaatgatacttagaggcaaggtccactttgaggtgcctttggatcctagtgatgcagagataagtgctatgcttgatatgctggccgagcactcttctgatgctgctcctgctgggacattggtgaaaaagaaaaagagacgtcttcggcgagtatctagattggatcgggatgctggtccttcggttcctgctgttgaggaagtgcctgtgcctgaatttaccaacgctgaccccaatgggtgtgatccatctgtcgctgatcccaatgggtgtgatccatctgtcgctgatcccaatgggtgtgctgtctgtgttgctgatgaaaacgagggggaggaagaagatgaggtccctttgactcggaagaacagtcggcaatacgtagccagtggggaaagtagtggagttccttctgctgctctgtctgccctcattggtctacaagaattgtttctggcgaactttgatcagactcttgaagatatggttccagaggatctgttatcagagccggcggatggtgacgcgatggatgtttgtgctgatgtgttcgacgctgggttggggtcaacccgggcagcgtcccgcgcctcatcgaccttagagcgcggtcttgagggtcaggaaactgacttggatcgtcttgctcccatggaagtaactgagggaccttcagccttagaggcggctaccacagagaacttggccctcaaggatggtgctgacacttacccagcccctgagggtgtttccggggatgattcgactcgggtgggaagcgtaaaccacggcccagcccccgagggtattgccggagacgatccagctcaagtgggtagtgcaaactatgacccatcccccgagggtgtccgagcggggtctccctcttgtacttccatggatgttcacgcaggatctcctccacactctggttgcatggtggtagcccatgcttttggtcaaggagtcgctttagaggctagcgttcctgacgaccaagttttgggctctgctgatgacactgaattggttcctgctggttcatttcaagttgctccggatggtgaccctacgccaagccatcaattgatttctcatgatttgggagtcccttcatttttctccaacctccaggcattggtggacgggatggctagtcagctgaagttgcaaggtgcttctgttccagaaagagcttcgtctctggcacgttggaatctgatgctgcttcaacaacgtgtctctgacttagaggcgacgaatgctgatatggctcgacagttttctgttcttgaagagaaacattctcaaagtcaggctgaactggtccggcggtgctctgattttgaggaaaagtattcccaaagccagactgagctggcccaggtttctgctgctctaaacgatgccaacgtgttgaactctactctccgcgctcagcttgattctgaaaaggaagaaaaacgtgcccttgttgcttctcgtgacaatcttgataagctatatcgcgactccagcaactcgttgaccatcctggagaggagtcatcgcttcaccatggaggagttagacaatcatcgctgtaagctgcaggagtcttcggatgacgtgattcgtctcaggcagtcgatatcggctaaggatgctgtcatcaaggaactgcgtgcttccaagaagtccctcacccaggagctagaaaccgctcagttggctgtcaaggttgctgaagagacctctgttactctgagggcccagcgtgacagagccatggataaagccattcgcgcagggcggatcttgatgaggagacccggtgtgattgttcccgacgatataagggctaatgtgaacgctgctcctgattcctcaagtcgcccttcttcgtcggttgctcctgagaagaatgttgcaaaatag

SEQ ID NO: 154110 - DNA, 423 bp, Zea mays
  Clone ID: MRT4577_72126C.1
tacgttcctcccgacgcgcacaggaagaggcccggttgcattgacccgcgggatggtgacgacgctcgcggcggcggtcttgatctccgcgtgagggagtcggagaacaggcggcgtgaggagcagcagcaaaatattgccatggtaaatggtatgactgaaagattccacaacaaatggctctcaaagttcgcagagtggggactctctgtccattcactgtggagcctaatggcaggactctatacggagattgagcttctcaaggaaaacaccagagccagatttgctaccccatctacagaggaatctaccctagctacagaaggatctactccacctacagaggaatgagctccctgacaatcaaaggctcacctgtgatgtgaagactactccctatcactgccctaccctctgctg

SEQ ID NO: 154111 - DNA, 1104 bp, Zea mays
  Clone ID: MRT4577_72127C.1
atgggggtgctccatctgctgctgaccccaatgggggtgctccatctgctgctgaccccaatggaagatgaggtccctttgactcggaagaacagtcggcagtatgtcgccagtggggaaagtagtggagttccttctcctgctctgtctgccctcattggtctacaagaattgtccctggcaaactttgatcagactcttgaagatatggttccagaagacctgttatcagagccagcggatgatggtgtgatggaggtttgtgctgatgtgctcgacaccgggttgggatcatcccgggcagcgtcccacgcctcgtcgaccttagagcgcggtcttgagggtcaggaaactgacttggatcgtcttgctcccatggaagtaattaagggaccctcagccttagaggcagctactacagagaacttggtcctcaaggatggtgttgacacttgcctagcccccgaggatgttgctggggatgactcggctcgggtgggaaatgcaagccactgcccagctcccgaggcattggtggatgggatggctagtcagctgaggttgcaaggtgcttctgttaaagaaggagtttcgtctctggcacgttggaatccggtgttgcttcaacatcgtgtctctgacttggaggcgtcaaatgctgatatggctcggcagatttctgctcttgaagaaaaacattctcaaagtcaggctgaactggtacagcggtgttctgattttgaggaaaagtattctcaaagccagactgagctggctcaggaatccgcggatgatgcgatccgtctcaggcagttgatatcgactaaggatgctgctattaaagaacttcgtgcttccaagaaatccatcgcccaagagctagaggccgctcaattagctatcaaagttgttgaagaaacttccattacactgagagcccagcacgacagagccatggataaagccattcgcgcggggcgaatcttgatgaggagacccggcatggttgttcctgatgatataagggctgacgtgaatgctgctcctgattcctcaagtcgcccttcttcgtcggttgctcctgagaaagataatgcgaaatag

SEQ ID NO: 154112 - DNA, 294 bp, Zea mays
  Clone ID: MRT4577_72128C.1
gccttggtctctcctccaacggggcaacgactcaccggctatccaacctacgaacgggatcccgatgcccatggcggcctcggttcttctcgccgcaccggctcctcttctcgccgcgtcacatccacggcccacgggcgaacccgccgcctcccgcaccgtgcctgcgagcgcccgcttctcctctccgggtctcctctgttctccgcgattcctccgccgccccggcaataacccacttgatcctgcagaaacccctcacgcgatccacgccaattcagccagcgccgatgt

SEQ ID NO: 154113 - DNA, 3261 bp, Zea mays
  Clone ID: MRT4577_72129C.1
atgggtaaaagtaagaagggtagcggttcttctcctcgctctggcgacaaacgcaaacgtgagccgactcctccttcggaggacttcggcgactcgaagtactcgaaggaggagttctcctccgagtccgagggatccccggctcccgtctctcccccggcgtcgtctgatgattcagacgactcccaggggattgccgcggaggagtactcctcggatgagaaggactcctcggactcatccgaggaggacagcggcggcgacggtggtgatggcggcgacgatgggggcgacggtgacggcggcggcgacagcggcaagggcagcgacggcggcagcaacgatgtaatcagccgagtgatttatggcaacatcgatgtttttagaggtaacagccgagtgactgacggtggcgtcggcgttttagagtatctggccgagaaaaaccccatatgtactgcatcgttgcacgcttccactttccgtgccctaattcttgctttttctgcatccaagctttccttgcgctcgtgcgatactgcctccgtcctgctcgccggcgagattgagatggcgcccaagcggaaagcatcaggttcatccgctgctgtcattcctcccatcgatcccaacagccagttgcctttcgcaggtaaccatatgtcagttgtttctgagtctgatcttctccaccttacgtacatcggggttcttcccccgaaggagctctgttcttggcgggtttgccatggggtcactgttccaacagaggacacccacgaatttgtcgtatatgttccttttcttctccgcggtcttgcccttcctgtttctccttttttccgcggtctccttgatttctatcacttgaatctgacccatctgaaccctaattccattctgcaaatctccatctttgttcatttatgtgaggcctttcttggcaacctgccacacttcgggctgtggaaatacttgtatcactgtcggcctgggatggccggaggacagcatcagctggtggggggcacgagcttagaaatgcaccgcggaagaaaaattgattatctcgatatccccctcaaagatagcattaaaggatggcgcttggagtggtttattgttgagaatcacggaaattctctccccccgcggtcagggagacagacggacgttcgcactccgagctggaatgaatcccccatagaccaggatgtggctgaggcaggagttctgctagctgaagttggattgttgaaggagaggggtctgactacagaagctgtggttgctgactttgtcttcaagaacattcagccattgaaggacagggcatacccggcctacctgtaccgaggtctagctgactccacccgggtcaccaatagaagaattcctgctgtggacttggtgagccgacttgaaatgatacttaggggcaaggtgtcaaatgttggtgcccctgttgcctactcggcttggaacttgcctccttccaaggcctttacccatttcatgtcaagtcctcctactggcgatggcggtttgggccttagagtgcgaccctctgccgaagaagttagtgcgttggttgcttcgcttgaagaaattcctgatgatgaacggcaggttcattttgaggtgcctttggatcccagtgatgcagagataagtgccatgcttgatatgttagccgaagattcttctgatgccgctcctgctaggacatcagtggtggcgcctctcccggaagctggtaaaaccttggatattcagaggcctgtcagtgttcgcccgaagcgcccttgccgagccaatcaacttgattctcctgttgatgagcagaaaaagaaaaagagacgtcttcggcgagtatctagcttggatcgggatgctggtccttcggttcctgctgttgaggaagtgcccgtgcctgagtttaccgacgctgaccccaatgggtgtgatccatccatcgttgatcccaatgggtgtgctgtctgtgttgctgatgaaaatgaggaggaggaagaagatgagatccctctgactcggaagaacagtcggcgatacgtagccagtggggaaagtagtggagttccttctcctgctctgtctgccctcattggtctacaagaattgtctttgacgaactttgatcagactcttgaagatatggttccagaggatctgttatcagagccggcggatggtgacgcgatggatgtttgtgctgatgtgttcgacgccgggttggggtcatcctgggcagcgtcccgcgcctcatcgaccttggagcgcggtcttgagggtcaggaaactgacttggactgtcctgctcccatggaagtgactgagggaccttcagccttagaggcggctgatgcagagaacttggccctcaaggatggtgttgacacttacctagcccccgagggtgttgccggggatgattcggctcaggtgggaagcgtaagccgcgacccagcccccgagggtattgccggagacgatccggctcaaatgggtagcacaaactatgacccagcccctgaggttgctccggatggtgatcctacgccaagccatcaattgatttctcacgatttgggagtcccctcattcttctccaacctccaggcattggtggacgggatggttagtcagctaaagttgcaaggtgcttctgttccagaaagagcttcgtctctggcacgttggaatctggtgctgcttcaacagcgtgtttctgacttagaggcggcgaatgctgatatggctcggcagttttctgttcttgaagagaaacattctcaaaatcaggctgaattggtccggcggtgctctgattttgaagaaaagtattcccaaagtcagactgagctggcccaagtttctgctgctctgaacgatgccaacgtgttgaactctactctccgcgctcagcttgattctgaaaaggaagaaaaacgtgcccttgttgcttctcgtgacaatcttgacaagctatatcgtgactccagcaactcgttgaccatcctggagaggagtcatcgctttaccatggaggagttagacaatcatcgctgtaagctgcaggagtcttcggatgacgtgattcgtctcaggcagtcgatatcggctaaggatgctgtcatcaaagaactgcgtgcttccaagaagtccatcacccaggagctagaaaccgctcagttggctgtcaaggttgctgaagagacttccgctactctgagggcctag

SEQ ID NO: 154114 - DNA, 146 bp, Zea mays
  Clone ID: MRT4577_7212C.1
ttgcgatatggagtaaaaatccctggattattaagtttagaagaatgttaacttcaaagtttattgcgaatttcaaaatttacctcaaccagagatcatccatgagcctatgggacccgaatcaaaatcttactcatggatcatta

SEQ ID NO: 154115 - DNA, 510 bp, Zea mays
  Clone ID: MRT4577_72130C.1
ctattttgcaatatctttctcaggagcaaccgacgaagaagggcgactggaggaatcaggagcagcgttcacgtcagcccttatgtcttcaggaacaaccacgccgggtctcctcatcaagattcgccccgcgcgaatggctttatccatggctctgtcgcgctgggccctcagagtaatggaagtttcttcagcaactttggcagccaattgagcggtctctagctcctgggcgatggatttcttggaagcacggagttctttgatagtagcatctttagccgatatcaactgcctgagacggatcacatcatccgtggattccttttcagaatcaagctgagcgcgaagagtagagttcagcgtcttagcgtcatttagagcagcagagacctgggccagctcagtctggctttgagagtacttttcctcaaaatcagaacaccgctggaccagttcagcctgaccttgagaatgtttttcttcaagaatggaaatctgccgagccat

SEQ ID NO: 154116 - DNA, 1809 bp, Zea mays
  Clone ID: MRT4577_72131C.1
ctatttcgcaatatctttctcaggagcaaccgacgaagaagggcgacttgaggaatcaggagcagcgttcacgtcagcccttatatcatcaggaacaaccacgccgggtctcctcatcaagatttgccccgcgggaatggctttatccatggctctgtcgcgctgggctctcagagtaatggaagtttcttcagcaactttgatagccaattgagcggtctctagctcttgggcgatggattttttggaagcacggagttctttgatagcagcatccttagccgatatcaactgcctgagatggatcacatcatctgcggattcctgcagcttacaacgatgattgtctaattcctccatggtaaagcgatggctcctctccaggatggtcaatgagttgctagaatcacgatacagtctgtcaagattgtcgcgagaagcaacaagggcacttttttcttccttttcagaatcaagctgagcgcgaagagtagagttcagcgtcttagcgtcatttagagcagcagagacctgggccagttcagtctggctttgagaatacctttcctcaaaatcagaacaccgccggaccagttcggcctgaccttgataatgtttttcttcaagaatggaaatctgccgagccatatcagcatttgtcgcctccaagtcagagacacgacgttgaagcaacaccggattccaacgtgccagagacgaaactccttctggaatagaagcaccttgcaacctcagctgactagccatcccatccaccaatgcctggaggttggagaagaacgaagggactcccaaatcatgagagatcaattgatgactcggcatagggccatcacccgaattagctcgcaacgaaccagcaggaaccaactcagtgccatcaacagagcccaaaacttggtcggcgggaacactaacctctaaagcgactccccggcccaaagcttgggctaccaccatgcaaccagagtgtggaggagatccagcgtgaacatccatggaagtacaagagggagaccccgctcggacaccctcgggggctgggccatagtttgcgctacccacttgagccggatcacctccggcagtaccctcgggggctgggcagtggcttgcatttccagcatgagtcgaatcatccccggcaacatcctcgggggctgggtaggtgccagcaccatccttgaggaccaagttctctgcagtagccgcctctaaggctgagggtccctcaattacttccatgggagcaagacgatccaagtcagtttcctgaccctcaagaccgcgctctaaggtcgatgaggcgcgggacgctgcccgggatgaccccaacccagcgtcgagcacatcagcacaaacctccatcacaccgttatccgctggctctgataacaggtcttctggaaccatatcttcaagagtctgatcaaattttgccagggacaattcttgtagaccaatgagggcagacagagcaggagaaggaactccactactttccccactggcgacatactgccgactgttcttccgagtcaaagggacctcatcttcttcctccccgtcgttttcatcatcaacacagacaacacacccattggggtcagcagcagatggagcacccccattggggtcagcagcagatggagcacccccattggggtcagcagcaggtggagcacccccattggggtcagcaccaggaattatcagtatatttttcaaaactgtcacatccgtgcagggcatgcaatgaatacctccgaagcataatattgatgacat

SEQ ID NO: 154117 - DNA, 300 bp, Zea mays
  Clone ID: MRT4577_72132C.1
ccaaaggacggaccccccgtaattcggcccaaaaaaagggggtcccataaccccctttttggatccccccaaaggtaacctttggtggcaagcccaacctaaaagtggggggcgggcaaaaaaatttttgttcctgcacaaaagctcttaccttacaaaccacatttgagcaaaaaaaaagtatgttggtcttcagcttaccttttaaaggggcctccccgggggccgctttgttgatgccaataaactcagctttaaaaaaaccccccccaacaaaaaaaccccccacataaggctggg

SEQ ID NO: 154118 - DNA, 262 bp, Zea mays
  Clone ID: MRT4577_72133C.1
ctccagagctcgtcgccatgggccaccgacagactcgatcacgcagtccgtcgacgtaaggtcagcatggtgagggtcagtgtgctcaacgatgcgcacaagtgcatgtacaacgctgagaagattggcaagaggcaggacatgatcaggcgagcatcgaaggtcatcatcaagttcctgacggtcatgcagcgccatggctacattggagatttcgagtacgttggtgactaccgatcgggctagattgtggtcgaactcg

SEQ ID NO: 154119 - DNA, 334 bp, Zea mays
  Clone ID: MRT4577_72134C.1
attcccgggtcgacccacgcgtactggagacacagtcgaccggcgggaatgcccgtgcgcaagcactggcggacgtgtcgctggcaagggagagcgaggcgctgctgatggagctggcgctgatgcgagcgtacatgttacggatgcaccagaggagccaggggagccgctactggccatcctatgactatgaggaacaagggcccagcgacggcgactgtgaagaaggaaagctagctatggacgacatgcaggtacttacaccagtttcactgccacgtcgctcgctgtgaccttgaacataccccaaatgcccggacacagctaatagagt

SEQ ID NO: 154120 - DNA, 336 bp, Zea mays
  Clone ID: MRT4577_72135C.1
gccggccggtccgggctctggggggaaatgatccctagtagaaaaagaaccggtgtttcttgcacttgtgagataccttttccacggtcttctctgcaaatgtgtaggtcagtataatccttttttagcgatgttgtagcacaagcacctgatagttgaaaaggcaagctcatctgcatggccggaagcttactcactaccccttcccagaactgagtagttctgctgtctcttctaatatagtgtttcattgtgacttattagctttagtccctgtttgatcctacttgcttattgtttgttggtggtgaaaaaaaaaaaaaaaaaaggccccta

SEQ ID NO: 154121 - DNA, 156 bp, Zea mays
  Clone ID: MRT4577_72136C.1
ttgttttttactgccacactatggggcgtgggcaaagttcatccctccgcccccaggacccacccccttagaccaacacggcgtcaccgagaaaatatctctgcttgtataacaaaagatatggatggtgcgggtgttcactagaatgagaagcca

SEQ ID NO: 154122 - DNA, 309 bp, Zea mays
  Clone ID: MRT4577_72137C.1
attattcttatgataccttttctagttttggttaaaacaacgctttttataccacaagaaaaaaaggacccaccatgacacagagtcagcacaaggaactctgtgttaaatcacacagctaaacactcatcattctaaccatttcaagaaaacctgataatgttattatatcgggtaacgctgcttgtgcatgctaaattcttaaggacaagaatcttgtgaaacaacagctcagaaaaaacttggcccattcctggtcgaaacatgttcccacaaagagaaatataaacccccaagccattctgtgac

SEQ ID NO: 154123 - DNA, 153 bp, Zea mays
  unsure (1)..(153): unsure at all n locations
  Clone ID: MRT4577_72138C.1
gcgtggngcggaacgcgtggggcgggagcgcgtgggcgcggcagctggtcgtccggnccagcaggaatgcgccgccgtctgcaagggcacaggtacaggnaagnaaaggntaattccatggnacctgaggtaggnagcatcaggtaaggttcc

SEQ ID NO: 154124 - DNA, 249 bp, Zea mays
  Clone ID: MRT4577_72139C.1
acacacgcgtccgccgacgcgtgcgcggaggcatgggcggacgcgtgggttaagtctagctggcgtcaggcatcaaaccatgtgcagaatgtaccacatggcgcgactacaatcgcaggaagcaacagctaatacatctatcgataccgatggacacctagcttaactacttgacggtgatcttgtcgaccactccagcgccatgatgcggtccgcaatagacaccatatgttcccagtaccgtgaggg

SEQ ID NO: 154125 - DNA, 284 bp, Zea mays
  unsure (1)..(284): unsure at all n locations
  Clone ID: MRT4577_7213C.1
atnanaaaaaaaatgatgtaatgataaaatgtaacatagtataagtctgaattgattaatgatgtaatttgaggaaactgagataaagtagaattatgattgctacgcttatattatggttgatatgtatatgtataaaaaaggggggcccccactttagttgtctcctgcccccgggtttttatctgggacgggttctctgggggggatctttttttcccgaatgtgcgtctattatgtttttgtgtaaatcttgtcatgattgtttcccgtgagaatttttt

SEQ ID NO: 154126 - DNA, 367 bp, Zea mays
  Clone ID: MRT4577_72140C.1
ttttgtgcgggctgctacccgccccctgcagggaggtcatctggtgcatcaccgggaccacacgtgcccatgctgacctcagacgctcgtatgatgagctagcatccggccggcctgcatgcatgagcagctggccacgcatggactacgccacgggtcactgaacgaaatctaccggctgactttactgtctgacgaggctctgtctcagcagcaagccctactacccggccgggactatgggcgtattaacagctgactctgggtctgatgcgcacgctgaaggacacgtaccagctggagcctgccagctcacatgcctcgtggggactcgatgataaccattgcctcgggttgatatttaggt

SEQ ID NO: 154127 - DNA, 490 bp, Zea mays
  Clone ID: MRT4577_72141C.1
atgatggtgcccttgcctagttattcataaggaaacactgtagtttgaacattacatcatttcaattatcaacaaataaactaattaatactttttttactaagtaataatttgtatttacaggtgtacgaactcatgtcacggctgttgatcaagccattgtaaaaggtgatacaaagttggaaggtcctgtggttgttgttactggtgcttccagggggattggaaaagccactgcattggctcttggaaaagcaggctgcaaggttacaagtttaagtaatctgcttataaatatagagaagtttatcaaatgtgtatgcttctcttaaactctgcacaaacctcaagcccacaatggccattgctagaccaagctgttagattgtcaatttaaatggaccattatgcatagtggataaatggttttatcatcagaataatatgaaagctgtatttaaactgcaggtcttggtgaattatgctcgat

SEQ ID NO: 154128 - DNA, 2044 bp, Zea mays
  Clone ID: MRT4577_72142C.1
attcggcacgagagcagcgcagctgcacagaattgttatcgcagggggcattaagctgcctgcctccgctgccggccgtgctacctaatcgccgcgcttgttttcccaccgcccgatggccgccatcacgccgccgacgcagtcggagccgtcgccgcagacggggcgcccggcctcgtctgccgccgccgcggccaagcgtggagggggcggggctggtgccgccggcgggccgctgatggggaagtacgagctggggcgcctcctggggcacggcaccttcgcgaaggtgtaccacgcgcggcacgtcgacacgggggacaacgttgccatcaaggtgctcgacaaggagaaggccgtgaagagcgggctcgtcccgcacatcaagcgcgagatcgctgtgctacgccgcgtgcgccacccgaacatcgtgcacctgttcgaggttatggccacaaagactaagatctacttcgtcatggagctcgtccgcggcggcgagctcttctcccgcgtctccaagggccgactcagggaggacaccgcgcgccgctacttccagcagctcgtctccgccgtggggttctgccacgcccgcggcgtcttccaccgcgacctgaagcccgagaatctactcgtcgacgagcaggggaacctcaaggtatcggattttgggctctccgccgtcgccgagcagttccgtcccgacggcctgctccacaccttctgcggcacgccggcctatgtggcccccgaagtgctcggccgccgcgggtacgacggcgccaaggcagacgtgtggtcgtgcggtgtcatcctctttgtgctcatggccggatatctccctttccatgacaaaaacatcatggccatgtacaagaagatttacaagggcgagttccgctgtgcgaggtggttctccaaagaccttaccagcttgctgatgcgcattcttcacactaatcccaacactcggatcactttgccggagatcatggagtcccgctggttcaagaaaggattcaagcctgtcaagttctatatcgaggatgaccagctgcataacgttatagatgacgaagatggcctgttagatatgggacctgctggtcctgttcctccaccattgccacctccaccgccacctctacctccaccaaaggttgatggtgatgaatcagggtctgactcagactcgtcgatctcatcctgccctgcttcaatgttatctgatgagagccaaaggccccgtggctctctaccacgtccagcaagtcttaatgcctttgatatcatatcattttcaaggggatttaacttatcagggttatttgaggagaaaggggatgaagtgaggttcatctcggctgagcccatgtcagatatcataaccaaattggaggacatagcgaagctgaagagcttcaagttgcggaggaaggactggcgcatctgcctggagggtacaagggaaggagttaaggggccattaacaattggcgcggagatatttgaactcacacctccccttgtaatggtggaggtaaaaaagaaggcaggggataatgaagagtacgagaacttctgtgacaaggaattgaagccagggatgcagcaccttgtccaccatatggtccgagctccaagtatgctgcttactgatgccaagtagatcgaaaggctttgaacttaacaacagcacttcgcacggagctactggtaacaggcgtgacattctgagcggcatgaggctagaggagacagttgagcacagcacagttgaccagaagagatagtcgccggaacaaaaaccttgaccagttccacagcgctgtagtttcgcagatgatgagcagctcggcatctcatgactgaataaacgcaatgcccgccatggagggagactccggtgtctttcttgtacctgaggtggttaagttgttactcgaatgctgtatcacgagtggtgtagtcctgctattcgtaatatttcgattaaccatcatgctattctgtctaaaaaaaaaaaaaaaaaaaaaaaaac

SEQ ID NO: 154129 - DNA, 429 bp, Zea mays
  Clone ID: MRT4577_72143C.1
tgtcgcccacgcgtacgggggaggagagctacgagcgttcagacggaagacaccggattaacattccacaaatgctagacaaggggtctgcggactgagactcaccgtaccttatggtccccacgcgacatgagagggctcaaggctagatggagcctgctccaccttctggtatgccgaaagcacaacttcagccagctgtcatctaagccgacggagccggtggccggacctcgttcggctgggggggtcatcgggagacgagggcggacgacgcattagatgctgaagacgaggtgtcctaagactacccatatgtgtccggtgggaagcagcacggcgccgtcaaaggcacaagatctcgttcattaccaccggagcatggggaaggatgctgcgtgtaagaagcaggggcaccctgttattttg

SEQ ID NO: 154130 - DNA, 324 bp, Zea mays
  Clone ID: MRT4577_72144C.1
ggaacaacatagacccccccctttacagggaaacccttccaagtcggtctcaggcccggggacaaaaccccaatgaagggccaaaaactaggcgggtggcccccaacaaagggggggctactgaaacccttactaattacccagttccaaaaaccacccggttgctaggaaagggacccaacactttagcaaccagactagccctgggggggaaacccccgcctggggtgggccatctttgtttgaacaccaacataaactctattggaaaacatcgggaggggcctttacctaaaagtcttttcaagaaacttcaccctggaa

SEQ ID NO: 154131 - DNA, 311 bp, Zea mays
  Clone ID: MRT4577_72145C.1
aaaaaaaaaaaaaaaaaaaaaaaaaaaaaaaaaaaaaaaaaaaaaaaaaaaaaaaaaaaaaaaaaaaaaaaaaaaggattttttttggggtaaatataaaaacctcctgagaaaggaaatgtttcctcgccgttttttgggggtcccagggaaaaaaaggttttatttgaaaagggcctttgtgggcgtccccattatcctttgaaaatgcaaaaagggggcccaagctgcgtgcccttttgatgggaaaactgaaacacccactgggaattttgttaaaaataatcccaatggggaaccattttcttttg

SEQ ID NO: 154132 - DNA, 151 bp, Zea mays
  Clone ID: MRT4577_72146C.1
gatctattaaccgtcagcaagggttgacccggaaatgacgaaccgacacctacaggcgaaccagatatgcctataacgcgaacccttaaagctggaccatgacatggacgaagctgttggctgggatggaactggtatgggctgacaataa

SEQ ID NO: 154133 - DNA, 657 bp, Zea mays
  unsure (1)..(657): unsure at all n locations
  Clone ID: MRT4577_72147C.1
ttatataagcctgtattatatnaatacgaaggaaaggcaccaattcatgtaatgaccggagtacatgtaacgacgatcacgtaccacgttctgatgcctttttaatcatagaagtgtatggtgaagcactaaggcgccaacactagagattagagtaatggcgatcacgtatccacgttaccacgtaccacgccctgatggctgatgcctttctttctcctgtgtcatgccctccactaccactacttactagctcatcatcgtccaccgtccttgtagatggggtcaaagccatttgctttaaggagcccgcaggcaaacccggatcccgcgatcagttttcggtcagctcatgctacacgtggttgtggacttctgatacacatggcaatgcagtcctgcgagggggaagcagtcacagcggcggcgcccgagcagattgatcaagtcggcgaagtggtggcagccgcagcggcggcgtcggaacccgacgccacgagcgaagcgcgtgtggtggagacgccacaagaagaagcagaagaccccgagccggcgcaccgcggtagcaagagccggaccccggccccagcaccagcgtcgccatccacggtcaaggagcggcagatcccggtggacccggcgtcgctgcgccgtctg

SEQ ID NO: 154134 - DNA, 371 bp, Zea mays
  Clone ID: MRT4577_72148C.1
ctaggcagccaggcagccatggcgcccaccgtgatgatggccttgtcggccaccgccgtcgctccgttccatgggctggagttcaccgacagtcttcccgacgaccggcgctgctccagaagcctatgtaacgttagcaacggcggaaggatccggtgcatgcaagggtggtcggactacggaaacacgaagttctagactctgtagtacctggcggcgattgcgacagacgacctgcttgagcaatgtgactaccatgatgtgcaacggctggataccctggctctagttcataccggacagatatgagtaccgtgagaacttcatctaaccgtgctaattcgaactgcgttactggaccatgcgaaagc

SEQ ID NO: 154135 - DNA, 242 bp, Zea mays
  Clone ID: MRT4577_72149C.1
aatgaaaagcgcattcatttaattttttccttaaagggaagcactgaaaatgacgatggctggaatcaattactgggccctctttcctagagtacggtgaatggtaaccgttcaattgtttagagataactggggttttatgccgctggtggactagcttggccctttttaccgaccgagcgcatggggtacaaaaccacttgtttgaaaaccggacgatgttctattaaccgactgacacc

SEQ ID NO: 154136 - DNA, 553 bp, Zea mays
  Clone ID: MRT4577_7214C.1
taagttgctccacagttcggcatatcatcctcaaacaagtggacaaactaaaagagtaaatcaaatacttgaagatatgatgcggtcatgtgtcctggagttcccacagaaatgggatgactgtctgcccttgacagaattttcttataataatagcaatcaagaaagcattaagatggcaccgttgaagcattgtacgggcgaagatgccaaacacccttaaattggtcagaacccagagaacggtgctattttaggcctgacttagtcaaagaaacagaggaaagagttcagcggataaggcaccacttgaaagaggctcaagctaggcagaacaattatgtggataaacgacaccaacctttgttcttttaagtcaaggattatgtatacctgaaagtatcaccaatgaagggtgttaatcgattcgaggtaaaaggaaagttggcaccccgatacattggcccgttttccattcttgaacaatgcagaccagtggcgtatagacttcaactgcctgaaacattatctgtagtacataatgtgttccatg

SEQ ID NO: 154137 - DNA, 416 bp, Zea mays
  Clone ID: MRT4577_72150C.1
actaattaccatgcacctatcaccatggtggttaccggtatgtgaaaacccaattctgcaaccttacaggatccaactggcaagcttatctacaatcttaccttcatcaaccatgcagctagatcaatgatgagacctatgacaacagttacgatacagcgcatgtattggcacatatcataacgggacagcaactacgacaactcgcgctaacaaacgttgctgtctactctaagcaaccgcattgccttgcattcaaccaactaggttcatcgaactctgattattatttgcagccatctcaactaccattcagacagctacctgatgactacccccagcagtctgatgcattcaaccaactagcagcattgaactctactgcttatttacaggcacaacaactactgccattc

SEQ ID NO: 154138 - DNA, 786 bp, Zea mays
  unsure (1)..(786): unsure at all n locations
  Clone ID: MRT4577_72151C.1
gatgaggatagcatgaatattgatgagtccagtttggctacttgctcttcagaaagttctatcaataatgagaatatagacaaaaaaatgaataacaaacctggttttcttcaccctaaagaggaaatggatccacttgaatcacaaggaaatgaaaacttgcgaagcatatttttggatacctctgatggtcctacttgtgggactcgaacccgggactttgggtgctacttgagctgtgtgctactacccagtcaagtcgcaggcttgtttgcgatgatgcagcttcatttgtgttttctgtcagaatagtcctcagactgatccacctcattaagctgaactaccaccttatcagattggagcagagcttgctgcctttaaagctgaagttcgctactggggcttccaatgattgttttgataaatatatgaagtacaagtcagtgcctaataccttgtatgaagatgcagaaaaatgtctaagattggctctttattcaaatccgccagtgatggctgcattattgccactaatacagattctcctcctaggtgataaactgaaagttgcactaaatgagcttgagaaggcctgcctcagtttagctacagccctccctttcangttgagaggtangctgctggaagagtatgaccaaaaccaggtatcaaccattttctcttgctatgangaggctttgagaagagatcctacatgtagctactccatggagaggctaatcanaatgcataaaaaaggatattataacaccatccaactac

SEQ ID NO: 154139 - DNA, 301 bp, Zea mays
  unsure (1)..(301): unsure at all n locations
  Clone ID: MRT4577_72152C.1
acacaccttcgggccaaccttggaccaatggatttgaatgggggccagggatcgacgtcgttggctaaaagtggcatgtgtggcctacctagcgtggttggcagtcccgccttttggtttctacagaataaataatagcttaattggggtatgaatactaattggggaatcggttagtatcatataaatggatgattggagtgtgcgtggtttttaatatgcatgttctatgatgtcctttattccttttaaaatattattatttatatgtagaagttaaaaggtttacagttnanaaaaa

SEQ ID NO: 154140 - DNA, 231 bp, Zea mays
  Clone ID: MRT4577_72154C.1
agtctgctcgtgaattcggctcgaggcgagcagcaatatgtctgcggcacgggcgaggagcagaccagcacccaccagccctcgtcggggggcggcagctgcagcttcaccagccgccgcctttccccgtctcctgtgcctatgcctctcctcctaacccccttacatttgtccacccaacccccttccaaactaccgtatcttgccacttagtatccgactgacccacaa

SEQ ID NO: 154141 - DNA, 294 bp, Zea mays
  Clone ID: MRT4577_72155C.1
tgggttttttttttttaatacattttttatagcaacttataatagtgcccacttaagcaagattttatggactaagatatagtacgaaagtaatatattaatgaaggcaattaatacaagctcggaatggcagcatattttcctgtgagtcagcatcagtataaatttgttatgtcagtgatctgcgttccacagtcacagcatagttgaacagtagctagataagtattccactaatatgagttagtattaagtgcttgaatggatgtttacctcatacacttcatttcattc

SEQ ID NO: 154142 - DNA, 628 bp, Zea mays
  Clone ID: MRT4577_72156C.1
ccgctctcgcctctcggccttctccttgtgccgccgaacaccctcacaagagtcggcctctcgatttctcagtccagccgcagcagcccccttccctccctcctccatcaggtgttgcctcccgcagatccaagtcggaattcggtccttcgtccccaaaccaccaatccgtcctttggaatgctacagggaagtgaagtgatgggggagtgcgaggacggcaaggagtacaggtgctgggaggagctgctgccggacgcgctgggcctcatcttccgcaacctgccgctgcaggaggtgctcaccgtcctgccgcgggtgtgcaagtcctgggggcgggtggtggccggcccctactgctggcaggagatcgacatcgaggagtggagccagcagcagggcaagccggagcagatcgcccgcatggtcgagctactcgtgggccgcagcgccggctcgtgccgccggatcagcgtctccggcctgccctgcgatccgcgcttctccttcatcggagacaacgcacgagctctccggaccttggagatccccaggagcgagatcagcgactccatggtggaatccgtggcgccgcggctgccgaacgtcactttcctcgacatcagca

SEQ ID NO: 154143 - DNA, 1707 bp, Zea mays
  Clone ID: MRT4577_72157C.1
aggaattcggacgaggctctcgcgcaaattattatgccgggaaagattatattcttcccctttagctttgagcccgaaaggccgaagctttcgcgttcttccccacagatatctggagccgtagcttctgtttggtatggccgtgggttgaaataaatagtagtgtgcgggacgcccaccaattggcacgctgcgctttccatccctgcagctgcaagatgccttctttttagatctgtgctgccgtgccttcctcttcatggtaccctgtggttggagtcggtattagcgtttaatgaagctactttttcctcccttgccttttggatgatgcttagtactactacgtcttatcagctatcaatcctcctctcgcgtgcttcttggataggttgcattctttgggtttgctcacagcgcacacaaagccattttactgctgggaatggtggctggcactattagcgtctccggctcttgagtgatctccaagggaagtgaagtgatgggggagtgcgaggacggcaaggagtacaggtgctgggaggagctgctgccggacgcgctgggcctcatcttccgcaacctgccgctgcaggaggtgctcaccgtcctgccgcgggtgtgcaagtcctgggggcaccctcgtggccggcccctactgctggcaggagatcgacatcgaggagtggagccagcagcagggcaagccggagcagatcgcccgcatggtcgagctactcgtgggccgcagcgccggctcgtgccgccggatcagcgtctccggcctgccctgcgatccgcgcttctccttcatcggagacaacgcacgagctctccggaccttggagatccccaggagcgagatcagcgactccatggtggaatccgtggcgccgcggctgccgaacgtcactttcctcgacatcagcagctgcacgaagatgggggcccgcggcctggaggcgttcggcaagcactgcaagtccctggcggggctgcggcgggtgatgcacccgatcgacctggcggacagggcgtgccagcacgacgaggcgcacgccatcgcgtgcagcatgcccaggctgcggcacctggagatggggtacatgctggtggcgacggaggcggtggcggagatcctggggcggtgccgcgagctcaggttcctggacctgcgcggctgctgggcggtggacgacaagctcctgccgcgcgaccgccacccggggctgcgcgtcctgggaccccgcgtcgacgactgctacgagaacagctactgggaggagtgctccgacgactactcggacgactcctccatctactcgtgggagctcatggacgacgtcgacgacgactacgactacgccgccggcagcgacgacgacgacgacgaggccgtctgggacgacgacggccagggcctggagaacctggaggtcaggttctacggcggtggcttcggcgagaccttcgccggcttcgactggccgccgtcgccgtgacatgacacctgctgcctgcgcttgcgttgcttgcgtgggtgggtgagcctttgtgtgttgtccccaagctttggaagcttgctgtgctgctgtagtactgtgcctgcgacatcactcgatcttcctctacctcgcagatatgccatatgtgaagcgaactgctagtggtgcaatctaaaatgtagacgctggtgtttacatg

SEQ ID NO: 154144 - DNA, 266 bp, Zea mays
  Clone ID: MRT4577_72158C.1
attaattatttactttattgtttggaactttaaaagcttgattcgttgtctaataattttgaaatgcacataaaaaaggcgctggttataaaacatttggtacaaatgaaatacaagtctgggttcggataaaaaaaaatccaaactttgaaagaggaatggaatggaactgcacgtaacatagtaggggaatcttttgaaacatccacaaatccattcttttaagaccggtagaatttttaaacaaaataataggcttctttaaa

SEQ ID NO: 154145 - DNA, 461 bp, Zea mays
  Clone ID: MRT4577_7215C.1
gttgtccctagagaggaagcaaaggcacatgaccgtcgtctccgggtgggacgacgagtccggcctgctcgatgcgatggtcgttgaggccacgcccgtctgtgagtcccgtcgcaagaggcgagcctccacctgctccaacaatgacggcgccggatccaacaccaaatacggtgatacggttgacagaccaccaaggatccaccttcctacaatggtgtggtgcaaaaacaacaacatggtctacacagcagtgcctctaacgcacggaaggacaaaggcagacgccacagagtatcattgaggaaatcatgtctctgttattaaatggttcctgcacatctgctttgagctgatcaccacgccttgtggacacaggcactgtgttcgaggagcctattatatgcacaaacattccaagacttgttctaggatggactaataacgccatctgcagtgga

SEQ ID NO: 154146 - DNA, 280 bp, Zea mays
  Clone ID: MRT4577_72160C.1
ctgacgcgtgggaacagatcacagtgaattccgacaccaaggtctttcgcgcaatgtacttcatgacaggctatcgcggcagacacatccctgtgagagacggctcgcgaagactgcggatgggccacgccggtgaccttggacgtcctgtggtgaccgttcaccggcaggtcctgtgccctctcagtggatacttccgaggaggctactagggcctcgtgtgcagtgacgactctctgggattctgtccgtcagtgctagccgcctttgtattgccagt

SEQ ID NO: 154147 - DNA, 2316 bp, Zea mays
  Clone ID: MRT4577_72161C.1
atgtgcgtggattataggtcccttaacgatgtcactgtgaagaacaagtgtccattatcccgcattgaggatttatttgatcagatgagaggtgcaaaggtattctcgaagattgatctccgctcgggttaccatcagatgaggattagaccatcgaatattcccaagacagcattctcgactcgatatggattatatgagttcactgttatgtcatttggattaactaatgcaccaacttatttcatgaacttgatgaacaaggtgtttatggagtatttggacagatttgtcgtagtattcatcgacgatattcttatctattccaagagtgatagcgatcatgaggaacatctgagattggtgctacagaagctaagagataatcaactctatgtcaagtttagcaagtgcgagttttggattggcggggtgccatttcttggtcatattatttctaatggaggaatatcagtgtatcctgctaaggttaaggagataatggagtggagagtacccactacagttactgagattcggagtttcttgggactagcaggatattatcggagatttattgaaggattttctaagattgctaagcctatgacctcgcttctggagaaggacagagaatttaagtgggacgagaagtgccaagacagctttgatcaattgaagaagagattgatgtcaccaccagtgttggttatgccagacctacagaaaggatttaatatctattgtgatgcatgtggccaaggcttaggatgtgtgctcatgcaggaaggacatgtgattgcatatgcttctcgtaagttacggaaacatgaattgaattaccccactcatgacttagaattaacagccgttgtgcatgcgcttaagatatggagacattatgtcatgggaaccaagtgtcaagtgtacactgatcataagagtttaaagtatatattcactcagaaggatctcaaccttgggcaacgccgttggttggagcttattaaggattatgatttggagattcactatcacccgggcaaggcaaatttggttgcagatgccttgagtcgaaaggagcatgttcattcagctattgtttcccagctacccgatgagattgttgaggatttcaggagacttaacctggggatagttgctcacactgaaggagttactattgatgtggaacctaccttggagcaagagatccgcaaaggccaaattggtgatgcaaaaatacaagagattaaggatctgattactgaaggtagaggtccggaattcacggaagatgagcaaggcaccgtatggttcaaggacgggatgtgtgttcctgatattgaaagccttcgagagactattttaaaggaggcccatgattcggattattctattcatcctggtagtaccaagatgtataaggatttgaagcaaaagtattggtggtatggattgaagagagatgtggtcgcacatgtggctatgtgcgatgtgtgtcaaagagttaaggctgaacaccagaggccagctagactactgcacccactgaagatacccgagtggaagtgggaagagattggtatggatttcattactggattgcctcgcacccagaaaggatatgatgctatatgggtgattgtggatagattgactaaagtggctcacttcattcctgtaaagactatttataaaggctttatatgggaggaagtgcagactccattatattgggatcagactggagaaaggcagttctttgggcctgaactgattcaagaagcagaagaacaagtccgtataattcgagagaatttgagagtggctcaaaccaggcaaaagagttatgctgataatagacgaagaccactggaatttaaggaaggagattatgtgtacctcaaggtttcaccacttcgtggaatgaggagatttaaagttaagggaaaattgtcccctcgctttattggaccctttagagtttttaggcgagttggggagatggcataccaactcgagctacctgctactctatcggatgtgcacaacgtgttccaagtatctcagctaaagaagtgtctccgtgtccctgaggaacagttaccaatggaagagctcagtgttcagggtgatttgacttacacggagtacccgatcaagattttggatacattgactcgagttacaagaaataaggtgataaagatgtgcaaagtgcaatggagtcaccatggcgaagatgaagcgacttgggaaagagaagaagagcttcgcatagattttccccatctttttcctcgttcctcctaa

SEQ ID NO: 154148 - DNA, 402 bp, Zea mays
  Clone ID: MRT4577_72162C.1
cgactcctataggtggaattcgttcctcgaggccggccgggcatttcgcagtaagtcgtcgaccattgctgacttgaccgagatgggtcccaaaagcatatgaattcgggtgggaagcaggcggcctcggccaaaggacctggtgcaatatgcagagagtagaatggacggccccatcataccgccactaccgacgaattcggatcaactgcaggtatgctgcgatcagcagcaagtattccgcagcgtcaatctcttgcgatgctgtgtaaatcagctccggttagccttttggcatgctagtcaggcatggtgctggtgccggccttgcggacgaggataaatttggaataaagtttgagtcgacgattccgaaataaaaaaaaaaaaaaatttgcggcc

SEQ ID NO: 154149 - DNA, 1189 bp, Zea mays
  Clone ID: MRT4577_72163C.1
cattggacccctcgaggccggccgggagacgtcatcattcctctcgagtagtcgatcggagtcaggagatgggcgcgtctggtggtgaaaagcttggtactcttgtgtgtgttcttgcacatgtatcgttattattggtgctcgtgctagcaccgtgtgtgtgcaaggcgactggtggtgactacggcggcctctccaacgaccactacaccgagtcctgcccggagctggagaccatcgtcaagaagtccctggcgccgatcttcgccgtggacatcacctcgccggccgccctcctccgcctgctcttccacgactgccaagtccacggatgtgacggctccatattgctcaactccgacgagcgccggcacataacctcggaactgggctcacgcaagaacctcgggatccggcacgtcggcaccgtcgggctcgtgaaggcggccgtggaagcggcctgccctggccgggtctcctgcgccgacatcgtcgtcctggcggcgagggaggccgtggcgcacaccggcggcccgcgcgtcgccagcgtgccccttggccggagggacgccacgaccaccagcacgcaggccgccgatgcgcagcttccgtcctgtttcctcgggattgacggcgcgctcgacatctttaccagccgcggcatgaccgtcgaggagacagtcgccattctagggagccacacgctggggggtggccattgcgtcaacatagacaccggtcgcgcgcgacgcgacaaggcatttgaggccctgctgcacctgcagtgcccaaagaccatgccgcctctgatcacagaggccgtcgtctttgtacccagcgacctgacgccgacatggttcgacacccactactaccggggcgccgccgcaggccgggggctcttcaacgtcgacgacgaggcctccacctacgcgcgcacggcggggtacgtgcggcggttcgctgaggacagggagggcttcttcggggtcttcgcctcggccttcgtcaagctctctgggtttggcgtgctcaccggtgagcagggtgagatcaggaagaaatgcgacgtcgttaactactgatctgctagcattattttggtggtatatcgaaagataatattgtgattgtgaatttgtgattctactgtcatggcatggattgaataataagttgaaataatatc

SEQ ID NO: 154150 - DNA, 1737 bp, Zea mays
  Clone ID: MRT4577_72164C.1
atgagccataagccaccgacatttgctagttctcctgatccactggacacagatgattggctgaagtccgtagagaagatgttgaacattgctcagtgcactgaccgggagaaggttttatatgcttctggacgtctgacaggccctgctgctgattggtgggattcatatactgctgcccacgatgttgctgacactaccacacgggcggagttcacgacgcagtttaagaaccatcatataccagctggactgatgaaaattaagaagaaggaattcctatcgctgaagcagggaagcatgtcagttagcaagtaccgcgacaagttcatccagttatccagatatgtgcctgatgaagttgctgaagatgagaggaaacaggagcattttattgaaggacttaatggacccctgattgctactactccagttcagaataagcagcagactccaggatctggcaagggatactctattgctagggttaatcaagtcagcgttgatgctactcctgatggtgctgacatcgtacttggtatgttttacgttaatgcaattcctgcaaccatattatttgattctggtgctacacattcatttatgtctgctcgatatgccaacacaaatgagataccactgctaaatatgagaaaaccaatgatagtaattacacctaaagggcctgttgaggcaaatcaaatgacacgtagattgacattaacaattatggcaagagaatttggagctactgctataatattagaggcaaccagtatagatctgatccttggtatgtcatggttaagaaaggcaaaggccattatagcatgtggtaggggtacggtagaacttaccagccctaaaggagaaatatttcaagttcaaattacagtaaccacctcatccaaacgtgcaatgttctttatacccgaggagtttgttggcgacaacatccgtgtggttagggattttctggatgtctttccagaggagttaccagggatgccaccagatagggaagttgagtttgtaagagatcttttacctggaactgcccctatttctaaacggccatacatgatgtctgtagaagagttaaaggaactgaagaagcagttaaccgagttacaagaggctgggtacattcgttcgagttcctcaccttggagagcgccagttttgtttgtacagaagaaggatggatcacaaagaatgtgtgtggattatagatcccttaatgatgtcactatgaagaacaagtatctgttaccccgcattgaggatttatttgatcagatgagaggtgcaagggtattctcgaagattgatctccgatcgggttaccatcagatgaggattagaccatcggatattcccaagacaacattctcgacccgatatggattatatgagttcattgttatgtcatttggattaaccaatgcacaaacttattttatggatttgatgaataagtttagcaaatgcgagttttggattggcgaggtgccctttcttggacatatcatttctaatggagggatatcagtggatcctgctaaagtcaaggaaataatggcgtggggcgtacccactatagttacggagattcggagtttcttggaactagcaggatattattggagatttattgaaggattttctaagattgctaagcctatgacctcgcttctggagaagggaagagagtttaagtgggacgagaagtgctag

SEQ ID NO: 154151 - DNA, 1443 bp, Zea mays
  Clone ID: MRT4577_72165C.1
atgtctgtagaagagttaaagggactgaagaagcagttaacggaattacaagaagctgggtacattcgtccgagttcctcatcttggggagcagtgatgagaggtgcaagggtattctcgaagattgatctccgatcgggttaccatcaaatgaagattaggccatcggatattcccaagacggatttctcgacccgatatggtttatatgagttcactgttatgttctttggactaactaatacaccagcctattttatggatctaaagaataagtttagcaagtacgagttttggattggtgaggtgccattccttggacatatcatttctaatgacggaatatcagtggatcctgctaaagtcaaggagattatggagtggagcgtacccactacagttacggagattcgaagtttcttgggacttgcaggatactatcggagatttattgagggattttctaagattgctaaacctatgacttcgcttctggagaaaggaatagaatttaagtgggacgagaaatgccaagatagctttgatcaattgaagaaaagattgatgtcgccaccaatattggttatgccagacttacagaaaggatttgatatctattgtgatgcatgtggccaaggcttagggtgtgtgctcatgcaagaaggacatgtgattgcctatgcttctcgtcagttacgcaaacatgaattgaactaccccactcatgacatggaattggcagccgttgtgcatgcgcttaagatttggagacattacattatgggaaccaagtgccaagtatatacggatcataagagtttgaagtatatattcactcagaaggatctcaaccttaggcaacgccgttggttggagcttattaaggattatgatttggagattcactatcacccgggcaaggcaaatttggttgcagatgccttgagtcgcaaggagcatgttcattcagctattgttgcccaactacctgatgaaattgttgaggatttcaggagacttaacctagggatagttgctcacactgaaggagttactattgatgtggaacctactttggagcaagaaatccgcaaaggacaaattggtgatgcgaaaatacaagagatcaaagatctgattactgaaggtcgaggtccagaattcacagaggatgagcaaggcactgtatggttcaaggacaggatgtgtgttcctcatattgaaagccttcgagagactatattgaaggaggcccatgactcggattattctattcatcctggtagtaccaagatgtatcaggatttgaagcgaaaatattggtggtatggattgaagagagatgtggctgcacatgtggctatgtgcgatgtgtgtcaaatagttaaggctgaatgccagaggccagctagactactgcacccacttaagatacccgagtga

SEQ ID NO: 154152 - DNA, 2361 bp, Zea mays
  Clone ID: MRT4577_72166C.1
atggccttcgggcttcgacgctcggcggctgaacaggtggccgggtgggtcctcgatgggcctggcttagggtgtaccagggcccacccagacccccatgtgggtccgcccctgttcggtagccctccaacaacaatcgctaacaggtgtcaattaaagtgccctagtggccggggtgtcacgctccacaagatcgtgacagccataggaggtggtgtatcggttgctaaggctcagttggtaatcagagcaaggtttatcggattggaggttgatgatgcttcttgtaatatgccacactctcctcgcaccaagggcatcatacaacactttgtaaggctaatgaccaagaagcacctaatcgccggtgactacgtactaaccgtagaggtatgggtggttttcgtcgacgtgaggtacatgtggatagaacatggtaagaagaatcctaataacatgccacaaacttgggatgcgttgaaacgggtcatgcgggctagatttgttccttcttattatgcacgtgatatgttaaacaagttgcaacaattcagacagggtactaaaagtgtagaagaatattatcaggaattacaaatgggaaaatctacaccatggcagcagcgcacgactacgtccatgaccggccgtacaccagcaccaactccctcgctgagtcgaccagcaccaccgccttcctccggcgacaaaccacgtgcatcttccacaaattcagcaaccaaatctgcccagaaaccagaaggtagtgcctcttcagtaccctccacgggtagaacaagagatgttctgtgttatcgatgcaagggctatggacacgtgcagtgtgattgtcctaatcagcgtgttttggtggtaaaagatgatggtgggtattcctctgctagtgatttggatgaagctatacttgctttgcttgcggctgatgatgtaggcactaaggaaccactcgaagaacagattggtgcagatgatgcagagcattatgagagcctcattgtacagcgtgtgcttagtgcacaaatggaaaaggcagagcagaatcagcaacacacgttgtttcaatcaaagtgcgtcattaaggaacattcatgtcgtttgatcattgatggtggtagctgcaacaacttggctagcagcgacatggtggagaagcttgcacttacgaccaaaccgcacccccatccatatcacattcaatggcttaacaatagtggtaaggtcaaggtaaccaagctggtacgaattaattttgctattggttcatatcgtgatgttgttgactgtgacgttgtgcctatggatgcttgtaatattctgctaggtagaccatggcatcatggtagatcaaatcaatattttctcatacaccatgataagaaaattattttgcttcccatgtcccttgaggttattgtgcgtgatgatgttgctaaagctatgaaaactaaaactgagaacaacaagaatattaaagttgttggtaataacaaagatgggataaaattgaaaggacactgcttgcttgcgacaaaatctaatgttaatgaattaatgcttccacttctgttgcctacgctttgcgcgcgtgctggttcagctgcccgtcttcttgtcttcggaaccccaccatattggagtttgattttgaaacctacatttacatctgggttgtcttttctaaaccttgagagaaatatgcttgaagcgagtgatagtagtggctgggaattcttcgctaacctgacaacatgcaattccctgatggtgctttcattggatggcaataatctgtggggagctataccaaacttcatctctatcctgtccaccaacctcacaaatctactaatgagtgacaaccaactatccggagtagtcccctcaagcattgggaagtttaatggattaattgaactcgcactagatggcaacaattttaccggtacaattgaggattggatcccaaagttgacgagcctacaagagttatatctcaatgacaacaactttgatgtcatagaagacgaggaggtgaccgatgtggggcaacatgtggtggaggtgctcgctgctgttgtggaccttcagggtggcgagggagatgatgagtactacaactatgaagaggccaaggtggcgcgggtgttcgacgatgagtgtgctgacgactgcatgctctttagtagcgatgttgtgctggtgtcggtgctgagcacctcctctgcgatgctgtctcccattcaggcgtcgctcctgcgtctagtggtggtcactgcagtaggcactaattcgacgcacattgctgccaggtcatcgctggtgggaacctatttatcctga

SEQ ID NO: 154153 - DNA, 2130 bp, Zea mays
  Clone ID: MRT4577_72167C.1
ttaggaagaacgagggaaaagatagggaaaatcgatgcgaagctcttcttctctttcccatgttgcttcatcttcatcttcgccatggtgactcaattgtactttgcacatctttatcaccttatttcttgtaactcgagtcaaagtatccaaaatcttgataggatactccgtgtaagtcaaatctccctgaaccctgagctcttccattggtaactgttcctcagggacacggagacacttcttgagttgagacacatggaatacattatgcacatccgatagactagcaggtaactcgagttggtatgccatctccccaactcgcctaaagatcaagaatggtccaatatagcgtggcgacaatttgcccttaactttgaatttccccattccacgaagtggtgacaccttgagatacacataatctccttcttcaaattccagtggtcttcttctattatcagcatagctcttttgcctagtttgagccaccctcaaattctctcgaattatatggacttgttcttctgcttcttgaatcagttcaggcccaaagaactgtcttcccctagtcagaatgaaatgagccactttggttaggctatccataataacccatatagaatcatatcctttcgaggtgtgaggcaacccagtaataaaatccataccaatctcttcccacttccactcgggtatctttaatgggtataatagtccagcttgtctttggtgttctgccttaactctttgacacacatcgcacatagccacatgtgcagccacaactctcttcaatccataccaccaatacttctgcttcaaaccctgatacatcttggtactaccaggatgaatagaataatccaagtcatggggctcctttaaaacagtctcacgaaggctttcaatatcaggaacacatatcctgtccttgaaccatatgatgccttgctcatcttccgtgaattccggacctcgtccttcagtaatcagatccttaatctcttgtattttagcatcaccaatttgtcctttgtggatttcttgttccaaggtagattccacatcaatagtaactccttcagtgtgagcaacaatccccaggttaagtctcctgaaattctcaacaatctcatcgggtagctgtgcaacaacagctgaatgaacatgctcctttcgactcaaggcatttgcaaccaaatttgccttgcccgggtgatagtgaatctccaaatcataatccttaataagctccaaccaacggcgttgcttctcatcccacttgaattctcttcctttctccaaaagcgaggtcataggcttagcaattttagagaactcttcaataaatctctgataatatccggcgagtcccaagaaactccgaatctcagtaactgtagtgggcactctccactccattatctccttcactttagcaggatccactgctattcctccattagaaacaatatgaccaaggaatgacaccttgtcaatccaaaactcgcatttgctgtacttggcgtagagttgattatttcgtagcttctgtagcaccaatctcaggtgtttctcatgatcactatcactcttcaaataaaaatatcgttgatgaaaccacgacgaatctgtccagatcatgaacaccttattcttcagatccataaaataggctggtgtattggttagtccaaatgacataacagtaaactcatataatccatatcgggttgagaaatccgtcttgggaatatccgatggcaaaatcttcatttgatggtaacccgatcggagatcagtcttcgagaatacccttgcacctctcatctgattaaataaatcctcaatgcggggtaacggacacttgttcttcacagtgacattgttaagggacctataattcacgcacatcccttgcgattcttgtttcttctgtacaaatagaaccggcgctccacaaggtgaagaattcggacgaatgtacccagcctcttgtaattccattaattgcttcttaagttcctttagttctcctacggacatcctgtacggccgtttagaaataggagcagtctcaggtaagagatcaatgacaaactgaacttccctatttggtggcat

SEQ ID NO: 154154 - DNA, 3573 bp, Zea mays
  Clone ID: MRT4577_72168C.1
atgtcccctgaggctattgtgcgtgatgatgttgctaaagctaccaaagctaaaactgagaacaacgagaatattaaagctgttggtaataacaaagatgggataaaattgaaaggacattgcttgcttgtgacgaaatctgatgttaatgaattatttgcttccacttctgttgcctatgccttggagtattctgatgtatttccaagtgagataccagagggactgccacctatacgagggattgagcaccaaattgatcttattcctagtgcatctttgccaaatcatgcgccatataggagaaatccggaggaaacaaaagaaattcagcgacaagtgcaagaactactcgacaaaggttatgtgcttcgtatgaaattgggagatgaatggaaaactgctttcaaaactaagtttggattgtatgagtggttagtcatgcctttcgggttaactaatgcacctaacactttcatgagattaatgaacgaggttttgcatgccttcattggaaaatttgtggtattatactttgatgacatattgatctacaacaaatctatggatgaacatgttgatcacatgcgtgctgtttttaatgctttacgagatgcacgtttatttggtaagcttgagaagtgcacattttgcaccgatcgagtgtcatttcttggctatgttgtgactccacagggaattgaggttgatgaagccaaggtagaagcgatacatggatggcctatgccaaagactatcacacaggtgtggagtttcctaggacttgctggcttctatcgctgttttgtgaaggactttagtaccattgctgcacctttgaatgagcttacgaagaagggagtgcattttagttggggcaaagtacaagagcactctttcaacgtgttgaaagataagttgacacatgcacccctcctccaatttttaggttttaataagacttttgagcttgaatgtgatgctagtggaattggattgggtggtgttttgttacaagaaggcaaacatgttgcatattttagtgaaaaattgagtgggcctgttctaaattattctacttatgataaggaattatatgctcttgtgcgaacattagaaacatggcagcattatttatggcccaaagagtttgttattcattctgatcatgaatctttgaaacatattcgtagtcaaggaaaacttaaccgtagacatgctaagtgggttgaatttattgaatcttttccttatgttattaagcacaagaaaggaaaagagaatatcattgctgacgctttgtctaggagatatactttgctgaatcaacttgactacaaaatctttggattagagacgattaaagaccaatatgttcatgatgctgattttaaagatgtgttgctgcattgtaaagatgggaaaggatggaacaaatatatcgaagcacatggaggtggcttaatgggacattttggagcaaagaaaacggaggacaaacttgctggtcatttcttttggcccaagatgagaagagatgtggcaagattggttgctcgttgcacgacatgtcaaaaggcgaagtcacggttaaatccacacagtttgtatttgcccctacccgttcctagtgctccttgggaagatatttctatggattttgtgttgggattgcctaggactaggaagggacgtgatagtgtgtttgtggttgttgatagattttctaagatggcacatttcataccatgtcataaaactgacgatgctacacatattgttgatttattctttcgtgaaattgttctcttgcatggtgtgcccaacacaatcgtttctgatcatgatgctaaatttcttagtcatttttggaggactttgtgggcaaaactggggactaagcttttattttctactacatgtcatccccgaactgatggtcaaactgaagttgtgaatagaactttgtctactatgttaagggttgttctaaagaagaatattaacatgtgggaggactgtttgcctcatgttgaatttgcttataatcgatcattacattttactacaaagatgtgcccatttcagattgtatatggtttcttgcctcgtgctcctattgatttaatgcctttgccatcttctgaaaaactaaattttgatgctactaggcatgctgaattgatgttaaaactgcatgaaactactaaagaaaacatagagcgtatggatgctagatataagtttgctagtgataaaggtagaaaggaattaaattttgaacctggagatttagtttggttgcatttgagaaaggaaaggtttcctgaattacgaaaatctaaattgttgcctcgagccgatggaccggttaaagtgctagagaaaattaacgacaatgcatataggctaggtctgcctacagactttggggttagccccacatttaacattgcggatttaaagccctacttgggagaggaagttgagcttgagtcgaggaagactcaaatgcaagaaggggagaatgatgaagacatccacactactgatacatctatgccaatacaagtaccaatttctggtcccattactcgcgctcgtgctcgtcaactcaaccatcaggacgagtgccctagtggccagggtgttacgctccacaagatcgtgacagccataggaggtggtgtatcggccgtccgaaaattagaagacatgtttgaagggttagaattccatcacgtggaaagagaccgcaatgtagcagcagatgcattgtcgaagctgggatctagtcgggcacaggccccacccgaaatcttcgtccaggaagtatcacgcccaagtataccctcagatcaggcggaagaatgcaacaccttgagccaaccaaaatcggaccctaatgactggagagagcctatcattagcatccagaaccctggttgggaaggttttcagtttactaaatgggtagagtacaaacctattgcttctttaacctcagccaaggcagtggagttcatacaagacataatatttaggtttgggataccgaacaacatcataattgacctgggatacaacttcactagctctgaattcttcgatttctgcgaacaacggagtatccagatcaagtatgcaacagtagcgcacccaagagccaatggtcaggtggaaagggccaatggaatgatattggaagcacttaggaagaaagtgttcgacaaaaatgaaaagtttgcagtaaagtggatcagagagctaccgtatgtggtctggagcttgagaactcaacctagtcgagctctacatggaaataccccgttcttcatagtctatggttcggaagtggtgctacctgccgacctcaggttcggggcaccgaggctggtcttcgaaagcatagctgaagcagaggctaccagactagaggatattgatgtgctggaggaagagcgattgaacatagtaattcaatcagcccgataccagcagtccttgaggcgctatcatgataaagtcgtacgacaccgatcctttgtagttggagacttggtccttcattga

SEQ ID NO: 154155 - DNA, 265 bp, Zea mays
  Clone ID: MRT4577_72169C.1
ttttgtgggtgttttttgaaaatattgggggcggaataaaaagcttgtgtaaaacaacaggttacagcagtaatactataaatgccctgctaaccggctaagaatgaccaaggactctgtatcataacaaggtaccttgaatcagcccacacttaaaagctcatacagtagattcctaccatagctgagaaatcctaaggggggtagacaacctacaccggcattgacagggtttgccactacgtgaaccgccgctaggaggagt

SEQ ID NO: 154156 - DNA, 349 bp, Zea mays
  Clone ID: MRT4577_7216C.1
cgtgccaacacccgcatccaagcccgtgccagctgcatggaacctgcggcgttggcagcacccggatcctgggccagctcgttgagcttttgaggcatcatggcaccccgaccgttacgccctactgctcacctgatcgcctatctttgctgcttcagcgttacctgtcactaacgctggttgagccagtgtgaccagcaccaggcgatcctctatttgatcctacagtccatcctgcatgagatgtcacattgatgacacttggtgctgctgctgtcatcacacatattacagcagctgcctgcggtgcattgactggcacaaaacattacgtgacaacaccttcaag

SEQ ID NO: 154157 - DNA, 1554 bp, Zea mays
  Clone ID: MRT4577_72170C.1
atggaattaccactagacgcgcagagcagcggaagacgtctcgatgtagacgaacgcgtcgagcagtgccgtgcagtcgccggcgtccttcacgtcctcgcacgtgtgctcatgcaagaaggacatgtgatcgcctacgcgtctcgtcagttgcggaaacatgagttgaactaccccactcatgacttagaactagcagccgttgtgcacacgcttaagatttggaggcattattcatgggaactaagtgccaagcaatgccgatggctggagcttattaaggattatgatttggagattcactatcacccgggcaaggcgaaattggttgcagatgccttgagtcaaaaggagcatgttcattcagctgttgttgcccagctacccgatgagattgttgaggattttaggagacttaacatggggatagttgctcacactgaaggagttactattgatgtggaacctactttggagcaagaaatccacaaaggacaaattgatgatgctaaaatacaagagattaaggatctgattactgatggtcgaggtccggaattcatggaagatgagcaaggcaccgtgtggttcaaggacaggatatgtgttcctgatattgaaagcctttgtgagactattttaaaagaggcccatgactcggattattctattcatcctggtagtaccaagatgcatcaggatttgaagcaaaaatactggtggtatggattgaagagagatgtggctgcacatgtggctatgtgtgatgtgtgtcaaagagttaaggctgaacaccagaggccggctggactactgcacccactgaagatacccgagtggaagtgggaagagattggaagttgggataagagtctaccgtatgctgagttctcttataataatagctatcaggccagtctgaagatgtcaccttttgaggctttatatgggaggaagtgcagaactcctctatactgggatcagactggagaaagacagttctttgggtttgaactgattcaagaggtagaagaacaagtccttataattcgggagaatttgagggtagctcaaactaggcaaaagagctatgctgataatagaaggagaccactggaatttgaggaaggagattatgtgtacctcaaggtgtcaccacttcgtggaatgaggagattcaaagtcaagggcaaattgtcccctctctatattggaccattcttgatctttagtcgagttggggagatggcataccaactcgagctacctgctagtctatcgaatgtgcacaatgtgttccacgtatctcaactgaagaagtgcctccatgtccctgaagaacaattaccaatggaagagcttagtgttcagggtgatttgacttacatggagtatcctatcaagattcttgatactttgactagagttacaagaaataaggtgataaatatgtgcaaagtgaaatggagtcgtcacagagaagatgaagctacttcggaaagagaagaagagcttagcatagattttacccatcttttcccaagatcttcctaa

SEQ ID NO: 154158 - DNA, 2841 bp, Zea mays
  Clone ID: MRT4577_72171C.1
atggagacccgtccactcttgttttccttaggaaccagggagaagaccgaaagcgaaaaggatttgaacatgctggattcgaactgcagaagaataccaacttgtgacggtcaccacggtcacatgcgggctcggattggaagttcaagcacaacatggaaagcttatcaagacgagtgccctagtggccgaggtgtcacgctccacaagatcgtgacagccataggaggtggtgtatcggttgctaaggcgcagcgtcttttggaaggctgtagtcgggtcgtgaacgtcgtctcctccaccaatcgagttattccacaccctctcatcgaaagatcgggcattcacccaacgggattggaggttgatgatgcttctcgtaatatgccacactctcctcgcaccaagggcatcatacaacactttgtaaggctggtgaagacgcacacagaaggtcttgataatgccttgcaggtgacaaatgaaaagatggggcaattggaggccacacaaatcgacacaaacaccaaacttgcaaatgtggaaatgacaggtgctcatattgacaagagccttgtcgcactcttgaggcgatttgatgagatgcatgctaataccaatggtgggtgtgatgagggcgccgaaggtaactgggatgactatgttgttgatactgaacaagatgacaaagaagcacctaatcgccgacgactacatactaaccgtagaggtatgggtggttttcaccgacgtgggatacatggtaatgatgatgcttttagtaaggttaaatttaaaatacctccttttgatggtaaatatgaccctgatgcttacattacttgggagattgtggttgatcaaaagtttgcatgtcatgaatttcctgagaatgcgctggttagagctgctactagtgagtttactgaatttgcttcagtttggtggatagaacatggtaagaataatcctaataacatgccacaaacttgggatccattgaaacgggtcatgcgggctagatttgttccttcttattatgcacgtgatatgttaaacaagttgcaacaattgagacagggtactaaaagtgtagaagaatattatcaggaattacaaatgggtatgttgcgttgtaacatagaggagggtgaggaatctgctatggctatatttttgggcgggttaaatagggaaattcaggacatccttgcttataaagattatgctaacgtaacccgattgtttcatcttgcttgcaaagctggaagggaagtgcagggacaacgtgctagtgcaaggtctaatgtttctgcaggaaaatctacaccatggcagcagcgcacgactacgtccatgaccggccgtacaccagcaccaactccctcgctgagtcgaccagcaccaccgccttcctccagcaacaaaccacgtgcatcttccacaaattcagcaaccaaatttgcccaaaaaccagcatgtagtgcctcttcagtagcctccacgggtagaacaagagatgttctgtgttattgatgcaagggctatggacacgtgcagcgtgattgtcctaatcagcgtgttttggtggtaaaagacgatggtgggtattcctctgctagtgatttggatgaagctacacttgctttgcttgcggctgatgatgcaggcactaaggaaccacccgaagaacagattggtgcagatgatgcagagcattatgagagcctcattgtacagcgtgtgcttagtgcacaaatggagaaggcagagcagaatcagcgacatacgttgcttcaaacaaagtgtgtcattaaggagcgttcatgtcgtttgatcatcgatggaggtagctgcaacaacttggctagcagcgacatggtggagaagcttgcacttacgaccaaaccgcacccgcatccatatcacattcaatggcttaacaatagtggtaaggtcaaggtaaccaagctggtacgaattaattttgctattggttcatatcgtgatgttggtgactgtgatgttgtgcctatggatgcttgtaatattctgctaggtagaccatggcaatttgattcagattgtatgaatcatggtagatcaaatcaatattctctcatacaccatgataagaaaattattttgcttcccatgtcccctgaggctattgtgcgtgatgatgttgctaaagctaccaaaactaaaactgagaacaacaagaatattaaagttgttggtaataacaaagatgggataaaattgaaaggacattgcttgcttgcgacaaaaactgatgttaatgaattatttgcttccacttctgttgcctacgccttggtatgcaaggatgctttgatttcaattcaagatatgcagcattctttgtctcctgttgttactaacattttgcaggagtattctgatgtatttccatgtgagatactagaggggctgccacctatacgagggattgagcaccaaattgatcttattcctggtgcatctttgccaaatcgtgcttcatataggacaaatccggaggaaacaaaagaaatccagcgacaagttcaagaactactcgacaaaggttacgtgcgtgagtctcttagtccgtgtgttgttccggttattttagtgcctaaaaaagatggaacatggcgtatgtgtgttgattgtagggctattaataatatcacgatacggtattgacaccctattccacgtttagatgatatgcttgatgaattgagtggtgccatcgtcttttctaaagttgatttgcgtagtgggtaccaccagattcgtatgaaattgggagatgaatggaaaactgctttc

SEQ ID NO: 154159 - DNA, 3528 bp, Zea mays
  Clone ID: MRT4577_72172C.1
atggcgggtgaatcatggagcttggctccgtccctcctcgaccgcgtctacgagtcctccatcagaaccactacttgcgcctggccgaaatcgacggagagggagaagaagactgagaaaaggagaagagggccgccgccgaggtgtatgggagtcgcgatcccttggcagatgggtaacatgacttgtgggtacagggtacaacctctgcagagtgtaaaactgatggtcaacacccggaagggtggtggaattgatttacctcccaatcgacacactcggaggatatttagacaaccccagccacaaccaacagagatggatcctccaccaccgcctccaccatcaggagttgacccactggttgcagctcagatgaggatgatgcaacaaatggctgacactatggcagatatgcatgctcagatgcagcaggaacgccaggagatgcaccaagagcgggaggagatacgtcgagagttgcaccaagaacgagaagagatacgccaggaaaggaggacgcagcagcaacagcaacagcaacaacaaccgcaacaagcaccacagcctccaccaccacccccagttccaccccgagataagcaccgggagttcatgagccataagccaccgacatttgctagttgtcctgatccactggacgcagatgattggctaaagttcgtagagaagatgttgaacattgctcagtgcacggaccaggagaagggaagcatgtcagtcagcgagtatcgcgacaagttcattcagctctccagatatgctccggaagaggttgccaaagatgagaggaagcaggaacattttattgaaggacttaatggacctctacagtattctctggtggcacatacgtttccatcatttcagaggctgctcgataaggctctatctattgaacacaagcgtgttcagctaggagatttgaagaggaaggctatatcccaaggacaaggaagcaacagtgctacccccacttgtaccccgatgaaattctcaggacagagtgcaggcactacttgcttcaagtgtgggaagactggacattatgcaattgtttgcccacagaggattgctaccaccccagttcagaataagcagcagactccaggatctggcaagggacactctattgccagggttaatcaagtcagcactgatgctactcctgatggtgctgacatcgtgcttggtatgttttacgttaatgcaattcctgcaaccatattatttgattctggtgctacacattcatttatgtctgctcgatatgccaacacaaatgaggtacccctgctaaatatgagaaaatcaatgatagtgattacacctaaagggcctgttgaggcaaataaaatgacacgtagattgacattaacaattatgggaagagaatttatagctactgctataatattagaggcaagcagtatagatttgatccttggtatgtcctggttaagaaaggcaaaggccattatagcatgtggtaggggtaccgtagaactcaccagccctaaaggagaaagatttcaagttcaaattgcagtaaccacctcttccagacatgcgatgtactttatagttgaggagtttgttggtgacaacatccgtgtggttagagattttctggatgtctttccagaggagttgccagggatgccaccagatagggaagttgagtttgttattgatctcttacctgggactgtccctatttctaaacggccatacaagatgtctgtaaaagaattaaaggaacttaagaagcagttaacagaattacaagaggctgggttcattcatccgagttcctcaccttggggagcaccgatactgtttgtacagaagaaggatggttcacaacgaatgtgtgtggattatagatcccttaatgatgttactgtgaagaacaagtatccgttaccccgcattgaggatttatttgatcagatgagaggtgctagggtattcttgaagattgatctccgatcgggataccatcagatgaggattaggccatcggatattcccaagacaactttcttgactcgatatggattatatgagttcacggttatgtcatttggactgactaatgcaccagcttattttatgaatttgatgaataaggtgtttatggagtatttggacaaattcgtcgtagtattcatcgacgatattcttatttattccaagagttatagtgatcatgaggaacatctgagattggtgctacagaagctacgagataatcaactctatgctaagtatagcaaatgggagttttggattggcgaggtgccattccttggacatatcatttctaatggagggatttcagtagatcctgctaaagtcaaggagataatggagtggagcgtatccactacagttaaagagattcagagtttcttggggcttacaggatattatcggagatttattgaaggattctctaagattaccaagcctatgacctcacttctagagaaggaaagagagttcaagtgggacgagaagtgccaagatagttttgatcaattaaagaagaggttgatgtcgccaccagtgttgaaggatatcaaccttaggcaacgccgttggttggagcttattaaagattatgatttggagattcactatcacccgggcaaggcgaatttggttgccgatgccttgagtcggaaggaacacgttcattcagctattgtggcccagctacctgatgagcttgttgaggatttcaggagacttaacctggggatagttgctcacaatgaaggagttactattgatgtggaacctactttggagcaagaaatccgcaaaggacaaattggtgatgctaaaatacaagagatcaaggatcttattactgaaggtcgaggtccagaattcacggaggatgagcaaggcaccatatggttcaaggataggatatgtgttcctgatattgaaagccttcgtgagactattttaaaggaggcccatgactcggattattctattcaccctggtagcaccaagatgtatcaggatttgaagcagaaatactggtggtatggattgaaaagagatgtggctgcacatgtggctatgtgcgatgtgtgtcaaagagttaaggctgaacaccagaggccagctggactactgcacccacttaagatacccgggtggaagtgggaagagattggaatggatttcattaccggattgcctcgcacccagaaaggatatgatgctatatgggtgattgtggatagattgattaaagtagcccacttcattcctgtcaagactacttataaaggttctcaactggcagagttatatatggcacagattgtgtgtttacatggagtaccaaagaagatcgtgtctgatcgaggttcacagttcacctcaagattctggagaagctttcatgagaatatgaatacaaagttgaattttagtacaacctatcaccctcagactgatggacagactgaaaggactaattaa

SEQ ID NO: 154160 - DNA, 319 bp, Zea mays
  unsure (1)..(319): unsure at all n locations
  Clone ID: MRT4577_72173C.1
ggccggtcccagtacccggacgtacggtgaccccacaccacaccaccacaacccctccgtcctcttcgcggctgcggtgcggccccgggagttccttgattcagcgggcggtgggcatanangacatcnctttctatctttnggtaacctgaacctcccgctgcagctctgtaggtagctagtattccacaggtgatttctcctttcctgatcgacatatttcaaacttgtccgtgacctcccagtatcataatagagggccacgggttttgcttatcaatggtgtaggagttaagaccaaatacttgagctatctctt

SEQ ID NO: 154161 - DNA, 1830 bp, Zea mays
  Clone ID: MRT4577_72174C.1
atgagccataagccaccgacatttgctagttctcctgatccactggacacagatgattggctgaagtccgtagagaagatgttgaacattgctcagtgcactgaccgggagaaggttttatatgcttctggacgtctgacaggccctgctgctgattggtgggattcatatactgctgcccacgatgttgctgacactaccacacgggcggagttcacgacgcagtttaagaaccatcatataccagctggactgatgaaaattaagaagaaggaattcctatcgctgaagcagggaagcatgtcagttagcaagtaccgcgacaagttcatccagttatccagatatgtgcctgatgaagttgctgaagatgagaggaaacaggagcattttattgaaggacttaatggacccctgtacaccccgacgaaattctcaggacagagtgcaggcactacttgctacaagtgtgggaagattggacattatgcaaatgtttgcccacagaggattgctactactccagttcagaataagcagcagactccaggatctggcaagggatactctattgctagggttaatcaagtcagcgttgatgctactcctgatggtgctgacatcgtacttggtatgttttacgttaatgcaattcctgcaaccatattatttgattctggtgctacacattcatttatgtctgctcgatatgccaacacaaatgagataccactgctaaatatgagaaaaccaatgatagtaattacacctaaagggcctgttgaggcaaatcaaatgacacgtagattgacattaacaattatggcaagagaatttggagctactgctataatattagaggcaaccagtatagatctgatccttggtatgtcatggttaagaaaggcaaaggccattatagcatgtggtaggggtacggtagaacttaccagccctaaaggagaaatatttcaagttcaaattacagtaaccacctcatccaaacgtgcaatgttctttatacccgaggagtttgttggcgacaacatccgtgtggttagggattttctggatgtctttccagaggagttaccagggatgccaccagatagggaagttgagtttgtaagagatcttttacctggaactgcccctatttctaaacggccatacatgatgtctgtagaagagttaaaggaactgaagaagcagttaaccgagttacaagaggctgggtacattcgttcgagttcctcaccttggagagcgccagttttgtttgtacagaagaaggatggatcacaaagaatgtgtgtggattatagatcccttaatgatgtcactatgaagaacaagtatctgttaccccgcattgaggatttatttgatcagatgagaggtgcaagggtattctcgaagattgatctccgatcgggttaccatcagatgaggattagaccatcggatattcccaagacaacattctcgacccgatatggattatatgagttcattgttatgtcatttggattaaccaatgcacaaacttattttatggatttgatgaataagtttagcaaatgcgagttttggattggcgaggtgccctttcttggacatatcatttctaatggagggatatcagtggatcctgctaaagtcaaggaaataatggcgtggggcgtacccactatagttacggagattcggagtttcttggaactagcaggatattattggagatttattgaaggattttctaagattgctaagcctatgacctcgcttctggagaagggaagagagtttaagtgggacgagaagtgctag

SEQ ID NO: 154162 - DNA, 236 bp, Zea mays
  Clone ID: MRT4577_72175C.1
cattagcccatgggatttggtacacatgaaagtttggtatacacgtacacatataaaatcctagtcttcaaaatcagatataacggtgcaaaacaatcacacaccaaatctgtttttgaaggtcaggattttctatgtacatcagtttttcatgtggactatataacccttagcgaccactgcaaggtggtaggccattgcagctgatcagcttcctgtgcttactggtcttgctc

SEQ ID NO: 154163 - DNA, 329 bp, Zea mays
  unsure (1)..(329): unsure at all n locations
  Clone ID: MRT4577_72176C.1
gcaccgaccaacagctcttgcttaccataatagatactagaatactttttgttctatgacacataggtgaccatacattccagtcaacacgcaacagtatgccctgatatttcggacctcacttcaattccnaatattctttatcactagcagggnggggggcgaggggggcgcgacgatgctccaaagcccctgtttaggtggacgtnccatgaaaactgaacttagaagaccatnnaaactcccnnnaccccnaaaatntgattgaacttgtagcttacagcttgnctcctgcggcttgctgcagctgcnatccggcttgcgctgcg

SEQ ID NO: 154164 - DNA, 2493 bp, Zea mays
  Clone ID: MRT4577_72177C.1
ttaagaagaacgagggaaaagatggggaaaatctatacaaagctcttcttctttttcccaagttgcttcatcttcaccgtggtgactccattgtactttacacatatttatcaccttatttcttgtaactcgagtcaatgtatccaaaatcttgatagggtactccgtgtaagtcaaatcaccctgaacactgagctcttccatgggtaactgttcctcgggaacacggagacacttcttcagttgagatacgtggaacacattatgcacatccgataaagtagcaggtaactcgagttggtatgccatctccccaactcgcctaaagatcaggaatggtgcaatatagcatggggacaatttgcccttgactttaaatctcctcattccacgcagtggtgacaccttgaggtacacatagtctccttcctcaaattccagtggtcttcttctattatcagcatagctcttttgcctggtttgagccactctcaaattctctcgaattatacgaacttgttcttctgcttcttgaatcaattcaggcccaaagaattgtctctctccagtctgatcccaatatagaggagtcctgcacttcctcccatataaagctcgatctgacacgatcttctttggtactccatgtaaacacacaatccgagccatatataactctgctagctgagaacctttataagtggtcttgacaggaatgaagtgagccactttagtcaatctatccacaatcacccatataacatcatatcctttctgggtgcgaggcaatccagtaatgaaatccataccaatctcttcccacttccactcgggtatcttcagtgggtgcaatagtccagctggcctctggtgtttagccttaactctttgacatacatcgcacatagccacatgtgcagccacatctctttttaatccataccaccaatattttcgcttcaaatcctgatacatcttggtactgccaggatgaatagaataatccgagtcatgggcctccttcaatatagtctctcgaaggctttcaatatcaggaacacacatcctgtccttgaaccatacagtgccttgctcatcttccgtgaattccggacctcgaccctcagtaatcagatccttaatctcttgtattttagcatcaccattttgtcctttgcggatttcttgctccaaagtaggttccacatcaataataactccttcagtgtgagcaactatccccaggttaagtctcctgaaatcttcaacaatctcatcgggtagctgggcaacaatagctgaatgaacatgctcctttcgactcaaggcatctgcaaccaaattcgccctgcccgggtgatagtgaatctccaagtcgtagtccttaataagctccaaccaacggcgttgcctaaggttgagatccttttgagtgaatatatacttcaaactcttatgatccgtgtatacttggcacttggtccccatgatatagtgtctccaaatcttaagcgcatgcacaacggctgccaattccaagtcatgcgtggggtagttcaattcatgtttccacaactgacgagacgcgtaggcgatcacatgtctttcttgcatgagcgtccatcctaagccttggccacatgcatcacaataaatattgaatcccttctgtagatctggcataaccaacactggtggtgacattaacctcttctttaattgttcaaagctatcttggcatttctcgttccacttaaattctcttcctttctccagaagcgaagtcataggcttagcaatcttagaaaatccttcaataaatctccgataatatcctgctaatcccaagaaactccgaatctcagtcactgtagtgggtactctccactccattatctccttaactttagcacgatccactgatatccacgacgaatctgtccagattatgaacaccttattcttcagatccataaaataggctggtgcattggttagtccaaatgacataacagtgaactcatataaaccatatcgggtcaagaaatccgtcttgggaatatccgatggtctaatcctcatctgatggtaacccgatcggagatcaatcttcgagaatacctttgcacctctcatctgatcgaataaatcctcaatacagggtaatgggtacttgttcttcaccgtgacatcattaagtgatctatagtccacgcacatttgttgcgatccatccttgttctgtacgaataacaccggtgctccccaaggtgaggaactcggacgaatgtaccctgcctcttgtaactctgttagctgcttcttaagttcctttaactcttctacaggcattctgtatggtcgtttagaaataggggcagttccaagtaaaagatcaatgacgaactcaacttctatatctggtggcattcctagtaactcctcaaggatcaagtctatcctgctctcttctaacagtatagggtagcccat

SEQ ID NO: 154165 - DNA, 1680 bp, Zea mays
  Clone ID: MRT4577_72178C.1
ttaatcttgtccgtggtgactccattgcactttacacatctttatcaccttattccttgtaactcgagtcaatgtgtcaagaatcttgatcgggtactccgtgtaagtcaaatcaccctgaacacttagctcttccattggtaactgttcctcggggacacggagacacttcttaagttgagacacgtggaacacattatgcacatctgataggctagcaggtagctcgagttggtatgccatctccctaactcgcctaaagatcaagaatggtccaatatagcgaggggacaatttgcccttaactttgaatctcctcattccacgaagtggtgacaccttgaggtacacataatctccttcctcaaatttcagtggtctcctattatcagcatagctcttttgtctggtttgagctaccctcaaattctctcgaattatacggacttgctcttctgcttcaatctcttcccacttccactcgggtatcttcagtggatgcaatagtccagctggcctctggtgttcagccttcactttccttttcaaatcctgatacatcttggtactaccaggatgaatagaataatccgagtcatgggcctcctttagaatagtctcacgaaggctttcaatatcaggaacacatatcctgtccttgaaccacacagtgccttgctcatcttccgtgaattccggacctcgaccttcagtaatcagacccttaatctcttgtatcttagcatcaccaatttgtcctttgcggatttcttgctccaaagtaggctccacatcaatagtaactccttcagtgtgagcaactatccccaggttaagtctcctgaaatcctcaacaatctcctcaggtagctgggcaacaatagttgaatgaacatcctccttgcgctcaaggcatttctcgtcccacttaaattctctgtccttctccagaagcgaggccataggcttagcaatcttagaaaatccttcaataaatctccgataatatcctgctagtcccaagaaactccgaatctcagtaactgtagtgggtactctccactccattatctccttaaccttagcaggatccactgatattcctccattagaaataatatgaccaagaaatggcacctcgccaatccaaaactcgcacctgctaaacttggcatatagttggttatcccgtagcttctgtagcaccaatctcagatgttcctcgtgatcactatcactcatgacgaatctgtccaaatactccataaacaccttgttcatcaaattcataaaataagctggtgccttagttagtccaaatgacataacagtgaactcatataatccatatcgggtcgagaatgttgtcttggggatatccgatggtctaatcctcatcctagcaactctcatctgatcaaataaatcctcaatacggggtaacagatacttgttcttcacagtaacatcattaagtgatctataatctacgcacatcccttgcgatccatctttcttctgtacaaatagaactggtgctccacaaggtgaagaactcgaacgaatgtacccagcctcttgtaattccgttaactgcttcttcagtccctttaactcttctacagatatccaaggatcacgtctatagtgctctcttctaacactataggggtagcccat

SEQ ID NO: 154166 - DNA, 281 bp, Zea mays
  Clone ID: MRT4577_72179C.1
cttggggggtggtgggaggggttgaagatcacacatctgactcctggcacagtctagatgcttgacattactggtgccaagatacacaggggactgttgcttttatttacagctgccctacggatcagaacatgaccctgactcttagtgagtctgtgggggggcgcgttcccgctgagaggacaaccccctagtcaatgttgaggacgatctagactcacacctggactcacgttagcctcatgatcaccacacctgtgacctaatcacgaactttactg

SEQ ID NO: 154167 - DNA, 729 bp, Zea mays
  Clone ID: MRT4577_7217C.1
gaggaagcaaaggcacatgaccgtcgtcttcgggtgggacgacgagtccgtcctcctcgatgcgatggtcgttgaggccacgcccgtctgtgagtcccgtcgcaagaggcgagcctccacctgctccaacaatgacggcgccggatccaacaccaaatacggtgatacggttgacaggtgcgtttgttagctgttgtggcatgctgggctgattttaggccaccgcctggtttcaactttcaagtcatggaatcggtgctcagggctcctctcttccaccctgcgaaggtgacttatagcaatggtgcaaacagatgggggacaccacatcatgcccatccgtgagatcttggcctcaacgtcgattgagaagatgacgttgcaaatatttcagacttgtcaagataagaagagacgaaggaagaacaatcaaatgagaaaccttttcagtcagtatagaatgacatcttttttctttcagttcagaccaccaaggatccaccttcctccaatggtgtggtgcaaaaacaacaacatggtctacacagcagtgcctctaacgcaaggaaggacaaaggcagacgccacagagtatcattgaggaaatcatgtctctgttattaaatggtttgcctgcacatctgctttgagctgatcaccacgccttgtggacacaggtaatttataactgtgtctttccaaaaaaggatggttgcatgaattctatgc

SEQ ID NO: 154168 - DNA, 239 bp, Zea mays
  Clone ID: MRT4577_72180C.1
cggcacgaggcctccctcctcctcgggccactccaacgtgcaaccccaggcctgccgcggccacagacgggccgcgccgccgacagatcttccgattccgcttccggcgggcgttctgccccgcacgcgcctgtgacgcttgagcggacggatttgttcagaccgttctttggccggcggcgttgcgctgctccttgttggcttgcagctcccatccaggggtcattgagatgccccgg

SEQ ID NO: 154169 - DNA, 300 bp, Zea mays
  unsure (1)..(300): unsure at all n locations
  Clone ID: MRT4577_72181C.1
cccacgcgtccgcccacgcgtccgaccgagcctgcggctgaacacaggcgcacggcatcatccagtgcctacctgagtcgggctgaggacgagatggaacgagctaggaagaaatcaggagcaggctctgaaggagctggcatgcggctcgcgagaccgcttaaacccagncgacttatagcgagcgcctgcgggacgccgcacaccgagacgggggccctgcacatagggtgtgacgactaccaaaccgaccaaaggaacgagagaaagatagctacagctaggcaacgcattcaaagg

SEQ ID NO: 154170 - DNA, 1184 bp, Zea mays
  Clone ID: MRT4577_72182C.1
ctggtatttctggaaaatggcattcctgaagaggggctaggggagcatgtaggcgggtcagctgtgcgagctacatgcttcataccagagacctacacagtaacatataattcatgtaactacagttcgaacggtatttctgatggcattgctgttgaaaaagacgagactttcttactcatatctgttggatcaaagcaagtcctcactacttggattttgcaaccgaggaatgcagaaaacagacaagtatattcaagtggcttagatattgactccaagcaaaactccagaaacttggaaaacgttgattcagccatgtcatttcaatggctaactacccacatgccaccaaagcttcctaggaacagactgaaatctggccacataaaacagagggttgaggaaggaaattcttctgttgttcagccaaatatggacgttatggatcacatggaaaatgactggcgttacctttctgttacagcatttcatttgaagcatccggttctcaggttgactgtatgttttgttgctgttgcttgctcggatgcaacagttgtgctccgtgctcttctgttaccttctcgattgtggtttgacgttgccttcttggttccacatgcatcaccagttttggtgctgcggcatattatcatcaatgctagccactataaagatgatgctggagacagataccttattgcgagtggatcaacagatggtagcatcactttttggaacctgacagagaccattcatggcttcatgcaactaatatcagagactcaaccacatatgagtattggttatcaaaagcgtcccaggacaggaagagggagtcaaggtggtcgtctccggtggagatcactgtcatacgcttcgaagaagagagatggagatatgtcatcctctgacggaagcaacccgggtaccctaaacactgctgaaaattcatctgaagcttctggtgtggaaaacactcatattgtagtgcatgaagcaagtgacagctcaaaaactgagatgccttcaagtacccagtcatgtgatatacctgaattgagaccaatgcactcgttatctgagtgttcaccagtcagggcgttaattgcctccacatatcattctcaacacctgacaagtcatactgcattataaagtggtgggagatgatcaatctg

SEQ ID NO: 154171 - DNA, 521 bp, Zea mays
  Clone ID: MRT4577_72183C.1
gggaaaaatcaaaattttggtatgaatcaaataacaaagttttaatgcactaaataacctacaaaatatattaaggaagtttggccatttgaattttccaaaatccccaaatcagcccatgaactaaggccctatgggaaaattcagaaatcagaattctgaatttcagaaccctttcccaagttcagatgtgttccctgttttccaaaactcgaatccataaagtccaaatatcaaagtggcgccaaatttccttgaacatgatttggtgaagtttgaactcaaacaaaaaccgtttgacacgattttggtgtagtttgtcctcgggactcggctggctgacactggcaccctggcaatgttacaactccctgtccctagataaaatcgcgcaacatccacacacaaacgacaaagcacaatcaggggaacaaatccttcacggcgatcttgcccaaattctcgaagatttgtgcccaatcggcgttagaacacgggcagaagcaacaactccacgtgtt

SEQ ID NO: 154172 - DNA, 293 bp, Zea mays
  Clone ID: MRT4577_72184C.1
gggggggaaaaaactaaaaacgtttttttctttaatttagaggctcctcccaaaaataaggctttaaacccaaaccggtttcaacaaagttaaaaattcttttggaccggccacacctccccctaaaaaattttttgttcccgccaaatatgaaagggtctcaacaaagccaatttttttaggcttccacatggacccccacgaggacgcactcgccccccccaatatattattttttttgggaaaagatcttcgagcctatggtctacaggggggtcttttttccaaacttt

SEQ ID NO: 154173 - DNA, 279 bp, Zea mays
  Clone ID: MRT4577_72185C.1
gcctatcaaatatttcattaggcccttattatataacttgtgaagccattcattaactcttgtcttataaacaacagcgaatgcttactcttgctctatatcgggatgggaaagatggtgaacggggatgacgccattattggtggctcccgcatcactggcgtaatcagggcacctggtgcaaatacatatcacggtaccaatggcgtccatgtgttaatcatagcttgggatccaacccaatctagcatatctagcataggccggcttaaagacttg

SEQ ID NO: 154174 - DNA, 732 bp, Zea mays
  unsure (1)..(732): unsure at all n locations
  Clone ID: MRT4577_72186C.1
naggcnncggccggnaaanaaanttaaaaaaaaaaaaaaaaaaaaaaaaaaaaaaaaaaaaaaaaaaaaaaaaaaaaaaaaaaaaaaaaaaaaaaaaaaaccgcctttccacgtttctcttgtttaggccgggttcaaaagagttgggctccaaatcctgggggggtttggagttggaaaatcgccttcgtcgttcgacccaaaaagattcgagggagagccacaacccatcgcactctcaaatcgccaaagggacaatggacatcgcagcgtcagtttctggagcggaaggaagcaagttctgaaagggggcagcctgcaatttctccgacgccagaaactcctcaaaggaccccagggaaaggccggcgtcaatgaggaagttgatagtcgcgggggccctctgcgtcgaattcatggggggggaggggggggggggcatcaagggaaacagcctggccatcctgaccgacggggggcacctcctgtcggacgggggggggttcgccatctcgttgttctcgctctgggccgccggggggaaggcaaccccgcggaagtcgaacgggttcttccggggggaaatcctcggggccctcgtctccatccagttcatttggttgctcgccggaatactggtgtacaaggccgtcgtgaggttcgtcggcaagagcggcaacgtgcgggggtcgctcatgttccccgtgtcggcgttcgggttggccgtcaacg

SEQ ID NO: 154175 - DNA, 156 bp, Zea mays
  Clone ID: MRT4577_72187C.1
agccaaagattcaccggtgcaccagaggcgatcgaggattcgagacaacccaactccgtcgccgagctacatcgatccatcgatggccacggccacggtagccggcttgcgatccgcgactacgaacccgccgccgcctaagtagctcgatcgatg

SEQ ID NO: 154176 - DNA, 329 bp, Zea mays
  Clone ID: MRT4577_72188C.1
ccttaaggacgggaccagcaccatgactaactagcaaccaaaaggctaaccggagctgactaacaggacaccggaagagaaaaacgcagcggaaaaggggcaaccgaaccgcacagaaccggaggggagcccaaaaaaacgggaggagcgggacaaggggccaaacatgcaacaagaaacaaaaagaaacagggcctaagaacggcggcgccaacaagccaaaccaagggcacatgccttagcagaaacgctggctgcaaagggggcagagaacatcctgaggggcgagaaaggaggataaagcaaccgcgccccaaaaaggggggccg

SEQ ID NO: 154177 - DNA, 326 bp, Zea mays
  Clone ID: MRT4577_72189C.1
ttgttttgtggacctttcacgatagatggggacaataggagtacactagtaaaatgaatttacccatgtgttataaggaatcgatagacttaatgcaacaactctagtaagcgagaaagctacgcccataactcgggcgggatgaattatatggagcgcggtgcgagagctctaactgccgctacacgctcttatagtggcgatggcatggttgtccttcaaagggccatagagcctacgactgcaccaaaagagaagccacatataaactccaggtcgcgcaccaccgtagctatcagtgatagaatgctgcatcctctgagcga

SEQ ID NO: 154178 - DNA, 572 bp, Zea mays
  unsure (1)..(572): unsure at all n locations
  Clone ID: MRT4577_7218C.1
gccggccgggccggngaaatcacgaatcctaacgacccagccacgaaaaaaccccttcttcctcttctcttctaacacctccttttttctttatacctactaccgaacatgggcctcttcagtcgtcactctggtgatcaccactcccagcacaatacccaagctcaaccatacgccatgccccctcaagcctacccgtaccaaggccctggcgcacctcccccttctcaggctcaatactacgccccgggccctcagtcgtacggatatgcgtacccgtccgcggaggaggcgcaacgcgcggagagcaaggcgcgcaagcagaagaggttctggaggatcttcactttctctcagatcttctcgttgctcggataattgagctacgcacattctacctatatgtgtatgtgacaatggattgttggatggaggtatacaagtgtggtgtaccgagtcctatccttgatgtattcgtgtacatatgaatcatcattggatgtttactggttgtataaggattatctataccagcaaatactcaccaaaaaaaaaaaaaaaaaaggccccta

SEQ ID NO: 154179 - DNA, 473 bp, Zea mays
  Clone ID: MRT4577_72190C.1
cttggaacctttgggctgatttatgtgcttgtttatgtgcttgtgttcttgatgtcggaactaggtgacgggagatgtggatgttcatgtgaagtgggcgtcatctattgtagtcggtgatattgctctgtgggggactgttctcatttctattaagtatggtcgtagaccggctccgccgggtgatgagggtgtgtcggttgtgatggatgaggaggtgtggtgtcgtggggcagggggtggacgtgctgaaccggctgggtcggatcctaaggtgcgtgtcgaggtcgtcgttgatatggttgcggactgggttcggtgtcgtcctcttggatcggacgttcctgctaatcgtcatcttcatgagggcatgaaggacctgtacatagacatagccttcctccggctgttccgaattcgccgtctaacgtctattcttgagcgaaaactccgaatgatcgggtggacgttcg

SEQ ID NO: 154180 - DNA, 603 bp, Zea mays
  Clone ID: MRT4577_72191C.1
ccgggtcgacccagcgttcgcccagctccgggaaagaaatgttcggcataacaaagaagctgtctgtggtgaaccacacactaacaaataaaaggatcttgctgagtacatatgtgatgggtccgttggctttagaggttttcctattttaaagcacatcacagggacctagagagcagattcattaatgcttggtaagaattcagttagagctttccgctgagaaatagcgtgagcatattttttcttgaaagaaaaccagttaaatcatgtcactgtaaatttttaataaatatacctcagttagaccattgtctgattctgattgtttgaatcattaccttacctacttgatagcaacttcggtttatgcttagttggtgctgcgttactgttgttttgtgttcctttgtaggtcaaaaaagccctaagaattgtgaaggttgaggtaactcacaggggaaacatgcgcagaaaatgtcgcatttctggcctcacctcacaagcaacaagagagctatcgtatgtgtctttcattgctggtatgagctaatagcttaaagaataatgcagtgacatgatttgttggtttctctgtgtctt

SEQ ID NO: 154181 - DNA, 249 bp, Zea mays
  Clone ID: MRT4577_72192C.1
gtacacaatgggcttatatgggaaatatgtttgatcggttgtttacgaccttctacgtggggccggaaagctttcctgggctttgggtcctgaattaatgggctggggcatcgtatagtgtgacgggaagcgttgatgggacggatgaggattcatgtaataattgttctcaaaagactgatgcgcggactgtgcggatactgacccggaccgcccggggttatatgcggaccgaccgtctgtggatgc

SEQ ID NO: 154182 - DNA, 353 bp, Zea mays
  Clone ID: MRT4577_72193C.1
aaaacaaccccttcaaaagaagaccttgggaaaatcaaagcggagatcaacaagctttcaacttaaatccaacaaaccaagaaagctactggcaatggccgacctttccaataaggaccacgcaacggtccgaggcacaatctgcactagccaatgcaccacggaactttaacccaacgggtcagttcctgcagggggacggcgagaagccaccacacctcctgcatgacactacatctaaagtctacgaaagactcattccaccaaacttagactgagctgcgagacaccggcttgttcttggtgatatcgaaggaccgccattgctcatggctcaggtttatccacccctt

SEQ ID NO: 154183 - DNA, 570 bp, Zea mays
  Clone ID: MRT4577_72194C.1
cctggtgagtgaccatggcggaggccgcaggagcgactcctctcctcactggcctcccggacgagatcaccatctcggagatcctcgtccgcctgccccccaaacccctcctccgctgccgcgccgtcagccccgcgtggcgccgcgccacctccacccgcgatttcctcctgtcccaccacgcccgccagtccgccctgcccctcctctacagccacaacgacgtcgccgacggcggccagtccctagacgtcacgctcttcgaccatcgtgcaggagtcgccgccgccgaccagttccagcgcgtcgcgcgactgaagacggctcccttggaaggggggatcgacgggagtttcactcccctcttctacccggtggcttcctgcgacggcctcctcctcctctccatcgactgtgacctctgcatctgcaacccggcaactcgacagtatgctcccctcgagcagctcgatggcttcatgaccgtggggttgtaccctcacccccctaccggtcagtaccgactgttgctgtaccatgaaacagatcaacgtgccatctatgttttct

SEQ ID NO: 154184 - DNA, 1415 bp, Zea mays
  Clone ID: MRT4577_72195C.1
cattgggtacctcgaggccggccgggaccttggtttctctatcccctctcctctgatcggctggtccccgttgcattggccttggcccttgccatgccaacctcatcaacgcctctcaactctagctagccagccacacctcctctgctctggtcctccccgccattagccggtagctgcctaagctgctaaccttgctatcttagctacttctactagtctagtgcgtattttgtgtcctgtacatgcttagttcgtcccccgccccgacctaacgtgcgagtgccggactgctgcggaaggaaggaagggagggaggaggccgggcatcagggacaaggaagactagctcgacattaatttcgttccggtaaggggaatccggaatcgttcggcatggataatcagcgagccacctcaacctcaaagggaatcggctgctagctaggagctagcgaggaggagggttatcggctcctccggcaatcctgaggccggctagctgagggcgaggcagcgtcacgcccgtccgtatgcatggagagccagagggtggtggtggtggtggaggacgcgggcgccgcgcggtcggcgctgcagtgggccgtcggcaacttcatccgcggcagcgactccatcacgctgctccacgtctgcccgccggcgcggtcgcgcaggaagcgccgccgcctccgcctcggcggcttccagctcgcgctcgccttcaaggacctctgcaacgtcatcgccgaggccaaggtggagatcgtggtgacggagggggagctcggggagacggtggtggcgacggtgaaccagctcggcgcctccacgctcgtcgtcggcctccacgacaagagcttcctctacagcagggcgccgagccagtacagccgagtcatcaggagcctgggctgcagggtcctcgccgtccgacagcacgccacggcgcgggacggcttcctgaacgccgagctcacccagatcgagaccgtgaacctgcacataccaccgccaaagatcccgttcccgatgttcacgctcccccttggcgtgatatggagaagatcgaagcggagaaagtgatactcaaactgcggggaagacggaggaacagcagaacaggaacagcacggcaggcatagctgagcctgtcctgatggttagtagatatatacacgtacacgcacgcgtgcgcatcattggaggcgcaagcaaatgtgtggattgacgtaactgtaatgacgacagcggcaggcacagaatgttagagaggaagggtatactccagctccgggaaagtcggccccgtacttgtattattagatgattaatcgacaggttggtttactggaaactagaggagccattgagttttctgaagaaaaagaagaatggagcaaggttagaggact

SEQ ID NO: 154185 - DNA, 729 bp, Zea mays
  Clone ID: MRT4577_72197C.1
cctctcattaaagcgccgctagattcacgggtaattggacaataataagcatgcatgcatctcagatggtacatgctagctggacaaagattacacagcgggatacccttccttgcaaacataacaatagttttagcttactttgctgccgccatgaacttatgctagcgttcaatcaacggtgagcaatcaatcacttcgcacgccatttgctcgccctccttatgcattgaggcggctcaacatccatggcggcagacctgcgatgcggagctgtggttgcgcctgccccggaggaggcagctgctgctgcgccggctagcgaccgccttctgcctctctgaaagttccttctgtagaatcttgctctcctcctgcagtgacctctccttcttctgtagctcaaaaattgactcggccataaggtggctctttcttgatctgatgtgcttcagtgagctctccagctgctgctctagctgttggagctcttttggattcaaagactccagatcctctcccatcaggtgcttgtggcatctttgtatggtctcaattttgcacttcagtttcctgtattcgtgtgaccaatttccctcactttcagattcagctgaaataagagccttttcagcataggaatatcgctcataacgatctagaattttgtccatgcgagagtcagaggcgtactcgtagagcttgccctttgtaggagaagacgatgac

SEQ ID NO: 154186 - DNA, 310 bp, Zea mays
  Clone ID: MRT4577_72199C.1
cccaaactagtccacaaaaaagtttaaacgaataaggcccccttaaacaatttttggaaaaaaaaacgggtcgaattaaagggacccccctttaacatgggacaccccaccatagcgggttcaacagaaaatggtccccaactttccagcaggcaaaatttcctaatcagggttaaaaaacgggtccaaaggacccggaaacatcatgggcctaacattatcatagcaggggggatccatcattgggggggggggccaaggtcaaaaaacagcagctttagaaaaccctattgttagaacaggcgggcca

SEQ ID NO: 154187 - DNA, 247 bp, Zea mays
  Clone ID: MRT4577_7219C.1
cttttctttttttgctatacgccacaggtgccacctatcatacgatgcatagacaggttcaatagactagccgcctcaaaggtggtataatacgaatggtcaacaaatcaaaaattaacctacaccttggtattatcttatcgggggacactattttatgaatgaaaaattgatcccttaaaactaccggtttttaccgtagactggactttatatgcagcactgttcttatttcactagctccctt

SEQ ID NO: 154188 - DNA, 504 bp, Zea mays
  unsure (1)..(504): unsure at all n locations
  Clone ID: MRT4577_721C.1
aattcggcacgagtggggcaccagcccagcagcagaagcgcccctcggccctcgctcccacaacaagctcaagccagccttctctctctctctgctccaatggcgcgcttccagctcgcagccgtggccatggccatgctcttcgccgcggcggcggcgcaggccccgaccgccaccccgacgccggctcccaaggcgtcccccccgccggcgacgccgccgccgacccccgcgccggtgtctccgcccgtgccggccctgatcatgcctcctccggcgcccgcgcgcgctgctaagcacagggaccggcaccagaggtatgaatattatctatctagcttgaggtggtggttgaacaataaaaagcgagggcgagctggactgacatacataggtattgtgtggtgtgtgtgagagagagagaaacagaggtcttcagtttgctatntttttttgtatgtttggggtaagtctttgtgctaatgtacgtacgtgtgtatacct

SEQ ID NO: 154189 - DNA, 502 bp, Zea mays
  Clone ID: MRT4577_72200C.1
ttttttttttttttttttttttttttttttttttttttttttttttttttggggaaaaacaagattttacttttctctttcaacagtgccctttgtccctttcaaaccaaagaaggaaccccgaaaaaactggggcctctcttcttcaaaaactggtttaatcttaccctcgaaaaaaatgctgcagtgtcttttgaattccttcaaaaagggctaaaaaaagggtttccaaatcctccgcccttgtctttacataaaaatctcgatgccttgagccataaaaaaagcctgatttttttcccacaaagggccttttggcccgtttaactttcaaggattttgaaatccggacctcgtcgcaaatattggtcttttgggaaaaaccatgctggctgaacccgggaaaccctttcaaaagacaaattgaaattttttatcttctccctgatgggtttgcgaaaaacaacttccccaaaatcacccaagccctcctccctgaggg

SEQ ID NO: 154190 - DNA, 174 bp, Zea mays
  Clone ID: MRT4577_72201C.1
agcacatgcaaagccgcatacttgacagaggaatgaaagctttcatcatctttttacacgctcttgaagaccgtttcatggtccagtctgacagcaatcactcagacttgctttactaataacttattttcaatctgaataccaatattagcaatctcacgctatctcttcttt

SEQ ID NO: 154191 - DNA, 306 bp, Zea mays
  unsure (1)..(306): unsure at all n locations
  Clone ID: MRT4577_72202C.1
gggaacgaaaacgcttctcattctggaaggatatgacagacagctacaggttgtttctggaagaacaacctatccgcataactcatgttacatactctttttttttgccaaaaaaagattggagccttgagcagnnccccctatcattcagaaaaatgctggtgccccctccttgcttggaaaggacacattttctgattgtgtcagcgcctactctcagattgtcactggatccattgagggtagatcctgtcgcattccttttacagcggaatcgtgtcagaaatgccttccctctattagaat

SEQ ID NO: 154192 - DNA, 319 bp, Zea mays
  Clone ID: MRT4577_72203C.1
aagcagtggtaacaacgcagagtactttttttttttttttttttttttttttttttttgaggattatgtcattttttatgcactaataaataattccttatttttgatgcaggatgccgccaaaatcaaagaagtcagtgaaggggctgttcaagggcctggacctttttcaggggagttcttcaagcattttcagacgtcgagagctgttgagcgctgtacatggagatgaggtaacatatcttgtccagatcaatttgcttacctctttacgagtgatttcttgggttgtgtgtccccggatgtctcggggcctctg

SEQ ID NO: 154193 - DNA, 1055 bp, Zea mays
  Clone ID: MRT4577_72204C.1
caaaataaacactccatgaagctcataaccattatcaggacatcgccacaatagaagggcgaaatttgacatcacattgtcaaaatattatgtccagaccctcaaaactacagatttgtgttcagtggaaccacaaatctcatctacgaaaataagcaggcatcaactaaatctgggttttgctgaaattcctaacgatggccatcaccgaagggccggagtcatgttccatagctgcgatctccagcatccccaaggcctgggattatgaaacctttctcgtttacaatttgatccatggctcctgtatacacacaaatccttgggaatctttgattgagcttcttgagggcaggaggggcagcaacagctgatataatttttatctgactgatttcagctccacgttccataaccagatcaactgctgcagtgactgttccaccagttgctagcataggatccacaatgaggattttacatcctttcgggaatctatcaggtagcttatttaagtaaacagaggccatcagtgttgtctcatcccgggccatacctaaatggaaagttctagttgaaggcaaaattgatgttgcgagatctgcaagtgcaagccctgctctaagaataggtacaatcattattggctccatctcactgacagattcaacaacctcagtgcccacaggtgactggatctgccgtgttactgtcggcaaccaatctcgtgttgcctcatagattagcaatctccctagctcccccattgcactcctgaaggcgtgggaaggggtggagcgatcgcggagtactgagacccagtggccggtcagcgtgggttgcacccggaccaccaccttgaaatcgtccatggatacggcggccgcctgtccgttgttacagttctccatcctcagcacgagattgggacctttgctggaggcctatggggtttaaagagaataaattaatcggtgaaagaaagcggcagggcggcgggatggatgtgcaggatgggagggcggcggggcagcagggatggatcgacagcaacg

SEQ ID NO: 154194 - DNA, 882 bp, Zea mays
  unsure (1)..(882): unsure at all n locations
  Clone ID: MRT4577_72205C.1
atggttagcgagcaacaagctcctgcggcggaggtggtggtggagggcagcgaggcggcggcggaggtgcccgtggagagcgaggaggcggccgcgcccaaggcggaggagcagcaggatgacgaggcgccggtcgtcgaggacgtcaaggaagacgaggacgaggatgaggatgacgacgacgacgacgctgacgatgatgacgccgatggaggcgccggcgcaaccgagggcaccaagcagagccggagcgagaagaagagccgcaaggccatgatgaagctcggaatgaaacccgtcaccggcgtcaccaggataaccatcaaaagagccaagaacatactgttcgtggtgtcgaagccggacgtcttcaagagcccgacgtcggagacgtacgtgatattcggcgaggccaagatagaggacctgagctcccagctgcaggcgcaggccgcgcagcagttcaggatgcaggacctcagcaaggtgatggccaagcaggacgcggccgccgcggcggcggcgccggccgacgaggaggaggaggtcgacgaggccgggatagagccccgcgacatcgacctcgtcatgacgcaggccagcgtcacccgcgccaaggccgtcaaggctctcaaggcgcacgacggcgacatcgtcagcgccatcatggagctcacggcctgatcatgatataccagtgcaatgccgtacggccgtttcttcctcgttattgcagtctgcttcgtccagcgtcgctgttcattttttggatttgcataanagacgagctttgaataagagatgtactgtttgttaccatatgaacgttgttgcaatcatgtcggnttccgaaaaaaaaaaaaaaaaaggccctaaggccgc

SEQ ID NO: 154195 - DNA, 213 bp, Zea mays
  Clone ID: MRT4577_72206C.1
gagctcacttttcgtttgccgccctttttttttttttttgggggagacttaaattacatggcggttccacaaaatccagcaccaacacaagaaccacaagccgaggagtgtacctttttttcaaactcccccatccagctgccctataaccacgagatgaccccccattgcgcatcagattttattcgcctgctgggaaactcaaacccacac

SEQ ID NO: 154196 - DNA, 524 bp, Zea mays
  Clone ID: MRT4577_72207C.1
cccgggtccaacccactcgcatcgtattcacttcaaccgcacagctgactgctgataccaactgcagcgccaccaggcatggtggtccacggcgtatgggtttctgctctaagcccatcaaacaggcgacgtagaccatgctacattgaccggactccatgttccaccttcaataatattgctaggggtccatagcgctggaaagtactatgagcgttgaggctccggggccacaatcaacctgatgctcacatttgctctattctaagttttagggtttgaaattaattgggaaccactcagggaaaacgatgataccagtaatggctcaagccccatgctaattgttgtacgtacctattaggaatttgccgaatacctgtgtggtaggcacatatggagcattagcttgattctattcatgaatgaaattatggaatccaagactgtatgcactgatagagatagtgcaacaaacgaccggatccacatatgaaaaatctcagaaagtattcctttactga

SEQ ID NO: 154197 - DNA, 694 bp, Zea mays
  Clone ID: MRT4577_72208C.1
gtcggtttgcttatggttcattcctcgtttttcgttttgatgtcaccatattagtgtgaagattgccaccggacttttactataaggttgttgatccttcattggagatgctgctggctggatctgcaggggcaacaaaattttggaagtagattgaggcgttgactggactaatgttcatagtatcgggagaagatcgttcggatatatatatttacctaaatcactcatctgttagttcatactcaatttttgtccgctgcaattcttaattgtttaaattggggctggtggttttctccagcaactcgattgaatggatggatgggtcggaggcgagtttgatcctgcttctccttgtgcaatcaggagttcggaactgtttagagttccttgcgtgggcagaagagttttggaactagattgaggcgttaactggactgatgttcatagtatcgggagaagatcgttcggatatatctacctaaatcgctcttctactattggttcatatttaatttctgtccgctgcaatttttagttaattatattggggctggtggttttctccatcaacaagattattatatggatggatggatggtgttcaagcgccttgcctgtcctgtcttgccctttgtcccttcgtcgcctcgggcctcggcgtgctcgcattttccattacttcgtttcg

SEQ ID NO: 154198 - DNA, 720 bp, Zea mays
  unsure (1)..(720): unsure at all n locations
  Clone ID: MRT4577_72209C.1
tgaaagtactcaaccacccgcagctcctccctcactccaaaggcccacggcctacggtctactctcaccaacccaccagcatggccgagcgtctcgccgcagccgccaccctccgcgccgacgctccgtccggcccctcgccggccggccgccgcgccaggccatccagctctgccttcttcccctcctcgtcctccccggctctccgcctcgtcagcctccgcgccgcgtcctctcggccctcccagaaggccaagtcggcggggagggggcgatcggtgaggtgcatggcggcggcgtcggacgcggcacagctgaaggccgcgcgcgaggacatcagggagctgctcaacacaacccactgccaccccatcctggttcgtttgggttggcatgattctggcacatatgacaaaaatattaaggactggccagaacgaggtggagctaatggaagtttaagatttgatgttgaactaaagcatggagccaatgccggtttggtaaatgctctaaagcttgtgcaaccgatcaaggacaaataccccagtataacttatgcggatttattccagttggcaagtgctacagcaattgaggaagctggtggcccaaagattccaatgaaatatggacgggntgatgtcacaggacctgagcagtgtccacctgaaggggagcttcctgatgctgggccgagtgctcctgctgacacttgag

SEQ ID NO: 154199 - DNA, 1039 bp, Zea mays
  Clone ID: MRT4577_7220C.1
tttttttttttttttacgaagcagaggagcagtaagcaagcactcgtgaaattggctagcttgatgtagtacaatgaaatgtgcagaaaagcttgcttataagaggcaaaaggagaaagagaatgaaaatgagctccctggtgaaaaggaaattgatttgaaagacagcgacaagagaaagagaaaacatgaggaaagtgaccacagctcagaggacgagaaatatagaagaaagaaaaaaggatttaaggatgccaaaaattctggtagccagagacctgcagatcggtgtggagcatcttcaaagagttcagggaacagtgacgaagccttcgaggagtacctggaaggcatgttcccgtgatcggattcgtagttcttattaaaagaaaaaggtgactgaaggcttcttgatcagcccatgaaaaaaatgatgcacgggtcttggaacaacaccattagcgggtgttggagtagcaagtcagttccagttcgaacctcaacgagtcaacgctctgctgactctacaacgtcatgtaaagtgcgacctgtaattatgcgtgcctgggttgtttcggtgggttttttttctcccattgctttcagagacatggttgacgcctgttagtcaaagaagattgtaatatactaactactactcccttgcccgcactatactgtatgacatttccagcagcgttgctttttcgtcgttcttattaaaagaaaaaggtgactgaaggcttcttgatgcccatgaaaaaatgatgcacgggtcttggaacaacaccattaacgagtgttggagtagcaagtcagttccagttcgaacctcaacgctctgctgactttacaacgtcatgtaagtgcgacctgtaattatgcgtgcctgggttgtttcgtgttttttttttctctcccattgctttcagagatatggttaacgcctgttagtcaaagaagattgtaatatactaaccactactcccttgccctgcactacactgtatgacatttccagcagcgttgctttttcgtc

SEQ ID NO: 154200 - DNA, 834 bp, Zea mays
  Clone ID: MRT4577_72210C.1
gcgtttgtcactaaccatcctctctcctgtcttgctaattcggcacgagggataagcttgattacccttcattggaaattctgcttgctggatctgcagtggcgaaggagttttggaagtagatggaggcgttaactggactgatgttcatagatggatccgctttttcgggagattactttctatactctccatttcgattttgagtcgggtcggtatcttcccttgttgattagttccgctgctttgcgcctccgtgctcgcagataccttgggctgtttcgcctctgcgcgacgacgtgaggcgggagcgtgacgagtttggtttggctgggctgttcggtttgcggtttagtcttcctgcgattctagttttcgtgtggatcctgtttcgtcctcgacttctcagtgtgtggattgcaggtttgggtacgatccggtattgggaattcgtcgtggcgtcgggtggcgaggagttgggaggcaggtcagtcttctgtcagatccggcggttcattggttttgtcacttggatatggattcggtggtttcaggctcaaatgtctccgggtgtggtaccatcagaatcagatagtgtcgtcggagcctgcacatcagaagcagaaggaagggtccttgctggttatggagagattagttgaatgttggaggggcaacagagctttggaagtagattgaggcgttggctggactgatgcccatagtaccgggtgaagattgtcaggatatatctacccaaatcgctgttctattggttcatactcattttttgtccgctgcagttattaatttcttatattggggctggttgtc

SEQ ID NO: 154201 - DNA, 1080 bp, Zea mays
  Clone ID: MRT4577_72211C.1
gccggccgggtccgagcgctctggttttcctctcttcgtttcggtgtccatctccaagcgcctcgcctctcctgtccttgtcttgcccttcgtcgcctcggcgcggccgccatccgtcgctcgggcgggggcctcggcgcgctcgtgttttacgtcacttccttctctatactctacgtttcgatttcgaggcgggtcggcttcttcttcaccggttgatttgttccgctgctttgcgcctccgtgctctcgcagatcccttgggaccgtctcgcctccgcgcgacgccggcagcgagctgagtttggtttcgccgggttgctcggtttgcggtttattcttcctgcgattttagtttttgcgtcgatcctgtttcgtcctcgccttctcagcgtgtgggttgcaggattttgggtccgatccggtcttaggcgttcgtcatggcgtcgtgtggcgaggagatggaggcaggtcagtcttctgtcagatccggtggttcattggttttgtaaattggacatggattcggtggtttcaggctcagaaggaaggttccttgctggttatcgagagattagttgaagggtgtaggtttgcttatggttcattcctcgtttttcgttttgatgtcaccatattgtgtgaagattgccactggattgccaccggacttttcttgttgatccttcattggagatgctgctctgatctgcaggggcaacaatgaatgagactgactgattatggttcattcctcgtttttcattttgatgacatcatattggtgtgaagatcgccactggacttgctataagcttgtttacccttcattggaaatgctgttggctggatctgcaggggcaacagagctttggaagtagattgaggtgttggctggaccgttgtccatcttatcgggataagatcgttcacatatatctacacaaatcgctcttctattggttcatactcattttttgtccgctgcagttattaatttcttatattggggctggttgtccatcttattgggataagatcgttcaaatatatctacccaaatcgctcttctattggttc

SEQ ID NO: 154202 - DNA, 2606 bp, Zea mays
  Clone ID: MRT4577_72212C.1
aattcggcacgaggctctggttttccctttgcgccgctgttccagcgcctcgcctctcctatccttgtcttgccctctgtctcccctcgtcgccttggtgcgctcgcccttcgtccctcggccttccgcgcgctcgtgtggcgcggcgttccttctctgcgcaccacgtttcgggattcgttttttcgtgatttcccttcctagatccagcttttcgatttcgaggcgggtcggttttttctccggttgatttgttccgctgtttttcgcctccgtgctcgcagagagctgggaccgttttgcctccgcgcgtcgccgtgttctggtaccttgctgcgtttggttttcccaggtcgcttggatcgcggttacctcttcccgcgattgtagtttagccgaggtgcgtttgttggggttgtttggtctgcgtttgggtcgtactgtggggttagattcgtggtgggtcctgtgtgttctcgagttttagcgaggagagtatataggttgcaggattgtgtccgattcggtagtttcaggctcaaatgtcttctggtgtggtaccatcataatcagatagtgtcgtcgtagtttgctcaccagaactaggtagttgcgagaccttgggcccattctcattttaacggctatctcgcttgggcctttcgggtgttcgccctacttcagaagttaacgaagggtccttctggttaggagaaattagggaaaaaaaatggttatcgagagattagttgaagggtgtaggtttgcttatggttcattcctctggttcattcctcgtttttcgttttgatgtcaccatattggtgtgaagattgccaccggacttttactataaggttgttgatccttcattggagatgctgctggctggatctgcaggggcaacaaagttttggaagtagattgaggcgttgactggactgatgttcatagtatcgggagaagatcgttcggatatatatatttacctaaatcgctcatctgttagttcatactcattttttgtccgctgcaattcttaattgcttaaattggggctggtggttttctccagcaactcgattgaatggatggatgggtcggaggcgagtttgatcctgcttctccttgtgcaatcaggagttcggaactgtttagagttccttgcgtttgttcactaaccatcctctctcctgtcttccttcaaaaattggcattataagcttgattacccttcattggaaatgctgcttgctggatctgcaggggcagaagagttttggaactagattgaggcgttaactggactgttgttcatatatcgggagaagatcgttcggacaagatcatttggatggatggatggtgttcaagcgccttgcctgtcctgtcttgcccttgccttgggccttggcgtgctcgcattttccgttacttcgtttcgattttgagccgggtatcttcttcacctgttgatttgttccgctgctttgcgcctccgtgctcccgcagatccctttgggctgtttcacctccgcacgacaccaggagtgagccgagtttggtttggccgggttattcagtttattctttattatgcaattctagtttttgagtctattttgtagtcctcgacttcccaatgtgtgggttgcaggattgggtccgatcagtggagaattcatcatgatgacatgttgcgaggagatggaggcaggtcagtcttctgtcagatccggcggttcattgattttgtcgattggacatggattggtggtttcaggctcaaatgtctccgggtgtggtaccaccagaaccttcgatccattcttactttaacggcagagaagaaagggtccttgctggttacagggagaggtttgcttatggttcattccttgtttttggttttgatgttgtcatattggtgtgaagatcgccaccggacttactataagcttctttacccttcattggaaatgctgctggctggatcttcaggggcaaccgagttttggaagtagattgaggcattgattggaccggtatattgggagaagatcgtcgcgatatacatacctaaatcacttttgtattggttcatcttcagtttttgtccgctgcaattcttaatttcttatattggggctggtggttttttccagcaatattatatggatgaatggatgggttggaggcgagtttgatcgatctggcttacgcttgtgcaatcagaagttcggaaatgttcagagttccttgtgtttgttcactaaccaccccctctcctgtcatttttctttgaaaattggcattataatcttgattacccttcattggaaatgctgcttaccggatctgtaagggcaagaagtagatttgaggcgttgactggactgatgcccatagtaccgggtgaagattgtcaggatatatctacctaaatcgctcttctattggtttatacacatttctgtccgctgcaattcttaaatgttttaaattggggctggttgttttctccagcatctcctgcaatcagaagttctgaactgttcagagttccttgtttgttcactaaccatcctttgtcaatcttctttgaa

SEQ ID NO: 154203 - DNA, 588 bp, Zea mays
  Clone ID: MRT4577_72213C.1
tttggaggatggctttgatgagggaatctccaaactatacagagctgggacaggactactacaaggacagaactctgatcatgcttttcctgcgtgacaactggaccctatggacttccaacaccaactacgatctccagacatcgagatcaaagaaccacctgctgcccccacagaatccggcccctagggacagtaagacgcatcctatctccccagctgatgaatgcctgctgatggctgctagattaccacgactgtgacgcccttgatttctgatagcttatcgtctagtacacctcgcggtgctctcttcgtcacgtggacggtgagagtgtgctgaagatgactgccattgtcattgccggtgtgttttaattacagcatacattctacgatgtcatcgtccgcatgctatgtgtacaactctcacaggtagatagaatcgatggctggatgcgtagcttatcatgctccacgcctgctgcttctttcatcgaacaaacatacctgcccttgttgcaccgatgttgtttacaatgacctatatttgactggaagaactcaacgaacgaaagctcctatgcg

SEQ ID NO: 154204 - DNA, 415 bp, Zea mays
  unsure (1)..(415): unsure at all n locations
  Clone ID: MRT4577_72214C.1
gcaaggggtccgggactggacgggcaccggttataaataaccacacacgcttaagggctgaagcggaccaagcagtggcagtgattagccactatactactcgtaggtactaccagcgggttgcttgaacagtggaagagagcgagccgaggatggcgtagcgggactcgttgttggnggtcctgctgctgctggttgaggtggacgtgctggcgctggcgcgcgcggacctgacgcacgacaactgcgtgaagaacaagaaggtgactgagcataacctgtgcagcgacgacgtgacgctgatgctggagccgctggccaacagtgcgccgatgttcgtgggcacctacacgttgtacccgtgcagtcacgccgagttacccgtgtgctggtggacggagagcctgcgcgcgcc

SEQ ID NO: 154205 - DNA, 1665 bp, Zea mays
  Clone ID: MRT4577_72215C.1
tggcgtcgggtggcgaggagttgggaggcaggtcagtcttctgtcagatccggcggttcattggttttgtcacttggatatggattcggtggtttcaggctcaaatgtctccgggtgtggtaccatcagaatcagatagtgtcgtcggagcctgcacatcaggtggattcgagatcttgggtccattcttattttaatggctgatcttgcttgtggccttttgggtgttcttactttagaagcagaaggaagggtccttgctggttatggagagattagttgaatgttggaggtttgcttatggttcatggccatggttcattcctcgtttttcattttgatgacatcatattggtgtgaagatcgccactggacttgctataagcttgtttacccttcattggaaatgctgttggctggatctgcaggggcaacagagctttggaagtagattgaggcgttggctggactgatgcccatagtaccgggtgaagattgtcaggatatatctacccaaatcgctgttctattggttcatactcattttttgtccgctgcagttattaatttcttatattggggctggttgtccatcttattgggataagatcgttcaaatatatctacccaaatcgctcttctattggttcatactcatattttgtctgctgcaactattaatttcttatattggggctggtggctttttccagcagttcagttatatggatggatggatgaatgggttgtaggcgagtttggtcctgcttatgcttgtgcaatcaggagttcggaattgttcaagttccttgtgtttgttcacttacccatcctccctcatgctgttttccgaaaattggcattgtagctagattacacttcattggagatgctgcatgttggatctgcagggacaacagagttttggaagtagattggtgtgttgactggactggcattcatatatcgagagaagattgttcggacacgatcatgtggatggatggatggtgttcaagtgccttgcctctcctgtcttgcccttgccttgggccttggcgtgctcgcattttccgttacttccttttttatactctgtttcgattttgagccgggacattatcttcttcacctgttgatttgttctgttgctttgcgcctccgtgctctcgcagatccctttgggctgtttcacctccgcacgacaccaggagtgagccgagtttggtttggccgggttattcagtttattctttattatgcaattctagtttttgagtctattttgtagtcctcgacttcccaatgtgtgggttgcaggattgggtccgatcagtggagaattcatcatgatgacatgttgcgaggagatggaggcaggtcagtcttctgtcagatccggcggttcattgattttgtcgattggacatggattggtggtttcaggctcaaatgtctccgggtgtggtaccaccagaaccttcgatccattcttactttaacggcagagaagaaagggtccttgctggttacagggagaggtttgcttatggttcattccttgtttttggttttgatggtgtcatattggtgtgaagatcgccaccggacttactataagctttctttacccttcattggaaatgctgcctggctggatcttca

SEQ ID NO: 154206 - DNA, 273 bp, Zea mays
  Clone ID: MRT4577_72216C.1
cacacgcgtacgcactcctattctctcatcactaagctcaaactgattaccctcagtgccattactggctcaagctcaaacccttctttaacaataccaacttctatgtctcatacgttgacctagcttaattctaaatatattatacttaccccatctacatacaagaattctcaacaccacgacaagccagtattagacctcatatcatcctataacttcctcatatacaatgaactttactggcttcccatctgatacactaaacatgaa

SEQ ID NO: 154207 - DNA, 228 bp, Zea mays
  Clone ID: MRT4577_72217C.1
cgttcgttttacttaactttcccggtttttttctcatccccagccacacccatgcagggggcatctttctcattcaatcccttgccaacttaatgtaaccttcaatttaggcagtacccttatacaaatccagggcgttttgtttctgaggcatcagtgcatcccgactgcgacgccctactgctcgcctcagtgccagtctttgcggcagcagtattgtcagcatct

SEQ ID NO: 154208 - DNA, 442 bp, Zea mays
  Clone ID: MRT4577_72218C.1
gcgcccccacgggggaagagctggacggcggcggcaaggccggcgtggcgctcggcgccgtggccgccgccggcgtcctcggcctcggcgccttcgtctggcggaagcgccgcgccaacatccgccgcgccaggtacgccgactacgccgcgcgcggggagctcgtctgatccgcttggctggcgtcccccctccctccccacgctagctccacggatcggatcggatcaggagatgcttccactgcaccgctaggaaggagagtagctaggccgagcctctgctcatattacatcgcttcattctttcgtgaccacgacaaggaataacaacaatccacgcgtacgtatattcgtattcattcatacggagatggagatgggccatttttgtaaacatcgtgtacactataattaattatgtatttggagagtgctctatt

SEQ ID NO: 154209 - DNA, 120 bp, Zea mays
  unsure (1)..(120): unsure at all n locations
  Clone ID: MRT4577_72219C.1
cacttcactattctaatctatgtattcagttcgacgctctagttctagcgcttgagccgactagttcctttgtcgacacggtggatctaattccgcaccggtattatcccccccctcann

SEQ ID NO: 154210 - DNA, 1703 bp, Zea mays
  Clone ID: MRT4577_7221C.1
atggattctacttgggagaaaaggctggtcaaacgttactatgacaagctgtttaaggagtattgcattgctgatatgacccagtataaaaaaggcaaggtgtgtcactgtcattgagagctattccttgatgtgaatgcttagtttctccttcactcttgaatgacatgtaatagaaagactgtccgtactagcatgacatagatggtcctttttgtacggccaagattgcagtaatgatatcatgccaattgtgatactgttttaaccttgatttcacatttcataaacttaatacatgggtggtaataacaagatgattattctttttggttgtggatttgtgtcagtgtgcatagtgcaatatgcttgcttgtcacacccattttaatgtctaagatatggcaggcatgcacaaacacttgttatcagaagttaaagcaagtaagatatggatcatatggcagccatgcatactcgtgataggatgatgaatggctgcccattttttttgtttctgaaatgatctgtagttttggatgttgcatgttataagggtattttctgatgcagattggactgagatgggtgcggcggccggagctggtgctcagcgcccttcgcgctgcccaggggtggggcgaggctgacgcgcagggcgggcgacgattgcgatggcgtcgctagggcggctcaaatccgcatcttcgatagggaggagaggaagatgcagtaccaatcgcacatccgcgggctcaatgcctatgatcgccataagaagttcatgaaggattatgttcagttttatggccacgagaaaaatgtggatagtagtttgcccatcaaaactgataaagatacgctgagagaaggatacaggttcattctttccgaggaagatgagatggattctacttgggagaaaaggctggtcaaacgttactatgacaagctgtttaaggagtattgcattgctgatatgacccagtataaaaaaggcaagattggactgagatggagaacagaaaaggaggtgatatctggcaaagggcaattcatctgtggtaataggcattgtgatgaaaaacatggtctaggtagttatgaggtcaatttttcttatgttgaagcagaggagcagaaacaagcactagtgaaattggtagcttgcaaaaggtttgtgaatcaactgttccacaataggatttgtttgaaacagtttttaactattactccttatagtttcttattaggatgtttctttcattgaacttttcgatggaccaatgggtgttgctctttctttcttgtcttctttgtgttcaagcaagcattcaattggttacttagcttgattgtagtacattatgaaagatgtgcagaaaagcttgcttataagaggcaaaaggagaaagagaatgaaaatgagctccctggtgaaaaggaaattgatttgaaagacagcgacaagagaaagagaaaacatgaggaaagtgaccacagctcagaggacgagaaatatagaagaaagaaaaaaggatttaaggatgccaaaaattctggtagccagagacctgcagatcggtgtggagcatcttcaaagagttcagggaacagtgacgaagccttcgaggagtacctggaaggcatgttcccgtgatcggattcgtagttcttattaaaaaaaaaagtgactgaaggct

SEQ ID NO: 154211 - DNA, 298 bp, Zea mays
  unsure (1)..(298): unsure at all n locations
  Clone ID: MRT4577_72220C.1
ctatacaaaaactatgactgcacatcgcaccaaactaagaattcaactcgaggttagcgcgcctctctcaaggcacttccctgggcccggtaacagttattttgactcagangaacaaaactacgcaaagaacccctttcgttcagtgcctaaccctcctcagcgaacttcaacgacttccttggcccccactaataccttcccccacaacttactaacccaaaccgccaccattacccggtcttattgtgggccttaagaaacctccttttaaaacacaactactgtctcaccccct

SEQ ID NO: 154212 - DNA, 340 bp, Zea mays
  Clone ID: MRT4577_72221C.1
gcatgcatggacgagaatcaagaatcaatggatctgcgtgccgcttgcgggcttgttcgggtctaccccaatccatatggattgagggccattgagaagtggaccacgatggaggtccccaaggcggccccggagaccggggaacgagaggatgctagagggtctgcatccaggagcggagtgggggcgggggacccatacgcaccagaagaggcacggaggtggagatcctgaagctgacagcaccaggccctggagcatgagagcgcggaagacaccaacaccgagctgagcttgatgaccttgagcctagtggagctggagaaggagggactaggca

SEQ ID NO: 154213 - DNA, 295 bp, Zea mays
  unsure (1)..(295): unsure at all n locations
  Clone ID: MRT4577_72222C.1
cgcgggttcngggcacggcgcgcgcctncttctcggctcgacnctctcggggccaacccgcttcgcggggcgtcggcgcccgcccgtctngcgctgcccggccaagggcagtcctcgtgcgtcctctccctcggcggggcgcccaacnccaacaccggcgccggcgnccggcgtctcccttcccgtccgcgcgggcggcggggggcgctcgccgcggacctgtgggaacgcctcctcggcggctcgcgcgcggggctgcgccgccccgctctgcggcgcggcgctggaccgcgtc

SEQ ID NO: 154214 - DNA, 420 bp, Zea mays
  unsure (1)..(420): unsure at all n locations
  Clone ID: MRT4577_72223C.1
tcgaggccggccgggccgggactccgtttcgaattctagggttttgctgctctccgaccccgagctccgaaggccgcagcatcaggcgcgtcccccctcgcgtgtgaccgagatgaagctggcgaatcaagggagcgtagaatagcccatgttcaagcctcatcatctgcgctgcgaaggaggaactgctaaaacgtacatattgatgataaggaatactcgactggatacttctgcacaagaaaatctagagactcatagtcgttcagacgactacggcggaggcggcgcatgatcaggatggccaatgcgacgacggccagcagcagcagcggctgcaccagcctagccagatccagagggtcaagaatacctcgtcatcgtgngcgacgatgatatctgccggaggctgcacgatta

SEQ ID NO: 154215 - DNA, 529 bp, Zea mays
  Clone ID: MRT4577_72224C.1
ccccgcgtccgccgccgcatccggaagaagaggggccccttctacttggttgcgctgcgcctacctcctgtctgcgaggcgagcaatccacacacaggagcgggcgctcgtaccaccacaaccacgacccgatagctttcatgccctcccgctcaaatgcatcctatggcatgggagaagctcctagcattagggagacattggtcgagcttcaaatgaaaaaggcataccgatatgttatcttcaaaatcgaacaaaagcaaaaccaagtggctgaggacaagacaggggctactactgaaagctatgaagattgttaggcctctctaccacagaatgactgccgatacgcgctccatgattttgatttcgttactgaggagaatgtgcacaaaagcaagattttcttcattgcctgatccccatcgacattacgcatacctgctaagatgctagtctccacgtcgaaagaccggatcaagtacgagcttgacaggtttcactacgaaatacacgcgaccgacccatc

SEQ ID NO: 154216 - DNA, 383 bp, Zea mays
  unsure (1)..(383): unsure at all n locations
  Clone ID: MRT4577_72225C.1
accgactataaattgacaatctgcggcttacctaggcggagtcgcaacattttagataggcccnatcccccctccccaacagttgccgcgctcgtgccactgtgcgctagccccggcaaccccgaggacaacgcacactaccgagtggtcctcctccctgccagctagaaagactggaaggcttaacactatcagcatcgacagctctccatccaccacctcaaaggacttgcgtgctaagttggtattgcagagagactcaagcgctgggaaaagtcgcatcgctcttcgctaagaacaccgtcagaaagatcctacacccaaggtaactgttggcgcatcttttttatcacaaacataaacaaaagaggattgaacaattg

SEQ ID NO: 154217 - DNA, 270 bp, Zea mays
  Clone ID: MRT4577_72226C.1
ggaatcgcgtactgcacaccctgtgatggaactatcattcacggccaaagtttcccatgtgtccgtgtttcagtgcacgctcacgggttaaccaatccaatgggatcaatatatcacacactacgggtgaataaaagaagaggccccccaaaaagcttagacattcaaataatgatacaagtgaatgatcaaacagtgcgaataaccacaaaaaactggggagcctatttatcataagggcggtcctgctagagctcgccttaggaagct

SEQ ID NO: 154218 - DNA, 272 bp, Zea mays
  Clone ID: MRT4577_72227C.1
cttccaaaaggaatcctttgccattttttaattttttttaaaaaggaaaacacaggacacgggctgtgacatcggctctgaacattaccacgtaggttgggagcccgtttatactttttataccagatccctgccaagggcatacgcatctaggttcatacagttcaacagtgagggcacagaggcactaggtgtacggataagaggatgtagcaatccaacgcggttagtacgggttcttgacacgcatggctggcacccacagccctaac

SEQ ID NO: 154219 - DNA, 418 bp, Zea mays
  Clone ID: MRT4577_72228C.1
ttcctttcacgcgtgcggcgagaacatcatcaggggatagtgaagagccacgtcggcctcctggcccctgcgcacaaagctgcattgatcccctgtgactgcagccatcgcggagcactcagccttgctgcacgcccagtcgggattcatctacaccgtcaaggacacgtaggactagagctgaacccctgaagaaaccattacttgcacagctcgctggtgagcctactgaagcaaggccaaactcgtacgcagggacccatgaagatcttgccccagagatcatccgacgagatggacatggaaaattggttgatcggcggcctctaggaaaatgccttcacgaatgactctatgggaagacacccttcaggggaccggtcaatgacgaaacactgtgaaatgtgatctcacaggg

SEQ ID NO: 154220 - DNA, 569 bp, Zea mays
  Clone ID: MRT4577_72229C.1
ctcgaggccgggagggagtgcattcagctcttcaagtctacgacattcgactccaagaatcaatcaccttcactcgtccaccaaatcaactctaccaatcctcacatttcaaaatggtctgctgcggacgtaacaatggcacctgcgtgtgcgcccaggaggctaagtgctcttgcggaaagcagcccgcgctccagtgcacttgcgaaaaggctgccaccgagaacaagcttccctcttcaacatgtgcctgcggaaagcgcgctgaggatgcctgcaactgcagccgctctgagaacaacggctcgtcaaacctcgagaccgacttcaccaccaagaaataaatgtattggtgcgatgaaagagttgtagatgcatttgaagcgtggagagggtggcatacggaagggagttcccggcgtttattgagtgtttacgaggcgtgggatggcgactgtgcctggcttggatcgaacttacgaggacgcttacgattgatgagatgatcgaaagtgccaaatgttaatcaaagttttcttgacacgaaaaaaaaaaaaaaaaaagcggcc

SEQ ID NO: 154221 - DNA, 595 bp, Zea mays
  Clone ID: MRT4577_7222C.1
ccggccgggatcactactactagtagtatactgcacgtacagaagatacatacaaagttactgtacgtgatgatagtaaagactagacttggaggagagcgtatactcatacacagtacagcagctagcggtggaagttctttcgttgggggaattaagggactaaccaagacagacgtacgtcgtgttgacacatgacacgttacagttgattcggcattgctttctttatactgctggggcctatgcgtgactcatgtgtcggtgtgcaccagacgatcgggctgctgatcagcgcagtgtacagaggggatgactgccttctcatcgctgacgtttactgtagggggaacctctgggcttctgatctgagccggcaccctcgctgggatcctcggcggcggcgccctcctcgtctacaacaccagcgccctctccggctaaggatatccaatgcatgcgcttcttgcgattcgtcatgtaaaatcagggtgtctgtctataatctagcctccatgtggatgctcaaccttcgtcatgtaacaataatcagggctactcttcatgaaaaaaaaaaaaaaaaggggcggccctt

SEQ ID NO: 154222 - DNA, 523 bp, Zea mays
  Clone ID: MRT4577_72230C.1
cccacgcgttcgggaggatcatacaagatgcaaatttttgtgaaaaccctcacgggtaagaccatcaccctcgaggtggagccctctgacaccatagagaatgtcaaggccaagatccaagacaaggagggcattccccccgaccagcagcgacttatcttcgctggcaagcagctcgaggatggtcgcaccttatccgactacaatattcagaaagaatccacccttcaccttgtgttgcgtctgcgtggaggtgtgatcgaacccacactgcgtatcttggcgcagaaatacaactgcgacaagatgatctgccgtaagtgctatgcccgcctgcaccccagggctaccaactgccgcaagaagaagtgtggccacaccaacaacatccgccccaagaagaagataaagtagattttttttcttgtttacaattcggtcaagattttattcaaattcattttgatttttaacatgaaatgttttaaacaattatcatgtttatgaataaagactttttgtt

SEQ ID NO: 154223 - DNA, 737 bp, Zea mays
  Clone ID: MRT4577_72231C.1
agtggcggtgtcgcaggtcgcaactgatagacagacgcagaggcgaagcgaaagacagagactcgagaggcttcggaggccagggtcgcagtcgcagcggcgacgaagcaaagatgtcgtattcgaggtacaggagtcgttcaaggagtgtggactcgagtgatgttgagaaccctgggaacaatctcttcgtgactggtttatcatctcgtctaactgatcaagatctggagaagcatttctctacagagggagaggtgattgatgcaagtatagtacttgatccatggacaagggaatcacgtggatttgggtttgtcaccatggctactcttaaggaggcagaacgctgcatcaaatatctcgaccgttcagtgctggaaggtcgtgtcattactgttgagaaggcaaagcgaagacgaggtcgaaccccaacaccgggaaggtatctgggcgccaaatcatcgcgtggaaggaggtattcccgaagcaggtcacctgttaggagagaccgttacagctcacgctactcgcctgagcgagaacgctcttattctccttatcgcagaggacgatcatactctcgtcgtgacaggcgtagatcatactcccgaaggagatcatacactccttccgacaggtcggagtctccctacgacaggcgaaggtcctactcaccgtacgacaggcgcatatcttactcaccccaccatggtcaccgccaccgttcaagatct

SEQ ID NO: 154224 - DNA, 518 bp, Zea mays
  Clone ID: MRT4577_72232C.1
ggttcattgcgctttgctttttttgctttgttgccaggtcccaaattttgaatcccctgaacaggtcgggatgtgaataactccaaactgcccaaaggcttttccggttgttgcaagggacccccaatcaatttttgtctttttcaagttgtcccacacgtcccacacattataatgggacgatgttgatgatactttgttaacatgcacatggaatgtgtacgggcacacacggaccagagttaattctcgggatcgtactggagaaacataagccttatattataacgctgggggtgatagatattattatgactacgattgatgatccggcctgtggctactgctgaaagggattgtgggtcaacaggggggcatggttcgcggggttatgttacacgtcaccctgggacatcaagggagggggttttcgggcatggggtgctaaccccatacttaaaggggatgctcgaggggctgcccaatttaatggcggtcactccccttgccgaaaactt

SEQ ID NO: 154225 - DNA, 806 bp, Zea mays
  unsure (1)..(806): unsure at all n locations
  Clone ID: MRT4577_72233C.1
ggtaatcagaggcggtgtcgcaggtcgcaactgatagacagacgcagaggcgaagcgaaagacagagactcgagaggcttcggaggccagggtcgcagtcgcagcggcgacgaagcaaagatgtcgtattcgaggtacaggagtcgttcaaggagtgtggactcgagtgatgttgagaaccctgggaacaatctcttcgtgactggtttatcatctcgtctaactgatcaagatctggagaagcatttctctacagagggagaggtgattgatgcaagtatagtacttgatccatggacaagggaatcacgtggatttgggtttgtcaccatggctactcttaaggaggcagaacgctgcatcaaatatctcgaccgttcagtgctggaaggtcgtgtcattactgttgagaagattttgttgacagcagcaggttgatgcctacagctgtttggcatcaattcaaaagatacacaacctaagatcgaaacaatgctacctcaaccaaagggcaaagcgaagacgaggtcgaaccccaacaccgggaaggtatctgggcgccaaatcatcgcgtggaaggaggtattcccgaagcaggtcacctgttaggagagaccgttacagctcacgctactcgcctgagcgagaacgctcttattctccttatcgcagaggacgatcatactctcgtcgtgacaggcgtagatcatactcccgaaggagatcatacactccttccggacaggtcggagtctcctacggacagccgaaagtcctactcancgtacgacgggggcatatcttac

SEQ ID NO: 154226 - DNA, 547 bp, Zea mays
  Clone ID: MRT4577_72234C.1
ctcgaggccggccggggtcacgtttacagttcctctgcggagctcatttgccggtgtccgttcccaccggaaggctcacaacggatacaaatcggcgagtactccacaagagcatggagattgctcgagccgccctcctccctacctgacgttgggacaggcaccggcaccgtgcgacagagctccggacctgctctgcccgagaggttctcgccattggcgttctactatgcttctcggaggagcaggcactcttgactgcactaagcgccgggcaacactgtcccagtggcctcaggaagcgcagtacttcagagccaccgctgcctgaatggctgctcttatcgcgcgccagcacactgaacccactgagctccacgacatcttcctcatgccggatgctaaacaacgacctggacgtctgctaggcttctgcatgagcgcggcacaagccacacgcagagcaatgaagggtacttgccgacttatatctagcgccaggctcgtatccaaatactccaacggcgcgacggagctgtactatgat

SEQ ID NO: 154227 - DNA, 568 bp, Zea mays
  unsure (1)..(568): unsure at all n locations
  Clone ID: MRT4577_72235C.1
ccggnaaacacatactctccagtctcacgtcgcgcactctcgcaagctataattccaaggcaccgccgccgcanntcgatctcggggannatcgaaacctcgnaaagggcgcgacnngcggtnnnccacgcncnncccgggnnntcgcgccagcgtcgnagnnaagcgcacctgcgnnactcctccctttctaggaagcgttccatttttccttagggccatgggaagacgactacgacttcccggcggctggcgggtacgaccccatgggaatgatggggatggggatgggaggctacggcctcggtggccccatggggatggggggctacggcctcggaggtcccatggggatggggggctacggcctaggcggcgaggacgacgacgatgccatgaaggacctgcacgccggcgccggagcaggggcaggggacgatcctcccgcggagttgaaggtgggagaggagagagagatcgggaaggaagggctgaagaaaaagctggtgaaggagggcgagggatgtgaccgccccggtgccggcgacgaagtcgaagttcactacac

SEQ ID NO: 154228 - DNA, 1402 bp, Zea mays
  Clone ID: MRT4577_72236C.1
cattgggtacctcgaggccggccgggaaaaccgccacggccgacctcgccttctgcctctccgatccgcatctccgatccgcatctccgcttagtatatacatggggattggtagcgagcgattgattacactgggtgaccatcatcatcagtaactaataattactttagattagaagcaaagggaagcgaagcaagaatcgatcgagtcgagaagatggtgcagttcggcaagtggctgaggaggcagatcgagcggagcctcccggagtggcaggaccagttcctgcgctacaaggagctgaagcggtgcgtcaaggcccgctccggcggctgcccgccgttgcccgcggaggaggccgagttcgtggccgagatcgacgcggagaccgagaagatcaacgccttcttcctcgaccaggaggaggagttcatcatccgccaccgggagctgcagaaccacatcgagcgcgcgctgggccgcggcaggccggcgccggcgccggcgctgcacgaggccgaggtcgccgccatccgcagggagatcgtcaacttccacggcgtcatggtgctgctcctcaactacagcagcatcaactacataggtaggaggagttctagctctagctagctgtacggagttgaattgaaagcctgcaggtctgtccttttgcccatgcatgtctcctctccatgcatgatgattctaaccaatcccgttccatcctccatgtctggctgctggctgctggctgcttgcaggcctggccaagatcctcaagaagtacgacaagcgcaccggcgcgatgctgcggcttgccgtgatggagtcggtgctgcagcagcccttcttcaagacggagacggtgtcgcatctggtgcgggagtgcgagtccttgatggaggccgtgttcccggaggcgcgcgatcggggccaggccgccgccgcggcgctcgccgtcgcggaggcggagcagggcatcttccgcaacaccgtggccgcgctcctcaccatgcaggacgtccgcgcggggagctccaccagaggaagccactcgctgccgccgctcaacctgccggactccgactggctccggtccttcgacccgccgtttccgatcccgacccgatgacacatgttggcttgttgctcgctcctagttggcttgcgccagcctcctcgatctcccttccttttcgtcttcttggcccggtacatgctgtgcttgccttggttttccatttttcccgctttctaagctctaattaactaatgtatgtagagtgcagtagtgagactacagtaaataaatgtaatttactggaatgacagccgagagaacgtacaagctcatactcaatttggttccaattttgtggaaaaaaaaacctactgttaacg

SEQ ID NO: 154229 - DNA, 1556 bp, Zea mays
  Clone ID: MRT4577_72237C.1
gtacaatccggtctttcgggttatccccagtccacaccggccgcgccgcagcggcccatcccacccgtcagcgtcggcgtaggcccccgccggctccttcctctcgccgtcgcgagaccgagcagccagtagcagcaggagtgggtgctccgtgccccgccatccaacaccaaaagtggaacccctcacacccacgcgaggtggtcgacactcgacggagagccgcaaaggaggaggagctggcggtggcgggatccagcaggccgcccatgtcgagcggcgcggacggatcggatccgatcacgggccttggcccgtcgacgatcccagagccgccggaccgtgagccgcctcatctacagtctccgtcgccggcggcgcagcaggaggtggcggcgtcgcaagccgagacgccggtgccagcggtgaccatcgtgatctcgcggccaggggaggaggttcagacgcctgatgcaatgggtggctccccggcgtgctccacgcaggccggtgacggcaaggctacagccacctcggtttcgttgaccgcttcggcggctgccaaggaggccgagttggcaaggtccgacagcttcgacgactacgagcaatgcagagtttgtcaacagaagacagaagaacctctggtcgaccttggatgtagatgtcgtggtgatcttgcaaaagcacatcgcacatgcattgatgtttggtttcgtactagaggttcaaacaagtgtgagatatgccagcaggttgctgccaatatcccccctccagagacgcaagcaagtggatggtttagcccactttgggttgcatttgcaatcctgattggtggtctcttattggatgtgctgatatctgtttctcttggtgtttccgcacttcctgtcaatataataattggcgttcttatagttctcggattgggcaccgcccttcgtcttgctctcgagtgctgccaggaatggggctcaaggaggaacgtaggcaatatgccgaggctggagaacataccgccgactgggtaccaccctgcagtagtataatcattatgggacttgtaaatagcggtaggaacatctaaccttgtgctggctcttggattgtattagctttagctcacacgttgctcgttaatgtcgagctcaaattcaaagcttgttgattacgatcgggtccatactcccctagtccaatgcaatgtaaatgcagagttactgatactcggtcttcatggactagtgctgatgccgaattgccagcaccttaattggatggtctggctacccattcagcatgacagggctaggttccttcttccctccttgtacggtttactctgacaagtcacttgttgtgtttcatctttatctgtggcttgtcggtataggcatttgtgaaggccatttgagcgttgtggatataacatttttaaatgaaaaaaaaaaaaaaaaaaaaaaaaaaaaaaaaaaaagtactctgcgttgttacctgcttttaaaaaaaaaaaaaaaaaaaaaaaaaaaaaaaaaaacacccccccaaccccc

SEQ ID NO: 154230 - DNA, 453 bp, Zea mays
  Clone ID: MRT4577_72238C.1
tcgcgatcaaaacacgcgcgcgcggggctacccccgaatatcgcaccgcggcccgtgcgcgcgccccatcttcctatatagagaggcattatagatcggggcgtacatatggatatatgtgtcctctgtgaaaaagtgatatgctctcacaatcacacacaatataagacccaaacatataaagtgaaaactctggggcgtatagagagagatctctctcataataagtgcggtgctcactgtgccctttttacactcgaaaaacctggcgcgacatgtgttataaagaatcgcacaacgcgcggagagaggcggtgcgtatattgcgccacagtggggtttcttttttccacagagacacggaccacatgagagtgctctacaccctctgcctctgagagatgtacaacacgcggcacactctgttttgccacaacgcgagaatactctgtg

SEQ ID NO: 154231 - DNA, 246 bp, Zea mays
  Clone ID: MRT4577_72239C.1
agatagagcaacttgttgagaatgctgaagagtgtataggtcctcgacaacgaagctctctacgacatctagcttcgcactctgaagcttgctacacccactttcggggacctgaaccatctcatctctgcaaccatgagtggtgtcacctgctggctgcggttgccaggccagctgaactcggacctccggaagcttgcggtcaacctgatccccttgcccagccttcatttgttcatggtcggc

SEQ ID NO: 154232 - DNA, 130 bp, Zea mays
  Clone ID: MRT4577_7223C.1
gccgggactagggactcccttatttctgccaagctccacgcattaaacaaaatactttgttatcggactaaaactgatatgagatcacaatgacgcccccaccactgacgggaatcatggaagaaagctg

SEQ ID NO: 154233 - DNA, 1785 bp, Zea mays
  unsure (1)..(1785): unsure at all n locations
  Clone ID: MRT4577_72240C.1
gaaatgaatattataacgncactttcctactcgttcgactacgacctgcttccattgacatatgggtcctgcagtgttaaagtcccacggatcagccaaaccagcattcccctcaaagccgtcgtccttatccccaatccacaccgtcggcggcccatccaacccgtccccatctgatctccccgtcggcggcggcccccaccgcttccttcccctcgccgtcgcgatactgagcagacactagcagaagtaggtgctccgtaacccgccccccaacaccaaagtggcactcatcacgcccacgcgaggtggtcgacgaagagccgcagaggagggggaggtgctgggtgggatccggcggaccgctcatgtcgagcggcgcggacggatcggatccctgcacgggccttgacccggggacgatcccagagctgccggcccatgaacctcctgtgctgcaggctccgtcgccggcgccgcagcaggaggtggtggtggcatcgcaagccgaggcgccggtgccagctgtcaccatcgtgatctcgcggccaggggaggaggttcagatgcccgatgcaatgggtggctccccggcgtgctccccgcaggccggtgacggcaaggctacagccacctcggtttcgttgaccgcttcggcggctgccaaggaggccgagttggcaaggtccgacagcttcgacgactacgagcaatgcagagtttgtcaacagaagacagaagaacctctggtcgaccttggatgtagatgtcgtggtgatcttgcaaaagcacatcgcacatgcattgatttttggtttcgtactagaggttgcaaacacgtccggatatgccagcaggttgctgtcaatatcgcccctccagaaacgcaatcaagtacaagttattgggtttggagggttgattcgacttatggaaggggacgaggaggacgagaaaggggatggttcagcccactttgggttgcatttgcaattctgattggtggtctcttattggatgtgctgatatctgtttttcttggtgtttccgcacttcctgtcaatataataattggtgttcttatagttctcggattgggcaccgcccttcatctagctcttgagtgctgtcacgaatggggctcaaggaggaacgtggccaatattccgaggctggagaacatagcgccgactgggtaccaccctgcagtagtataatcgttatgggacttgtaaatagcgtaggaacatctaagctcgtgctggcttttggattattatgttctcgcaactagctttagctcacacgtgttgctcgttaatgtcgagctcaaattcaaagctcgttgattacaatccagttcatactcccactagtccaatccaatgtaaatgcagagttactgatactcggtcatcacgggctagtgctcatgccaaactgccagcaccttaattggatggtctggctacccattcagcatgacagggctaggttccttcttccctccttgtacggtttactctgacaagtcacttgttgtgtttcatctttatctgtggcttgtcggtataggcatttgtgaaggccatttgagagttgtggatataacatttttatatgccacaacccgctgtgggattcccctgcgcgcaagctcagggtattttagtgaattgcgagttggaaaggggacaagggtgtgttctgcttgggagtgtcccaattttgtatgggtcccttgttaggtttagtagttgggtgtttaaccccccccccccccac

SEQ ID NO: 154234 - DNA, 577 bp, Zea mays
  unsure (1)..(577): unsure at all n locations
  Clone ID: MRT4577_72241C.1
agcagtggtaacaacgcagagtacgcgggcaagttattgggtttggagggttgattcgacttatggaaggggacgaggaggacgtgaaaggggatggtttagcccactttgggttgcatttgcaattctgattggtggtctcttattggatgtgctgatatctgtttctcttggtgtttccgcacttcctgtcaatataataattggcgttcttatagttctcggattgggcaccgcccttcgtctagctctcgagtgctgccaggaatggggctcaaggaggaacgtgggcaatatgccgaggctggagaacataccgccgactgggtaccaccctgcagtagtataatcattatgggacttgtaaatagcggtaggaacatctaaccttgtgctggctcttggattgtattagctttagctcacacgttgctcgttaatgtcgagctcaaattcaaagcttgttgattacgatcgggtccatactccactagtacaatgcaatgtaaatgcagagntactgatactcggtcttcatggactagtgctgatgccgaattgccagcatcttaattgg

SEQ ID NO: 154235 - DNA, 592 bp, Zea mays
  unsure (1)..(592): unsure at all n locations
  Clone ID: MRT4577_72242C.1
ggtccgnacttcccgggtcgacccacgcgtccgctaatctcctctctctaactaagcctgcggcacggggcaacctcgccggagaagacgacggaccgaggctacgagctacgtagccgagggccggctacccgagggcctgacgcccttgacaacctggtatcacgttccagacgatcctcgccgcgccgcgccgtctccccaccacccgccacattctcgccaccaccagccgccgcgccaccatcctcggactcgtcctccggcgcgtcctgcccacccggcatgggtgaccccaatgacctcaagacctccgtggaggctctcaccaccgccatgaaggagatgcaggcctcgatcgccgccaacgccaagggcattggcgccctctccttcgggcgcaccttatcctcgggcgccacgacagactccggcgaaccccgcaccgtccgggcgccgcgatttcagaaaatggatttcccgcgctatgatgggaagtncgatccgctcaccttcctcaattggtgtgaggtcgtacttccaccaacaacggatcatggacgaagagaagggtttggatggcgtcctacaa

SEQ ID NO: 154236 - DNA, 294 bp, Zea mays
  unsure (1)..(294): unsure at all n locations
  Clone ID: MRT4577_72243C.1
ggcgtcgtccatgctctccgctaccaccgtgccactcgagcaggggggccgggctgcccgagctctccgggctcaggagctccgcgcgggtgcccatgcgccggattggcctctgcggcggcccatgtgcgccgcgtccttcagggcccacgcggccgccacgagcggcgtcccggggcccgcggcgcgggccgcgccgctggctgtgcccgtgcccggggtccggcgcgtcgcgcgcctctttctgcggcgctggcccgggcgcgtncgggtgtggccccgcggggttgtcgg

SEQ ID NO: 154237 - DNA, 448 bp, Zea mays
  Clone ID: MRT4577_72244C.1
aaaaaacccaaagggggggaaggaaatttccaaattccaaaacaacctttggcccaaaaaaaaggggcccttgatcaggatgaatacctaagcccggggggaccatagcagagatttgttccccgggaagccaaaatcaggggcaaaggggggggacccccactttaaattacaggggggtaaacaaaagccccctcagcccgatctactaaaaaataaaggggggggggggggaaaaaacacaacaacccttttccggtttatcccaacagtctcggaacaaaaaggggggccaattgaattcaaatgagcccccccttgaaggggaacaaaatgaaatcccgggggggggggaaacaattttttacaaacaaaaagcccccgaggggtggatccgcggaaatggaaactcggggggggcgaggatcatttgggcaaaaagcggggg

SEQ ID NO: 154238 - DNA, 530 bp, Zea mays
  Clone ID: MRT4577_72245C.1
acggttctagatcgcgagcggccgtcctttttttgtgtagaatctatatttggaacacaagtattatcttcatttgaaggtaaagtctgtcaaaaaaagaaaaaaacaaaagagcccttgcatgtaggggcacaaatattcttacaaaagaatcgaaacctggaagaacaaaagcatctcgcaggctaaaccccaagctatacctatctacacagctccccacgtttccgacccctcctggaacaggaacagggacccaaggtttacgcatccaagaaggcgacgctcttcccttcacaaagagccctttgaatttgatgatgcctgcgaggatttcttcaagcgaaaatatatatatatatatatatatataacccattattcaactgctatcaatccacctgctcgccgatcaggttgagcccgacgaccaagaacgaaaccccctgactgtcaatccacctgctcgccgatcaggtcgaggccgacgaccaagaacgaaaccccctggaacaggaggaagtaaaagt

SEQ ID NO: 154239 - DNA, 688 bp, Zea mays
  Clone ID: MRT4577_72246C.1
tgcactgcagggtacgctcgtctgtgtctgcctactccctcctccggctcccgcgaagcgactccaagaagcagcaggagcgtcgagctcgagcagcagccatggatggcgaggaggttggcaggaggggtattcctactctgctgaagccgtcttcctcctccagcgacggcagtgccggggaacaagagcacatcgcttctgacgtcactcagctcataggatggacgccgctggtcgaattgaagcgaatcgccagcgaggctgggatcgatgcgcggatcgtcggcaagatggaggcttaccagccactttgctccatcaaggaccgctctgctttgagaatgatagaggatgctgaggagaggggattgatttcgcctggagtcacaacactggtggagccgacgagtggtaacatggggttagggttggtcctcttcgctattcagagaggttacaggctcattgcagtcatgccggctaaatactcgcttgacaagcagatcttgctgaggttcatgggcgcggagctatacttaactgatccggcccttggctttccgggcatgtttgacaaagttgaacagctccgaaaacagctgccaaagtacatgttctgaacccagtacgaacaagcgaatttgaagcccattagattgaccgggcctgagactggaggacacgg

SEQ ID NO: 154240 - DNA, 625 bp, Zea mays
  Clone ID: MRT4577_72247C.1
agttctgaagatgtgaattaacctacttagggactatcaaacgctactccataactgagtagttataaaggtagttatgggtttgtcaagaagcatattgcatgatcaatcaagatggaatttgttcctctcttattgatagagatatctatgagcccctcgattgattacatcaagaaatgcataattgtgttagggttaagtggtaaccattaaaagattccaattcacagtatcgataaagagaggtcatcttagagccagaccaaatatcgtgagataaagggaacaacatgtacataatgttgcaataattcgtctaatatgatctttacgtatgcataggagttgacatatcttgctagaagtcgttgtcatatattggaccaagtaagagtactcagaccaggtctatgttacgtgaacctatagggtcacacagttaaagggaagaaagtctaactttgataggatccaaaattatactaggttttagggttgctgatgggacttagagtcaaaagcccaccagaacgtccatataatgaggggcgggggtgtgggttaaaggttacctaattccgaaaaattgtcccaagaaaaaatagattttaaataaataaat

SEQ ID NO: 154241 - DNA, 551 bp, Zea mays
  Clone ID: MRT4577_72248C.1
gcatggagcacattaactaacactggctcacgtttgggaacatgtccgacacctgccacctgagggagaacatcgccccaatctactgagggcactctcagatcaagagctgttggtagcagtccaaagcttcccaggagttgctaacaaatataagcaatctcttccagtctcggtaccagggccgctcccgtgacacggagttcctcctgcgtgacagacgaatgggccatgcccttgccagctcctaggaacatcttggcaatgatggagacgctcaggcccgcgagctcctccatcttgacttcgaactgtggcacctcaacttgctggatgctgatcagacagctggtggcgctatcaactgcatgcccaatctttttcttgtcatctgccgagggcttgaaggcgatcttgtcatcactgatggtgttcctcatgttataggcatacttctcgagagtggtcctagaggacaccttctttttgaccctcatcaacctcaggcttggtacttctcagcctccctgcaccatcttgctcaatctcct

SEQ ID NO: 154242 - DNA, 261 bp, Zea mays
  unsure (1)..(261): unsure at all n locations
  Clone ID: MRT4577_72249C.1
tcaaaaannagtggcggtggccattttattggttgtgtcatccactaatnaccatacatncntctgtncttagtttacatcgaccgcttacagcaggcagccattgacatttattgtttatcacacatcgatcatgaacatacgccggctggtgcaactactacacgcctacgatctgaacaagtatagtacagagaaaaccacactgttcactctactgacggactaactaattgatggatctgatggtagtacacattt

SEQ ID NO: 154243 - DNA, 258 bp, Zea mays
  Clone ID: MRT4577_7224C.1
atggatgccttgaaatttgaatatcctgattatgaaaggcttgataaatgtgccgaaggtgtgaaaagaaagagaattgtctgtattctgagcatgcaagctgctagaatggtaaaggaggatgaaaaagcttcaaagaaaagaaaatccacccctgagccgaaggctgctgcttcgaagaagaggaaggctgagagtccagagccgaagatacctgaggcaacagaggagactccttcgatgccttcggctgcctaa

SEQ ID NO: 154244 - DNA, 191 bp, Zea mays
  Clone ID: MRT4577_72250C.1
cacgcgtcctcgcactgctatgcctctatgccggatttcactccaatcacctgccgtaacagctcgaagcaggcttacgaattagaaaacgaagcaaacgaacttatccgcatcaagaactatctctatggcaagctcccggtgcacacaggccattctgtcgaaaaaatccatgagaacctgtctagggt

SEQ ID NO: 154245 - DNA, 363 bp, Zea mays
  Clone ID: MRT4577_72251C.1
cgcgaccctgggctattcactcaagccctccaatttctccttgcaacttcggcgcaaaacattgtgccgctgcacacggtggcgtgtttcgtcgactaggacccttagtgcctgtcagtgaagctttgcgaggtcacctccaacgtgtccgtggctgtgccgggtggaatttgcaagcagtggtgggggaattgctcatcaatgattgaggtcgccgggcgctcgctctccatcaagttcagtccacccccgccatcgacgagtcagtgactgaggatccaagtgttcagcaggtagaagttgctgagcaggagctcattgaagatggccaatactaggaagggaggcggaatcgatctacct

SEQ ID NO: 154246 - DNA, 465 bp, Zea mays
  Clone ID: MRT4577_72252C.1
aagggaccgggtttttacccattaaaatggaaaaattacattgaaaacccgggaaagggatcccgaaaaaaatgttaagggcaaaatttacaccttcaatttgttttacccggtggaaaaaaaattgggccggcgggcaaaaataccacgggactcgggactactaaaattacttttggacccctgggcggaccccgggggacccccaaaaagaactccggggaaaaaaagggtttccccgttaccccataaaaactggaacgcccccttttggcccccccctccgggggcgaattttgctaagggggccaagcgtcctttttcaaggggacccccaaattcccccggttccaagggaacctcggggctttcggggggggggcaaaaaatgggaacccaagtgggggccgccgcggggcctctgcaattgggggggctgcttcccagggtccccgggggggaaaa

SEQ ID NO: 154247 - DNA, 268 bp, Zea mays
  Clone ID: MRT4577_72253C.1
ggggcggtggagtattcagtcggacgaaagaccattatctggtattgtccgatctgcttctccccaagagcgagagcgggggtatggtcgtcgtaaactttcgggtcctctaagagacagctacggacggagtaagtgctggagaaattcttcctagggatatgaaaagtgaggtaggtgctgatgctggtgggggtgatcttttattgctttttgttatttgttggctgagatggtattgtctctggggtcttggtaatctacttac

SEQ ID NO: 154248 - DNA, 506 bp, Zea mays
  Clone ID: MRT4577_72254C.1
tttttttttttttttttttctttttttttttttttttttttttttttttatagataagcaactgggttacttgctttttctatttttaataaaaaaggaaacatgcatatcatgatagagttgaaatagtgtaccgttatagatagacgcacgatcctcttttatttatttatttgattatatattgaagaaaaagaataggaggaggaacaagtctgagcgaggctgagagcaagcaacaacgaccaacaacaacgaccaaggtaaaaagaaaggactttgagtttctcagcaccaagaaggagagggagagattagatcttagcctggtacaaggattcgcagagggaccagaactgggaagccagagcgccatcgacattttgggcgaaacgtgagggggattcgagtttagcataaggcaccaaatatttccccttgagttgcttctccgtcacttccggcgacgtcgctgcgtacagttgcgtcacagctccttgctcagg

SEQ ID NO: 154249 - DNA, 409 bp, Zea mays
  Clone ID: MRT4577_72255C.1
cggacgcgtgggtgtgtgtgctgttttgtttgtgtttggtggaggagagaaaccccgtgttttgcgtggagaaggcaagccgctcaacgctcgtcgatgtgcggagctatgcacaaatcggaatcgccatagtccttacaaacatcgattgggtttgtttatggaccgagagatgatgatcgagcaactgatgtggtgccaaccacaagacgcagttggtggacgacctgagaatggacttaaccagtggatgctcgtcgagcgagtacctcccccaacaaacactacctaagtgttaaattaaaggaccgggagatgatgatcgagcaactgatgtggtgccaaccacaagacgcagttggtggacgacctgagaatggacttaaccagtggatgctcgtcgagcgag

SEQ ID NO: 154250 - DNA, 668 bp, Zea mays
  unsure (1)..(668): unsure at all n locations
  Clone ID: MRT4577_72256C.1
gnaagaaatttnganaacacaaacatacaattgtaaatttttgtcagtagcccaagaggaagtttcctgagatatggttgtatgaaaatctctgtgaaaggcagaggaaaaggtaactattagatcaataacatatttccttcagcacaatgccaaaacaaagagcacataaacatacatattggtcactaagggactttttgtggcaggcagacttcccgaaaggctattattccctagaaatctgattcaagtagaatatttgcaaatgtcagcagaaggttaacaagaaagaaaaaatagaggttcattcaaacaattatgaacaaacataaagttccaaggaagtacgttggcaggccatgtacaacaatgttatgactagtgtttgaataagtgatgagatcacaaacgctgattagaataggactgcaataaggatcaactttgagctcttacctttttgccttggtgatagataagattacaaggtacatacaaggagatatcccttggtgtatggtttttgcggacgatgtagtgctagttgatgaaagtcaggcaggagtaaataagaaactagagttgtggttggagactctagaattcaaaggttttagagtcagtagaactatatatgagatgtgatcacgcaaatactacacatg

SEQ ID NO: 154251 - DNA, 258 bp, Zea mays
  Clone ID: MRT4577_72257C.1
ggaatgattatagacaagggatatatttctccatacttcatcacaaatcaagacaaatcaattgttgaattcgaaaatactagagtgcttttaactgatcagcgtgtgaatgatgttcaagagatacttcccttgctggagaagacaacacagttgagtgtcctttgttgtgataataaagttggtaaatcctaattaatttaaaaaaaaaaaaaaaaaaaaaaaaaaaaaaaaaaaaaaaaaaaaggagagacgata

SEQ ID NO: 154252 - DNA, 521 bp, Zea mays
  Clone ID: MRT4577_72258C.1
cacttaaggttagccagtatctgggttaacatagaaccgaccggctttcacagggtgcaaaagaatacccgacggaaaagtgccaaccaaccacagaataattttaagagagagctcctgtcctacttgatgtaacaccggtgagcatgtgaaccagccaacaattgctgcgaactcaggactgactacaagccgataatgcgaccacctaaaagttggggccagagtcgctgctgccggtatgggcgtcctataccattcggtcagacaccacccatgtctttacccatgccctgattcatcaagttgatcatggggttggatgagctctccagctctttaatcttgtactcgaactggtccgtctctgcgagctatttgttttacagccagatgatggcctggtggatggcgtactggataatctgcttgatatcggccagcaccttggacacaatcttgtcggccttgatcgtgatgcccatgccgtcagagtggatctacagggagactttgttctc

SEQ ID NO: 154253 - DNA, 339 bp, Zea mays
  Clone ID: MRT4577_72259C.1
cataccaccctaattataatggttataataatcatccaattccaactccaactcgtacgcgagttttagcccgagttgttaggttgttggtgagtcttcgagggaaaataatccttttggagttcttctgtaccgagtagcgagtaactcggataacggattccaagcaaaagcggtcaagctataaatacaaaactgattgactccaagtcctctcaatccgcctcgcccctcgacttcctctctctcacggcggcggcgagatgaaggtcacggtaatgaccggcgacgagcagatcgtcaccctcgacgtcgaccgcgacgaatccgtggaaaatc

SEQ ID NO: 154254 - DNA, 384 bp, Zea mays
  Clone ID: MRT4577_7225C.1
agcaacataaaaccctcaaagtgcaccaacacaggcgacccaagagccgggcgaggtagctacttgagctttctgcctgagagtggcagcgcgagcatactcctgcaatgctcgaaggctcctatacgtatcacttcttgccagcgtcacttccataccatgagctgccttaccatatgtgaacacctgacgagtcaaccctacagcaagccaacagcctacacgccactggcatacttagatatatcacactagctcctgcaacaatcatcaacccctattacaagactcagctttggagcttgcaatggcgcaccacatcaggtgacaacaacaacaacaactggtgtctagcaaaccttggtggctactctaagaaacaac

SEQ ID NO: 154255 - DNA, 541 bp, Zea mays
  Clone ID: MRT4577_72260C.1
gtgaagacgagccgagtcaaccccaaaatgacgtaggcgggtggactactccgcataatgaagcagatggatgaacctaaagatggatagacggagcaagtgatcgattaagagatgatcgccaagtggtcgccacttaacaaacactaacatagtgtttattccagacgcgcaagtgaatgaggacctagaggctcggcaggtggaaaatactgagcaggagctcattgaaggtactgtctggttgcaagcaatcagatggttggattgttcctaatgatttggcctctgaaagagatgaagaatgacattacaaaatctgaaggtgtcctgtgctgggaggggattagtgggctaccttggaaataagaatgatctgactcatcagttagttatgataataccacataatgagaatttgtagacagtatgagggatcgtcgaagaccatcttggaggatgaatttcgtcatgatcatatgtgaaattgttatgaagattactgggccgctcaccataactggtgactaaacataggcgc

SEQ ID NO: 154256 - DNA, 257 bp, Zea mays
  Clone ID: MRT4577_72261C.1
cgtttagttccatgtatcattagccgacagttctctgtcaggtggtaacatgagataatccatacgtcccacattgatggcgcgcaaggggacctaaaagcggggggcgtcatgaagcccccggccggcgccagcggcaagggcggcgcggtgagacccctgtctgccgcggttcaggtgccaggagtgcgcccacgccctggtcgtcctgggggtcgagttctgcgccgacaggctgctcccagcacgccctgccg

SEQ ID NO: 154257 - DNA, 448 bp, Zea mays
  Clone ID: MRT4577_72262C.1
aaaaacaaatatctaaaatcccctcgttcataggggggggacgacgatcattgaccaaaccaggggcttaataatcttaaaaaaggggttccagaccaaaaaaaacttcccccaaatcggggctaacagggccaaaaccttgggcaatttcagggacaacactcagggcataaactaggctattttggggcaggtcctctacatactaaggaacatgatggggtggggaaaacctcctaaactaataagttgaaacttgcatgggtttaaggacgttaaaaaaaccattccaaacttttttaaatctctccccctccaatccaaatggaaaaaggggattttttcccccatcagttttgccaatccaaatttttaaggctcctgacgctaaaaatatgggatcatgtaagcgggaaaataaaggacgcgggcgaattttggtagggcc

SEQ ID NO: 154258 - DNA, 133 bp, Zea mays
  Clone ID: MRT4577_72263C.1
aagcacgtgagcttgatcccagaatacttgaacgtgggcgcatcttgcccaagagaccacctgtgaaaccacccaccgagcctattggctttgatttgggaattgagaacagaatccaggagcgagaatcatc

SEQ ID NO: 154259 - DNA, 377 bp, Zea mays
  Clone ID: MRT4577_72264C.1
cggatctgcaaccacaatgccgaaagcgacgaagcaatggaagtacgatgtactaggatgcttctttagagtatattttagagttgataagactgcttcaacgcttaaagacgcgatctacaacttgtatgaaaagatgatcccgccagatctgcggttggcaagaaatgccatgttccgttacatgtggaaatacttcaggaacagtcaaataactctatttcaaaaagattacagggattatgtgcgcgggatgaggctgatggtatggactagggaccaccaaatgatagaagaaactacagaacaaaaagatatcgacagtttgtttaattgtagtactcttaaatacattcctgaaaataaagagcagcccg

SEQ ID NO: 154260 - DNA, 378 bp, Zea mays
  Clone ID: MRT4577_72265C.1
gaaaactatggtttgggggggctcaaattaggggaggagaaaagaaagagccaaaaacccaggggcccaaatggtgattatttggcgggtaaaaaaaaggcgggaatgcttaagcgcacaattaattctaacataaaaacatgaacgcgcacaaaagggaaacccgggaaaaggaaaacccccaagaaaggactccgaccgggagaccctgccccggaaggaccccgtcaaaaacttggtcccccaaaaatgcaaccgcaaagacttaaacctgaaaggtaaacgcgccctcgtggaccgggaccggcaggacttctggaagaagggctccatcttgaaggcgggcagggcaaaccccttcaacgggccccctttctt

SEQ ID NO: 154261 - DNA, 607 bp, Zea mays
  Clone ID: MRT4577_72266C.1
cattgggtacctcgaggccggccggggtgatcgatgccgccatcaacgccctccaccccctccgctcaggtccccttccgcggcagcggcagccggcatttccagcccctaaaatcctatttccctctcccacaccacgcgccgcgcccgtctgattccgcccgccagccacgcccgcagatctcgcttcggcgccctgattccgtcgtatgcaaggtcacagccctgccttccatcgtcgcccccatgccacgctccccttccatcctcgctcacttccagccgcccccattcccagttgaaggagtcgtccaggaaccgggaaccccatcaccggatcaggagcagctgtgtcgcgagcatggtcgttgctgagctcccgatgaccgcccgatggtgtcggaccccgcaccgccgtcggcaccgagcgtactcgctgccgtcgacccacctccccggagaggacatcctcttctgcatcgacgtcgacctcgaggtccacgccaagatgaagtccgctgccgtggcgtcctcggatccacgtccaccgcgtcgccgcagtccgtaggagctgatggtgccccgacggtggggagcatcaagccat

SEQ ID NO: 154262 - DNA, 324 bp, Zea mays
  Clone ID: MRT4577_72267C.1
catcatcgcgagggagtttggccatccagaccacgcgtccgcctgtggtgaaacctgtttcctcataccatgcgtttcgtcagcctggggttgccgatgcgaaaaccaaatgtgcgtgaaataaactctctgtctcgtcatttgcgtgctatacgttgctgtttaatttccatgacgacccgttacgtgtgaagaaccagctccatcatatctttgtaacaaatttgtgttgggagaaacagaaagacggtggtgttcagtttattgtgtatggtgatttaataataaaatataataaacgggatacgttggatgtgtgtgccc

SEQ ID NO: 154263 - DNA, 1082 bp, Zea mays
  Clone ID: MRT4577_72268C.1
tcggccggggttccttcctctctagatatagcctatgtttcccacctccactacctggcagtttcccatcgtcattgatgctgccgcggtcattccctctcctctcccccatccagcgtcgattcctctcctcccctcgaccatataagccccagtgctccaccaagccggtcccccgctcccttcctcttcctgtaacacccagtttgtaatatataatctctactactcttaagaatggagcgtaggcgtgcacatggtgtgtgttctgcctccgacatcctccccttcgctccgctccctgacttcgctccgctccctgaagccgtgatcgaagccgcaatcaacgccctcttccctctccggtcccctccgcgatccgattccgcggcagccggcattcccagcccccaaaatcccatttccctctcccacaccacgcgctgcgcccgcctgattccgcccgccagccacgctcgcagatctcgcttggacgccctgattccgtcgtatgaaagatcactgccccgccttccatcgtcgcccccatgccacgctccccttccatcctcgctcacttccagccgcccccattcccagttgaagcagtcgtccaagaaccgggaaccccatcaccggatcaggagcagctgtgtcgcgccactcgtgcgcctgcgcctcgaacctgactttggacgacgccgacggggaccaccctccctccgcatcgaagccgatgagcctctggtggtggtgtccgcggtcgattgaccgattgagccaccaaacagcaccaatcgagcggcattagccccgacctgaagcacacctggccggaatccaaaggatatcgtgcccccgcccccatccggagtctgccccgcatcgtgcgatgctcgttgctgagctcccgatgaccgcccgatggtgtcgaaccccgcaccgtcgtcggcaccgcgctactcggcgtactcgctaccgtcgaggcgtcgacccacctccccggagaggacatcgtcttctgcatcgacgtcgacctcgaggtccacgccaagatgaagtccactatcgtagcgtcctcg

SEQ ID NO: 154264 - DNA, 106 bp, Zea mays
  unsure (1)..(106): unsure at all n locations
  Clone ID: MRT4577_72269C.1
ttcgtgatgatccgagnacatattgctgcttgtttgttcataattagttcatgagcagcaacaaacgatggcaccgaggataacgagcctactagatatgggcatg

SEQ ID NO: 154265 - DNA, 493 bp, Zea mays
  unsure (1)..(493): unsure at all n locations
  Clone ID: MRT4577_7226C.1
cccacgcgtccgngaacagcctaaaatctaatttttgccagctgatcaaatggactgtgaggagaaaatccataagtaagacctagatgtcagacgaataaacctgcagagaattgtgtttaaattccattgagatgatacaagtttgctaactagaatccacgtataatgacagcatatttttcatcactaaaattccattgtcattaactcattatctgaaagattagcccatgatcacttcagatgaaaactaactgaaaataatgccataagtactagaagttaatttatggactcgcctgaaatgcagatgctcaatctgagtcctctgacagcctcactattttaaaagcaagttggatccagcgctcttgaagatggagaggcagccgagaaccaccttccctaattgcctgatgaagactcctcttgagttgagacaccagcttactggttattgtgtctaatgagtaaatttgcaagcctccca

SEQ ID NO: 154266 - DNA, 827 bp, Zea mays
  Clone ID: MRT4577_72270C.1
actcctcctctcctgttccgcggccccgacccatcgctcccctcccccctctcgccccgcctagccgccggcgacgagctccagctcaggctgccttttcccacggtcggcggaggaggaggcgggcgtgagaggacatggagcccatgagcgtggacagcagcggctgcggcggcctggacgcgcagatcgagcagctcttgcagtgccgcccgcttgccgagcaagaggttaaagcactatgcgagaaggctaaggagatattgatggaggaaagcaatgtgcagccagtcaaaagcccagtgacaatctgcggtgatattcacggacaattccatgatcttgttgagcttttccggattggcgggaagtgcccagatactaattatttgtttatgggggattatgtggatcgtggatactactccgttgagactgtttctctcttggtagcactgaaggttcgccacccacatcggattacaatcctccgcggaaaccatgagagtcggcagatcacacaagtatatggattctacgatgaatgcctacggaagtacggcaatgcaaatgtatggaagatattcacagatctttttgattatttcccattaacagccctggtggaatctgaaattttctgcctgcatggtggtttatctccatcgattgagaatcttgatagtgtgcgtagcttggatcgtgtccaagaggttccacatgagggacctatgtgtgatcttttatggtctgatccggacgatcgatgtggttggggcatttctcctcgtggtgctggctacactttgggcaggacatatctgagc

SEQ ID NO: 154267 - DNA, 1093 bp, Zea mays
  Clone ID: MRT4577_72271C.1
gtgtcgcgtggggccggctgacgcgggaggaggcagacgcgcggacgaagcggaaggtggaggccgtgatcaaacgcgagagagccctcgcctacgcctactcccatcaggggctgaaggcgacaccgatggcggcccacgcgatcctggcggacctgcagtcggggcggagcccctggtggtggacgcccatcgagcgccgccacgagccgggggcctaccgccctgcggatcccgccattagaaagcccctgccggcgctcgccatcgcccaccgcgacatgacgacgacgcctgtggcgatgacggcggcgacgacaccggcccggtcggtggtctcggcctactctaagacaagggccacgaggcctgtgatcagggtgggagccccgccgccttcgaaccatagccacgtggggagcatccgcgacgacgagagcctgacgagctgcccggcattcggcggcgtgcccaactacatgacgcctacgatgtcggcgtccgccaaggcacgggcacgggcgcacctgcaggagcagcagaagaacaaggcggcccaggagaagcccaggttctcgttcgggctgggccagagcatcgggagctgggccaagagcccgttctggaaggccgctgtgccgtcgtcgagggtggccacgccggcggcgtcgatggccggcgggcgacaccgatcgacgcggtcgatcagcgggcttagcacggactccaccgtgtccatgccagccaggctcggcacgaggtcctttaagtagatacacatgtcggactcatcgttgcttacattgcattgcattcttcttatatctcttctcgacgcatttgtgcttggaagtggtacacatgtgattgatggtgtggcttgttgtgggataccatcgtgtttgctgatttattattgtgccttactagctccctggttgctagctcctttgttcacagccttccgtgggtttttgagaggggccagagttgtagcatgtaaaatctgtgactccatcgaacaaccgtacatgcgttaagttcgtgctttttgccaattaccatggcatgtaaaaaaagtcgacgcggtcgc

SEQ ID NO: 154268 - DNA, 312 bp, Zea mays
  Clone ID: MRT4577_72273C.1
acaacactcccatccgatccagccggccaccagcgcgcagacctctcattcaccatgctcctctccaaggaaaaaccgccgcgagacatgacaagcacatgttccatgatggggagctatgtggcaagaatgactacaaccatcgtccacgcaccccaagcgttgaagagacctagcatgaaggcgatcacactcatgcatacatcactggctaccaagcatgccaggaagacttgcttgtgtacacaccactactcggcacgctccctccgacaggcatagcaaagcaccacagcgtcctcatcctgtcga

SEQ ID NO: 154269 - DNA, 759 bp, Zea mays
  unsure (1)..(759): unsure at all n locations
  Clone ID: MRT4577_72274C.1
ggtacgcctgcaggtaccggtccggaattcccgggtcgacccacgcgtccggttgtattttatatattagaaataagatgccacacagggcaatccagatttagattaaagaaaggatacacagacattaatctgcaacaggtcttgttcatactcataaagtgtaccgtattaagaaatcagaacagtgccttaagacagactgagacgtcgtgaaaaatgtgttcacactgtgggaggcaaagcttggtctgagaatgtaactgttgatgtgagcagcagaaatctgcttatagataacatactgttaatatttaattaaaagcattgttttttctagagctgagaaatagaagctaaagaataattagagctgaaaggcttccttatatcaaaccatctaacatttttcttagggctgttaaactagacataaaattgatttatctttctctctgtacacaaagtatccaaatattataccttaaggattcctaccaggttttcttgaaaagtggcttttacatgaggcaagaaggaagtagttgtagatagaatcattttctagttctttaaatgagacaatcactttgttttctaatagatgtgacctgtgtaacttanaaaatctgagggtttgagagaggttgctctagatttccaatgacgataccctggctgaataggcttttctcttccttggcctttacttcttttctcctccttggttcagtcccatgtgctatcattatatcatgc

SEQ ID NO: 154270 - DNA, 229 bp, Zea mays
  Clone ID: MRT4577_72275C.1
tagagcggccatgggcaacgcaaacacccccacccccacccccacccccacccccaccttgcatagcccagagtgcggccgtgacaacccgtagcgtctctgatctctctcgtgactcctcggccggaggagcacaggcatggagctggagcagaagtttttgccgaggggggcggggtactgcagcaacgcggcgcgcggactcgcctgctacgcgtgcgccgcgcgg

SEQ ID NO: 154271 - DNA, 323 bp, Zea mays
  Clone ID: MRT4577_72276C.1
ataaggcacggacaagctggtgggacgacgggggaggatattaaaaattggcacgaaaccaaacatgaaacacatctgtggaattgaggaaggacgaaagacgatacatgaagaggtatcaaaccaaactgagaaggaaaaggatgcatctataaaagaagcgaagcttaaagtggaacaacaaaaaaagaacacgcaggagctggaaaaaaaacttgatgaacaaccaaagaactctaaagaggcgacggtgaaagaagcgttggaacagcaacagaaagagctggagacctaccagtagatggagaggccttagaagtgaa

SEQ ID NO: 154272 - DNA, 479 bp, Zea mays
  Clone ID: MRT4577_72277C.1
tgatttgtagtaccatttcttgattacatttgactcccaagagaagaccatttggacgatggatattttgtcacaagttacgggatttagttcaaatttgaactgaatacaaaatatcctgacacgatatctgtcgtccaaacacttataataatttccacgctgttttttccctcttgtgtgcctgtacaatagaaatattgcagacttacaacacaaaaaaaaaaaaaaaaaaaaaaaaaaaaaaaaaaaaaaaaaaaaaaaaaaaaagaaaagagaaaaaaaaaaaaattggcgctgggatatttgtttttctatccaaaaaataaaagcaaaaccgcgacaaataaaaataaaaattaggggccctttaacttggagctttttgtcccctttgggggggcttaatcgccccctgggcctaatcaggaacagaattggttcccggttaaaattgacatccgatcccaattccaaaa

SEQ ID NO: 154273 - DNA, 396 bp, Zea mays
  unsure (1)..(396): unsure at all n locations
  Clone ID: MRT4577_72278C.1
ccggcccggcccataaaaaaacagcccggggggggggcgggggcggcgcgccaacaccaggcgcggcagggcagccgggcacagcagcaccgacgggccacaggcaaagagggcacgcanccccgccagcaccagaaggaagaagcacaggggccccgacaggacgggccccgaccagcacgagggcggggggggggcgcagcagcggcccgccgncgncnccccgcagaccggcgaccagccgcagcgcaacgaggaccgcaccgacgaggaggnggccaaaggagagancnacaaccacaagaacgnccggaagcagggcaccggcacacacaacnacagcacgggcagagaccgcgaggacaacaagccccggaacgagaaggacggcgagaa

SEQ ID NO: 154274 - DNA, 152 bp, Zea mays
  Clone ID: MRT4577_72279C.1
atatacaaatatgttaggtaatttttgattgattcatattagtagtagacttaaacattttttgacatgaaaattgtgataacagtatgactttttaattgccgagctttgaacagttgttttcggagaaaaagggctgaaaatatggagtc

SEQ ID NO: 154275 - DNA, 324 bp, Zea mays
  Clone ID: MRT4577_7227C.1
acacaaacacttaaacccaaaattgtgttacaccccaacacataatttctggtaataccatctcacccatgcccagggggacacaaaacatatccccaacctaaatcttccaccggcctttaaaactatccaagaaaaacccagagacaaccccaaaaaacggggcacctaaaagggccccaggagggcaaaggccccaatttgtaccaaataaagtccatgcacccaaaaaaacaaattgctcgagccaaatccccagctaacgtccccgtgcattcaacttcatagccctccaaaaccgggacctaaattcaaaacaccggc

SEQ ID NO: 154276 - DNA, 1348 bp, Zea mays
  Clone ID: MRT4577_72280C.1
actcctatgggcgattgggaccctcgaggccggccgggaggcaatcgagaaaagagaattagctatagccagccgtgtgtcgaacacgacacgcgataatggcactcatgcaggagagcagccaggacttgctcgaagcgcacgacgagctcttccaccactgcctgtgcttcgccaaatcgctcgcgctcgccgtggcgcaggacctccgcatccccgacgcgatccaccaccacggaggcggcgccaccctccaccagatcctcgccgaggccgcgctccacccaagcaagcttcgcgccctacgccgcctgatgcgcgtgctcaccgtctcgggcgtcttcaccgtccagtattcttcaaccgtcgacgcgtcggacggagctgatgtcgtctacaggctgacggcagcctcccgcttcctcgtcagcgatagcgacgaggcgggcacggcgtccttggctccctttgcgaacctggcgctccaccctatcgccatctccccgcacgccgtgggcatctgcgcgtggttccggcaggagcagcacgacccgtccccgtacggcctggcgttccgccagatcccgaccatctgggagcatgctgacaacgtaaacgccctactgaacaaaggcttgctcgcggaaagccgcttcttgatgccaatcgtactcagggagtgcggagacgaggtgttccgtgggatcgactcgttggtcgacgtcggcggtgggcacggtggcgccgccgccaccatcgccgccgcattcccgcacgtcaagtgcagcgtgcttgacctcccgcacgttgtcgccggtgctccatccgatgcctgcgtgcagttcgttgcgggcaatatgttccacagtattccacctgcaaccgccgttttcttcaagacaactctatgtgactggggtgacgacgagtgcatcaagatattgaagaattgcaagcaagccatatctccacgggatgagggtgggaaggtgataatcatggacgtggtagtcgggtatgggcagtcaaacatgaagcgcctagagacacaagttatgtttgatttggttatgatggcggtcaatggagtcgagcgcgacgagcaagagtggaaggagatgttcattgaagctggattcaaagactacaaaatccgaccagtagctggcctcatgtcggtcatcgaggtctatccatgaattctttgtgaacaaaaggccggctgccataatataaactgaagaccacgacgtcgtcatggagctgagcgtgttgttttttagactactaggcacttgagcctctgagaatttgtaataataaataagctgagcaacagcgttctgtt

SEQ ID NO: 154277 - DNA, 692 bp, Zea mays
  Clone ID: MRT4577_72281C.1
tcgaacacgacacgcgataatggcactcatgcaggagagcagccaggacttgctcgaagcgcacgacgagctcttccaccactgcctgtgcttcgccaaatcgccgccgcattcccgcacgtcaagtgcagcgtgcttgacctcccgcacgttgtcgccggtgctccatccgatgcctgcgtgcagttcgttgcgggcaatatgttccacagtattccacctgcaaccgccgttttcttcaagacaactctatgtgactggggtgacgacgagtgcatcaagatattgaagaattgcaagcaagccatatctccacgggatgagggtgggaaggtgataatcatggacgtggtagtcgggtatgggcagtcaaacatgaagcgcctagagacacaagttatgtttgatttggttatgatggcggtcaatggagtcgagcgcgacgagcaagagtggaaggagatgttcattgaagctggattcaaagactacaaaatccgaccagtagctggcctcatgtcggtcatcgaggtctatccatgaattctttgtgaacaaaaggccggctgccataatataaactgaagaccccgacgtcgtcatggagctgagcgtgttgttttttagactactaggcacttgagcctctgagaatttgtaataataaataagctgagcaacagcgttctgtt

SEQ ID NO: 154278 - DNA, 1411 bp, Zea mays
  Clone ID: MRT4577_72282C.1
gggaccctcgaggccggccgggaattcggcaagagggaattagctatagccagccgtgtgtcgaacacgacacgcgataatggcactcatgcaggagagcagccaggacttgctcgaagcgcacgacgaactcttccaccactgcctgtgcttcgccaaatcgctcgcgctcgccgtggcgcaggacctccgcatccccgacgcgatccaccaccacggcggcggcgccaccctcccccagatcctcgccgagaccgcgctccacccaagcaagcttcgcgccctacgccgcctcatgcgcgtgctcaccgtctcgggcgtcttcaccgtccagcaagagcaaccaccagacgcagacggtggtggtggtgctgattcttcaaccgtcgacgcgtcggacggagctgatgtcgtctacaggctgacggcagcctcccgcttcctcgtcagcgatagcgacgaggcgagcacggcgaccttggctccctttgcgaggctggcgctccaccctatcgccatctccccgcacgccgtgggcatctgcgcgtggttccggcaggagcagcacgacccgtccccgtacggcctggcgttccgccagatcccgaccatctgggagcatgctgacaacgtaaacgccctactgaacaaaggcttgctcgcggaaagccgcttcttgatgccaatcgtactcagggagtgcggagacgaggtgttccgtgggatcgactcgttggtcgacgtcggcggtgggcacggtggcgccgccgccaccatcgccgccgcattcccgcacgtcaagtgcagcgtgcttgacctcccgcacgttgtcgccggtgctccatccgatgcctgcgtgcacttcgttgcaggcaatatgttccacagtattccacctgcaaccgccgttttcttcaagacaactctatgtgactggggtgacgacgaatgcatcaagatattgaagaattgcaagcaagccatatctccacgggacgcgggtgggaaggtgataatcatggacgtggtagtcgggtatgggcagtcaaacatgaagcgcctagagacacaagttatgtttgatttggttatgatggcggtcaatggagtcgagcgcgacgagcaagagtggaaggagatgttcattgaagctggattcaaagactacaaaatccgacccgtagctggcctcatgtcggtcatcgaggtctatccatgaattctttgtgaacaaaaggccggatgccataatataaactgaagaccacgacgtcgtcatggagctgagcgtgttgttttttttactactaggcacttgagcctctgagaatttgtaataataaataagctgagcaacagcgttctgttaaaaaaaaaaaaaaaaaatttgcggccttgccttgcacgttct

SEQ ID NO: 154279 - DNA, 548 bp, Zea mays
  Clone ID: MRT4577_72283C.1
cctcgaggccggccgggatcagaaatccagaattatcaataactatctaacgtgtgcatcccgaactaggatcaccacaccggtctgtcatgaccatgagaacctacaacaaagcagtgctcctcgtccttgccatggtgatggcggtgctgtcgacagggatctgcacggtgccggcgccggcgccgagcttggaggagttcccgacgacgacagagaacacgtgtgtgaagatcctcgccgacagcggctgcgtccgcaaccacaaggcgtgccacgacaactgcttcatcaagctcaagggcaatggcgtgtgccttcgcgacgcgtgctggtgctcctacacatgcaagccatcgctgctgtcgccgccaccggcggcccagtgaaactgccatacagggcagcgggacgccgagatgacgttcagatttgtgtgacatcctagattcctagtatcctcctagaggccggcggtgtcgcttgccatgaggcatgctcgaaatcgagaataattttagatgaaaaaaaaaaaaaaaaaagcggcc

SEQ ID NO: 154280 - DNA, 541 bp, Zea mays
  Clone ID: MRT4577_72284C.1
ttttttttttttttttgtgtctaatacccacaacaatttagagatataatgatggaggagttcgctgatgatttatactcagttgagatgtttagtaaagcgtatgcaagattggtatagctaatattgccaagaagacaaaattaaaacttatgctaacacgtagaggtgcagccggtctcgtcgcagctttccctccttcaagcttcatctgcagcgtcgtcgcgctggccattgacagcgttggaagcctgaccggcagcgagggcagctttgctggcggcatcgctaccaatccgagcagctgcggtaacacctgacgccaagaaaacataggacgaatccatgatggcaacgaagacaaagccggcgcaagggaggcgaactcagctccggcggaaggcgaaaacctagcttagcttcgagaagtacgaggagcggaggagggagagaatggggagcccgatccgttttgcgtaacggggccagtacttgagaatggggagaactcagctccgacgtctacagcattacagttgat

SEQ ID NO: 154281 - DNA, 172 bp, Zea mays
  unsure (1)..(172): unsure at all n locations
  Clone ID: MRT4577_72285C.1
cctcccgcttcgcttctccctcggcctcgctcgatcgctcccacgccctcngcgcccccgntccacaaacnctaccaccacccaagaaccgnncagcgcagnnggcgcgaagagnnggatcgnngcaggnnncgggcaaagatggaagggaagatnnccctgcacattccaa

SEQ ID NO: 154282 - DNA, 309 bp, Zea mays
  unsure (1)..(309): unsure at all n locations
  Clone ID: MRT4577_72286C.1
tcgttggcggactaggagcgaacgagagggaggtggcgaaactcctagtcgtgaagccgtgctagctgccctggctggggtcgtggacgcggcgatgagggacaacaccgcgtacgcgcagaacacggcgcacgacttcangaacctgctcttttgctcgcgcgcggtgggcgggggggggggggcggcgcgctacgcccgggtggcctggctcgcgggggggtgcgcggcgttccgcgcgggggtctgccgtttggtgcnctcgggcggttcgctcggtgcgggcgtcgtgtggggcttgttggggcg

SEQ ID NO: 154283 - DNA, 529 bp, Zea mays
  Clone ID: MRT4577_72287C.1
caacagcctttctgttggatgttctgaagccaaacttgccagagcatgcttttcttcaaaccaaggttttggagataaacttagtgacttacccaaatgttgctgatgccattcttgctaatggtatgttcagtcattacgaccgtcctcgtattgctcagctatgtgaaaaggccggtttgtacttgcgagccctccagcattactcagagttgcctgatatcaagcgtgtcattgtaaatactcatgccattgagccccaggcacttgttgagttctttggcaccttttcaagagagtgggctttggagtgcatgaaagacctcctactggttaatctgaggggaaatcttcagattgtggtgcaggctgcaaaagaatactgtgagcagctaggggttgacgcgtgcatcaaattatttgagcaattcaaatcttatgagggtctttactttttcttgggatcctatctgagctccagcgaggacccagatatccatttcaagtacatagaagcagctgcgaggac

SEQ ID NO: 154284 - DNA, 350 bp, Zea mays
  Clone ID: MRT4577_72288C.1
gggcggaaggggaggttcgagctgttgttgttgaggttcttggtgcccattttcggtaaaaaccacaagtgtagtttgcgctggcatttctgattggtactgcctcacgagatatgggagaggggctttctgctttgttacctatctatgttggtgggggggggggggggaagatctcattatgctcgtgaggtatgagcaggagtgattggcaggtcctgacaccacaggtgggggtcgtgctcggtgagcagggtgcacccacgagaaggaaccggtgtaggggcctggtaggcagcgatcctgggcaatgtggggctcattgacgggggtgtcggggggtacctggc

SEQ ID NO: 154285 - DNA, 215 bp, Zea mays
  Clone ID: MRT4577_72289C.1
tgtgccagtgcagctgcacaggatgatgacgatgtccctgagcttggccgaggagagacatttgaggaggctgcggaggtgaaagaggtgcctgcagcggcaccagaagagaagtaaagacttgtatatttcaccccttcatatacccattgcttcggaaggggctcccacagtcttacccttgcgcccccgacaaattgcgtatatacttattg

SEQ ID NO: 154286 - DNA, 271 bp, Zea mays
  Clone ID: MRT4577_7228C.1
ttccaaaagccctcatccatctcccgtctcctgtcttcctcgccctcatcggaaaagcagctcaagtgagtcatctctctcgctctcatccatctcttgtcttcctcgccctcttccccatgtcttccgtagttgctgcacgtccgcgcggtgccgagtgaggagcttctgcacagcgcccgccgcctcgtgcttctgggtcagattcatctggccgtggaatttgtgatgtaccttatattttaattattgctcatgtcttcaagtgcag

SEQ ID NO: 154287 - DNA, 196 bp, Zea mays
  unsure (1)..(196): unsure at all n locations
  Clone ID: MRT4577_72290C.1
ccggcacaaaaggccacgaccgccgcgacgcggcgagacagcgcggcggccaggaagcgcagccgctccgacagcgggaggacgagcgggacccagcgaccgtgaacagttggcagctgcactcgcgancgcccggccacggcacatgcaggcgccgcgggagagcgcagaacgccgacgantgcccctcggcagt

SEQ ID NO: 154288 - DNA, 514 bp, Zea mays
  unsure (1)..(514): unsure at all n locations
  Clone ID: MRT4577_72291C.1
aaaaaaaaaaaaaaaaaaaaaaaaaaaaaaaaaaaaaaaaaaaaaaaaaaaaaaaaaaaaaaaaaaaaaaaaaaaaaaaaaaaaaaaaaaaaaaaaaaaaaaaaaaaaaaaaaaggggggggggttaaaggggaccaaggttaacgaacgggggaaggaaaggaaaagggtttaaaaagggggggggaaaaaaaaataaaggggcgggggttaaaaaaggtggggaggggaaaaacctgggggtaaccaaataaaagggcttggaaaaaaatccccttttggcaagggggggaaaaagaaaaaaggcccgaacggatggcccttcaaaaaagtggccaagccgaaaggggaaagggaaccccccctgaaggggccaaaaaaggggggggggggggggggtaacccaaagggggaccgtaaaatgggcaagggcctaagggccgggtttttgggttttattccctacttttngggaaaggtgggggggtttccccggaaaagttaaaaagggggg

SEQ ID NO: 154289 - DNA, 355 bp, Zea mays
  Clone ID: MRT4577_72292C.1
tgttgctgatgtcgacaacacgttcattgaggttgcggataacattggcgatgagcatgtggtcggtgacaacctcgccaatgaccatgttctgccatgttcttgaatttgcggtagtagtccatgttggaggttgccttggacgaagttcgaggtggaagcatcgaggtaaggggcaccctgcttgcggttggcaatgaattggttttcgagagcgagtcaaatggcacgagcagtagtactgtgctcagacgatatcctcgggactgctagagatggtgtcgtggaggcacgtgaggacaatgcagtccatgcgtgcccaacccggtatgatgttgtcagtgttggtgtcaag

SEQ ID NO: 154290 - DNA, 255 bp, Zea mays
  Clone ID: MRT4577_72293C.1
ttatgtggctcccgttaacgacagggccgcagggggccatcaccatcgtcgggatggtgtcatttgcgaagatgatcaagttcaaagtacaggagaactgcgagatgaatctgggcccccaggcaacgagtctaaggacacccgccaaagattagaccagctgttgcaacccgatcaccggcgtctcgcagctgattatatctccctggccaaggtgcgctcaaagtgaatatcgcaaactcgttcatgtgccag

SEQ ID NO: 154291 - DNA, 614 bp, Zea mays
  unsure (1)..(614): unsure at all n locations
  Clone ID: MRT4577_72294C.1
gggcccgccgccgaaacccaagaattnccctcctcgactcgggaggaacgcacacgagctggatcccacgaccccagtacgtacgcggacgaacatcgaaccagggagccgcgccccgccttcactacacctcctgacaggctctacactttgcagcgaccgtctaggtcgatgtccaagccggacgaaggggtcgtctagacggtcgtgctggagatattggcaattacgacaataaagaacacgctgttggaagaggaggaggacttaagaaactattataaggaccaggtccgttaactcttcctggtggttaagaaggtcctgtgtttaaccactgacgtcgagatgtccacctcgaagaccgtactcgtcgtggtgtaggtaaacctaaagaagatcgtcaggttggtggttcactctttcgaagagtaggtggactagggaacgctaaaagaggtgctcgaccagaaagtcacagaggacctgggtttgcaaacgcgtaccacgcgttagaccaaagtatgctacgtggccgctgctaaggtggtcagggtcttccacataacggtcctcgagtagatgtaatccggatcgagagggggggtttgggt

SEQ ID NO: 154292 - DNA, 296 bp, Zea mays
  Clone ID: MRT4577_72295C.1
aatgtaggaccaaaagggggtgataataaacagaaacaacaagttactcttacacaataccgcaactgttaaatgaagagggagggggcctttaaaccgcacaaaaaaaatttaacctttttttcggtttaaaatccttatggaaactaaactccggcagatcttttttgggtgctccacgggaaccttttgggaaaaagaaattagtggagatggaagatcctcatattaaaaaactgatatggtcataaaaacactatttctttgggtgacttttcatacaaatccaacccgca

SEQ ID NO: 154293 - DNA, 270 bp, Zea mays
  unsure (1)..(270): unsure at all n locations
  Clone ID: MRT4577_72296C.1
gacactcaggagcacgaggacctcgtgaancgttaacgctcgtttacttttcgaggttgnnncngntctcgcagccgctggtgccgccgccgctttgnttaagcggtacaccaccgcacctgctgtttcttctcgggccgctttgagcaatcgtctccctttctttctcggtgatcgccttttgctgagagcgaaatttaatttcccgttgggcctcccactatcgcttttttcttattttttcctatttttatataccctggggcgggg

SEQ ID NO: 154294 - DNA, 321 bp, Zea mays
  Clone ID: MRT4577_72297C.1
gttggaataaaaaacatgctcagagaataacactagcaattccacagtaagtatataactggagacatttaaaaacctgggatactgactactggccggtctaacaaagagctggagattaaatcccagatgcacccgaattatgccgttgtgacaattctccgtcgcacacaaatgtcttacatattaggtggctcctagctaaggacaaggttataaacttactgattcaaaaaaacaccgggggggtgtaaacccttggacaaacattttgttaaggagattgccccaaagggggggattttgggtcaaccagctttt

SEQ ID NO: 154295 - DNA, 699 bp, Zea mays
  unsure (1)..(699): unsure at all n locations
  Clone ID: MRT4577_72298C.1
tgcggagcgcggctcgtgttcgtaccccgtgcctacctgcgcctgcctcccccggcaccgctcgggtttgatcgctggcgtcaagatgtatcctgatggagtcgaaggacccgcagaccgacccgcccacctactgcagcccaggtccagttggtgaggacatgttccattgacaagcgaccattatgagggccagcacgatagcccatgtgcaggtggggtattattgctgaagagtcaattcccagccgatcaacccctcaagccaccaaaggtgtctttccgcagcaagcttttccggccgaagatcaaagcaagcgcatcagttgccgtgacattcgtaaggatgagtggagccctgctttaggatctcaaaggttctacttncaatctgctcactgctcagttacccagagaccgatgatccncgtgtccctgagattgcgcacatttacagaaacgacagcgccaagtattgagtcctacgcaccctcctggacatagaccaatcccatttgcgagantccagnctatancacttgccaaaccgttggaatgtgccggaccccaaatcgttatcagctaaataaacagtcaagtcacaactatgacntgaggtttgagnaacggtgtgccctgttgaatcatttattaccttgtgaaagccggtggtgtctggtttctacctgaccgtttcat

SEQ ID NO: 154296 - DNA, 309 bp, Zea mays
  Clone ID: MRT4577_7229C.1
ccccttgggggattgggtgttttttccttttttctttctttccctttttactttttctggggtacaaaatacatacaccatcggggccctaaaacaaaaccccttcaaagggcctaagcggggaccacccccaaaaggggccaaacatacgtaaccccccaggtaaaggccacccaacggttccggcccccaaaggaaccatatcccttcctgcacccctcccaaaaaaagcccccccctcccagccccgggggataaaaccccccatgatcttgaagtttccatcaaagtcccagcctcttttcccct

SEQ ID NO: 154297 - DNA, 236 bp, Zea mays
  Clone ID: MRT4577_722C.1
gttgggtctaccaaaaccactttgacctaatcgggagtagtgaagctaaagggtatttacattttgctgaaattgagcccacgccagggacctctacctccaatgtggcctacagggccaggcttgtaacaaaccagcccgccttcgtatagggggggggtgtagccccccctaatagcaaagaaatggccccccacccactctgcctgagctgggtacaaattgctgaaaaacca

SEQ ID NO: 154298 - DNA, 124 bp, Zea mays
  Clone ID: MRT4577_72300C.1
agcgcgacagcgattccgtctagttagaccaaccgagagagtcccctcagaccagaagaggtgaatatgagttccctcggtcgcctggctatccctagggctccaacgctgcgcctacgtccac

SEQ ID NO: 154299 - DNA, 2380 bp, Zea mays
  Clone ID: MRT4577_72301C.1
ctcttggatacatcaatggaccaccatatcctgggcctatccctcccatgtattattacatgcccactgtgcctatggattcgatgagaagtccatcacactacattcaaaatcaaccagctcctaatcctgttttatccccagaagctgctgagttaagatctaatatactaactcaagtggagtactacttcagtgatgcaaatctggagcgtgatgatttcctgaaatctttaatggatgagcatggttgggttccagtttcaaaacttgcagatttcaatagacttaagaaaatgaccgcagatatacacctgatattggatgcactgacaagctcaagtcttctagaagttcaggatgacaagattagaaggcgttatgattggtcaaagtgggtctcgctttctggtacatcagttgcgagcccatcatctgccagtgtgaatagcagtgtgggtgagaagaacattggtggtttttcaaataaggatgcttattctgaagatcaaaagacgcattgtcaatccaaagatattagatgtaatacagatattggtatgggggaaaaagttatcgatgaacaagtgcaagattcacatggttgttcattgaataacgacttttctgtcatcagtattgatgaaaagactaagaacctttctgcacatccttcacgcaaatatggatcttcttttagatttggtgaagttcagaaaacaaggtcgaagatagtacctaatgctcagagtgaaagaggtttctctattggtttcccaagtgccttctctagctttggtggtggtggtgaccagagcactttcttgcttgatgaggagttggaactggaacatgtcgaccattcacgtgatgacctccattcacataaaaggggtgatgatgaagatgaggacttctttgttgatgatcaagacgttagtaggctaatgattgttacacaggatactaggttagaaaaggatgacaaaaatcgcacaagtataccacaggcattttcaactgaggaagcttcaagaataagtgatgccttatactgctatgagaaactgcatggtcgatgcactgataatcaaagaagttcccaggctgatcctgcagatgctgattctaaaccaaccagtggttcaaagggaagccatattcgcactgggactaaagttactgaagaagcaggacagcccattccacgtaggcgccaaaataaaggcaacagaaaagcgcacagctcacgtaaacagagattctttgctggtaattttgtgaataatcctgatcagtatggtggtgtgtcagaaagccctccaggcaattcagttggatatttctatggatctactccagaaaatcacagttataaaagttcaaagctgagttcatctcctcatggaattcctactgggagctcgcctgttgggtctgtgcccaaatcttctccacaatctcagcatcttacttttcatcttttagaaaaaaataaactccagccgcaaaggtacaataagttcaaacatcactgccttatggagcgtaagaaattaggcactggccagagtgagcaaatgaactcactgtatcgcttctggtcatactatctgagagataattttaatgaagatatatacaaggattttaagaaactcgcactggaggatgctgcagcgagctacagatatggtctcgagtgtctattcagattttatagttatggtttggagaaaaaattccaacccaatgtatatgaagatttcgagaagcttactttcgaattctaccgtaatggtgatctttatggactcgaaaaatactgggcatttcaccattaccgaaatccagatagcggtcctgtagataaacttccagagctggagaggcttctgagggaggagttccagaccctagaggacttcaaggcaaaggagaaagcccgagcgacgacggagaaaggaactggcatcagtagcagcagtgtggtggtggccgcaagtcatagcaaggctgagactaagcaggtctgagtcccgcatgaaaattttcggtggtcgccccagcaaaaagaggaagtagcgttttctttttctttgcgaagaagtaatgattcgggtagacatgtgcagattttgctatatcccctgccagtgccgtgtgttgtggctgcccagaaattttccctccttttctcattaccttcctggcaccaatgtcaatgtgggagttgtacatagatattttttttcctctcttgttaaatggacatatcatagagaatggagtttaaagcctttgtggtggctaaaaaaagttttttagggtgtgggctatgttgatggcatagtcatctttgagaacttgatttttgaat

SEQ ID NO: 154300 - DNA, 816 bp, Zea mays
  Clone ID: MRT4577_72302C.1
cattgggtacctcgaggccggccagggtgatcctacctatctccaatcatggcctccaccatcggtaacaacgaccgcctcacccagctcaaggccttcgacgacaccaaggccggcgtcaagggcctcgtcgacgagggcgttaccatcgtcccgcccatctttcatcacctgcctgaccctcacgacgccacctctaacgcccatgccgccatcccggtcatcgatctcgccgccttctcagcaaccaacaacgacgaggcccacgcccaccagcagctggtcgcccaggtcaaggcagccgccgagaccgtcggcttcttccaggtcgtcaaccacggcgtgcccgcggagctgctcccccgcatgctcgcgtcggtgaaaagcttcaacgaggagcccgccgacgagcggcggccctactacaccagggaccaggcgaggcgcgtgaggtacgagagcaacttcgacctcttccactcgcccgccgccaactggcgcgacacggtcttcttcgaggactcggcggcgcccgaggagatgccgccggcctttagggacgtcgtgccggagtacgccaggcaggcgcgggggctggcggcgcagctgctggcgctgctgtcggaggccctgggcctgcacgcgggctacctgcagcgcgacgccggctgcctgggcgggccctcgctcgcctgccactactacccgccgtgcccagagccgtggctcacgctaggcaccaccaggcactccgaccccagcttcctcacggtgctcctgcaggacgccgtgggcggcctgcaggtgctcctcggc

SEQ ID NO: 154301 - DNA, 732 bp, Zea mays
  Clone ID: MRT4577_72303C.1
cgtgccatccgccgtccgggagtatgagtatgggaggcagtgaagcagatatccttgtgtttctggcacgggcgcttgtttccatagtgtaaccatcaatccatgcatatgtgcaggcctaggactgaggtggcgttcgttgcctggctatacttaatgtggttttcgctgtaatattcggtctcatggcaattattcttggatcaacactgctggcgctcggaagtacctgttcagttcctcttttctggtgctatgagataacagcctggggtttggtagtcttatatggtggcacggccttcttcttgagaaggaaagctgcagttgtccttgacgagagcgattactctacccacaatgtgggtctagagatgctggagtccaaaatggaagtgactccagagatgcagcgccgcatcaccgatggtttcaagcagtggatgggttcgtccctcctatcttctgatgacgaggaggaagcctcggatgactacatcgagcgcgatgttcctagcccgactgccttaggtcaacaacaccagcatgagcatgatcgagagacctgactgctgtataaataaatgtacatagagcgtcccacttattcgttgaggtttgatgtagtaagtgccgggttcgggttcgattgctaacaagtgattgcctttgttcttttttcataatagagggattagttagcttcccaaaaaaaaaaaaaaaaaagcggcc

SEQ ID NO: 154302 - DNA, 327 bp, Zea mays
  Clone ID: MRT4577_72304C.1
gtgcgctgcgccgggtcggactgagacgagactatccccccctcccctcaaccggggcgggggaccccatctatcccactgactccacgcaccacccgcccgctgcctccgccggatctcacggactcggatccgcccgaccacaaccaccccgggccgccgccgcgcaatggtcggagctgacagaagatgcacgcactcgggggggggggggccacctcaaagtgcgtggacgagggacacactgcgaagcgctgggacccgatctcagatcccgtctcgcaccccggccttggtgaacacccagagggaccggtgggtgcggag

SEQ ID NO: 154303 - DNA, 427 bp, Zea mays
  unsure (1)..(427): unsure at all n locations
  Clone ID: MRT4577_72305C.1
aaaaaaaaaaaaaaaaaaaaaaaaaaaaaaaaaaaaaaaaaaaaaaaaaaaaaaaaaaaaaaaaaaaaaaaaaattgaaaaattgttaatcgtttgactattcttgggctttttttccccttttggccgttttccctcttgggggcgttttttttgctttttccttccccctgtgcgcccttttgccgcttccttttccagggccctttccctcttttagggggggggttttccttttaatggggcggggttttcacacttccttgtttgggaaacccttgggttttcccattttgtcccctttgcgacctttccccttttgcgcgggggtgtctcttttagcccgcccccccccgttggtctttccaccggggggcgggcctgatcgggnnnttgttttttttttgggggggncnngnaccccgcc

SEQ ID NO: 154304 - DNA, 1707 bp, Zea mays
  Clone ID: MRT4577_72306C.1
gcacgagcatagcagcagcccattgcctgcctttcggcttaccctctctctctctctctcacacacacacacaaccactcacactgccggttggtttcccttccgttgtggttggtgcgtacttagtggcggccggccatggcgcggaggaggggcttctcggcggtggtgccgccggcgtggctgccggcggtgctcctgtgcctggcaggcgcggcgtcgggcgagccgctgccgcagtactacaatgccatcttcagcttcggcgactccttctccgacacgggcaacttcgtcatcatcaactcgggcaagctgcccaacatgcccaagttcccgccgccgtacgcgaggtgctccaacggccgcctcgtgatcgacttcctggccgaggcgttcggtctcccgctgctccctccgtcggcgaacaagggcaccaacttcagccagggcgccaacttcgcggtgatgggcgcgacggcgcttgacctcaagtacttcaaggacaacaacgtgtggagcatcccgcccttcaacacgtccatgggcgtgcagctggagtggttccaggaggtgaagcgcagcatctgccccgacgaccccgccgcgtgccgcgccctgttcgggagggccctgttcgtgttcggcgagttcggcggcaacgactacagcttcgcgtggaaggcggactggtcgctggagaaggtgaagacgatggtgccggcggtggtggcgtcgctggtgggcggcgtggagcggctgctggacgagggcgcccgccacgtcgtggtgccgggcaacctccccgccggatgcatccccatcacgctcaccatgtacccgtccgaggaccgctccgagtacgacccgcgcaccggctgcctcaagaagtacaacagcgtcgcgctctaccacaacgccatgctccgcgtcgcgctcgaccgcctgcagcgccgccgcccggagtcccgcgtcgtctacgccgactactacacgccctacatacagttcgcgcgcacaccgcacctctacggctacaagcgcggcgctctgcgggcttgctgcggcggcggcgggccgtacaactacaacgtgagcgcgtcgtgcgggctccccggcgccaccacctgcgaggaccccgacgcgcacgtcagctgggacggcatccacctcaccgaggcgccctaccgcttcatcgccaacacctgggtcaagggcccctacgcgcacccgccgctcgccaccgtcgtgctcgaggacatggtcgactgatccctcttgcttctgcaggattggtttgccacaagggagtagctgatatgtaacgtgaattccattcgttcatgtccatgtatattgggtactaccggagcggagtaacaaaaaaaaatatatatgttagtcttttctgttttttttttcgtcgtgcacctgtgtgccgtgcagtcgcatagatcaatgaagaaaccactccagctgtttttgatgattggtttaaaaaaaaaaaaaaaaaaaaaaaaaaaaaaaaaaaaaaaaaaaaaaaaaaaaaaaaaaaaaaaaaaaaaaccaaaaaaaaaaaaaaacaagcggccgctttttttttgtcttttttacttttccctttggaaaaaaaccgggaaaggaacgttaaggaagggggctttttctggtttttttgccccccccttttttggaaaaacccggaag

SEQ ID NO: 154305 - DNA, 289 bp, Zea mays
  Clone ID: MRT4577_72307C.1
ggcgacctcaaccagttcctcagtgcccaccagctggaggacaaggcagccgagggggcccctggggacgggcaggctgcgcaggggccaaccatcagctacccaatgctgctgcatgtggcagcccagatcgcctccggcatgcgctatctggccacactcaactttgtacatcgggacctggccacgcggaactgcctagttggggaaaatttcaccatcaaaatcgcagactttggcatgagccggaacctctatgctggggactattaccgtgtgcagggccggg

SEQ ID NO: 154306 - DNA, 311 bp, Zea mays
  unsure (1)..(311): unsure at all n locations
  Clone ID: MRT4577_72308C.1
cggacgcgtgggcggacgcgtgggcccctgaagcccataaaaaagcatggaaagngcngaagggngcaganggngnacncgnnccnggagganncggaganaggggagnccagggcaaaanncnngccgcaaaanangcacgcgagaacaangnnccnnancnnggcannngcngggggggggggangcannganngagnnngcccgnncagagaagaaaccacgaggggccaanagcacggaanncganccagcnacaacaacaccccggggcaacnncaagccggagggcncaaaaacccagaagggag

SEQ ID NO: 154307 - DNA, 223 bp, Zea mays
  Clone ID: MRT4577_72309C.1
gagcacctccaagccaaaaggttgctaggttctttgaaccagcaactgagggttcctcgtcgcatcatcgagaccagtaagcaacggggcggctaatctgaacagggctgctgcgattaacctacaaatcagtttgcttcatgttgcgcaggcttagatctgaatgccggattcttcgtcttacggcttgaatcgagctgggaggtgggggggggggggcacg

SEQ ID NO: 154308 - DNA, 475 bp, Zea mays
  Clone ID: MRT4577_7230C.1
aaaaatggaacataggcggccgtaattaaattaaaataaatccccaaaagggtttcaatttggtttttaaaaaaaaagggggaaaatcctggggtttataaaacaggctaacaaaagggggggtggccccaatcccccaacaaacatttatatattttaaagggtcgggaaccccaccgggcaaccaatgggtggggcgaacacagaagttgggctttgttggtaacccagggccaactttagggaggcaaaagggcccgcgggggtcccccaaatacggggggaagcccgggaaacggccccggggggactggtaagaaacttgggccagttttggcaggggaaccttcggcttcggaccaaaaaaggggcccccccccggggggagggggccgaagccgggatgaaaataccttttttaatctcccacctggccagcttaaaaaagctaatgggggggaccagcgggaaagcc

SEQ ID NO: 154309 - DNA, 207 bp, Zea mays
  Clone ID: MRT4577_72310C.1
gcgaaacccggcagggatgccaggagcccccactgacggagaacgcacagctgcggagaaaatggtcaaaaaacaggcagagaaggaccagaccgatgccgaaacgagcacggcaccagcaatgacgaaaggaacgcggggcccgcccaacggcgcaaaggcaacatgaacatgcctcgaaaattgataaaccggccgcagagggac

SEQ ID NO: 154310 - DNA, 423 bp, Zea mays
  Clone ID: MRT4577_72311C.1
ggggcgggttcttttcttttatttatcccagggagatggctgttaaagacaggggattattaaaaaacacaccgcccattatggggagaggggcatgccatggctgctgcaggacggggtcatggagccccaacccgggtcgccgcttttttttccaccaagcacagggctttgggacaatgccagggggggaacaccctcggaagaaatggcaacccccgaccagccaaaggaagagggcccccaactcgagccggccaaaaaggcgaccccctcctcggggggggcgtcctcctcctcgtccgcgtcggcgggtgatatcccgggccacatcgatgtcggcgggctcataaacccgttggcaggggcgctgcccgaggaccaacacggggcgggggtcaaaacggcccactcggggaccct

SEQ ID NO: 154311 - DNA, 165 bp, Zea mays
  unsure (1)..(165): unsure at all n locations
  Clone ID: MRT4577_72312C.1
cgcgtccgaaccaaaccctcacgacacgacaccaagnctagtagctcgagggcaccaatcatggcctagcatgttctccagcgtcgtcgggctcaaccccgccgcggcagtgcctcatgccgccgccgcctcatcgccggcgaagagggtgcagctggccgcgcc

SEQ ID NO: 154312 - DNA, 1582 bp, Zea mays
  Clone ID: MRT4577_72313C.1
cgcaggcctgccggggcgaaagcatccgatacgctgccggctgcccacccccacccccaccggccaccagtaccactaccactaccaccccgcgaacgaaaacgttcaccgcccccaagctgtttgcgacactccctgctaccagtcacagccgagccgagtagccgaccgattctccctccgcagctccgtttctccgacgcgctcagccgccggctaaccatctcaattctcacgacgtcaccgcctagtcgccctcactgacgacgcggcgccatgcctcctccccaggatggggtcgatgactccgcggcgcgggtcccgctcctcccgccccctgctccgcgccgcgcggccgtgaggctgcacccgctcccgctcctcatcgccgcgacattggcggcctcctaccgcctcctcttcctcgcgcccgcgccatcctactaccagtccctcctcctctccctcggttccaacgacaccgccgccgcccacctgcacgcgctcaccatccgcccccacctagcgggcacgggcgccaacgccctcgccgccgcgcacgtcgccgccacgctctcctcccactccttcccgacccgcctcacgagctactccgtgctcctctcctaccctgcgtaccgctctctctcactctccgcgccggatcgcgacactgtgctcttcgctttgaagcaggaaacctacgcaggcgacccttacgaggcggtctccgccgaggccgtccccaccttcctcgcctacgcggcctccggttcggtctccgctgaggccgtctacgccaactacggccgcgcagaagatttcgcttacctcgccgcccgcggcatcgacgtcaccgggaaggtcgccgtcgcgcgctacggcgaagtgttccgcggcgacatcgtcaggaacgcgcgggatgccggcgccgccgcggcggtgatttactccgacgcgaaggactacgcggccgggaagaccttcccggacggaccgtggatgccgccgacaggcgtgcaggtgggtagcacgttcaagggggtgggggaccccacgacgccgatgtgggcgtcgtcggagggctgcgagcgcctgaccatcgcggaggcgatgagctccgatgacatgccggggataccggcgctgccggtgtcctggaaggatggggagaccatactacagctcatcggcggcgatgtggcgcccgagaattggcaaggaggcgatggcgcggcggcctataggtttgggcctggcccggcagtgctcaatctgacctacacagagttgacttgggacaggggaacttggaaaggacagagaacatcttattttcctatttgttgttttctttgcataggggaatgagacgatggttactattcagaatgtcatttcggtgattgaagggggagaagaacctgaacggtatgtaatccttggaaatcaccgtgatgcatggacatttggggcagttgatccgaacagcgggacagcatccttgcttgagctagctcaacggttgtctgagctgcaaaagaaggctggagacctcgacggaccatcatcttgtgcaact

SEQ ID NO: 154313 - DNA, 204 bp, Zea mays
  Clone ID: MRT4577_72314C.1
tcttcctcccactcgtcctctcttgttgctccaatataattatcttcctcttcgtctctcgcacgtccgatccgtcctcacgtaacactccgatagatggagtcgtccatgtccatgttctcctcctcctcggtcgtcgttaggacatgcgttcctgccgctgtcaagttgcccctcttcccgtcctttactaggcccggttcc

SEQ ID NO: 154314 - DNA, 283 bp, Zea mays
  Clone ID: MRT4577_72315C.1
acttggtattgagactgtacgggaacattcaagggctcaaaaaattgcacttgagaaaaggaaaaaagcgaagcctagggcaggaaaaagctagtaggccactaagaaaaaggtaagcccaagaggaacccaccgggccagggggtaaccttttaacggaagaaaaaaaaaatggggtcgaagggggggccgacaacactatcctctggttcgggggaggattgacaggactcatacaaaaattggtcataacaagggggaacacacaggaaaaaatgaaggg

SEQ ID NO: 154315 - DNA, 342 bp, Zea mays
  Clone ID: MRT4577_72316C.1
gtcagatcttgtagctttatttagtcagggagttaaatagtgttagtacttacctaaaagccaccaagaccactaatttcaagcttaactaactacagctcaagaacttgagcccgcagaagccaattgatgtagagaagtaaaggatatgggtgcacacatctacactcgataattcagcaaaaaaatcgaagttagtaggcataataaaacttataattagatcagatccggatacgaatggctcgagttagggtttcaatgctcggtttcagactgcagagggaagagaaaagggtggacatacctgattggtacggatcgccgacgaacacctggcgt

SEQ ID NO: 154316 - DNA, 456 bp, Zea mays
  Clone ID: MRT4577_72317C.1
atgtctgggttttacgaagttatggagaagaccaacatagaaaagatcaccaatgagatgctggctaggttgtctgaggattcctgcgatagcgatagttttgacgtggagagcgggaatgaagatgtcgaagatcggccgtggaggccgagccatgttgtttttgggaaatcaactgtcaaacaagggcaaatcgaagcgatgaaggacaaatattttcatgatgtttctataacgaaggcaaccggaaaagagcaataccataacaacttcggttgttacagcttcgtgccccgctgtgaggcaaattatcctgtgcctacatttcggaagaagtggccaggctcttggatgaagcaatggtttttcgtgaagaatgatctgcatcacaaagaggatgtgagggacatcattcaacgtcccatatggtcacgtttcggcattaggagtccataa

SEQ ID NO: 154317 - DNA, 177 bp, Zea mays
  Clone ID: MRT4577_72318C.1
ccttcctttgcgagcccggttttccttcttccaattcaattgttccgggcttttttttttttttccttctcctccccccgtccggggccggagatccacggtttccattttccagatcgcagttcattcagttgctctgttacctttacacggtctgcatgcctttattgggtctgc

SEQ ID NO: 154318 - DNA, 160 bp, Zea mays
  Clone ID: MRT4577_72319C.1
cgcatccgagcgaccctatcagagaacctactggggaggagcttatgagcttaactcgcaagacaacgtgagggacagtcaacaccactgctgttgtaaactaacggaggagtcacaatactaatcagaagtaggcattacatgggcaggttgttctcct

SEQ ID NO: 154319 - DNA, 163 bp, Zea mays
  Clone ID: MRT4577_7231C.1
taaaaaaaatgcaccacatcaatctaaccaaaaaaactacaaagtgtaccatggggggcatggggggcctaaactatgatggcacggacaggttccactattaacatcttatatggcgggaaggaagtataatctactgtccgcatttatacaaggtccaagg

SEQ ID NO: 154320 - DNA, 296 bp, Zea mays
  Clone ID: MRT4577_72320C.1
aaaaaaaccccggggccaagggcatccaaggttctaaaaagctgggggggaaaaaaatataaaaatggtttaaaaaaggggggcggcctggtttaaggattttttaaggggcccccatggggccaaaaaaatttaacgttggaaaccctagggctttggtattaagggtttattccgggcaaaaaatggaaccccacgggcctaattaaaagggcctttttgttccaaggggtccaaaggaaattttacctttttcccaaggggtttgggggggggaaatagctttttgtttccta

SEQ ID NO: 154321 - DNA, 337 bp, Zea mays
  Clone ID: MRT4577_72321C.1
gaatacaatcctggaattcaggggccagaaaaatccccccttgtttaaaaaaggagttcaaaactctatgaatgcattttaaaaggtttatttaaatttcaatttttcacaaaagtttctcttaaaaaataagacattatccttagaaaggccctaaggggtcaaaggggctaagatggaggacaaacccgttttttaaaaatttaaaacggttctggggaaaacttaaagtggaagaccatgacttgcttttgatatcagaaactgcctttaaaatataaataaccatcatggatgatctttacaaggaaatctttaaagaccttctcctcctttt

SEQ ID NO: 154322 - DNA, 450 bp, Zea mays
  Clone ID: MRT4577_72322C.1
atggaccccatggtgtttgaggttgctgaattggatggagcagcaatgatttgtcacgctaatagtaaaagaaaaggttatttgttggttttaaatatggtgttcatcgatgatgaaaatgattttttgagcaatagtgcaaggaagaagaatcgaatgagggcaaaggacaaatacaacatggttgcttggagccactgccctttagaaagtgttggagcttttcggatgttagcttatgatgttcatgcggattccatggataagattgtgagaatcgcaaagagcactatgtatgagtccttcaagccttttgtgagagcagtggtcaaggtttttggtgagcgatacttgaggacaaccactattgatgataccgcaagtttatcggatatgaacaacaataggagttggccaagtatgcttggacgcattgactgcatatattga

SEQ ID NO: 154323 - DNA, 261 bp, Zea mays
  Clone ID: MRT4577_72323C.1
caggcactgcgtccctgctgatttgtggtttgaattgggctcggatctctgttggggaccggtaaatatgacttggatgaaccttgatcttgacacaccgcagttgctatctgatccactgcaatgatcttctcaatcgtcgacagatgaatacttgtgacaaatgagatggatgatcatgcacagggagaccgaatcaatgacaacatgtgcctgtatgagcctctatgtagtgaaacatgccaaggcgcatcgacagtg

SEQ ID NO: 154324 - DNA, 156 bp, Zea mays
  Clone ID: MRT4577_72324C.1
gcgagcttcccctgtcagtggtgcttgtgttaccaaataggttccctgtctacacggctgggtgttgtaaaatatcaagagcatgcatagctagtgcagctactgtgcagggaaatgagaatgatgtcgaagagctagagatgtcgctggaggcat

SEQ ID NO: 154325 - DNA, 101 bp, Zea mays
  Clone ID: MRT4577_72325C.1
gagctcgtggtgtcctacccattcgacatgactcgcaccccgtgggctgcccgcgagctcacgcccacacgcgatgatgctgtgtttcgctggctcagcac

SEQ ID NO: 154326 - DNA, 374 bp, Zea mays
  Clone ID: MRT4577_72326C.1
cggacgcgtgggttttttaatgaagaatatatatctgcacttctttggtgacatgtatgttcaattacatatatgtggttggaatgacgatcagacatgtacgtacgcagcagtcgactagtataatggagctggtaggcaagtgcagctgttcgatcgtggtgcgtatcgtagcagcaaagcaaagcaagcagccaatcgatcggggttagtacgtctacgacgtaccgggtttagggtgctgtggtccttgaagcggtcctccaggagcttggactgctccttggtcagcctcagcttcttccgcgtgctcccgtcgtcgtcgtcctcggcgccggcaccggcccgcgcagcggcggtcgtcgacgacgccc

SEQ ID NO: 154327 - DNA, 423 bp, Zea mays
  Clone ID: MRT4577_72327C.1
ggctgacattgttactcacccaaccaattttactttcgcacgtcctaccacttctggccgcggcctaactgaacatggccttactgcaactattaatgctctgctgcctagtcgggcactattccaactaataaagaatcacaccatctatgctgtatcgattaccataccgcttcttcttcgttttatgctccttgcgctgatctgaaatctttgacttcccaccatttatagtcctcatcattgccatcctcaatgacagcaccattattaatatctccaacgacaaagtaaaaccatctacacaaccagacaacttgaagttacctgacatttttccaactggagtaattattggtggatatctgaccatgaacactgtcattatcttctgccctgcatacaacactgacttcttcccac

SEQ ID NO: 154328 - DNA, 777 bp, Zea mays
  Clone ID: MRT4577_72328C.1
atggcgcgcaccaggggcatgcccgcgctcgcgctggtggtggtggccgccgtggccgtcgcgtgcgccgaggcgcggctgccggactaccacccgtcgacgttcacggtgacgggcaaagtgcagtgccaggactgcaccaagaactggaacgcctacgcctacaacgccaagccgatccccggcagcaaggtgagcatcacgtgccgggacgacaggagccgggtggtgtaccacggctcggactacacggacggccagggcatcttcaacatcgaggtgcccagcaaggcgaccaacggctgcgacctcgcgccgtcccgctgcctcgtccgccccgggcctcctcgggcgacgccgcctgcgccgtcttcaccgacttcaaccgcggccagaccggccaggtcccggcccgcctcacgcacgcctcccccaccaaggtcacctacgccgtcggcccgtactactgcaccctgcgccagtgcgacgacgacgtcaagggcgacgacgacgacgcctgctactgatgacgatcccggcagctcggcgctggccaccagtcgaccggcgctcgcaatcgcgttattgtgttcctggtggtttttgcgttcgcgtaatttttcattctttccttttttttccttctccgatttcgaagtctcttttggaaggtggatcgatgcgatgcattactgatctgctctgttcatctgtgtaacgcgcgatcagcatgccggcatggttttagttgaactctgtgaactattcttttgcctc

SEQ ID NO: 154329 - DNA, 303 bp, Zea mays
  Clone ID: MRT4577_72329C.1
caacagcaaccgcccgcgaggaagcataaaggagacgcagcgagtgcacagcgagccagcggcagcacatcagggcgccgcccgcggagaagaacatgcactacttcaacgatatgaaacggggaccgacaacacccgccctatgaaagaggagctgcaagccacgaacgcgttacagctgacgaagaccccgtggctgacccaaacgacaggtgaccgaccaggagggatcaacccaacattgccagggaggggaggataggactcgacattctcaacgacaaatgtagcccagcacctcag

SEQ ID NO: 154330 - DNA, 330 bp, Zea mays
  Clone ID: MRT4577_7232C.1
ccccggaggatgggattcacttaacctttccgatttggcaactgaatcaaggcgtttagccgtcttaccctcgaaaaagaggattgattcatcgttcatagcaataaaaaggtctggctcaaggacaaacatacaatccatccaacatttgggtccatgttaatccaggggggggggggggccttggcttactttttccagtggcccaaaattaaaggggttctgcataggtaataactttgttttttaccatttcattcattccattttttccggttgggagacatgaaacgccggaaatgcaacccaaggcaaatggttggttggatg

SEQ ID NO: 154331 - DNA, 322 bp, Zea mays
  Clone ID: MRT4577_72330C.1
tccacgcgtccgcaagttctgaagaggaggctaagttggcgagcgaagcggaggtccgtcgccgggaggcttgggccggagcatgttcctgacattacaaattagcccctagtcaccggaaggcttggaccggaacatggcaaagcatgtttctattgttaagtttgagatatgctcaagcttagttggtattataaattagcccctagtggttgttgccgccggcaagatgatgatgtattgtttgaggtggagtttgctattatgatgctacaaagaatttgtctcaaggttgagtttgtgatcatgttccctattagtt

SEQ ID NO: 154332 - DNA, 302 bp, Zea mays
  Clone ID: MRT4577_72331C.1
atcaactcccacgaggttgggtcgagtcgcatgaaccaggagggcgccgctcagggtgaaattatcgtcgagaggcgagtgcacatctgtggctccatcgatcagtcggtcctagagaacgtgcacacagtgcacatcgataaatgatatacatcgacaagcaagtgatggagatggatttcgacgtcggcatttactgtagctgcatcgccgtcgtcctcacaatgtggacgggaaggaacgacgtcgaggccgccgcgccgatggaaacttcaaggtcagcacgactagcgcccttgagt

SEQ ID NO: 154333 - DNA, 227 bp, Zea mays
  Clone ID: MRT4577_72332C.1
gggacccaaaaccacgaatccatccatcctcctcctcctccctgccaacgttacgttacgtacaaaactttaaagattttttccgtcctgttgccgtcccggtcccggacccggtatatcatacacgccgtcgtgagccttttcacttgcccccttgagcaagcgagcgagtgatttttccggggccttagggaacaaaaccccaatgcttggtgggaccattccca

SEQ ID NO: 154334 - DNA, 420 bp, Zea mays
  Clone ID: MRT4577_72333C.1
gccggccgggccgggctctaatcaatatggctaaaaaggacgttgctgctaagcccagctcctcatctggcggtaagaaggccaagaagaagtggtctgctaagaaggtcaaggataaggccaataacttggttattctcgacaagcccacctatgaacgtttgttcaaggaagttcctacctacaagcttatctctcaatccgtcttggttgaccgtcttaagcttaacggttctttggctcgtattgctatccgtgaacttgaatctcaaggtttgatcaagcctatttctcgtcaccatgctcaaatcatctacacccgtgctactggtgatgaaaaataaattttctttgctgaaatcataataaaaaaatgtactttttttagcgttgcaaaaaaaaaaaaaaaaaaggccccta

SEQ ID NO: 154335 - DNA, 501 bp, Zea mays
  Clone ID: MRT4577_72334C.1
taaaaaaaaaaaaaaaaaaaaaaaaaaaaaaaaaaaaaaaaaaaaaaaaaaaaaaaaaaaaaaaaaaaaaaaaaaaaaaaaaaaaaaaaaaaaaaaaaaaaaaaaaaaaaaaaaagggggggggcctttttgaggggccccgggtttccccccgcgtgcgtggaaattaatatttcttttttggtccccccagatttaattcttgggcccgttttttcacccgcgcggtgtgggagaaaacccccggggtcccccccttttaccctttttggaacatacccctttttgaagggggggggttatggaaaagggccccccccattatcccttttcaaaagtgttgcccaccctaaggggaaaggggccccccccctggcgcggacttttaagcggggggggtgttggttttacccccagggacccctttccttttgcccgcccctaagcccccgctttttgctttttttccccttcttttctggccgtttccggggttttccc

SEQ ID NO: 154336 - DNA, 386 bp, Zea mays
  Clone ID: MRT4577_72335C.1
gcttctgcttgctctggggggttttagtttagagagagcgagagagatctagtagagtggctagctagggggtcctggaacgaagatgttggcggtgttcagcgggcaggtggtggaggtgcctgcggagctggtggcggcgggcagtcggacgccgtctcccaagacgaaggcgtcgtagctggtggggcgcttcctggccgcctcctagcctgccgtgtccgtgcagcttggtgaccatttcccatatttctattttccataccgaacgccggttcctacccaatccccgataatctctatctctctttttttcttatgtttccaatatttattttcttaaactcagagtcaaatttcaggccttttcaagacaccactggtcc

SEQ ID NO: 154337 - DNA, 181 bp, Zea mays
  Clone ID: MRT4577_72336C.1
gggactcgcgagtggccctaacaaaggcattcaatccaaaccaaccaatccatgtcagcggggcctgttacccgatcccccttgcccgtagagggatagataccgagattactgccgaacacctgctcgcgttccacggtaccgttccgttcaaggccatctacgcctacgttctgggcaa

SEQ ID NO: 154338 - DNA, 195 bp, Zea mays
  Clone ID: MRT4577_72337C.1
tgtaccttacaacaagcgaacaacgccttaccttactccacctggcatgtggctaactccaacttggtcgcttgccctttcctactagcagcaacaaattgctgccatacaaccagttctctttgatgaaaccctgccttgtcgtggcagcaacccatcgttggaggtgccatcttttagattacatatgaaaat

SEQ ID NO: 154339 - DNA, 364 bp, Zea mays
  unsure (1)..(364): unsure at all n locations
  Clone ID: MRT4577_72338C.1
caattattccttgtcgattgaacaatattttacatcatggtacaaaccgaaaaccagcgggcgctcacatgcatccggacacctaaaggtcaccggcggcgcctccctcacttgccggggacgaagttgggggcgtaggcccaagcgttgttgttgacggggaacgatacagagttaggatgctcccaacacgccaggggggctatgttgggattactactccgaatggggttttggatcatgaggaaacaaacaggcaaaacgggggggggcagggccttggttatttccattgactgaaaagnaacggcgtttttaatcctgaaaggagggaacgggttgggcccatttggtattactggac

SEQ ID NO: 154340 - DNA, 561 bp, Zea mays
  unsure (1)..(561): unsure at all n locations
  Clone ID: MRT4577_72339C.1
gtttgtttctgaatgcccatgagctggagctgcaagcaaccaaatcaaccgtcagagctttccatgctgcaggacccctgacatgggagcaagagtcactcctgacaaacctgcgcctctcgctcaacatctngaatgaggagcacttgcttcaatttctgtgcagtggatgaatcccactttatgagaaagaggtcgctgaaacaaacagtgcactgaagtctgaaaaccaggtgctcgggtgcctttcttctctcccgtcaggccatcatattgaaggcatgtctgggttttatagacgctgcaagagttggcccatgattcattgatcatggtgacggataagaccggaagacaccggtacaggaattcaaatgagacgctgaaacttcaaagatgctggaaatttgtccgtatttgacttttgttccggaacttttgatgaggctgtattatagtacctttgtactccgtatagttactggtttactgttgaacggcttaagaaagctaaacagatggaaagggaaactaaattgttttacggcgactagccaactc

SEQ ID NO: 154341 - DNA, 1067 bp, Zea mays
  Clone ID: MRT4577_7233C.1
ggccggaaaaaaaaaaaaaaaaaaaaaaaaaaaaaaaaaaaaaaaaaaaaaaaaaaagaaaaaggagacgaccgcgccggcgccgcccattaatttctccccttctatccgcggccgcctctcctcgctgccgcggcatcttcttctgggtcctggcccgtcctcgtcgcaccattccatggccgattcagccgcgctctccacctccctcccccgctctctggcgtccaggaggcccctctcgtcgcctctccacgccagagcccgggcccgctcccagcgccgctgccggctcggatcgcgctcgctccaccggttgcgtgctcgggcgggaaaggacgacccggaggacctctacgggccctacccctgggaccagcccttggatctcaccgctgggtccgacattcaatgggtgccagaagacagagtcacgctattcacttctgatgggctgatccagattgggggttccttggttcctcgtcgagtttctgcttctgagaagaggcaacggaaactgaagagtggacaaaagttgcgccggtttcaggagagctcttacatggatccaaatcaaagtctttgccttggagcactatttaacatagcagcaacaaatggcctagacatgggcagaagattatgcatctttggcttttgccgttctattgaaatgttaagcgatgtagtggaagatacggtattggagcatggcggtgaggttgtcactgcagagaaggcaagcagtaacggcctccaggagaagctaaccatgtctgtcgcagtaccattgctgtggggcgttcctccagcatcagagaccctccatgtcgcggtgcggagcggtggaggtattgtcgataagatctattggcagtgggacttattctagatgtccagcgttaacaaaattggttccaagatgtatatgtctctctaattttctgcacgcgttgtgcagcaactgtaaacttagtctctacctgtacagacccggtcacccttgtgcatatatataaaagaactttgggatcacaacttaacagaaaaaaaaaaaagcggcc

SEQ ID NO: 154342 - DNA, 1049 bp, Zea mays
  unsure (1)..(1049): unsure at all n locations
  Clone ID: MRT4577_72340C.1
attcggcccgagggaaggatgtgactttgagtcaaagggtaaaagtgataatgagatgtgtgtgttgtattttcattcctcgggacaataatgttatttgtaggtagaagttattgtacatctgttatgtgttttctgcctgatcgtcgtttatgcttgcctcttgaagtaacaggtagcacatggagagcttgaattgaattcaagcttggatatgattggaaaatatttgtattagatcacctagaagggtgattgatgcttgttattggccaagcagacaatnaggtagtcagatgaagattgtnnnnnncaagcatgcttaaancccttcannagaatgcacagntnnttgagcttgaatttggaaaggggatatgccacagttcagagnnnnnnntgaacagaatttctggagcagttcnnnnnnnnnnnnnnnnnnnnnnnntcttgaagccaccaccgtttggattgacatgatctgtggtattctggtgatctcattatagcagacttcatttcttattgtgcttatacagtagtgtagcgggaagagaattcacattgcatgaaatcatgttgatagctaagaggtggaagttgaagtaagccgggaagggtgaggtattgggaactgtggcatttaaagttcagtaagcagcagtaaaatgtagtggtgtggtcgtgtatatatgatgtgcacattttgaactcaggcattctttattgagtgctgctagaattacattgagctccctccacttctgatacttgcctggttttgcgtcaattggatctgtttgtccgtcctcaccactgttatctgnnnnngctaatttgggcattatctatgacagaagaagaacnnnnnnnnnnnnnnnnnnnnnnnnaacagaatgttgttctaagaacnnnnncatattatttcactgaannnnnnnnnnnnnnnnnnnnnnnnnnnnnnnnnnnnnnnnnnnnnnnnnnnnnnnnnnnnnnnnnnnnnnnnnnnnnnnnnnnnnnnnnnnnnnnnnaaacatgagatataatga

SEQ ID NO: 154343 - DNA, 649 bp, Zea mays
  Clone ID: MRT4577_72341C.1
tatttaattgctgccagttgcatagcactataataactgctcttaaatataatattcacctgctaagtactggacttggttgttcatttgcttgagttaggtaatacttgcattatgtatctgctgacacctattgggttattacttattagtaggtgattgatttttgtattactgatgttagaccttgatatgtagtatatcgagagagacttctagtgaggtagtttcatgccatcagcacagggtttcttttgtttgatggcaccatgcacctagaggacactaatcaggcaacagcaacagagctttttagtaccaagtaagttggggtaggatagagttaaaacccggcagaagtcacaaatcaaggtttagagacgtggatagttttttcattcgcttttaattaaggctaatttttagtatatattgcatcttcaagtctattttagtgtcttttttcatcaactttcgaccttcttctacctctgttttcattattatggtgtcttaggatttcactacgtgctaatgcctttgcggaggtctttgttggatatgtccaaaccatttcaatcagtgttgggcaaatttttttgaactggtgctatctctagcctatcatgtatatcatcgttctcgacta

SEQ ID NO: 154344 - DNA, 353 bp, Zea mays
  unsure (1)..(353): unsure at all n locations
  Clone ID: MRT4577_72342C.1
gacccgcggtgggtgctcaagaaatctttcnntggagaaccgtcnnattcgtgacnngccgtcacctacccaccgagcacgcnnccgccgcaaggaaccgtnncaccgccatnnggatgtnnngtctacgcgctttcaaacgacaagggggccgcacccttctttacggctnntcggcgggctaaggggtcgcttccttcaatcnntggtggcnganacctgggcatgtnngttgtcngcnncggtnnggttgggtgttgtggtggccctttaatttnaagtctaagtcccccgttctctcttaattcgtcgcttgtngnnttctggtggtgggtcttgggtagtcccaattt

SEQ ID NO: 154345 - DNA, 347 bp, Zea mays
  Clone ID: MRT4577_72343C.1
taccccctttttcccccttccccaaattttgttttatatgtgccccgaaaagctgtactgcaggtgccagacatgccagggccgaaaggcacacccacgctgggtatgcacccgttatttactgacaccaaataccatgacccgagcaccctaaacgtgggctaaatatttaccacccaggacctaaaaaaaacctttaactgctgcttgctaataaaactttttgcactgttgcgtgaaccactatgtacaagtctgaaccgccccagtatcctcacgacaccgttattccaatgacccgttgcacccttggcatacacggaattcagacttgctactgattcctg

SEQ ID NO: 154346 - DNA, 386 bp, Zea mays
  Clone ID: MRT4577_72344C.1
gccgtcgccgctgcagtgtgcactgccaccgcttgagactgagatggggggtgttttcgaggcggccctccgccatgcctgctcacatcttcccatgcttacgtgtaaaagaaggcgcccatgccagacttggcccgggcacgcccttgtgctaatctgcgaggtccaatgccagtacagtactcccagctgcatccgcagctgctgaaaagaaagcctggacatcaccctgagtttatagactatgtgccatgagtggctatagaacgatgtctttttaattcacaagatatctctcttctaggctggtgctttgcgactataaattaggagattgttccactgtccgtggcatcatttgaacatgttacttcttattgtaccct

SEQ ID NO: 154347 - DNA, 512 bp, Zea mays
  unsure (1)..(512): unsure at all n locations
  Clone ID: MRT4577_72345C.1
gccaaaacancacacaaacacaagacacccagcccnaactgcaagtgctgctaccgcaacacaaaccgccacaatgctcacaaactccacaagcacccctcctacccccatacctctgaccagcggcgcaacaacaatgcgaaggggggggggtccaaccccacaagatccaacaggcccacgcacaacacctctgaccttgaccaccccagcaccttcaacaaccgtcacccctacaacacaagcaacaccaaccgcatcagcctgacacaaaacatcaaggcacaacaacaacaacaactcgacctaggaaacctcgctacctactaccaactacaacaggcacctacatccaaccaaccagctgcacaaaactctgaagcttattgacaacaacaaccaccattcaanccctagctaatgcctaccccccaaaacgcttgcaacaaaccaactggcagcatggaactcagctgcaaagttacaacaatatcaggtaccacgatccacac

SEQ ID NO: 154348 - DNA, 308 bp, Zea mays
  Clone ID: MRT4577_72346C.1
aaaccggtaatttttttttaataaaaaggggggggtatttccaaaaattacccggttttaattgggggccccttgggaattttattttcaaaaaaaccttttttactgttttggtgtccaaaccgaatgttcaaacaagtgtttaaagaattctttcattaaaaggttacaattcttaaaggtacaattaaaaaaccgtgctccaaataaccaacaaatttacattttaactacaattcacattaaaatttgcaacacgaccgagctctaaaaccttctattataactgtcttgaaaaccttttttta

SEQ ID NO: 154349 - DNA, 374 bp, Zea mays
  Clone ID: MRT4577_72347C.1
cgtctgagctatatgcctatgagacagtgggggcactaacctttgtggagaagcaagccggactcgtcaattgccactctgtgctagctgaaacaaacaacggattcacagaccctgcaaaagaacggctctataagggctcggaaaaatctggcgccgcactgtcgacggttattggcacaggcattcttgaccaatacgccattcacgttatgcagtcgcagttcatatcaacaactgacaaaaccatctacatcgcttgtcggcagacgagcgccatgtgcgatccgactccacgactgaacatgcagcaacttctaaagaagaaagacgggctcagcgctatgctatagccagaaatgatgatacacaca

SEQ ID NO: 154350 - DNA, 397 bp, Zea mays
  Clone ID: MRT4577_72348C.1
agcagcccatttttatttcacaaaaggaccagggccaactgccgttttttaaaccacgcaggtacaagaaccgcataccgggttttagccggaaatcttaagggaattcactttaggctttttgggctcctttttgggcaaaaggactgaaacccccccgttttccatggggggggagatttgctcgaacttaacgtttttgggctgcaggaacctgcaaaggaacctcccgttgttccgttccagggggggccagggggccgttttaaccacctggcccttgtggggctcccccttgatctaaaggattttgccgccctgaacctccaccttgacctctttcttttttaaccccgtaatcttaggccttaaacacgcgcccctttggagttttctt

SEQ ID NO: 154351 - DNA, 3027 bp, Zea mays
  Clone ID: MRT4577_72349C.1
atgccgacagttggcgcgccaggtaggggcctgctgcgtgttaacgaacactttcccgttgagttccagatgggtagacttcagcaacctctcgagcccgagacggtgctccgcttcgggagtctcgagttcatgtccctcgacggcagctacgacatggtactgcttccctcgcagcacgacaacaacaacaatccgcggctcgcccggcggcggcgaattcgacgatggcatctccccgtggcggaggaggagcactcgggtcatccccgacaccctcctcgccggagaagacggagacggggcaactgtggccacgcaggaggcagcaccttatcggctgtcggaccagagcgagtcgacgatgccggcactcctccgggggacatgtcgagtgttgtccttgcgcctgagacaacgacgagcgtcgcttccccgcgacgtgccaaccccaagcggactgatgatgccagcaccctcgcaaaggacctgctgggcgttaccctcgtacctgagatgacggtgtgctccgtccctgacgcgacttcaccaccatccatcgaccaagaggtaccgtccgcactccaccctgttccctttcgattcagcttcgatccacctagcgaccccgctgtggcggaggacgaccccgacttcggttgggatttctctggcctcggtaatcccggtgccatgcgggacttcatgtccgcatgtgaccactgcctctctggttgttctgacgatggccacgaccttgacgacgagggttatggcccaagtcgcgaatgtttccacgtcgatcagggagatcacgacgaaggcaaccacctcggtatgccggaggttgacgatccccctaggcccgcatctcgcgttgacatcccgtgggagctagctgtggtcccagtccctgcggaggatcgggacacacagctcgagcaaatccgtgagatacaggccaaggtcgacgaggaagcagggcgacttgtgcagctccgacagaacatcgagcaggagtgggcaggccgaaccctcgccggaggagcctgtcatcgggcccgggacgtccaccgtcgcatcatcgacaacgccagggcagcgctgcccccagccgtcaatgggtctggccaggacctagctgcagcggcgatgctacttcgaaccatgccggagccatccaccaccgagggacggcgtatccagggcaaactcaaggatctcctggaaggtgccgcagttcgacgagccgagagctctgcctcccgaaggcgagctgacccctcagagcatcacgcggcgtcctcccgacgcatgcgggaagcctcagtccatcccgagcgcacgcgggacgaggcacctaccgcccgggattgcctcggcaatgagcatcaccatcgcgaccatcgagcctgcctcgaggagaaggtgcgccgaggctaccatcctaggcgcgaaggacgctgcgacagcgaggaggatcagagtccctcgcccgagccacccggtccacgagtcttcagccgggccatacgacgagcgtcgttccccatccgtttccgagccccgactaccatcaccaagtactcaggggagacgaggccggagttgtggctcgtggactaccgactggcatgccagttgggaggggcggacgatgacaacctcatcatccgtaatctaccccttttcctctccgacgccgcccgggcctggctggagcatctgcctcctgcgcagatctccgactgggacgacctggtcaaggctttcgtgggaaatttccagggcacgtaccaacgcaccgagctgcataacatcaccgactcggacgtcatcggagctttcctcgccggcaccacttgccgagacctggtgagcaaactggggcgcaagactcccaccaaggcgagcgaattgatggacgtcgccaccaagttcgcctcgggtcaggaggtggtcgaggccatctttcggaaagacaagcagcctcagggggagccgaaggaagacgcccccgaggcgtccgcccagcgtggcgcgaagaagaaggccaagaagaaggcgaaagcaaagcgcaacgtcgtcgacgcaaatcttgtcgctgctgccgagcacaggaaccctcgaaagcctcctggaggggccggcgcgttcgacaagatgctcaaggagccatgcccctatcatcagagtcccgtcaagcacacccttgaagaatgtgtcatgctccggcgctacttccataaggccgggcccccggcggaagatggcaagggccaaggcaacaacaagaaggagggcgccaaggaagaggagttcccggagatccacaactgcttaatgatttacggcgggcaggtggcgaacgcctcggctcggcaccgcaagcaggagcgccgggaggtctgctcggtaaaggtggtagcgccagcctacctagactggtccgacaagcctatcacctttgaccgaggtgaccaccccgacttcgtgccaagcccaggaaggtacctgctcgtcgtcgatccgatcatcagcaacgctaggctctccaaggtcctcatggatggaggcagcagcctcaacattatctacgccgagaccctagaatcttgggggttgatcggtccgaggtccgggccggaaaccctcacctttgaggtggtcgggttccgagggacctaccacgcagtgttgggaaggccgtgctacgccaagttcatggtcgtccctaattacacctacctcaagctcaagatgtcaggccccaacgggatcatcaccgtcgggtccacgtaccgccacgcgtacgaatgcgacgtggaatgcgtggagtacgctgaggccctcgccgagtccgaagccctcatcaccgacctggaacgcctctccaaggaggcacccgacgcgaagcggcacgccggcaacttcgaaccagtcgaggcggttaagtacgtctctctcgaccctagcaacgatgccagcaacaaagtccggatcggctccgagctcgaccccaaatag

SEQ ID NO: 154352 - DNA, 1073 bp, Zea mays
  unsure (1)..(1073): unsure at all n locations
  Clone ID: MRT4577_7234C.1
ccgcattgtccagaacattcagcaggagctcacaaaatccaggctgggttcaaaagtttctctcgcatcctatgactcaactgccctgggcaagggacgcaaagtccagatcagaaggctcacagaatggcttggaacccgggatacctgaacatgagtataatgtgacaaggaaccttcagtgggctcatggaaaggcaggggaagatagggtgcatgttgttctatccgaagagcaaggatggctattcattggaatttatgatggatttagtggccctgatgcacctgactttctaatgagcactctatacaaggccattgatagagaactggaaggattgctctgggtttatgaagacagctctgaaaggagtgatcatgtatcgactcatgaagagggtggattggttgctgcttctgtggatgctcctcatgatgatagtggccagtgccagagtgacagtgggagacaagaacttggtaattttggaaaacaaaatgtatcacctggaaagggttgtgatgatagtgccttgcaatttcagccaaactgtaccagcagtgaagagaaagatttggctccacatggttctactagtgagatgttgggcagggatgagatagttgacgaaatggttgaagctgatctcggaaatgatcggcaaagtagagaaccccacagctcaaacagagatctttcaggtacagatctaaacaccagctgcagctgtgcaacagaaaccagttcctattgtgatcagcatgccaaattcttgaaaggaaacagaaaaagcaagcgtctctttgagcttcttcagatggaattgctagaagattataacacaaggttatctaaggagccaccagaggaaagtaaaataccaaacttgcatgttacacaggcagacactgcagaagcgcgctcaagaaacacagctgaggtctccaggtgttcattggcagcaactggagaatgttttgatgattctgaaggtcttggaagttcaagacacgctgtttttgtacttgggctaggtattaaagagtggacagggtgttctatatntaca

SEQ ID NO: 154353 - DNA, 2307 bp, Zea mays
  Clone ID: MRT4577_72351C.1
atgacgagcgtcgcttccccgcaacgtgccagccccaagcggactgatgacgccagcacccttgcaaaggacctgctgggcgttagcctcgtacctgagatgacggtgcgttccgtccccgacgcgacttcaccaccatccatcgaccaagaggtaccgtctgtattccaccctgttccctttcgattcagcttcgatccacctagcgaccctgctttggtgagcgctttcgcaagggcatatccagaccatccggggtaccatatgtggtcaacctgggaccgactgacagccgtctcaacctccggactagcgggttccgaggaagaggacgaccccgacttcggttgggatttctctggcctcggcgatcccgatgccatgtgggacttcatgtccgcatgtgaccactgcctctccggttgctctgacgatagccacagcctcgacgatgagggttatggcccgagtcgcgaatgtttccacgtcgatcagggagataacgacgaaggcagccacctcggcatgccggaggttggcgatccccctgggcccgcatctcgcgttgacatcccgcaggagctagctgtggtcccagtccctgagggggatcaggacacacagctcgagcaaatccgcgagatgcaggccaaggtcgacggggaagcaggccatccaccaccgagggacagcgtatacagggcgaactcaaggatctcctggaaggtgccgcagttcgatgagccgagagctctgcctcccgaaggcgagccgacccctcggagcatcatgcggcgtccccccgacgcatgtgggaggcctcggtccatcccgagcgcacgtgggacgaggcacctgccgcccgggatcgcctcgacgacgagcaacaccgtcgcgaccatcgagcccgcctcgaggagaaggtgcgccgaggctaccaccccaggcgcgggggatgctgcgacaatctctgactgggacgacctagtcaaggctttcgcgggaaatttccaaggcacgtacgtgcgccctaggaactcatgggatctccgaagctgccgccagcagccaggggaatccctccgagagtacatccagcggttttcaaagcagcgcaccgagctacccaacattaccgactcggatgtcatcggggctttccttgccggcaccacttgccgagacctggtgagcaaactggggcgcaagactcccacaaaggcgagcgaattgatgggcgtcgccaccaagttcgcctcgggtcaggaggcggtcgaagccatcttctggaaagacaagcagcctcagggagagccgaaggaagacgtcctcgaggcgtccgcccagcatggcgcgaagaagaaggccaagaagaaggcgcaagcgaagcgcaacgccgctgacgcgaatctcgtcgctgctgccgagcacaggaatcctcggaagcctcctggaggggccagcgcgttcaaaaagatgctcaaggagccatgcccctatcatcagggtcccgtcaagcacacccttgaagaatgtgtcatgctccggcgctactcccataaggccgggcccccggcggaagatggcaagggccaaggcaacaacaagaaggagggcgacaaggaagaggagttcctggaggtccacaactgcttcatgatctacagcgggcaggtggcgaatgcctcagctcggcaccgtaagcaagagcgccgggaggtctgctcggtaaaggtggcagtgccagtctacctagactggtccgacaagcctatcaccttcgaccgaggcgaccaccccgactttgtgccgagcccaggaaggtacccgctcgtcgtcaacccgatcatctgcaatgttaggctctccaaggtcctcatggacggaggcagcagcctcaacatcatctacgccgagaccctggaactcttgggggttgatcggtccgaggtctgggccgagacctaccacacggtgttggggagaccgtgctacgccaagttcatggccgtccccaactacacctacctcaagctcaagatgccgggccccaatgggatcatcaccgtcggatccacgtaccgccacgcgtacgaatgcgacgtggaatgcgtggagtacactgaggccctcgtcgagtccgaggccctcatcgccgacctagaacacctctccaatgaggcgcccgacgcgaagcggcacgccggcaacttcgaaccagctgaggcggttaagtccgtccctctcgaccccagcaacgacgccagcaagaaagtccggatcggctccgagctcgaccccaaatag

SEQ ID NO: 154354 - DNA, 4600 bp, Zea mays
  Clone ID: MRT4577_72352C.1
atgtcgggtgttgtcctcgcgcctgagacaacgatgagcaccgcttccccgcaacgtgccaaccccaggcgaactgacgacgccagcgccctcgcaaaggacctgctgggcgtcaccctcgtacctgagatgacggtgcgctccgacgcaacttcaccaccgtccatcgaccaagaggaacccttggaagcctcctggaggggccggcgcattcgacaagatgctcaaggagtcgtgcccctatcaccagggtcccgtcaagcacacccttgaagaatgtgtcatgctccggcgctacttccataaggccgggcccccggcggaagatggcaagagccaaggcaacaacaagaaggagggcgacaaggaagaggagttcccggagatccacaactgcttcatgatctacggcgggcaggctatgaacgcctcagctcggcaccgcaagcaggagcgccgggaggtctgctcggtgaaggtggcagcgtcagtctacctagactggtccgacaagcctatcactttcgaccgaggcgaccaccccgacttcgtgccaagcccaggaaggtacccgctcgtcgtcgatccgatcatcagcaatgttaggctctccaaggtcctcatggacggaggtagcagcctcaacatcatctacgccgagaccctggaactcttgggggtggatcggtccgaggtccgcgccggtgcggcacctttccacgggatcacacccggaaagcgtatcctgcccctcggacagatcgacttgcccgtctgctttggaactccctccaacttccgaaaggaaatcctcaccttcgaggtggtcgggttccgagggacctaccacgcggtgttgggaagaccgtgctatgccaagttcatggccgtcctcaactacacctacctcaagctcaagatgtcaggccccaacgggatcatcaccgttggatccacgtaccgccatgcgtacgaatgcgacgtggaatgcatggagtatgctgaggccctcaccgagtccgatgccctcatcgccgacctggaacgcctctccaaggaggaagtagtgctcgtcgactttctcctctcaaacgccgaagtttttgcgtggagtccctcggacatgccaggcataccaagggatgtcgccgagcactcactggacatcagagctggagcccgacccgtgaagcagaccctgcatcgttttgacgaagaaaagcgcagggccataggcgaggagatccacaagctactcgcggcagggttcatcaaagaggtattccatcccgaatggttagctaaccctattcttgtaaggaaaaaggatgggaaatggaagatgtgcgtagactacactagtctaaacaaagcatgtccaaaggttccctaccctctgcctcgcatcgatcaaattgtggactccactgctgggtgcgaaaccctgtcgttcctcgatgcctactcaggctatcaccaaatcaagatgaaagagtccgaccagctcgcgacttcttttatcacaccttttggcatgtattgttacactacaatgccatttggttcgaggaatgcaggcgccacctaccagaggtgcatgaaccatgtgttcggagaacacatcggcagaacggtcgaggcttacgttgatgacatcgttgtcaagacaaagaaagcctccgacctcctctctgaccatgaaacgacattcaagtgtctgagagcgaaaggcgtgaaactcaaccccgagaagtgtgtctttggagtcccccgaggcatgctcctagggttcatcgtctccgagcggggcattgaggccaacccggagaaaatcgcggccatcaccaacatgggaccaataaaagatttgagaggagtacagagggtcatgggatgccttgcgactctgagccgtttcatctcatgccttggcgaaaaaggattgcccctgtaccgcctcttaaggaaggccgagcgcttcacttggacccccgaggccgaggaagccctcgaaaacttaaaggcactccttacaaatgcacccatcttggtgccccccgctgcgggagaagccctcttgatctatgtagccgcaaccactcaggtggtcattgccgcggtcatggtcgagagacgagaagaagggcatgcattgctcatccagaggccagtctacttcatcaacgaagtgctatctgagaccaaagtccgctacccgcagattcagacgcggtggaaactgcaacactacttcgagtctcacccggtgactgtggtgtcatcctttcccctgggagagatcatccactcccgaaaggcctcgagtaggatagcgaaatgggcagtggaactcatgggcgaaacactttcattcgcccctcggaaggccataaaatcccaagtcttggccgacttcctggctgagtggactgacacccagttaccgacgactccaatagagcctgagctttggaccatgtacttcgacgggtcgctgatgaaaaccggagcaggtgcaggcttgctcttcatctcacccctcggaaaacatctttgctacgtgattcgccttcattttctggcgtcaaacaacatggccaagtatgaagcattggttaacgggctgcgcatcgccgtcgagctaggagttcggtgcctcgatgctcgtggcgactcgcagcttgtcaataaccaagtcatgaagaactcccactgctacgatcggaagatggaggcctactacgacgaagttcggcgcctggaggacaagttctatgggctggaactcaaccacacaacggttccctcggacgtcttctccaaggatatatatcaaccctccgtcaagatcgacgacacgtccgagataccctcggctaagcccgaggtgccctcggccgccgagggtgaggccctgcgtatcgaggaggagcggaatggggtcacaccggtcctaaactggcagaccctgtacctggaatatctcctccgaggagagctgcccctcgacaaggccgaagctcggcgactggctcgacgcgccaagtcgttcgttttgctgggtgatgaaaaggagctctatcaccacagtccctcgggcatcctccagcgatgcatctccatcgcccaaggacaagagctgttacaagaaatacactcgggggcttgcggccaccatgcagcacctcgagccctcataggaaatgccttccgacaaggtttctactggccaaccacggtggccgacgccactaggattggtctggacctcgtcggtcccttgcagaaggcacccaggggcttctcgcacctattggtcgccatcgacaaattctccaagtggatcgagttcctggacttctgcgaggaccaccacatccgtgtggactgggccgccgtagctcaccccatgacgaatgggcaggtggagcgtgccaacggtatgattttgcagggacttaaacccaggatctacaacgacctcaacaagttcggcaagcggtggatgaaagagctaccttcggtggtctggagtctgaggacgacgccaagccgggccacgggcttcacgccgttctttctagtctatggggctgaggccgtcctccccatggacttagaatacggttccccgaggacgaagacgctcaaacatcaacagggggaggagcggcaccctcggcgtcgtttcgaccctcggtggaatctggcccagcctcagacggtgatgcgagcaggcgcctcggccagccgctccgaagccccagccagccgtcccccgaggatcccagcccggctcacggcttcggcggcttggctccaggattggtcctactcgcgggtgatctggccaaaccccagctaccgctgctgcacctcctcggcctgggaagccacctgctcccgcgccgagaaagcctctgttcaagccgacatcgcctctgtccacgccaccgctgccttcagcttcggctcatcgcagagtagccgaagcatattccccctacaaacgggactccggttcaaatcccgcgggtatgaacaacctccacaccaggggggccgcgggataacaaactccaagcggctcgctgggaccgagaaaggggatattttgaaagggatccttccccgcgaaggaaacgggcccccgagccctcctactgatcaggggttcaaaggttggcccctcggaagggttcgacagccgccccagagcacccgggctccgcgcccattactgatcaggggtccgaaggctggcccctcgaaagggtttcgacagtcgccccagagcactcgggctccgcgcccattactgatcaggggttcgaaggttggcctctcgatagggttcgacagccgccccagaacacgcagagtgagggatgaccctgggtacgtccgatacatggccgagactcgggctacgctcccgaggtaccctaggacatttccgagaccagcgggaacgactcgtaatggaattccactggagggaggcatcgagccctcggaccctgtcgaaaagggtccgggtccagcgaatcacctacaggtacttttggagcgcgcctctgggccactagccgacccctaa

SEQ ID NO: 154355 - DNA, 138 bp, Zea mays
  Clone ID: MRT4577_72353C.1
cgaaacaacgcattactccgtggatcgacagcggataaaatggaccaaaccaaacaactcataaatatagaaactcttatttatcgcttggtttcacttatttatgaaagccacgatccgctcctggagtgcgacgcc

SEQ ID NO: 154356 - DNA, 377 bp, Zea mays
  Clone ID: MRT4577_72354C.1
ggtggtgttggagatgttggaggttataaaactgtttgggctgattcacaaagaccatggtcgaggagttgggggcttttgcaaaacttgggctcctaaataggcgaaaaagtccaaacgatctcaaaaaagtaaggagaaccggtagaccccattgaccttatcctaatgtgcccggtttttccagattgcgccgtgagatgagcccggctgaagggaatgaacctggggggtggagacacaagcgttgcatgggatcagggggggaggtactggataaaagggcgaacactggccataggtaaggtactcaatgtaagaatagagcagatggatatctttacctgtaacataaagggtgtcctgaaagctgtttt

SEQ ID NO: 154357 - DNA, 340 bp, Zea mays
  Clone ID: MRT4577_72355C.1
gagctcacctgtcggcggccgcccttctttttttttttttttttttttttttttttttttttgctctttctcttatttttcattttttttttttcaccaaccaaactgggggaaaaagggttttcaaatttgccaattgcaccataaaacaccccttcggtttcccaaaaaatttggggtggaaactgtgaacaagacttttccagaacttttcggagatttcttttggtttggccacccaaacctgggcctcccctttattacggtgacccttagggcgggctggcctgtccaatgaaaaacccggctacctttgcttcccacatttttcgaccggggg

SEQ ID NO: 154358 - DNA, 298 bp, Zea mays
  Clone ID: MRT4577_72356C.1
cggaaaatcccgggtccgtacccacgcgtgccgattgttgaatgcgagagctcgcaccaactcacccaatccgtctaggtctggcatcgaacttctctgtgtgctactactagatccttaactctcctgatcgtgcctgcagcctcgccaaacaggcctttgctgacgcgatagcccagttggacactgtaggtggcgagccatacaaagacaggaccgtgatcatgcagcttgtccgtgacagcctgactctctggacatccgacatgccggtatgttccctttccatcctaatcct

SEQ ID NO: 154359 - DNA, 1708 bp, Zea mays
  Clone ID: MRT4577_72357C.1
attgggtacctcgaggccggccgggccgggaggatggtgcattgtcacagttgtctaactgtgccctaacacagaccggagcgtcgcggcgctatctcctccgcggctctgcgcgcagtcgtgttggcaactgcagcggggcggcggcgtgcgtccctgctgtgagcttcatcgccccgtatcaagctagtttaggctgtcagcgggccacaacttcagccacacaacccggaactccgacaaccctcgcggctcgtgccgccctctcccgctcggtcgttcccatggatccaccgcaagagttggccgccgccggccgcaagcggcgccggcgaggaggcgtccggaaccgcaaaaggctttcctcgcagaaggggctccctccagcgactgcgcccccaacgccggcgtccccacctgtcaagcggcggcgcaaggacatcgctggacaggccgctgctatgccgaagagaggcaacacctcgagtctactggacaagatgcgtgcaaggttatctggtggccattttagaatgttaaacgagaagctatacacttgcagtggagaggatgcatttgactacttcaaaaacgaccctaatctttttgatgtgtatcatacaggatatcaagagcagatgtcacactggcctgaacagccagtgaatgtaataatcaattggttgaagagtcagaatgcgtcatggactgttgctgattttggctgtggcaatgcagcagttgcaaaaaatctgaagaacaaggttttctccattgatctcgtttcagatgaaccttcagtgattgcttgtgatatggctcatactccattggagccatcctctatagatgttgcaatattttgtctttctttgatgggaatcaactatccaagttatttagaggaagcaaatagggttctcaaaccaagtggttggcttgttattgctgaagtgcgaagtaggctagacccgagcaacggaggtgctgatcctgaaaagttttctaaagccattatccagcttggcttttcgcttgtttcaaaggatgtgaaaaacagaatgttcattctgttctacttcaggaaaaaggaaaaaagtaaggtggcgaagagcatcgattggccacagctgaaaccgtgcttgtacaaacggcgatgagccgcttgtctcgtatccaccagtaatactgtagttgttgtagtagagctcttcaaaagtttcgtcaaaactgaaagtctagatttaggtccctccgtacctgtatggctgcatctgtgtgccacgctattccattattttccacattagctgcgtctttcatttgttggacctcacaagaaaagatcacatagggaacgatgcattgtttggaagcagatcatatataattcaagtctacttttcacatgctgcaaattatgtgtatggtccagcgaacgaacatctggaccgttttcatttttcaatctggaatctggatcagcttgaaggaagtgctatgaccttgaatacttgatgaacggaagcattcgatgaaccttgctaaacgggaagttgaaaagaactttgcaaggacttttggttttcaattgatctccatccccattcgacgttatgggtgaagggatgaaggccgagcggtcgaggcatcaagtgaagttgcggaccattggatgagtcgagtggcgatccgtgagggcaaggag

SEQ ID NO: 154360 - DNA, 335 bp, Zea mays
  Clone ID: MRT4577_72358C.1
cgcgtgtgcggacgcgtgggtgaaaatgacatataatcattctattgttttttgctcagccaatgtaaaaattgtttagtgtttagttcagagtacatattttccacttgccattgtctagacgtattttgtactcaattttacataccctcgcattatttcatattttacatcagcagacagtatgttgctacaattatttcgaattttgcaattcttggaaggcaaacagtatgtggctacaatttaacataccagcaatctgtatgctatgtgtgtaataaccttttgaataggggtaccacatacaatttcacttaatgaatacattttca

SEQ ID NO: 154361 - DNA, 370 bp, Zea mays
  Clone ID: MRT4577_72359C.1
aacaatgaactatccatccacgcgacacgtctaagttgagttggacaaaaactacaacattctcactactaacacaacaaacttttacaaattaattacaatctttacaaattttaacattaacacaactgcaacctaccccccatcttttgaggctagcaagaaattataaaaaatacttgcaactaaaccaaaccaaatttaacactccctcacataccatcaatttatcaaacaaaataatgcactccatacaaaccacccacacctaaattatttcatgaatgatatcattctcctatctcacagtcccccgcccgtatgacacccgccattgctccacatccaatcccctctcatcactcttttc

SEQ ID NO: 154362 - DNA, 1192 bp, Zea mays
  Clone ID: MRT4577_7235C.1
ccggccggggccgcggcatcttcttctgggtcctggcccgtcctcgtcgcaccattccatggccgattcagccgcgctctccacctccctcccccgctctctggcgtccaggaggcccctctcgtcgcctctccacgccagagcccgggcccgctcccagcgccgctgccggctcggatcgcgctcgctccaccggttgcgtgctcgggcgggaaaggacgacccggaggacctctacgggccctacccctgggaccagcccttggatctcaccgctgggtccggtaagctcgctagcggactctcggctgctgcccccgatgcttcggttgcaaattgcaagcggcgggctgtttttgtctcaccttccgctagcgataatgatcatgtactgcgggttgagactttgataattactagtgattgatgcaacgattgctaccttctgctttgcggaaagctaatgatgctgggtaatgggaccacaatttgggagattttatttagttcgcctttggaaagtgttcccttttcctcttctgcgcacagtttccacaccgtctaaaagttcccgatctgtgtgtcctagcagacattcaatgggtgcctgaagacagagtcacgctattcacttctgatgggctgatccagattgggggttccttggttcctcgtcgagtttctgcttctgagaagaggcaacggaaactgaagagtggacaaaagttgcgccggtttcaggagagctcttacatggatccaaatcaaagtctttgccttggagcactatttaacatagcagcaacaaatgtaaaatatttgttacttcttactactttcttaccatatctagactttattttcgtaacaccatttgatatctcagggcctagacatgggcagaagattatgcatctttggcttttgccgttctattgaaatgttaagcgatgtagtggaagatacggtattggagcatggcggtgaggtatgtttccctatttggtgaactatacatgcgcaagaatcttcagtttgaggaactaaatggtgggccttgatcttcccttaatgttttgaagagagaaaaaaaataagagtgcggtacatggtcaatgattactgaaagcatattactttgctagtgaaaagacagtacttgagtaatgaggcataccacaccaagtatggt

SEQ ID NO: 154363 - DNA, 377 bp, Zea mays
  Clone ID: MRT4577_72360C.1
gcggccgggccggggattttcaaacaggggagagagctgcccaccttttcccagaaccagacgacctggcctcgccccagtccagccaccgccagggacttccgtcatcttctcagtttgccggcgccaccgccgccgctgcttctattttttcttttctttcaatctgaatctcgggggaggagaggcaaagggtcggccgcggatgcagaggtgaggtcgatgggagaccagcaaagcagatagaacacggataaccgagagccttgaatcttcctcattattaactttcttcgaatccctcgccctcctctgctctgataagcaccgtgatgccatccatacattgacgggactgcgatcttgcgcacggagat

SEQ ID NO: 154364 - DNA, 358 bp, Zea mays
  Clone ID: MRT4577_72361C.1
gaagggatgggtctatatatagacccacccactccgctttttacaggccgacaccagaccaacggcggccacttccacatggcgggcgggactcccgcctgaaccgacaagaagaaccgccacggcgacatccttgacaagtacatgtacctattctgccgcgtcgacatgctcatggacgagaagaccgtgcaatacctcatgaactccggcatggatccctgaacggagaacaacccgtacctgtgcttcttgtacactagctatcagaagcgcgcgactgacgtgtcgcacagcaacaccgtgctgctcgccagggcgcacagagacgacgtcctgttgcgcgcctgcggcacca

SEQ ID NO: 154365 - DNA, 613 bp, Zea mays
  Clone ID: MRT4577_72362C.1
gccggccggatccacggcaccaccgttccgaggagtactcccgttccgagcacactagtctctcttccctgcgcttgctcgctccttcttgcccccatggcgctgctcgccgtccagggcatggccatgtccaccgccgccgcggccctcccatctcacaaccacggcgccgtctcatcctacgtctccacctcctcctacgcgctcgcagcctccgccgccttcccccgcgcccgggctgcgttcgccgtcggcgccgtcttgtcggccaccgtcactccagttcttgacgtctactgcgggagaggggacaagaaaacgaaaaggggcaaaaggttcaaccattcatatggcaatgcgaggccgcgcaacaagaagaagggaactgggcctgcgcggctctttgcccctcctgctcctccaaggaaggatcagttcgatgatggggagatcatttcaatcgagattgacgaggacatcctggaataggttgtccgagttctgccttgctttatatttgccctgagcttaattggcctagtttgtaccaaatcaaatactacatattttaagtaattatttcctcgccaaaaaaaaaaaaaaaaaaaggccc

SEQ ID NO: 154366 - DNA, 153 bp, Zea mays
  Clone ID: MRT4577_72363C.1
ggacattaccgagctcattgctgctgtcagggagaagtttgcttcagtcgcatgtggcggtgtcgagtgtggctgttgtagcagctgcccctgctgatggcggcgctactgcaactgaggcgaagaaagtatagaaggtgcaggataactaat

SEQ ID NO: 154367 - DNA, 279 bp, Zea mays
  Clone ID: MRT4577_72364C.1
ccgctcgaacggccgttctcacacacgagccatggcgcaccacccctcgctgcttctgctcgggctgctcgagcgcggccggcttgctcacctccgacctgagcctgtgacggaacagcctgggaaccgcacgctgcactggccccacgggccgctgtgtcggggccacctcggacgacccgccggacactgtcatgacggcggcactgcgcgcaatcgtcgcggggcggctgcggactatgtgtgccctgtcggtggcgggctgcgcccatccgctgc

SEQ ID NO: 154368 - DNA, 221 bp, Zea mays
  unsure (1)..(221): unsure at all n locations
  Clone ID: MRT4577_72365C.1
gtacgaagctcggaattcggctcgaggccttctacactgacgctaactgggccgggagcccagacactcggcgctccacctccggctacgccgccccctcagggggcaaccnagannccnggncgccgaagcgccagccggacgaaacccgcacaagagcagaggcggagcaccgagccgnggccaacagcgnggcggaggcaagcaggctcaggcagcac

SEQ ID NO: 154369 - DNA, 195 bp, Zea mays
  Clone ID: MRT4577_72366C.1
actgatgagtttggaaccctaaacggcccactgtgcaggggaaagccgcgcgcttccggccaccgcccaccggggataccgtgacattgttccccttgaccccttcttcattcccgaccccggggcaccaaaatggaagcggtggaagcccatttgatggggcccagttcggattcaccaagtagattcctttaa

SEQ ID NO: 154370 - DNA, 690 bp, Zea mays
  unsure (1)..(690): unsure at all n locations
  Clone ID: MRT4577_72367C.1
tcctcnatattgagctgttgcaaaaagaaatattatcgtctagcatcagtatgatccccctgcagtgctgggcacataatggtgaataagtacgctgacgctgacattctgctcgccgccgccgtgctcgggtgtcttgtctcgttgtcgctcgacgaccagggcaccgacacctactacaccgactacacatccgtaggagggctacgcgaactagcacgacggcacgatgcatcaccacgaccatggacacgatctggaacggcggtgccgggtgcgggacaatgtacacgaacacctgatcaacaccgtgaccaacgagagctcgaacacctgaaacacaggtgcctccgcaaccgtaaatatcgcggaccgctgcccgtatccacggctcggcacgtgattgtctgcctgtctcatgaatgcttgtgcaccattggcagcctcggcgcctcgaacatggttatcgaatacggacagactcaagatatgtacatgtatgtagtgtaaagtcaggacctgctacgtacttccttgcaatagcttcattcaagcttatattattctagggatgagttacgatctactactaaagaacacctcgtgtcgcattaatctcatactacgactatacaatcctactgcctacaagtgatttgcttgatgaaataatgatctagaccatacgaa

SEQ ID NO: 154371 - DNA, 267 bp, Zea mays
  Clone ID: MRT4577_72368C.1
ctccggccgccgcagggagaggagtcgccgccatgtccgcgcatctgcaatggatggtcgttcggaactgctccagtttcttgatcaagaggaataagcagacgtacagcacggagcccaataatcacaaggcccgaaactccttccgctacaacgggctaattcaccgcaagacggtcggagtggagcctgcggctgatggcaaaggggtcgtggtggttatgaaacgcagatccggtcagcgaaaacctgcaacttcctacgtga

SEQ ID NO: 154372 - DNA, 537 bp, Zea mays
  unsure (1)..(537): unsure at all n locations
  Clone ID: MRT4577_72369C.1
agattatatcctttattttactaattccacatgcttaaaatgcacttgtattaagagtatacacatatatagctatctctggctttaatcatttaatgtgaaaaataattatcaactcatcaaaaattagacaagacacactngaaaacagtttaatttttaaataatttcagcaaaacttttaacttttttctttcaattctggtaagagaaatagactgaatccagatttagattatacctcagattaatttttaattcagaataatttttattaggagacaacttttatttttctttcaagggaacaacagctatataagcatttgccaagaatgaattatctttgaagttttatgtatttgaaccagacatggctcagattgatggtcccttgtgataagcttattccttctgcataatcttcaattcaagctaacattactaattaccaaaaaatcaatttaatgtactgctttcataataatacangcaagggaaatattctggaatatatgcagtgtcacttgtgcacca

SEQ ID NO: 154373 - DNA, 463 bp, Zea mays
  Clone ID: MRT4577_7236C.1
ctggtgaggagcatttaactagaactcaaacagtggcttctacatcagcgagctctgaaatttccagcaaagtaaacaagcttgagaatggggttaccaaatcatgtggtggtatgggcaatacgggatcagcagggcctccaatgcagcagctctgcctacgcggtccagaaatccgttctaacatcaatggctttcctgctatgtcaaacgccacgagtcagtatgccgggcaagggttgtttggatcaggcatccctatgacacacgcccaagtgctggggatgttttctggaatgaacggcaaagccaatggctatgtccataggcacccagtggctgctgatagtcttaaaacagcagcacagaacggagatgtcggaaaggcagctgtcaaccctgtgcaaggtgcaggtcatgatccaaagattgccaacggtaatagttctgctcacccaggctt

SEQ ID NO: 154374 - DNA, 632 bp, Zea mays
  Clone ID: MRT4577_72370C.1
cggggcaaacaatgacgataggtgatgtgcgaccgcaggaacaacaagaacaagatcaaccttcttcctctacattggtgcatccccttactcaagatgaggaacaggtacctcaagatgaaggcttggatcaagggggagcacatggagaacatgataaggaggaagaagaaccacaagctcccctaactcaagtctatggcgaccattcaaaagaatcatccagtggattagattatgggtgatatcagcaagagagtaaccactctctcatgtttagctaacttttgtgagcattactcgtttgtttcttctattgagcctttcaggatagaagaagcattgcaggattcggactggttgttggccatgcaggaagagctcaacaacttcaagagaaacaaaatttagagcctggtgtaacaccccaggtgttactgtacgttcaaccgcgaatatgcacttaagcacgagatatcgaagaggatactgacccttatgtcccaatcatcttcgcctatcatgatttcattatcgtatatgttttcatccatctggactctttctaaaaatattcgtgatgatcagaacatatttgttctaaaaattagcaagtcctgtgattatttaaa

SEQ ID NO: 154375 - DNA, 422 bp, Zea mays
  Clone ID: MRT4577_72371C.1
attcggctcgagagcatctggcaaggtctttttccgacccctctcctctccctcccgctagccactacccaattgagcgagccctaagccctagcaggcgaaagccagggcgaccttgggcgttagggccgccatcgccgttcgaattccctccctccgtcctggccgcgacggcagcagggtgctcaccggctagagggtcgggacagggcactacagcgtgcgactcgcgctttcttcgggcacatcagcttttcccagagagttcaaggtcgctgggcttcctgtcgatcgacagcagcatgggcccgggggacgaatatgagtttggactatatactcctaagctgcttgcatatactggagaggattatgtgtttaacccccgcatgccagaccaaggtgagttctccatttttacc

SEQ ID NO: 154376 - DNA, 577 bp, Zea mays
  Clone ID: MRT4577_72372C.1
agcgcaaaatccaaatccatataccttagcagtctagcacacagcaagaacacagggcaaaatcccctaggatatgacgctgacgcgtcacctggagtcctcgactcgtcggtgcaattacgaatgcacctgcaactgcaagtctgcaacctaagcgtagtgctgcagcaaccgctcggcctccctcacaccgctcaggtacgcggcgtgcgtcgtcgagtagtgcgtccggtgcgtcgcctcgccggcgaacagaacgcgaagcggcggcgcgcgggcaacgtcgacgtcggcgtccaaccggcgtggcagcggctctgccatccggtcgaggtcctcgccgctggacccgacgggcacgtaggtgtaggatcccaggaagagctggtccgtggcccacccgctcctcttgatccgcttcaccctccatcgtgacggggccgggaggaaagagtccagcgtggagtggaccccgtggatgacctcgtcgtcggggagagactcgaggtgctcggccttccgcccgggaaccacgccagcgccacgctggagcccgcgtggacgggcagatcgactc

SEQ ID NO: 154377 - DNA, 240 bp, Zea mays
  Clone ID: MRT4577_72373C.1
cccacgcgtccgcccacgcgtccgcaccaattccgacgagaaattaaaagcgctccaacttgatatctatctcaacgccaagatatacataatataaacaacacacaaattccatacagacctcattctgattatcctactcattatgcccactccatacaacacatacaatgcaataccacaattacacacctctatacctcttccactcatactcgacaccatctacaccaatgtata

SEQ ID NO: 154378 - DNA, 1508 bp, Zea mays
  Clone ID: MRT4577_72374C.1
gcaagatcagggccaaggcggtcagggaggactggaggcagaaatccaagcccatccctcctggcgccgtctaccctgccaaggaccactgcaggatcttgagcgacaagtccacgggagaggccggaaggaaggcatggatgaaatgtactttggagtctatgaccaactcttgtatgccaggaagaccgaacctgttgaaggagcccagtggacgggaatagtgacaacaatcgctgtcgagatgctgaaagcaaacatggttgatgctgtgtgatcctgacgacaggcttgctccaagacctgttttggccaggacaccagacgaagtaattgcagccaaaggtgtgaagccaacattatcaccaaatctcaatacacttgccttagtcgaggcagctggtgtaaagcggcttcttttctgcggtgtgggctgtcaagtgcaagctttgagatctgtagaaaagtaccttggtttggaaaagctttatgtgcttggaacaaactgtgttgacaatggtacgcgtgaagggcttgataaattcttgaaagcggcaagcagtgagccagaaactgttatgcattatgaatttatgcaagactataaggtgcatctaaagcatttagatgggcacattgaagaggttccttatttttgcctgccagcaaacgacctggtagatgttattgcaccgtcatgctatagctgctttgactacacaaatggcttggcggatttagtggtggggtatatgggagtaccgaaatatgctggggtctccatgacacagcatcctcagtacattacagtcaggaacgatcgtggacaggagatgctgaacctggtagctggccttctggaaagcacacctacaattagcagtggctccaggcaaccgtttgttatggagacagtgaaagctgacgatgccgcaaaactggggaaaggcccttcgaaaccagctcctagattcgtcggcgacattctggccttcctgctgaacttggttggacccaagggtctggagttcgcacgctactctctggactatcacaccattcggaattatctgcatgttaggcgggcatggggaaagcaaagagctgagcagcacatcccggggtatgccaagaagatcgtggaggcctacgacaaagacggacggatcgaggcaatggttacgcagtcaggtgactgactcacaccattcacactctactagctggtagtatttgtatactagctggtagtatttgtactgcattgtagtaaagattaaggaatgtagaagaattgtttgtgatgtgacgtagtggcgatgtatacagtagaatgtataggctgcatggcagcagctcagatctgtatgtacatcctgcgcttgccagtttctagtttgcatttgcttttctgggcatgccttttgttttaattatattgtctttgataagtccaagataaaagaagccacagagtcccctaaaaaaaaaaaaaaaaaaggccccta

SEQ ID NO: 154379 - DNA, 1218 bp, Zea mays
  Clone ID: MRT4577_72375C.1
cgggcgcgtgggcacccacgccatcagccatcgcgttccgcatcgaaccagcacatcgcaagacaagcagcagcagccaccactgccatcacatggagtacgccgccgtcggctacggctacgggtacgggtacgacgagcgccaggagccggcggagtccgcggacggcggcggcggcggcgacgacgagtacgcgacggtgctgtcggcgccacccaagcggccggcggggcggaccaagttccgggagacgcggcaccccgtgtaccgcggcgtgcggcggcgcgggcccgcggggcgctgggtgtgcgaggtccgcgagcccaacaagaagtcgcgcatctggctcggcaccttcgccacccccgaggccgccgcgcgcgcgcacgacgtggccgcgctggccctgcggggccgcgccgcgtgcctcaacttcgccgactcggcgcgcctgctccaggtcgaccccgccacgctcgccacccccgacgacatccgccgcgccgccatccagctcgccgacgccgcctcgcagcaggatgagactgccgccgttgccgctgacgtggtcgcgccctcgcaggcggacgacgtcgccgccgccgccgccgccgccgcggcgatgtacggcggcggcatggagttcgaccactcgtattgctacgacgacgggatggtgagcgggagcagcgactgctggcaaagcggcgccggcgccggcggatggcatagcatcgtggacggcgacgacgacgacggcgccagcgacatgacgctctggagctactgagctgtagagtctgtctccagcgcaggaggttgggagaggagaccacgctctggagctactactggacagggaagaaagtgggggtgccgggagcgagttcgaatttgaattcagaaactctgtactggcactggcacacgcggggaacgcgccacgcaagggcgagcgctatttccctccctttttgggtgctgggagaataataaaaagaccaacaatgaaggcattagtactacactttgtgcgaacttgaattaggccttgttcgtttgtgccggtttggtgggtcggaacgatttctagtctgattaatttaggtcttattcgtttgtgtcggattggtgggtcggaacgatttctaaccggattacttctctaatttatataaactttattaccggaaaaaaaaaaaaaaaaactatatcat

SEQ ID NO: 154380 - DNA, 495 bp, Zea mays
  Clone ID: MRT4577_72376C.1
agattcttcctctcgctccctcgatcccctcgaaacaaagcctaacgacggagtcgatttatccgctgcaatcatgaataagatgcaagctgactctgctcaggatgatcgtctcgcagattgttgagtatgctcatcgacctccactaagcacctccactgatactgcccttacttacagaattgacctgatgacttctgatccatcgaaagactcgcgtcttcaagggcatgtgttctactgactcgcactatccctgccccgcaagatcaacgagcgcatgtttggagatgccctccatgttgaggcagagcggagacatggtacttgattacctgaatcgtgacgatctcgaaaacatgaacgagaacctctactctgtgaacacggttgctgagatccaccctgctttcttgacatcataggccatctatcggtgtattccccgactcctatgccctggtctcatgagataggtttgataccgagcctga

SEQ ID NO: 154381 - DNA, 1791 bp, Zea mays
  Clone ID: MRT4577_72377C.1
gaccctcgaggccggccgggactcgatcctccgtcttatcaccggtgaggttgaggtgagacgatctccgccaccatggcctccagcacctccctctccctttgcttgcacgcctcgtcgccctcgtcctcgtctcctggactccgccgaccctccctcgcctcctcctcgtcctccaggtccgagagaacgcgcaagatcagggccaaggcggtcagggaggactggaggcagaaatccaagcccatccctcctggcgccgtctaccctgccaaggaccactgcagccgttgtgggctctgcgacacatactacgttgcgcatgtcaagactgcctgtgccttcctgggagacggcatgtcccgtgtcgaggatcttgagcgacaagtccacgggagaggccggaaggaaggcatggatgaaatgtactttggagtctatgaccaactcttgtatgccaggaagaccgaacctgttgaaggagcccagtggacgggaatagtgacaacaatcgctgtcgagatgctgaaagcaaacatggttgatgctgtggtttgtgtacaaagtgatcctgacgacaggctttctccaaggcctgttttggccaggacaccagacgaagtaattgcagccaaaggtgtgaagccaacattatcaccaaatctcaatacacttgccttagtcgaggcagctggtgtaaagcggcttcttttctgcggtgtgggctgtcaagtgcaagctttgagatctgtagaaaagtaccttggtttggaaaagctttatgtgcttggaacaaactgtgttgacaatggtacgcgtgaagggcttgataaattcttgaaagcggcaagcagtgagccagaaactgttatgcattatgaatttatgcaagactacaaggtgcatctaaagcatttagatgggcacattgaagaggttccttatttttgcctgccagcaaacgacctggtagatgttattgcaccgtcatgctatagctgctttgactacacaaatggcttggcggatttagtggtggggtatatgggagtacctaaatatgctggggtctccatgacacagcatcctcagtacattacagtcaggaacgatcgtggacaggagatgctgaacctggtagctggccttctggaaagcacacctacaattagcagtggctccaggcaaccgtttgttatggagacagtgaaagctgacgatgccgcaaaactggggaaaggcccttcgaaaccagctcctagattcgtcggcgacattctggccttcctgctgaacttggttggacccaagggtctggagttcgcacgctactctctggactatcacaccattcggaattatctgcatgttaggcgggcatggggaaagcaaagagctgagcagcacatcccggggtatgccaagaagatcgtggaggcctacgacaaggacggacggatcgaggcaatggttacgcagtcaggtgactgactcacaccattcacactctactagctggtagtatttgtactgcattgtagtaaagattaaggaatgtagaagcattgtttgtaatgtgacgtagtggccatgtatacagtagaatgtataggctgcatggcagcagctcagatctgtatgtacatcctgcgcttgccagtttctagtttgcatttgcttttctgggcatgccttttgttttaattatattgtatttgataaggcaaagataaaagaagccacagagtcctcaaatgttgaaatcggaaaaaaaaaaaaaaaaaagcggcc

SEQ ID NO: 154382 - DNA, 190 bp, Zea mays
  Clone ID: MRT4577_72378C.1
ggccgcttttttttttttttttttcgtccactatgcatattttatacatattagatatatagtgaatactcacatattgacacctctcaaactgatataatacacctagcatttgtggattcgcaccatgcatataatacaatcgcccaaggatgttgagagatagcatgcaacctgctccaatctcact

SEQ ID NO: 154383 - DNA, 1008 bp, Zea mays
  unsure (1)..(1008): unsure at all n locations
  Clone ID: MRT4577_72379C.1
cattgggtacctcgagggccggccgggaaaaaaataaaaaaaaaaaaaaaaaaaaaaaaaaaatattaaaaaaaaaaataaaaaaaaaaaaaaaaaaaaaaaaaaaaaatattaaaaaaaatctagcttggcgtgcgggacaaggtgaagggcatcctggagcgccaggacctcaagagggtccctggccttgggctcatctacaccgagctggtgcagggcataccgccgatattccctcacctcatagagaagatccctacggtccattcgggggtcgtcttcatcaccgtgaagcatctgccgattccgcacgtcgacgtctccgagcgcttcctgttccggcagggggagccgaagcatctcatggtgttccgttgcgtggcccggtacgggtatcttgacacgcttgagatggccagtgagttcgtcaagatcttggtcgagtacctccagtactatatcagggacatcaacctctatgcgttaggtgacccgttgatgagggttagcaattgtagcgctcgtatcgatagcttctctacggagaagccctcgggacgacatgccgtctatgccgaggaaatgctcacaccaattcagtccttttcggagctcacgatgcatccagtcggcatcaacagtgtcctgacgcatctccagacagcaaaactgaacgtggaggagatgatcaagattgaagaagaccaaaagatggtggaacgggaggtagacaatggcgtcgtttatattcttggggagactgaagtggtagccaagcctcactcaaatttgttaaagaagataattgttaactatgtatacagcttcctaaggaaaaattcaaggaatggtgagaagatgctatctattccacgtggccaactactaaaggttggaatagcatatgagatctaggtcttaaaatagctgattatacttgaaagattattattctccgtatagatacatgtaagtatgcttccnagcattgttggtcgtcaaggg

SEQ ID NO: 154384 - DNA, 693 bp, Zea mays
  Clone ID: MRT4577_7237C.1
tctgggaacacatgcgcaggctcggcatcgaacccaacctctacgcgtacacgatcctggcgtcgatctacatcggcaagggcgaccacgccatggcggacgctgttcttcacgacatgctgtcgaagcggatcgcgccgaccgtcgtcaccttcaacgcgataatcagcgcgtgcgcgaggagcggttcgggtgggaacgccttcgagtggttccacaggatgaagacgaagggcattgagccgaatgagatcacgtaccaggtgttgattgaggctcttgtgcaggatgggaagccaagacttgcctatgagatgtacatgaaggcttgcggccagggtcttcagcttcctgcaaagtcgtatgacaccgtgctggaggcgtgtaaggcttatggttccgtagtagatgtagctactctgggtcctcgaccttccaaaggggtggaagtggaacccatcaggatagagaatagcttctccagtctctctcagttcaaggatgtgcatggcagctctcatcgttttgcaggcgttggaatgtatgggttttacggatacagaatggcaaggtaaacaaaccaagcatgtaacctactatcaatccccctctccctcttgtaatcaccctcccaaacccaatgccacattttaaaacatttgacttgtgtatttgtaagctcactaagttgcg

SEQ ID NO: 154385 - DNA, 827 bp, Zea mays
  unsure (1)..(827): unsure at all n locations
  Clone ID: MRT4577_72380C.1
cattgggtacctcgaggccggccggggcgtgacctagacggatctcgcctctccctacagttcgctctctcccccctccatctctctccagtcgtgcgcccctccgctctgcgtggagtttccccgtcgtgcccctgctcatcttcccttggccgcgggcccttgccatgctcgccgagctccctctggtcttctctgctcgccgagattctccctggtgccgcgtcgtgccctcccctcggttttcaacgttgaacgccgccatctttctggtgttctgcgctggccgcagatcgaagctttgctgtgcgcccagtcgagcgatcccctgcgcgcgcgttccctgcacttgccccagccgcgctctggccgtcccagctccactcggcgccccctcggctcgcccccatggtgctggtcgtgtccctcggcgccggtcgcttcttcttgctattccatgccgcggtaatcgccctgctgctccagtgcgcccagccgagcgattctctggtccgtgcgcgcggtatttctcgagcatgccgcgcccagtccctgctccttgtttttctctgcgacgtggagtctcctcgccgcgcggatctctctccttcctaccatgttcggattgtgccgcgcttcctgtcgcgttcggcctgctccggatccgaagttggtcgcctcggtgcgaaatcgncgtcacgtccggggttctgacatgtctccctgctcgncgtcaaacttgggttccctgctcaggctttagcgctagcgcgtcggcgtgatggtacagtctcgccgtgattccctgatggttcgtgtctctgcat

SEQ ID NO: 154386 - DNA, 384 bp, Zea mays
  Clone ID: MRT4577_72381C.1
ttctttttttttttttttttttttttttgtgggtttttttttttggttgggggacaccaccaattgcctgaaacttccattgaaagtgttgccaagagaccccaatggtgggctcacttcccctgttccaaaaaagggcaagggggggggggcttaccaccacaaccattccgaggatttaaccctcctggggggggtcaagcctcaaactcgcccaagaaccaaattttcttataggggttcggggggccccccaagaagggccccccaatatttagagcttggcggtgaaacccagccagttaacctgtcttgggctttagggaccgtccccccccttccttatcctgggtccctagggccaagcgggctagatccacacca

SEQ ID NO: 154387 - DNA, 232 bp, Zea mays
  Clone ID: MRT4577_72382C.1
tactccctatagtgagtcatattaactatgttcagccactcccaggctgtggttgtgtgcccaggctgtcatactgttctgtgccaatctagcggtgggattgccaggctcatcgacgtgtgctccttcggtctcacgggcgattaagtccggcgtctcgtaacgtgagaagacatgaatttgctgttttgcagctttctcaggatatgtattgtagtccgtgaggatcttg

SEQ ID NO: 154388 - DNA, 819 bp, Zea mays
  unsure (1)..(819): unsure at all n locations
  Clone ID: MRT4577_72383C.1
gagctgacaccagacgcgccagggtttcaggcttccacgaatctccccgccgccctcaattcccctcggcgccgccgcctcctcccctcgcttcggtcctcgtctggattgttaaagaatgctacttccattgaagttagttaaccatccaggttctgtcaagatgtctgatagccatgagactgacaggaacattgagatttggaaaattaagaaactgatcaaggcattggaatcagccagaggcaatggcacaagcatgatctctctgatcatgcctccacgtgatcaggttgctcgagtggctaagatgttaggtgatgaatatggtactgcttcgaacatcaagagtagagttaatcgtcaatctgtgttggctgccatcacctcagctcagcagaggttgaagctctacaacaaagtgcctcctaacggattggttctgtacattggaactattgttactgaagacggaaaggaaaagaaagttactattgattttgagccattcaagcctatcaatgtatcactctacctttgtgacaacaagttccacactgaggctttaaatgagctcttggaatctgatgacaagtttgggttcattgttatgggatggtaatggtactctttttggcacactaagtggcaatacccgtgaagtgcttcacaaattcactgttgacctcccnagaagcatggtaanagggaggggcagtctgctctgcgttttgctcccgcttcggatggagaaacgcccatactatgntccgcaaacagctgaactttgctacccagttttttcatcatccagctact

SEQ ID NO: 154389 - DNA, 168 bp, Zea mays
  Clone ID: MRT4577_72384C.1
cgatgtaccgatgagagtcatagtgccatcattctcgagcttcgactcacttcgttgctatccgacctgaggatcaggtcaaacatcattgcatgcgcaggatattcatttaattgctaggtcctcaggcaacatgaaagattattggcggaaaaataatcttcagcc

SEQ ID NO: 154390 - DNA, 2091 bp, Zea mays
  Clone ID: MRT4577_72385C.1
ccggccggggttcaaaagcaggccggccgggagctgacaaccagacgcgccagggtttcaggcttccacgaatctccccgccgccctcaattcccctcggcgccgccgccctcaattcccctcggcgccgccgcctcctcccctcgcttcggtcctcggttagttaaccatccaggttctgtcaagatgtctgatagccatgagactgacaggaacattgagatttggaaaattaagaaactgatcaaggcattggaatcagccagaggcaatggcacaagcatgatctctctaatcatgcctccacgtgatcaggttgctcgagtggctaagatgttaggtgatgaatatggtactgcttcgaacatcaagagtagagttaatcgtcaatctgtgttggctgccatcacctcagctcagcagaggttgaagctctacaacaaagtgcctcctaacggattggttctgtacactggaactattgttactgaagacggaaaggaaaagaaagttactattgattttgagccattcaagcctatcaatgtgtcactctacctttgtgacaacaagttccacactgaggctttaaatgagctcttggaatctgatgacaagtttgggttcattgttatggatggtaatggtactctttttggcacactaagtggcaatacccgtgaagtgcttcacaaattcactgttgacctcccaaagaagcatggtagaggagggcagtctgctctgcgttttgctcggcttcggatggagaaacgccataactatgtccgcaaaacagctgaacttgctacccagtttttcatcaatccagctactagtcagcctaatgttgcaggattgattcttgccggttctgcagattttaagactgagctgagccaatctgacatgtttgatcagcgactccaagccaagatacttaatgtggttgatgtttcgtatggtggcgagaacggtttcaaccaagctattgaattatctgctgagattctagcaaatgtgaaattcattcaagaaaagaagttaattggcaagtattttgaagagatcagtcaggatactgggaaatatgtctttggtgttgatgacactctgaaggctcttgaaatgggtgctgtcgagaccctgattgtgtgggaaaatctggatatcaacagatatgtgatcaagaacagtactactggggaaattattataaaacatctgaacaaagagcaggaagctgaccagagcaatttccgtgacccatctaccaatactgatctcgaagttcaggaaaaaatgtctctcctggaatggtttgccaatgaatacaagaagtttggttgctcgctggagtttgtgaccaacaagtctcaggagggatcccagttctgtagaggatttggtggcattggtggcatgttgcgctaccagctggatatccgttcttttgatgagctttctgatgatgacgatgtgtatgaagactctgactagcaatcagccaatctcatgccagggctggcccatggaaggacgcaacagctcgacctcgccatacctacgcaggagcacacgaaaagcaactatccaaggattaatgggcatgggccagcgtcatcctcttcaagaggagcttaagactaagatgattttgagtcacaatcatgggagtaacgtgacaagaagataccctactatatcacaattattccagtaatgcgtcgagaagataccgttgtttaagtgcacaaaccaatacagtgacgtgccaagaagttaccgtattttaaggatgtttaattttcagtattcgtcggggtagtactgtgtcagaaacttatttgtacctaaaaaggccaaatattgccgttgccttggtgctttatgctatgttatcgtcttttgtgagtctgtgtgctaaggttgttgcttaatgctttgtgactcgcaagctgctactcttgcagtttttgcaacgacgaagctatgatatggagtacaattctgtgtcaaaaaaaaaaaaaaaaaaaaaaaaaaaaaagtactctgcgttgttaccactgcttcgcgccccccccccccccc

SEQ ID NO: 154391 - DNA, 145 bp, Zea mays
  Clone ID: MRT4577_72386C.1
tggagagagctctttttgttgtgcctggacccagcagggggcttccccgcgcagtctcagacattccccccgcccgggcgtggtcatacgctgccctttaccccacggcgctctcccgctctgttttgtccaggcgcgagcgggt

SEQ ID NO: 154392 - DNA, 1531 bp, Zea mays
  Clone ID: MRT4577_72387C.1
attgggtacctcggggccggtcgggatcgcccggcacacccaaaagtttcccactgccctggtcccccattcaattcttccaactccgccgcttcgcctcgttccgtccgccgcccccatggcgtccgccgccgccacgaccacctccgcccccgcccagaacctcaatccccttagtatcaacatcaagctccccccatggctcagcgggctgcgctgccccttcaccttcgtctgcccgcccccgcccccgcctccgcctccgccgccgcctcctcccccgctgccacctacggaacccgtggtcccacggtcgcggaggttaccaagcctgcgggtgaccacggagtacgatagcgaagagggcgtgtttgtgaacaaggtgtcgtgcaagcttgcgggggacctcgccaaactgcggctctccttccagagcgacccgcaggggcagtggcaagggggcggggaggaaggggacccgcttcagcagctcttcgccgcgccgttggtggggttcatcaccaagcgcttctccgtgcactacgacgtcgaggcacgcaacgcgctgctccgcggagactgctcgcttcccggaggagccgtccagctccgtgcctcgcatgatgtcaaggcacaacaaggagaagtttcggtgatcactagtttgggtgatccattgtataaaatggagttatcatctttggtgccctacagtggtttgccaagggcaacattccactttcctattggtcaagtttcagtggaagagaagagaaatgaagatgatgagaaggtgctgtctgtatatgggattggaaaatctgatttcttggacggtgttcttactgctcagtacaatgaaaatgatcttaatctaagatattgttataaggacaaggaattaactttagttccaagtgtctcgttgccttccaatgcagtatccatagacttcaaaaggcgttttggtcctgatgataagttgagctaccgttacatcttcgtcactgatgaatggaatgctgtttataaacataaagtgggtaaaaatttcaaagtgaaagctggttatgattctgaggtgcgagtcggatgggcttctctttgggttggagaagaagggggcaaggcgaagactgcgccaatgaaaacaaaacttcagcttatgcttcaagtaccccaggataatcccagaaatccttattttctcttcaatgtgaagaaacgatgggatctgtaaataggtgtaagttatccatttatgtggactccaaaggcttcggccaaccttttgttgcaatcttcgtaggtcaacagcaacacaatccatgagctctttctatttatcatatattttcaactactgtacgtagttagtacacagcgccccaagtaatccaaaatttatgtaaactctaaccctaaaccctaagtacttgttcgttttgttctctttgttttcagattgagtgggattaagtgagtttcaattctaatcaagtcaaaatctttgataaaaaaaaaaaaaaaa

SEQ ID NO: 154393 - DNA, 274 bp, Zea mays
  Clone ID: MRT4577_72388C.1
atgcggatatgtttcttatctagcctgcaggtccataccattgtcctcctctctctctcactcgagtcgttgcactccacaccatacgcaaactgcagatggaggagcatggcagggctgcagagatcgtcgcagacattcgtgaagttcggctcatcaagcttggtctcggtcaagaggctcacgatgccatacatcgtccatagcaggccatacgacgcggatgcagccacagctttataagagctgaggcattcccgcagcgtttgctccg

SEQ ID NO: 154394 - DNA, 1011 bp, Zea mays
  Clone ID: MRT4577_72389C.1
atggcctcggacatggacacacgctcggcctccttctgctcagccgcctcggcaagcgccttgcagttcttgatggcctcgttaagagccgtctcgaaccctgcaaacagtaggacaacattcttcggacggatgaaggccaagtcacaccagcaaccaaaacaaggaggtacctgcaaaaattatgccacaagcaaggctgagtatactaatactcagctagacttacccgtcatctcgtttccacttattactcaatgcagtacaatggatcaagcagtctcattagctgcgagaagcagacgattcgaatcgagttttaaccttgcaaggtctgtccaggttggacagattcagacttgcgacttcaaaaattcacaactacaggttaagacatccaaacaaattgatcctagactttctggaaagacttatggctgtaaaattttaacacaagtaaggcactgggagtcatcttcaacctcacgaacagcaacagcagggaggctgccggctgcacttggggaagtaaggctcggctccctgctgcatgggtgtcgagctgagggaggaggggcgctcggcctagagctgctgctagaggagggcgccgaagtactcaccaaggtgccatggggagtagacgttcatggatggcgagcagcaaagagacggggcgcggcatggagcagggctccatgggaggctgctgctccgagcaggaggcgaggtggtagagggcagtggcttgctgctgccgtgagggagagggaggacggcgtggggaggaaggtagcagggcaggtgggctgccatttaaagaggcgctcgctgcagccattggtgggctgggcggctactgcagagctcaggtcgcgtcagccagttgcagcaggtggcagagttactttgggtgcccatttttggcattttccttttggaattgaaccttggtggctgcacaaaatatcttccttgatgtatactctacaaatcgtgtatagagattga

SEQ ID NO: 154395 - DNA, 458 bp, Zea mays
  Clone ID: MRT4577_7238C.1
aaacgggaaaaaaaaatagtaaacccatgcgattttacgggggtcacattcacattggtagttcaacatatacagggccataacatttgaaccccgggcgcttacactgggggggttacactccaggaaaaaagggggggtcaagcaataaagcaagcaactgtttgaaacccaaaatgactgttttttactgaaaaaaaaaaagcttacttatgtttcaaggcatagcagggggctcacagccccttggggacaccaaacataacatggggcggtttgcaaatggcctccagggggacagccctcgggagggggattccccccccttgggccatatcgacctcggggccgccgaccgggtcccaatcgaagcactggataaacgtccccagaaccagccccagggtccgcagggggagggcctttccgggggacttccgccttcccataccgaacgg

SEQ ID NO: 154396 - DNA, 348 bp, Zea mays
  Clone ID: MRT4577_72390C.1
atcagtttttgctacgaatcatcagtatggtggcttggaccgggaaacaggtacccgtaacttacctcaaccaccatatcatcaccaatatttgttgataccaagccaacacaatcaagttacaattctaggaaacacaagtcatgctaatgttccctaacagatacatgcccattcccatactgaccatcaggagacttttaaaagctttgactctggcatgactgtatcttcatttcaaggacaaggaggcaatgcaaccatgacaccagttttcgttctggcaactttttcattaccaccctctgtgccaccctatggcgtgctatgtgtacctcagactgctat

SEQ ID NO: 154397 - DNA, 555 bp, Zea mays
  Clone ID: MRT4577_72391C.1
gggaccctcgaggccggccgggagatagcttccccactacgaatacagctgaccctacttccccctctccgagacaccgactgtgactgttctaccgctctccgtcgagctcattgctccctttgcctcgactctgactgctccagaacactctcaccatgtgtcgccccgtgcaatctgcgtaccatcgtgctatccggagcccatgatcacggcataggaaggatggtacccttctaagtccatcttgatcctctaaagtgtgattgacagaccctcttcttttgctttagctgtcgatagaacagcatttgcattctcaatatctggcaagatatctgataaaatacaacttacatctattttttttgaagccatcgacacaactcaggacgttatttgcattgatccccgtacataagactgcgaagattgtgtgaggtataattgatgccgtgtgcgcacgtgccatggaatttcatccactccgatgtcactgtgactacgtcatgtccagatgtccttcagcgaacctccactgctcctctcttactg

SEQ ID NO: 154398 - DNA, 454 bp, Zea mays
  Clone ID: MRT4577_72392C.1
caacggcgggatgaagagtccgcactagcaccagtgatgcctccaccgccggtgttaccagcacctgtgatgccagtggcaagcagtgaccttatggtgggcgctcctgggccgtatgataagctgctgcagccggttcacttgcgaaggggtgctgggcggtcctcagcagtccctaggatttccatgccggatctcgggaggaggtattatgagccaccaccagttatgataactccgttgatgcagctcacacaatatgagctccgtgtgattaattctgtggagtcacagctcggggaaccgttgagggaggatggtccagcacttggcattaattttgatccccttcctcctggcgcctttggtgcaccgattggtatgcatattgaaatctgaagtcgttgtgttttatgaaaaagttttaagctagtgaatgctcaaggtggcctgt

SEQ ID NO: 154399 - DNA, 306 bp, Zea mays
  Clone ID: MRT4577_72393C.1
aacccgcggaggatctcgcgtccgtgattattggcacgggccccgggtttcgcccaagcgcgtgtcgttccagcgcgggacttcaaagatgcatgtaggatgcgcctcacaccattcgagcttcgtattggcacatcaaagaagcggatccatgtgccggtgatttgtcagcgtcactcaagaccatattcatcatgcacaagcttgtgctgcttctactgcaatatgctacactggtccatggtcaatggaatgcactgaacgccttgctaatgttgatacctacacctggcgatgctgttacat

SEQ ID NO: 154400 - DNA, 445 bp, Zea mays
  Clone ID: MRT4577_72394C.1
aaggtcttgcaactgcaattttattttctttcgagaaaataaacaactgggagtttaaattgctccaaaaaccataaaaacaaaaagaaatacacacagaataagcatgtgaggtgatggggaagggaacagggtctctagaactttggcagattgtgctggcacggacccaggtgacaggagccagaccatggggctggtcccgcctgccactctgggattgtgaagggatgatcgccactggcaaggacggggaggaacacagacttcttcgctgaggaagtggcaggcaccttgagtccctttaaatgcgggggttgggaggaaaccatttcagaggaccgctttctccactgaaagctggggctggcgagttcgggcccactgagggaggggacgctggtggcagcaaatcaggccaagatgtcttctcacatggtgatgg

SEQ ID NO: 154401 - DNA, 323 bp, Zea mays
  Clone ID: MRT4577_72395C.1
aatgccacgaatgcacaatgcagcttcacagccgtgtggtaatgcatagactccagatcacgtctgatacaactaaggagctggcaagtcttgcagtaacattgccatgatgatcctatgtatattgccccgcactacaatgaccaagctatcttaagcatggttcaattgatattctaggtcgagcatgaactacttcgatgtgagtcacagactagctatctggagtctgacacggcgaactcaatagagacacaagcacacaacttactaacaatgtgggtctcgtattaagcatactactaatctaactcattgatcag

SEQ ID NO: 154402 - DNA, 271 bp, Zea mays
  Clone ID: MRT4577_72396C.1
ctgaaagggaaggtttaattgtggtagcaatgttcaggttcttcagcagaaattgcaggaacttaatcatgtcctcagatttattttcaaacctgaaggaagtgaaacaattttggcatttgccattagcatgctgcagtagaagatatggggccgcctggtttatgcataaatatggacaattgcggaattgccagatagtttgcatattatctgttgccatgtcaattactcaattattctgatagtttgcatattattctggagtatt

SEQ ID NO: 154403 - DNA, 301 bp, Zea mays
  Clone ID: MRT4577_72397C.1
ggggggttctttttactgtctggggggtttttctcccaaaaaaacttaattttaaacttgtttcaagacaaaatcttatggcttgacgaaaacccattgcccagacaactttttaagtccacggcataagcacccctatggcccgactccccctgatttaaaaccagcaaacaaactcctcgggggcgggaacctcctgcccagcctaatttcccttggcagggcttttaagctttacaccccacctctctttgggggggccctgaccctccatgggcttcccaagaaccaaccggggggc

SEQ ID NO: 154404 - DNA, 222 bp, Zea mays
  unsure (1)..(222): unsure at all n locations
  Clone ID: MRT4577_72398C.1
attaagccttagttttctagcccttgagctctctaaaacctctcgcatctcacccatttcctcttggaactcatctcctcggaggtactcgtcaaaatgttgcgtcgtcgcaatccctccgtggtcgagttcaacagtgactccgatgaaattcaggaggaatctnccattccttctncgcctcatcgctctctctccaagagaggatgaggttcgagtcgg

SEQ ID NO: 154405 - DNA, 293 bp, Zea mays
  unsure (1)..(293): unsure at all n locations
  Clone ID: MRT4577_72399C.1
cgggccgggggtcccgccgcctgaacgccacttcccctgtccggtgccccggttgctgtatttcctctctgccgtctccgtccccgggtcaaatcgaatcgagcccatccatctccatttccgccgccgccgccgccgagagaccccaaccccacccatccaccaccatgtggcgccgcctccacaccctagcccccgccttgcgcagggctacgggggcggccgccggggcccctgcggngtccgnctnctctgtagggcgggccgtattgttttcctcgggggcctggtgc

SEQ ID NO: 154406 - DNA, 309 bp, Zea mays
  unsure (1)..(309): unsure at all n locations
  Clone ID: MRT4577_7239C.1
ttttttttttnnnnnnnnnnnnnnnnnnnnnnnnnnnnnnnntttttttttttttttttttttttttgcacacaccacaatttcttttcttaggatttcagatatgccccactgccacaggggaaaaaacttctgcatatcctaaaaatggatactaactccccatcacattacaattaattacaactggcataagaaaacacattcatgttctaggaaaagaacgaacactatgcattactggcagcggatatcacactcactggttcacatgcagtgtaccactacactaaatcactttgatgcatc

SEQ ID NO: 154407 - DNA, 573 bp, Zea mays
  Clone ID: MRT4577_723C.1
tcgaggccggccgggccgggatttgccgccatcttcgcaagccaccgcaaccgaatgccgccttctgcgccggcgcctctgcgatccccgcaaggtcgcaaacatgtctaccgtgctccagcgcccgacccccggcacggtgcagtgcttgcggtcgcaagaagacggctgaggacgtcgcctacaccaagccggggcgcggactgatcaaggtgaacggcgtcccgattgagctcatcaggtcggagatgctccgcctcaaggccttccagcccatcctgctggctgggcgctccaggttcaaggacatcgacatgaggatccgcgtccgacgcggtggcaagaccgtgcacatctacgccattcgccaagtcgctcccaagggggtcgtcgactactaccagaaatacgtctaccacggcgccaagaaggaggtcaaggacatcttcactcggcactaccgcacccttctcgtctgcgaccccatgctctgcaagccgaacaagatcggtgtatgctccgcccgcgtcaggatccagaactgctaccgttgatctgctcggctgcccgcgc

SEQ ID NO: 154408 - DNA, 192 bp, Zea mays
  Clone ID: MRT4577_72400C.1
ttttcgtccgtacaataatatagaagagggggaagcgtttacacatactgcctcacaatatatatagatagtaattacacaacataaattagcaccacctctaccatttctcacataaccatttaaattcactcactttcttacatcactgtactgaagataccatggccaaatctaccgcatatttttgta

SEQ ID NO: 154409 - DNA, 693 bp, Zea mays
  Clone ID: MRT4577_72401C.1
aaacctacgtctacgtctccgccttgctctatccatccgtcggcgatgcaggccgccgtcgccttgagccagggccaggcgtcccttctcgtccggcggctcccaaggccttactgctacgccggcgggccggagccggatgatggcgtgctgctgctacgacgacgaggcgtgtcgctcccgctcccgcggctgcggctgcggcgcgcctgttgctccgcgagcctacccgtcggtaccggcgccggcgccggcagtgagcatgtccctgtattcccaagacaaaaaacatgggatccttacaagcttcttggtgttgaccatgatgcatctgaagaagagatcaatagtgcaagaaacttcctccttcaacaatacgctgggtatgaagaaaacgaagaggcaattgaaggtgcctatgataagataatgatgaagagctactcacaccgtaagaagtccaaaatcaacctgaaaaggaaattaattaagcaagttgaagaatccccatcatgggttaagtcactgcttggacactttgaggtgccatcgatggatgttgtgtcaaaaagatttgctcttttcggatttattgctgggtggagcatcgcaacttctgctgagactggacctaccttccagcttgcactggcactcgtgtcatgcatatactttctcaacgacaagatgaaa

SEQ ID NO: 154410 - DNA, 330 bp, Zea mays
  unsure (1)..(330): unsure at all n locations
  Clone ID: MRT4577_72402C.1
ctcacacccaganggcaaaacccccgggggcgtttttaaccaattttggtttgtacccccccgggaaccagtaaggtgccatgatgtttgcgacatggatgggagtaaattggcttgccttattatctatgaaaggaaactgttgggatgcacctaccaatagtgccgagtacgcctatgggctgttgagatatcactcaatataccctatggtcttggagtatcgcccaaattgaattttttagatgagctccgacagcatatggaagacaaacctgtgaaacccgatgatatcacagcatatcattctgctgttaaaacaatggcaca

SEQ ID NO: 154411 - DNA, 372 bp, Zea mays
  unsure (1)..(372): unsure at all n locations
  Clone ID: MRT4577_72403C.1
cggccgcgtcgactttttttttttttttttttttgtaaaacacttaatgtatttaaaccatttttctcaatagcttgttaatggtatcttcnacggtttccaaaatctccaccttcaacgtagtgattggtcttcttacgccagcctccagttggggtgtttaatttgaaaggccaaaggaagttcatcgcatacttgaatcgacgatcggctctataaatacaatgaactaaatcttctgtacagatgataccatattttcccaatttcttttcaatcatttcattgttagtgattggaatgcgttggcccttgattttggcaaatcctcttttgtagaccaattctctgtcgacgcggccgcgaattcgg

SEQ ID NO: 154412 - DNA, 844 bp, Zea mays
  Clone ID: MRT4577_72404C.1
gtactgattccccctccacctatctacccgccgccgccacgcccgccgccgacgacgatggcaactaccgcctcaccctccaccacgaccaccccccggtccttcctctcgtcgccttccttctcactcagggcatcgaagtcgaaccacctccggacgacgagaaggctgcccgttaatgtacgctgcgccagtagctctccggccgccgatacatcttacacgacgaaggtttcgcggaatgccaacatagccaagctccaagcaggctatttgtttccggagattgccagaagaagggcagctcatctgctgaagcatcctgacgccaaaattataagtctgggaataggtgacactactgagcccattccggaggtcataacaaatgccatggcagagagagcacatgctttatccacagtggatggctacagtggttatggagctgaacaaggtgaaaagaaactaagggcagcaattgctgcaacctactatgcggatcttggtatcgacgaaactgatatatttgtctctgatggtgccaaatgtgacatttctcgcctacaggttctttttggatctaaagtgaagattgcagttcaagacccatcatatcccgcatatgttgattcaagtgttatcatggggcaaactgacttatatcagcaggatgttcagaagtatggaaatattgaatacatgagatgcagtcctgaaaatggatttttccctgatctttccaggtcccacggacagatatcatattcttttgttcacccaacaatcctactggtgctgctgcatctagggaccagctaacacagttggtcaaattgcaaag

SEQ ID NO: 154413 - DNA, 200 bp, Zea mays
  Clone ID: MRT4577_72405C.1
gcagcaggggagactgggagatagagagaggagagggagggtttcctcaaagagaacctggacccaggcccaagcatagaacactagcgttctctcaccagggcgggcgttcatcccagcagccatggcgatggcgtacaatatggcgactgttgggatgaacgtgaaggaggagtgccatcgctggttcatggagatga

SEQ ID NO: 154414 - DNA, 888 bp, Zea mays
  Clone ID: MRT4577_72406C.1
ttttcaatcatttgttataagaatacagcagcctcgtatacttgttgtcctggattttctgcttcctgttgttgagtattttgtgccttctttaggctcgataactggcagagaggaaagcttagacccgaagaagatcctcttatgagggctgatgatattatacttactgagcatgttttcttgcaaaaagaggattttattcaactatctcctgtaaggcagctaatagttgatggttgtgatattgacgagttcatttatgatggctgtgggggcactgtatccttatgtgaggaatttgataagaaaggacaggtatactctgggattataatcataattggttgtggcaaaagacttcgattcaaaaatgtcaaaattgagaatggtgcactgcttagaagatgtgtatacttgaacatgggaagcagttactcaatttcttctgaagatgatgtagaggtttctgtgttagaaagttctttcacgaatgatgaagactgtttaaaccttgaagaacataaaaagagaaatctgcagaatgccattgatggtcccacaaaccaaatactgaactttacatttgaggctcaggttgtatctccagaatttacattctatgacagttcaaagttatcaatggatgattcgttgcacattgagaagcttcttcgggccaagatggatttcagtttcatgtatgcttcaaaagaaaaagatatatgggctcgatctgtcattaaagaccttacaattgaagctggttctggtcttcttgttcttgaacctgtagatgtttcatggaaatatacttcagtcaatgaaaagacaaacatagtgttggtgtcgacagatgtttgcatccatctttctctgagtgttgct

SEQ ID NO: 154415 - DNA, 365 bp, Zea mays
  Clone ID: MRT4577_72407C.1
cccacgcgttctcagactcttggacagacgcttagatcagctctaatattctatcaatcggggctttggccactttgtgaccaacatgattactcaatcaatcacttgtcagcgggctgcttctttacacgtcttttctggctcgaatcagtcactccttttggactgtaaagcttcattccaggacaggatattgacgattttgatctctagtggtcttccaataatgctctgctagatcggctcagtcaaaaggacttagactctatggtcggtatgggtgcttggatgttgtgataacatacaaatggagtggactttaatggttcctccacaaccctggtggtggcccttacaactggccc

SEQ ID NO: 154416 - DNA, 396 bp, Zea mays
  Clone ID: MRT4577_72408C.1
gaggaaaattaccaagttgacccaaatgcacgctaggctgccacaccgttcaatgaatatgtatcaatcatacaatagaacaccaaggttgactaccggatactcacctactaggcgctctgatcagttcaaccgcaggcgaattattatgatgagcatcgatgaatatatgcaatgacaaaggctcaagctttactggtcagcatagatctacatttgacgctacaagtcctacaggacaaacaacagttgatggaaagaatgtctttcataacgctagatatagattatatcatgagcagtttagtgcattcctggctaatgagacagagctggacgctcataagctgaccagagaggataccgtagcacatgcttattagatcttctgtcctg

SEQ ID NO: 154417 - DNA, 227 bp, Zea mays
  unsure (1)..(227): unsure at all n locations
  Clone ID: MRT4577_72409C.1
ggagggagggccaacngancaacaacccgcannaaaaagggaaggccaccaanccaaaaacgcgaaagcacgggaggaggccgacangcnacagcacacacgcacacacacagaaaaagcngagacggcannacgggcggcgaccaggaaaggacccccccncggcnccagcagaccagcaggaannangcacagcgaacgaaggcgaaaangcgaggacacgcgcc

SEQ ID NO: 154418 - DNA, 277 bp, Zea mays
  Clone ID: MRT4577_7240C.1
caaccattttcaaatgaaccttagaaaagtcttaacatttaaggtattttatgcacagaatacacttagattgataggacagaactcgtaatggagtttgagtaaagaaaatgactgatgtactaaacccagtaaaaattgttgaaaatgttaaaggtcagcatgttctaattgggaatctagatatagcttagatttcctattggcttagagtatttgctataacaaagtagtgcaatgacaattatatattcctactcggtcatactggactggc

SEQ ID NO: 154419 - DNA, 771 bp, Zea mays
  Clone ID: MRT4577_72410C.1
tttttttttttttttttgcgccggaaattccattcatttttagattaatcacttcgatagagcggagacgtagaaaatgtcgatggataggaccaacaagcctgcattcctccatgctaagaacctgaagatgaggaacgtattttccaagagttctgccccaatcttctctgccactactacttatgtccacgccattaaggtagagctctctcagatttgtgaggtttgacaatagtgtctcgaaacttggttcttgtaggaccaaaaggttatagctgtcaaaaagattatacaatgtgtctatttcagcaccatcaatgttatggattgaagaaatatccagcgatatgagactcgggagtttgcctattacaaccggaatgtgtccatagaaacctgcgtaagaaaggttgaggtgtgtgagtaccgaaagcctctcaaagccagccgccggaataggggatccaccgaagtcattcttgctcaggtcgagtcgctggagtgaggtgaggttgaagagcgcgccgtcaagactgtagctgtacaagccacggccaccgaggtcaagaacagtgacatggccggagacactgtcgcatccaacaccctcccagaggcagcagtccgtgcctgcttcccatgaagcaagggtggtggtggagtagtcgaagagaaaggatcgcttgagctggaggagtgctgcagcatggtctggatggcaccaaggagctgtgaggttaccataccaagtggatgaagctagtgatg

SEQ ID NO: 154420 - DNA, 441 bp, Zea mays
  Clone ID: MRT4577_72411C.1
gtgtggggggatattttactatttgggttaaggatattgggtttgggggggggattagttttcaaaggggggggtttaggttaacaatatccaccagaaaacaccgatccacccacaaaacccaaaaaaaaaaacccccaggaacacaacgaaaaaacaaccaaaaaaaaatgaaccaaaccaagccaaaaaacccacaaaacaagcccactcaaaagccacgagaataacaaccacaaaaccccaacagcttaaccagcaaggcaacccaaccgaaaccgacaccatttaccccaaaaaaaaaaacgaaacggaaaaaaaaagcctccaaagacccccttacaaggccggggaccggcaaaagaccccccaatccacataacccgggggccaccagcgtcccacccaaaaaaccaccgtccagaacccaaggggagcctg

SEQ ID NO: 154421 - DNA, 1225 bp, Zea mays
  Clone ID: MRT4577_72412C.1
ggcacacgcgcccccttagacattcggaattaccgagtcgaagtgcgctgtggcctgtggactctcccctccccaactccggcgaagggagcagaaacgttggcgtgttggttgggtggcgtcggcatggacgaggcaacgaagaagaatgtggaggctacggtgctggagatcctccggggctccgatatggagtccgtgacggagtacaaggtccgcgccgctgccagcgaccgcctcggcatcgacctctccatacccgaccgcaagctcttcgtccgcggcgtcgttgaggaatacctactttcactctcctccaaggaggaggcgaaggcggaggaggagggcgtcactggcagggagagcaagggcaaggaacacgaagaggaggacgaagaggatgacgatgaggaggaggatgaaggtaagggtggcgggaagagagagtacgatgaccaaggtgaccttatcctgtgccgcctttcgagcaagaggagggtgactttatcggagtttaagggcaggtcgttggtgtccatccgcgagttctacgtgaaggacggcaaggagatgccctccgccaaaggtatcagtatgactttggagcagtgggaagcattttgcaatgctgtacctgcaatagaggatgccatcaaaaagcttgaagattcagactgaactggttttaagagcctcttcttatgcccgtgtcaaatgaaaaagcctgggaagcatttcgcaatgctgtatctgcaatagatgatgcatgaaaaagcttgaagattcagacagaactggtttaggagcctcttattttgcctgtatcaaataaaaaagcctatttctgacccttaacgagggccatatatgtgtcttgcaagagctaagttctgtaaaagatttctacatgtaccatgtgtaggagttaggatagagtgatagacgtactgctgcatacagttcggaatatttgctagtaacaagtaatctaccattaggtggcctggagttcacatgctatgctatgtgatgatcggggatgtgtcctagcaatagcaagctcatgaagttgtttccccccccctttttttttctgagaatatagggttagtttgacaacctcatttcctcagggatttctattttctcaaggatctttttttttaaaaagttgccaagcccaaactagcctttacatgtttaaaaaaaaaaaacccccaacgcc

SEQ ID NO: 154422 - DNA, 546 bp, Zea mays
  Clone ID: MRT4577_72413C.1
cgacgaaacggttcaggagagcctcggtgtccgcaaggtatagcagtcctacgtgctcgatcgtgcatgcacgcacagttttttttttttttttctctctctctttttcttgaggaaacaaaagccaagattttcagtaaatttggtatcgaacacacactgaacatccctgcaacttttgttgttaagaggttgtttgtttaggactataatctgtctagattatataatccaacaaataatgtgttatttgctggattatataatctggacagattatattctcaaacaaacacccgctaattcttccaggggacaatcggagcgtggaaacgatgcaaccaggacatactttacaaccagaacgtccaaagtgtagtgccgtaccattcgaggctagccgcgaaagggtacagggcgctgatatacaggtaacttaactagtagcgatcgagcccaggaaagcaggtcgcaaaatttaccgcgtagtcgttcgaataatacgttgatatgatggtagcaatacagtatctgcaaactggttgg

SEQ ID NO: 154423 - DNA, 597 bp, Zea mays
  Clone ID: MRT4577_72414C.1
ctcataaacgagtcctgcatacatccattcgccgccgccgccgccgccatctcctcccactctcttcccactccgacgaaaccctattcagtatccatctctccatccatggcgtggcgcggccccgccacccgggccgtcctcgccgccgtccgccgcccggcagcggccgcgcgcctccacgccccgcgccgccgcgtcccgcccgccttcgccaccacctcctccccgctcccgtccgcgcggcctctggcggcgttgatggggtccccggtgacggcggccgccgtgatggcgcgtctcacggcgcatcccggagccagtgcgcgcgcgtgctgcgagctttcccaggggagtgggaaagatggttgatgctggaggctgcccaacttgatggggaccttccgtcctagaatgatgatgtacttgaatctggtgtgtagatcccatcctttccaaaggataaatgatgtgtcttttgcgggaataaaagctattatggcatttcttccacagcagagttcgaaagaattacccaacaatagctagcttcctcgttaggatttccagaagacttaataatgttaccgttacctg

SEQ ID NO: 154424 - DNA, 935 bp, Zea mays
  Clone ID: MRT4577_72415C.1
cgacgaaacggttcaggagagcctcggtgtccgcaaggtatagcagtcctacgtgctcgatcgtgcatgcacgcacagttttttttttttttttctctctctctttttcttgaggaaacaaaagccaagattttcagtaaatttggtatcgaacacacactgaacatccctgcaacttttgttgttaagaggttgtttgtttaggactataatctgtctagattatataatccaacaaataatgtgttatttgctggattatataatctggacagattatattctcaaacaaacacccgctaattcttccaggggacaatcggagcgtggaaacgatgcaaccaggacatactttacaaccagaacgtccaaagtgtagtgccgtaccattcgaggctagccgcgaaagggtacagggcgctgatatacagcggcgatcacgatcgtatcgtacccttcgttggcacacaagcatggattaggtatctcaacttgaccgttgtagatgactggcgaccatggtatgttggtggccaagttgccggattcacaaggaactcaggcaacctaacatatgcaactgtgaagggcgctgggcatactgcaccggagtacaagcccacggagtgccaaacgatgtttaggaaatgggtttcacgggatcctctctgatattacgtcgtctgagagaattacgtacgtgtcgctcctatgagtgtaggccggacgtacgtggtatgccctactgcaggccggagatcaaaataaaggagattttccattttcatgtagaaaaaatgagtgtccatggtgtctacttgttccctgtattaaaaataaatgcaatttttatactgcatgtaagggtaacttaactagtagcgatcgagcccaggaaagcaggtcgcaaaatttaccgcgtagtcgcttcgaat

SEQ ID NO: 154425 - DNA, 314 bp, Zea mays
  Clone ID: MRT4577_72416C.1
gcggcgctgccgcgcccgtcgccgtcgcgggcggagctagacaactttctgtaccgctacttcggggaccccgggtccgatcatagaggcggacgtaccaccggatttcgagacccgagccgcgcggtttcctgcccaacgttcacagaccaaaggcgcggacgtgggcgctggaggtgcacgcgctgaggaagcgcctggcgcggaaggtggcgcccgacgtcgcggctcggactgaccggcacacactgatgccgctacccggcaaggccgaagggccgggatacaagttccggcaggcatactactgggac

SEQ ID NO: 154426 - DNA, 221 bp, Zea mays
  Clone ID: MRT4577_72417C.1
ggggggacccccaccccctgcggtttttttggaaaaaattccagggcaaaacaaaaagaactggccttgggggggcgggcccccctacccgggacaggggaagataaaaaaccccccctccatttaaaaccaaagggcttttcagtttacagggaaccccccctcccaggaaactgaataaggatttgccccttatggagacactgggctcggacccccgg

SEQ ID NO: 154427 - DNA, 459 bp, Zea mays
  Clone ID: MRT4577_72418C.1
cgcacgcgttcgcccactcatccgcgcgactgcgtactcatctaatacactgttctcgaggctccaaaggagccactcttctagtggtgcggctgaaaaacatcctttagatgagaccatgcgagatgcagcgacggatttttacatagacgttgagtaagggccactatggaagatactatatggattatctctcagattacgagatgagaggcttgaaaaatcgtcagggaccatgcataaaagatcactagggtggccgctgtaactatagacaagcacatcttcggccgctagccacattgtgggacacatatagcgtgatttgaatgatgatcagtagacactgagttcactctgcagcatatggaaaaccttatggagagcctacttaatggctgtgcgtctcatatcttattagaaagatcgcttaatatgtataatgcccgccccggtaat

SEQ ID NO: 154428 - DNA, 293 bp, Zea mays
  Clone ID: MRT4577_72419C.1
aggatctgcttcaactaagcccaagcactactctccagacctccaccaaggagatggaccccatccttctcaggaacttgaagcactaactgaatgtcattatcaggagctgccaagctgagccacacgattgatatcttgcgctcgcttgctgcgacaaattcatctatagcatcgctcgcgtctcatgtgtgatcttaatatacacatccgtgctattcaaggacatccattaactgctgctgaactggtcttatcttgtctgtgcccctatatggacctttttacactat

SEQ ID NO: 154429 - DNA, 289 bp, Zea mays
  Clone ID: MRT4577_7241C.1
cggacggtgggacgccatcagcagctagcgcggtcgtcgagcccagcagagaaaggccccccgccctaacggtaatagccatggggtccaccgccggagacgaggccgcggtggtggacgaggaggcgtgcatgtaggggatgcagctggcgtcgtggtccatggtggccatgacgctgaagaacgccatggagctgggcgtgctggaggtgctggagaaggaggccggcagcgggaaggcggcgctggcggccgacgaggtggtggcgcggatggcgtgcgcgccgag

SEQ ID NO: 154430 - DNA, 419 bp, Zea mays
  Clone ID: MRT4577_72420C.1
gggccgacccacgcgttcggaaaaaacaactacagccatatctatactttttccgctactagtttcagcagctccggaacgcgggcgatggttgctcctacgggatcttgaattcttgacacacacacacaccgatggtaatggtgatggagggaggaaggacggaaggcgacgagctgattgctgattatgtggattgccttatgtctctggacaccaacacccggcctgtccacagcgatggtctcatcctcggtgctccaggcgggggaggagggacggtcgatgccggaactgagccagatgccatgagagatatcccctcatccgaagaccccaatgagcccgtgctcggcatgacgtttgagtccgatgaagccgccaaggcattttacaacgactatgccaagcggcttggc

SEQ ID NO: 154431 - DNA, 411 bp, Zea mays
  unsure (1)..(411): unsure at all n locations
  Clone ID: MRT4577_72421C.1
acgggccgggaaanccggggaggaccaacgcgtccgccaacgcgacggcaacccgccaggacaacaagacaactggttacccggaagctcaagctcggggctcccaggtacaggcaggccagcctcaacaaggagcgagcgagcgggggcaacgggaagggggggggcggggccctccaccggggggcaggcacaccggacggggccaagcaccgggcccggggacaacaacaacggctccaactcgggggggcgggcaaggcgggggggggggcggccccggggacggccgcggccgccgacccgaataaggggcaacgggaaacccggaagggggcgagagcggccaacggggggggagccccgcaacaaaaaaggcggaaggcggcaaaacaagcaaagggggaggga

SEQ ID NO: 154432 - DNA, 277 bp, Zea mays
  Clone ID: MRT4577_72422C.1
cggacgctggggggccacaaaaaggaaaggcagacaaaaattatagggaacactggagtgaaagggcatctatggatgaacatcacgctgaatttctgaacgtttgtcaacttggatgaacataagctgtagcagccagatgagtaacactcgggactgattaaggggagctattaatgcgcgtgtatttatatgataccacttagagaaagaagcataaagatatatctggtacgggtagcaaagcacatagaattgacaagattgttctatgcct

SEQ ID NO: 154433 - DNA, 329 bp, Zea mays
  unsure (1)..(329): unsure at all n locations
  Clone ID: MRT4577_72423C.1
tgtcagcgacgactcgatcgctcacatagcgacgcacgccacttctcacaacattcagccaagnactcngacctccgcttcaagatncanacctctctgncaacctcnactggcnatactatcaccctcgaagttgagtcgtctgacaccattgacaacgttaacgccaacgattcagaccacgaatgcgatccgcccataccagcatcgactcatcttcgctggcaaacagcttgaggatcagcgcacgcttgctgactacaacatccaganagagagcacactccaacttgtgctccgcctcagcggaggcatgcagatcttcgtga

SEQ ID NO: 154434 - DNA, 401 bp, Zea mays
  Clone ID: MRT4577_72424C.1
ttttgtttttttttttttttttgttaacaacacagggggggggttattaaaaagtgcgcgattcaaggacattagaaatgtctaatcctcaattgtcctagaggccaggaggcatgttgatccttggtggagtgaaacaacaccgccatgtacagttcaaagacattttttcggacctactctgacaccaccggattgactaaaaaaaaaatttatggtgcaaacatttgcccaaagatttcaaaattctgacgcaatgaaactcggggccagtgtcttgcaagggagacactcatctgcaaatttgcgatacaagattaatccctatgaaccccccttgttcttgacggaaagtggcaccacttcatgtcttactcaggcccatgttgcaacattttgac

SEQ ID NO: 154435 - DNA, 453 bp, Zea mays
  Clone ID: MRT4577_72425C.1
agaaaagagcttacctatttttgggaaccacacatacaatcatacaaaaaactttattgtgggacactatcacccataccgaaatctaaaagagggcaccaccacccatgggccggtggtagaacactgttaggtttgtgaaaccacgttagaaaaatggcagccattggtgcaaatgcaaaagggcgtcagcgttccgctcaccgggccaggggaacggcaacagctggggttgctactagaaggcaaaaggctcacaccaggtactaggctgaatggttacacatgttgcttctgtaaataaatgggagagttcactgctgccattgggtggaatggaaaaaaatgctggcggtaggcatcatgtatctgcctgaatggaatccgttgtaattgcaaataagaaccccaggtaaatgcctctagttcggtgtaatggaataaactgccgtt

SEQ ID NO: 154436 - DNA, 385 bp, Zea mays
  Clone ID: MRT4577_72426C.1
ccgacacatagtgaggctactcctaggcatctaatctatcgagattgtacatggcgagggacgtatggaagctgatatagctgatagtgatcaagaacaacttcttgctggtgtatcactcaggcaacatcgatgccaacgacaatcaataccaacgagcgtataaactgtacagtgtacactcgtactgatactatgcataagcacacaaagaagctgtaacgaatcatctaggttgatgcaaggaatggcattgggagcactatactaacaatacctagatgcacagcaggcgatcaatgtagaaccacaagtataatatggacaagtagtaaatcatgatggacactgggagcaacaaccaaatctgctacaactattacag

SEQ ID NO: 154437 - DNA, 288 bp, Zea mays
  Clone ID: MRT4577_72427C.1
tttattttttttcatttttttttcctttttaatagaaacacattgaataatggttggagcgcagtaagacaagtatggagcttctctagtacaaaacaggttttggcgccgtcaatgccaaataaccatggtttcaggctgttaactagtcgtctaagatgtatttaaccatcaccatgggtcatgtccacagtgacacttcgataccgtatttgatgtcatctgaggtgctggtagaatccaccgatgcccacctattacggtgccattatggcaacatatggaact

SEQ ID NO: 154438 - DNA, 283 bp, Zea mays
  Clone ID: MRT4577_72428C.1
ggactggagaaagtcagtatggaaataaatttcactgagatccagaaagtagcaatataggacttttaggggtatgtattagtgtaaataatatatgtgcagtctaggctaatcattttaattaaaaacaaataagcatacttttttgctttaaaaatatgccctcaaaatggtggggataaaatgtaagatattctgtagctttaattatttttccatcttattcaagtcagagcacttttttttaaatagcaatacaacaggcaagagaatactcaaaaat

SEQ ID NO: 154439 - DNA, 542 bp, Zea mays
  unsure (1)..(542): unsure at all n locations
  Clone ID: MRT4577_72429C.1
ggcaatcaganaagcgctgcacgtatgcaaaggtatcttggtctcactattgcttggatgctagacgctccacactgcgcaaattcccgctctcgttggcgtagacggcacacctcttgggctggcttgacgatgcgaccagccagtgctgcctgcttcctgggcctggggctcctcttggaggggtacctcaggtactacaaggcggcttctctgccgcaagggtgtgaactctgaagctaaagacctgataaagatcaagaacttcctgatggatcctgatgacgcactcaagaacaaggacctatactatgccacatactttctgctggacaatctgagcttgatgtacgaagcaccttgcaacatgatcaaaatggccaaagaacaaactgctgttgtaaaatctctgcagaatagggaatgtgcaccaacaagacacacatcttgatgataaaaacagcataaaatgagtcatctcagtcgagctagaacaactgagaagactaagcaaccttgaattgcccaccagacacttttat

SEQ ID NO: 154440 - DNA, 551 bp, Zea mays
  Clone ID: MRT4577_7242C.1
catccactccattgcaggcccagacgcaccagggttcttaggactagtttgggagtcataaatacttggcagcgacgcctttatgcgtcaagcacggcgtaatcccacggcccggcccggtcccggcgtggcggcgtcggccacgaccacgactagtctcccccgtggtcgtgagaccctggttccgccacgtcagcggcgagatgctcttcatctggggcggccacgtggctttcctgttgtgtgcgggcgatatcgtagcttcgggtaattgataacgacagggagcggaggacgagtgaatgctgatggcaacaggcaacggacaagccgctcgtctagtcgtcgtgttcacgcttctgccggccactgctccgttaagttttctgaaaaaaaaagagcagacgctgatttcttgatgaacaaaaaaaatcctgactggcatacgcaccgcagagtcgtggtcacggaggcggagatcccagatctggtcggcgagcgagccggcaaaatccggcaggcggcttcgcttcgctttgcttccgtggatc

SEQ ID NO: 154441 - DNA, 126 bp, Zea mays
  Clone ID: MRT4577_72430C.1
cgacgttgttaaatagtggccacccattggcgcgttctcttcgctatccgtgggttgcccaaccttcaaaagcccttccaaaccccccgtttccaaacctttttaaaagttcccggcggcttcttc

SEQ ID NO: 154442 - DNA, 611 bp, Zea mays
  Clone ID: MRT4577_72431C.1
caacacatccgctgtcgtcttatccacttgctccagcaaatactacaataaaaaaccaaatatgtctaacattggtatcaacggatttggccgtattggccgattggttttaagagcttcgttggaaaagggcgccaaagttgtagccatcaacgatccattcattggtattgaatatatggtatacttgttcaaatacgattctactcatggacgtttcaagggcgaagtttctgttgatggagatgttcttatcgtcaatggaaacaaaatcaaggtgttctctgaacgcgacccaaaagccatccaatggggatctgctggtgctgaatacgtagtagaatccactggtgtgtttaccaccattgaaaaagcatctgctcatttggaaggtggtgccaagaaagtcgtcatctctgcaccaagtgctgatgcaccaatgtttgttgttggcgttaacttggatgcatacaatccatcattcaaaggtgtatctaatgcttcatgcacaactaactgcttggctccattagccaaggttattcatgacaactttggaattattgagggtcttatgactatgttcacgctaccaccgcatcaaaaactgt

SEQ ID NO: 154443 - DNA, 356 bp, Zea mays
  Clone ID: MRT4577_72432C.1
attcccgggtcgacccacacgtcagctcatccctctcttaccaagtcatcctcgggttagggttccttacggttttgtgaacgggccatgcgagctgttgttgtggagtaccgttgcttcatctgtcggcttacccgcgccaccagcaactactcccaggcaaatgccttcgcatcctaaagccagatgctcaactccaacgtcatcaacgaccattaaaccgggaagtcactcggtatccgcaacatcaacatctcctccgatataaccaattgcgacgcattgaaccacgactgcttatatgcagcatcaaatacgattaccatttatccagccagctacatcaagccgtgctt

SEQ ID NO: 154444 - DNA, 370 bp, Zea mays
  Clone ID: MRT4577_72433C.1
gggtacctcgaaggcggccgggccgggaccttaccactcatcacgccgaccctgatttgtcctgtcggtgccgactaggatgcacacaccgagaggcattctggatggcccagtctaacaaccacgcggcggataaccgatcgctctcggcgcatcagaacggcgtccccaagcccccgcgccaccgccagacctacctctagggtatggactcgaagcttctgaggaagttgcggtactccaggaagggccacaagaacagtggcgaggctgcacccgaggagtaagatgatggtgattgacgtttgtcgcgacaaaggcatcccttgctatcgctaagagtcctagcgtgtgaacttacttctcactt

SEQ ID NO: 154445 - DNA, 342 bp, Zea mays
  Clone ID: MRT4577_72435C.1
aacccacctcaaaccaacccaagccacgttggttttccccccgacagcccacaaacgggggccatttcaaaggcggacgccgcaatcaataccaatcatatccacctcagccgtttcgcattggaccagcatcagcggaagagcccatgctcccaaaccgtggcacagaacaagaagagcgtcgtctcggctagggcataggcggagaacatctgcacacgttccacatgcaccatcctctatatttcaacaacatacatgatgcactaaaacactcgaaacatatgcttttaaaacaaggcagctagcgactatagtcgcacttccactacgagctgttca

SEQ ID NO: 154446 - DNA, 478 bp, Zea mays
  Clone ID: MRT4577_72436C.1
tcgagttttttttttttttttttttttttttttattctttttttttttttttttttttttttttttttttttttttttttttttttttttttttttttttttttttttttttgggttttttttttttttcaacaaaaccgggcaacgcggggcgggatccaaggggaccggggaaaaaaggccactttgccattaaaaaggccccggggggtttaaaggcgtcggaaaaggattaaaccccccccccgtgggaaagggagcttaaagggggccccccgggggccgttggccgggcgggctgaaccaagggaacgggcccttggggggcaaaccccctaacgggggtcggggggggcggaaaacaaaggcccccgttgcaaccttggattccgactaaaaggcggtaaacaaaaatccggcccacggaaatttcgggccaatggttttaaaaccaagcccgagaaccaattgggggaaa

SEQ ID NO: 154447 - DNA, 423 bp, Zea mays
  Clone ID: MRT4577_72437C.1
gacccaggcgtccgcccactcttccggggggccaaggtctttgtgcttttttgggggcaggccaggagggaatcgaaaaggcgggacccagggttgttaaccaccgtgccctcttcattttgggaaggaattgtaagggaaaggacttctttggcccttttgaaactgacagggtttattttggttgaaggaaaccagaaggcttgttgttgttccagactaaaaaaaagggtggggaccttaggtgtttttttccttgggaagggtttaataacttttctggaaattttaaactttttttgtttgttagaaaccgtaaaattggcgcttgttggggtttgttcttccccatgtaaactgctttttttaatggaagttttaaaatttttgtgtggttagaaaaaggaaagttttttcaagttt

SEQ ID NO: 154448 - DNA, 166 bp, Zea mays
  Clone ID: MRT4577_72438C.1
aacgggggggggagtccaaatgttttttcatttcatgttaccttattgcaaacaaaaataaagctacagcaatatattattttggtgtacttatttatggcctgtattgagctaaatacttagtactgcctggatctagctccacaatttttctttttatctacaa

SEQ ID NO: 154449 - DNA, 1155 bp, Zea mays
  Clone ID: MRT4577_72439C.1
cccacgcgtccgcccacgcgtccgcccacgcgtccgcccacgcgtccgcaatgagcagggctgattgaagccacagctcgcagagcaggaccaatacccagaagccttgcccagaatttctgcatgaccgattggctgcaaagcttaagcattggaaggctgaatttgttactacactgcagcattactggttagggacaaagctactatgggcagatgttagaatctcatcaagattactggtgaaacttgctggtggaaaaagcctttctagaagagagaggcaacagctgacacgcacaacagctgatatcttcaggctggtaccatttgctgtgttcatcgttgttcctttcatggagttcttactgccagtgttcctgaagttatttccaaacatgcttccatcaactttccaagacaaaatgaaagaagaggaagcattgaagaggaaactaaaagcaaggatggaatatgcaaagtttttgcaagatacagcaaaagaaatggcaaaggaagtccaaacatcacgtagtggggatataaaacaaactgctgaagatctggacgagtttttgaacaaggttaggagaggtgaacgggtctccaatgacgaaatcttgagctttgcgaagcttttcaatgatgaacttactttggataacatgagcagatcacgcttggtaaatatgtgcaaatatatgggtatccggccttttggtacagatcactacttgaggttcatgcttcgcaaaaaactgcaagacattaagaatgatgataagatgattcaagctgagggtgttgaatctctttctgaagaggagcttcggcaagcctgtcgggaacgtggtcacctaggtctactgtcaactgaagagatgagacagcagctccgagactggttggatctctcattaaatcatgcagtgccatcttcacttctcatactttcaagagcttttactgtatctgggaaagtgaaacctgaggaagctgttgtagcaacactatcttcactaccggatgaagttgtggatacagttggaacagtactgccatctgaagattcagtttctgagaggaggagaaaacttgaatttcttgagatgcaagaagaacttatcaaggaggaagagaaaaggaaggagaaag

SEQ ID NO: 154450 - DNA, 679 bp, Zea mays
  Clone ID: MRT4577_7243C.1
ctacctccaccgctggcgcgtataagaccaccgcgtcgacaacctcaggcgccaccgtgtttacggccccaacgtgtgtttgcaggggacgccggcaaggttgatgtcctataaatacatatattacaagcatgatccaaacctgtttggtgaatgggattttgaggtaagaacttctagttcgtgtagttttaattcatggttgtgaaaatggaatccatagttgaccacaacaacaaataggctattgacctgaaaatattgttggagatattgagcaactactctcctgttgaaggtcattgttctgtcttctgaatgttgaagctgttgaaaaggccacttgtagtatagaacctatacctgcaaagcaacgatgctcctatacctgcaaagcaacgatgcaagagcaaaactagaatttcctagagaaatgtttatctattaacgatgcttacattttttgtgttcaatcttagagtagcatgatctgtaatgctcttatgtactgtcctgataaattttgtggcgaatattggccttatcaagttcaattccactttttagttgtgcttctgagatatcaccaggctgaaactatctcacacacccattattctcttgactacctcacccaggttgcaagtgttacttttgatctattgttccttccgatgct

SEQ ID NO: 154451 - DNA, 199 bp, Zea mays
  unsure (1)..(199): unsure at all n locations
  Clone ID: MRT4577_72440C.1
tttttntggatttataaaagtgtttttcggttttttcccccgagccatgatagaaagggctattttatacacgagggccgctcattaccagcggcggggacttttaaaacaacataccgggccaccatatttcagacagttgcgtactccatgaggctaatcggaaccaaagccgattggacaaccatcgatttacctt

SEQ ID NO: 154452 - DNA, 1823 bp, Zea mays
  Clone ID: MRT4577_72441C.1
atgaggctctgtgtgggaggcgtgagacgccaggttggacctatgcctgagcacgaggctctatcgcgggtcggcgccgtcagggttgcacgtggcgacatcctggcagcgtcgaccaccacaacagagtcctcgttgaaaggccaagatttcagtggcataggactgttgagacatcatctgctggagcaggctgttgcagaacctctcaagttatatggcccacatatacctgtccttatcataaatacctcaaatggttatgaatgtgcaccagataacttaataggatttgcccgagtgtcccaacgactccggataaaccacttacaaccaagatcgcaaggggtacccccaacactcctaaatacgactggtaaccaccatcagcacaaaccgcaaagactaatgggcgcggttcaggtcaaggcctcgcctaccaagggacacaatcttgcctcgcccgagcccggcctcgggcgggaacagttgtcccggacgaattcacgcctcgccgaggacctcctcaggcagcaggcgcaccctcggctcacccaaggcctagctcaggcaggcttcgtcgagaagcaaccttggccaaatcgcctcaccaaccgaccatatcgcaggcgcattcaatgcggggatcacctgacaccttatcctgacacgcgtgcctcagtcggcaagccaagttcggcctcggacgcaacaggaagctccgcctcgcccgaccttaggcctcggcctcggaagcaggtctccgccccagggcttggcctcaacctcgacttcgggaggaggtctccgcctcgcccgaccctagggctcggtctcaacctcggcctcggaaggaggtctccgcctcgcccgaccccagggctcggcctcaacctcggcctcaggagaagtctccgcctcgcccgaccttgggctcggaccgaccgtgccacgcgagatacatcattaccctatgaaagtgcattcatcccttttgtgagttttggtgatttggataacaacacatttaaaggtctaacgagtttgctaagtgttgaacaggaaattcagtatgatgaacatacttaaatagtgtataatgatcagtgaacaaggctcaacacaaggtcaaataaccagtgagacaatgcaaatggatataatatggtctctatattggtttgaatatatggacaagtcctgagaaatcactatgcataaatatgatcataatagagattgaagtgattaagaggattggtcaagccaaagtgaataagatatgaggaatcgtgaattggcttgaccatattactatcagtccatatatgaatatatgagaatcaaactagagcttgattgatcttaacggttatatctagaagacattcaagcaaggttcacaatattgaagaaatgattctctcaatggatgatcaatatgatgtgactcaagaatggcttgatagggtgaagatagcaaggaaagggcttcgaggaactaagcgaaggtgaaggccaagcgacggcttgtggaccgaggtaccatggctaaggtgaagaagagagtacttgcactaagtcgatgaactaatcagctatgaagagttataacatgttgatgcatcagtacagtgacttgaagccatgatttgaactcacatatggtgatatggtacaagtcacatggtttgatttatgtttgcttcaaaaggtgagacaaagatgtttgtgatccttatgaagcaacgccatggagaaatcacacatgagacaccaatgactcaaggagtttacttaattatattttatttaacttgagt

SEQ ID NO: 154453 - DNA, 138 bp, Zea mays
  Clone ID: MRT4577_72442C.1
ggacccacaagggggaggtaacaattcacaatatagggaacacggacccactccattagaaccaggtgagaccctctttaagaagggcatactgcattcgagacacgggttttaggtggagaggaaaacacaatataa

SEQ ID NO: 154454 - DNA, 309 bp, Zea mays
  unsure (1)..(309): unsure at all n locations
  Clone ID: MRT4577_72443C.1
ctacgcttacgtgatcgactgatctgntatgggactgttgacttgggcggacgaccagacgctaggtctgtgcaaggcgccgcctcatactatagcacatggagacactggtccgaatgaaccgacaaaaccggcggcggcgtgtgccagttcgaacctgacacacggccacaactgatttcgtgcaagtctacaggcagcacagtcagtcaagcgtagttcacccgtgctcactcgatgcagactgccaatgccagcaggtccggtaccaactcgtcgtcacccgacatcgtcgtcggctcggcttga

SEQ ID NO: 154455 - DNA, 550 bp, Zea mays
  Clone ID: MRT4577_72444C.1
tttgggactgcaccgacgccttgttccttgtttcctcgacgacacccgagccgtgagagcaccgagccgaacgagatcacgctgagctctcctacaggcaacggagtcggagccggagccccagttgaagctggatccgttggatacagtgctcgccgaataccgcatacagacgtgtgcggacggttgcaactgaattcggtaccaccatgtgcagattggcatgacactacgagaggagggctgagggactcaacaggttaaggtaccgtatttgtagacttggatggagaaattgtgagtttctatgatgaagactaataagagtaggagtgtacataagtctgggaaaggtaaatatgtcaaaggagaagggcctaactgggatcttgatgtgagggtttgatgcttagcgcgatttcagaaagattgggtgcagactaaagcagtggttaatgagaagcaggagaataattctaccaagtttaaagaaaacctgaagcaggcgagctgaagtagacattaccgattagggaccgaatggtgttgt

SEQ ID NO: 154456 - DNA, 409 bp, Zea mays
  Clone ID: MRT4577_72445C.1
gcggtccgcaaggcacttacccagaaggcatatcccatgcagcttgtgttattgagcagtagcatgcgatctattgcgagtgcgagttatgtagacaagagattagtggacatgccatatgcagacgcttactatgatttatacactagttgtcaaactagtagtcaatctgtcattgcaaggagccttctcatgagaaggaccatgcaaagtggcctccacaacgggttttagaacagtacgtactccaaagggaagtccgctggcaacactcttagaaaatctatgatagtatctagtatactgttcaggtagctgatctgctacaccaactacttcatcctaatgctaaatatcataaccattaacgcaacgaagacactcatggccatatgttttgccatgaact

SEQ ID NO: 154457 - DNA, 193 bp, Zea mays
  Clone ID: MRT4577_72446C.1
aagatagtgaaaacggacgtgcactattatagttctgtaccactactaaacatggggcaattcattgaattatttatttctacccacacgtagtattagttgtcaggcgctctaatactagatacctgtttacctgaacgatagaactcaacgagagggtgttggagatagttggacataaacttgttgactg

SEQ ID NO: 154458 - DNA, 624 bp, Zea mays
  Clone ID: MRT4577_72447C.1
cttcgaacgtcgatctaaggtgagcggcaggaggcacggtacttgcagggcgcgacggcgacggggttcgcaacagtaggttgtggctgcgtgcggcctcggtccagtggagccgtacgcggtggtgccgatggtcggcgatgttccgatgagcctcggctgggctcgcgctccatggttatggtgatggccatggaggggctcaggcaacgcggcgcggcggtgcgagtggctggcaggtcgaccgtgtgcggtgggcgtttgcagagctcacgtggttgaggtggtggtggtgcgcgggcaggcggagctcatggcgcgatgacggtggttcctgggtgtggtggctgtgagaggacgtgtcggcgagcgtgacgaaccggccgcaggcggctgcggcagcggggtcgccatgtagctgcataggacagtcgcggcctgccacaacggacaccgcaagaactcgccgagctctggtggggtcgagccggagagcagcgccgtgtagtggtcagcgtgtcaaggttcttcagctggccgaggctcgcccggaggggccagcgatgctgttctccgggaggccgatgcgccgagcatggtgaggttggagcaggagcgcgccgt

SEQ ID NO: 154459 - DNA, 510 bp, Zea mays
  Clone ID: MRT4577_72448C.1
ttcggccgggacgaaaccttgggagtggggagacaaggttcgttcagttcaagaccagacgaggaggaagagaggcgcgcaagcggtccggtctcatggcgcccttccccgccctccgctcatcgtcgccggtggccgccgccgcggcgccgtcgctcggtcgcgtgtccggccacgttcaggcgttctgtctatgtcttatattcacttgtgagtgagttccgtcgtcgaacgaaacgcagcatctgcggcgcccagcaagaggcgcgtcgtctcctgcagggccgtcagcagcaggtcgctgtccatcatcaggtgcgagcagagcgcgaagaagggcggcgggccggacacatggctgggccgcgcggccatggtcggcttcgcctccgcgatcgccgtcgaggtggccaccggcaagggcttccttcaggtaggaccgtacgtaacatcgacagaagcgaggaacgaacgcgtgtgtaacaacatataacaagagtttgttgtggg

SEQ ID NO: 154460 - DNA, 702 bp, Zea mays
  Clone ID: MRT4577_72449C.1
ggtgtctcgcagctccagacggccacgtcggccagccggcggccactcgcttcgactggcaggcttctacccttgcagacataaaacgcaagcacgaggacgaggacgaaggttcgttcagttcaagaccagacgaggaggaagagaggcgcgcaagcggtccggtctcatggcgcccttccccgccctccgctcatcgtcgccggtggccgccgccgcggcgccgtcgctcggtcgcgtgtccggccacgcatctgcggcgcccagcaagaggcgcgtctcctgcagggccgtcagcggcaggtcgctgtccatcatcaggtgcgagcagagcgcgaagaagggcggcggggcggacacatggctgggccgcgcggccatggtcggcttcgcctccgcgatcgccgtcgaggtggccaccggcaagggcttccttcagaacttgggcgtgggtactccggcgccgacgctggcgctggccgtgtcggggctcgtcgccggcctcgccgggtcttcctgctgcagtcgggatcgggaggaggcacgcgagccagacgactgatggaacccatgagctgagagcacgcgtcgaacgtcgtctccccactcgacatcagttgctgtgctgtaatggttggtgaagatgaaaacccaggatatatatcatcatcatgtcatgtgtaacaaaaaaaaaaaaaaaaa

SEQ ID NO: 154461 - DNA, 478 bp, Zea mays
  Clone ID: MRT4577_7244C.1
ggcttggagtgacggtgaccgtgctggcgcccgtcccctacaggccgaccgcggtcgccgccggtgccaacaagcatgctgcggcatcctgccgtgaagaggagcagagcgacaccgggtcgtcgtcatccgtggtggacgcctccccagcggtcggcgtggggttcgacctcaacatgccgccgccggccgaggtggcgtaggtggaccgaccgccgcagcgcccggtgacacgagacgagacggctccgagaggtcgcgtagatgattagaaacaagctgtattagtacgaggttgggttcaatttgccgcgatgggttactgctagccaggtgtacatagacctttttgcatcggcagctaatacctatttgccgatgttacaaaaaaaaaagagcgaaacgttttgtagttcgttgtaatatgtaacatattacccgctaattaaataaagatcgactgtcttgtgcttatagc

SEQ ID NO: 154462 - DNA, 407 bp, Zea mays
  Clone ID: MRT4577_72450C.1
gcaactgatgtcgagtggggagacgatgttcgacgtgcgcgtgctctcagctcatggggttccatcagccgtcagtctcgcgtgcctcctcccgactgcagcaggaagaagacggcgaggccgacgacgagccccgacacggccagcgccagcgtcggcgccggagtacccacgcccaagttctgcacgccacccacaacaaactcgtgcccttgccggtggccacctcgacggcgatcgcggaggcgaagccgaccatggccgcgcggcccagccatgtgtccggcccgccgcccttctttgcgctttgctcgcacctgatgatggacagcgacctgctgctgacggccctgcaagagacgacgcgcctcttgtgggcgccggagatgctgcgtttcgttcgacga

SEQ ID NO: 154463 - DNA, 730 bp, Zea mays
  Clone ID: MRT4577_72451C.1
ggccggccgggacgtcggtcactcacttcgactggctcctactcctagtcctactacccttgcagacaaaaaccgcgaacgcgaggacgaggacgaaggttcgttcagttcaagaccagacgaggaggaagagagagagaggcgcgcaagcggtccggtctcatatggcgcccttccccgccctccgctcgtcgccggtggccgccgccgcggcgccgtcgctcggtcgcgtgtccggccacgcatctgcggcgcccagcaagaggcgcgtctcctgcagggccgtcagcagcaggtcgctgtccatcatcaggtgcgagcagagcgcgaagaaaggcggcgggccggacacatggctgggccgcgcggccatggtcggcttcgcctccgcgatcgccgtcgaggtggccaccggcaagggcttccttcagaacttgggcgtgggtactccggcgccgacgctggcgctggccgtgtcggggctcgtcgtcggcctcgccgtcttcttcctgctgcagtcgggatcgggaggaggcacgcgagcctgacgactgatggaacccatgagctgagagcacgcgtcgaacgtcgtctccccactcgacatcagttgctgtgctgtaatggttggtgaagatgaaaacccaggatatatatcatcatcatgtcatgtgtaacaaagacgacaactctcatgtgttggtgcaaaaaaaaaaaaaaaaaagcggcc

SEQ ID NO: 154464 - DNA, 367 bp, Zea mays
  Clone ID: MRT4577_72452C.1
gggctggcatgctcctccctcctcttaccaagtccagttggggtgagggtaacttacggttttgtggacgggcgatggcggcggctgatgtggagtaccgatgcatatgtcggcgggcttgcctgggacaccagcaacgagacgcttgagaatgccttcgcctcctactgcgagatcctggactggcaagtcatcaccaacctgtagacgactaggtctcaaggcttcaggttggttaccttctactacgagaactacatgctagactctatctagaacactcaacggaaaggtgctccacggactgcacatcaccgtgtaaccaggcccagacccgagtcgctagcggtggcggcggaggctacag

SEQ ID NO: 154465 - DNA, 303 bp, Zea mays
  Clone ID: MRT4577_72453C.1
gatgataagggacttttattgtgagaaggcctagtgtcgaaaggaccaaaacaaacgcacgtataccgtgtggcaactaaaccacagcatgcttgggagctagggctaaggcaatcggagccgagccgaagccgattaggaagaacagaaggccgagacgccgagttgaaacaccacaagcaggacgcatcttgaacaacagaatgcgatccacacctgacccacacacatgagatgatcgatcatggctgatcgattcgggagaacccacattctcgcaagttttactcgacgatgccattc

SEQ ID NO: 154466 - DNA, 963 bp, Zea mays
  unsure (1)..(963): unsure at all n locations
  Clone ID: MRT4577_72454C.1
ggaccctcgaggccggccgggccgaggccggtacctcaaaaaaaaaaaagaacccgaggacgggggggaaggttcgttcagttcaagaccagacgaggaggaagagaggcgcgcaagcggtccggtctcatggcgcccttccccgccctccgctcatcgtcgccggtggccgccgccgcggcgccgtcgctcggtcgcgtgtccggccacgcatctgcggcgcccagcaagaggcgcgtctcctgcagggccgtcagcagcaggtcgctgtccatcatcaggtgcgagcagagcgcgaagaagggcggcgggccggacacatggctgggccgcgcggccatggtcggcttcgcctccgcgatcgccgtcgaggtggccaccggcaagggcttccttcagaacttgggcgtgggtactccggcgccgacgctggcgctggccgtgtcggggctcgtcgtcggcctcgccgtcttcttcctgctgcagtcgggaggaggcacgcgagactgacgactgatggaacccatgagctgagctgagcacgcgtcgaacatcgtctccccactcgacatcagtcgttgctgtaatggttggtgaagcgaagatgaaaacccaggacatatatcagcatcatgtcatgtgtaacaaagacgacaactctcatgtgttggtgttgtctgctgctgttgtacgacatccgccgctcgcttgtacgaccgtactgcacttcatctgccggccgggcgagcacagccgttctttaataacatgacgggcgcatgcacacgccaacaaaaaaaaaaaaaaaaaaaaagcggccctagggaccgtcgcagagtatgagtatcaacgtacatcgacagcagcgacgcgcgtgcgtaacaaacataccaagttttggcctgggcgtgggtactctgctgctgttgtacgacatccgccgctcgcttgtaaaaaanaaaa

SEQ ID NO: 154467 - DNA, 1146 bp, Zea mays
  Clone ID: MRT4577_72455C.1
ctcgaggccggccgggacggcccaaagcccaatactgcagccctagcgctagcggccagctgagtggaagcatctccgcctctcgtccagcgccctgccgccctaggcaccaaaacctcgcgaggcaaccgcccgccggcgccgccgtcgtaggaagagggtgaactgaggattagaggagggggaagatgtcgttccgggcgcgggagatgtacaagaaggtggtgcggcgcgtgggcggcgaggggaagctgccggcggagcttatgaagtcggtgaaggacatgcttcccgacagcaacgtcatcatggggcgggccaagcgcggcatcttcgctgggcgacacatccggttcgggaacaaggtctccgaggacggcggcaacaaatcaaggcgatcatggaagccaaatgttcaggagaagcgtcttttcagctatattcatgaccggcacattagagtcaaggttaccacacatgcgcttcggtgcattgacaaagctggtgggatagatgaatacctcctgaagacaccttacaataaaatgtatactgagatggggatagtgtggaaagcaaaaatcgaaaagatgtattcagatttgggtgagatggaagtaggcttcttccctcctgaggaagaggctaaggttaaagagggctttgacgaggttcgtgctgccaagaaagactttcgtagggaagcaaaacgagctttggcaaagcaaaggcagctagaagcaagtagtgctggtgatgaccaagcgggtgaagtcacgcataaaaaggaaaaggtatcagctgctgctgctgaactctgagcttggcaatcattggatgtccctgggcaaataatgggaggcttgctgcttgatacaaactggggaaggtttctagtgcaataactataccccttttcagggagcaggcggtttatcttaagccagcgtattgtaaacacttgtcacgaggtcgaaattttgtacaatttgaaaattcaagagcctgaattgtggggcagtttgtattgtagaatctatcagagactcagagctaaattggctagaggtatgactcctagctcatttcagtttcatccctatgttgcttaaagattagcaaaaatgccaaaatgaattcatcggt

SEQ ID NO: 154468 - DNA, 234 bp, Zea mays
  Clone ID: MRT4577_72456C.1
cccggggctcgccttcacggtgctgccgccgcgggccttctaccccgtgcactggagcaagatcggcgggctgttcgttgcacccaaggataggaaaggcgagaggtgcgtgaaggccaaggtggagaacatcaaaggccagagctttggcatccatctttggaacagggaaagcagtaggatggaaatggaggtggggagtgttattgaaacgctgatttcagacagttgcct

SEQ ID NO: 154469 - DNA, 349 bp, Zea mays
  Clone ID: MRT4577_72457C.1
aaccccgggggaaaaaaaaccccccctttttggccaaacgggggtaattttaggggacaacgcccactaaaaatttggatttgcctttgcaggggccggggaaaaaaaaaaccccctgggtttggggggaaaaaaaaaatcccgggccgcccccccttttcgacccaaaagaaaagaaatttgcataaaacagccggggggcttagttgccggggacaaagtggggggggcggccccacgccttgtttttgccggggtcaaggttgggggcgggggggtttttgggggggcccttgccggggaaaatggcccggacaaaaaatcccaactgggaaaacagggggggggg

SEQ ID NO: 154470 - DNA, 493 bp, Zea mays
  Clone ID: MRT4577_72458C.1
cccttctcactcgcgcttgtacagccacagggcgccatgcctctccctcgcctctgtgccgccgccctcgttgttgccaccggaaagtctccgcgcacagaacctcgccaagatcgcgattcgtttccgagcttcgaggaatataagatcaaccgttggcgaccaagtgatctggttcttcgagttctacaaagttgaagaccctgagcatctgcttggtgaaggttgcctttggtgcaatctatgctcaggtaaagaagaaggagaacggtgtcgagtcggatctccgggagttctaggacttcgacgagttcgaggattaggctagcgactcccccaatcagctgactgtggtgggtttatttacatgggctacgtttcgattctgtgtactttgatttatgttatgtaaatgactcgtctttaatattattacttactctttgttattattcaaagcattgtgctatcatgagtcatttatgtaatcgcg

SEQ ID NO: 154471 - DNA, 395 bp, Zea mays
  Clone ID: MRT4577_72459C.1
ggggttgggtttttttaaacaaaaaaaaatgggcctatataaataattaaacaaatattttttaaccttccccccctggggatgtccaaaaaaacaaccgggttttgaatttttaaacaaaaagaaaacaatgcagggcacaaaaaacggcttcattccttcaaataaaaattatttttacaaacccgggactttgacacactattttcaaacacttttaaaacccttgtgggttttttttcaacctttaagcgttacttaaaaaaaagggtcccttaaaaaatgaacataaaatttttttttgggggggtggaaaaacccttacaaacgcgcaaaaatttttctttttaaagaacattttgcccgttaacaagatgaggggaattttttttcag

SEQ ID NO: 154472 - DNA, 312 bp, Zea mays
  unsure (1)..(312): unsure at all n locations
  Clone ID: MRT4577_7245C.1
actcccttctattttatattttgtctcatcatatattttctnnnnnnaaggaagaccatcaccgacaaaatgcctctgccacgacaaacaatgccatcagttggcgccggatcttgatcgggggctagcagggtatgcctcaccattgaggcgacaacgatcttctataactggcctcgacccctgcgaatggggggctcaacgcgggtctttcagccggagttagtttatgggttccgcttcccaagactgactaatccgattggggtgatggcacatgattcacatcacgacacgggtgcggctgactgg

SEQ ID NO: 154473 - DNA, 419 bp, Zea mays
  Clone ID: MRT4577_72460C.1
cggacgcgtgggcggacgcgtgggcggacgcgtgggcggacgcgtggggcgggtgagtccggcggaggaggggctggtgcaggcgctgaagctggaggagagccggcccaagaacgtccacccgcggtctgcgctgtacagccctacggagagcaggagcgacgccggcacgccgaccaccgcctagctacatcgtatctatttgacggctgcatcacctgattatcagcctgttctgattcatgccgccggaatgcatgagaccgtcgtaatacgcctgtctgaatgtcctgatgcttggtggtagcagtttttctcttgtctcttcaatcaatcagcttagtagaatccaatcaattactgttctactccgtagctaggaagttcaaggtctatctctatatataatttgaagaagg

SEQ ID NO: 154474 - DNA, 560 bp, Zea mays
  Clone ID: MRT4577_72461C.1
gtaccaacaatcataatacatataattagtatcagcactaaatgaaaaaatatcatgaattcttaagactccaaaaactatgaacaagggctttgacggtgacgattttatcgcaatgctctcaagctcctatagctcacattacttgccgcgtgacctttgaccagaagagcaatatcggtgtgtgaaatcataattcttaaaccctacatgatccaacacgcaatcacagactagcatcttacctttatcacccttgttaatacaaaaatcatcaagcctataacataacacacatacatgagcatcaataggaacaaaatattaaagaacaacaactacaacaacttgagctagaaaaacttgataactactgtaacaaacagaacattattgcatacaaccaaataaatatattgaactatactaattatttggaacaacaacaaataacattcatgaagaatacctaatacatacccatagaaatcaatatcattaaaacaactagcatcattaaactctcctgcttatacacagcactcacaactactaccatt

SEQ ID NO: 154475 - DNA, 467 bp, Zea mays
  Clone ID: MRT4577_72462C.1
gttgggggacaacaaaggggttgcgaactcaatataaaaaaagcgggttttgtttttttggtccaaccaaaccacacataaagggtttttccaacaagataaattcttgactcaggtcccagtatttaaaacaaactttctgatttatttcaacaaaaatttgcaattttagcgggggggggcaaaactaatggggcctgggggtcccccactcgactgggaggataggggtgaaataaccatacccgtggaccttgttgatggccttttcggggtcctttttgggaaaaaggttgaaaaacccaaaccccttgttggacccagttttttaatccaccgggacgtaaacccggttgacagggccaaaggcccggaaaacctcaggggggtcaggctcgcgggtgtcctccgagaggttggccacacggacggaattttggtggttcctggggcgcatggagtttcca

SEQ ID NO: 154476 - DNA, 1297 bp, Zea mays
  Clone ID: MRT4577_72463C.1
ttgggtacctcgaggccggccgggataaagaattctctccctctgaacaaaaaacttcctcccgcgcagttctgcggtggccttttaatcttggtgagcttcagttttttgtttcttggactcttcttcttgttaggttgcgttgcctcctgtgcttctgattggaggccgccatggatgaggtccccggaaggagcagctccgtgagagctacaaggagcatctttggcgaaagcatcggtgggaggaagccggagatgaacagggcaaggaatgttttaggacaagagaatctgcggccagagatgaagcagctagcaaaatccagcatagataagctgagtgaacgcaaggccgccgtggacagagaaagagccggcgccgagtccgagctgtcgagggcgcgcgccatggcgaaggagctggagcgccaaatagagcaggccaaggcccgggcgtcgtccaagaggtcagagcctcacacaatgcggccggcgaccagggcaagcaagacgggacacggtgcgccgcgctcgcagggggagcggcgcgacgctgccgagtacgcggaggtgtcgcgggagctgcaccgtgccaggcaggagctgctcaggctgcggctggaggtcaagtccgcggcggaggccaaggccaaggccgagagcgacatcgtgtcgtcggcgataaacatccagtctaacctgctcgctgccgacgagatgaagcggctggtggacgaggcgaacgaggagcacgtcctggtggagctcgcgcgcatcgaggccgagcgggagcgccgcgaggatcgacgcccagcggtgtgccgaggccgagcggttcgcccgggaaatggaggccaccagggctaagatcgaggcgctacggaaggacctgagccgcgcccgggaaatggaggcgaagctcgcggtgacgaacgctgacgtggaggtcctacaggccgagatggagctggtccgtgccatggagaggaacagtgtcaagaacgacggcactgcggacgtggaggctgaggacaaggcgctgctgcggactgcggaggccgagctggatgccgccaagaaggagctggatagcatcaaggccgggagcttccagttcatgacgtccatggacagcgcgcgcaccgagatcatgcgggtctccgaggaagtgaaccggctcaaggcgcatgataagaatgcggacgcgcaggtgcagcagctgaacgccaagttgctgaacgcgagggcccggctggaggccctcaccgagaccagcgagcggtccaaagcgatcg

SEQ ID NO: 154477 - DNA, 459 bp, Zea mays
  Clone ID: MRT4577_72464C.1
aacccaaacataggcgtattattaccccccaccaaatttaaaattttcccggccgggttgcgtacctttaggggcactggcccacaacaaaaatcttgggcccaacaaaaaccccggtccacgcgacaaaataaaagcaaaaaaggggtgcctgcaaaaaaaaaaaaaaaatcattggtcccgaaaacaacggggggcaaaaactggtttgcaaactactagctcggggggtagccctttttaccgaagggtggtggggcccttaaacccagttccaccggcgaaaaaaaaaagtacaaactggggttgacaacccccgagttgaaaaggacctttccgaacgtccctggttgaaccgggatgcgtcccatttttaccatgggcggcgggaatttttccttccacaaggttttgttggacccaaatttgtttaccagggggggcttttgggggtttacc

SEQ ID NO: 154478 - DNA, 1399 bp, Zea mays
  Clone ID: MRT4577_72465C.1
ccccgcgtccgccccgcgtccgccttggcgtccgcccacgcgtccgcacgccatggcgtcgaccagcctcgccacgctgccgtcgcagctcgcctccccggtccgcctgcgccgccgcgccgcactctcctccgctagccgcccgcatttcctcctccatcgtgcaaccaaaggtggatcgcaatgcaggctggcggtgacctgcaacgcgcaggcggtggcgccgaccagctttgcgcaggggacgcccgtccggccgacgagcatactggtggtaggcgccacggggacgctggggaggcaggtggtcaggagggcgctggacgagggctacgacgttaggtgcctcgtcaggccgcgcccagcgcccgcagatttcctccgggactggggtgccaccgttgtcaatgccgaccttagcaagccggagaccatacctgcgacacttgttggtattcatgccgtcattgactgtgcgacaggacggccagaagagcccatccggacggtagactgggaaggaaaagttgctctaatacagtgtgcaaaggctatgggaattcaaaagtatgtgttctattccatccacaactgtgacaagcatcctgaggttcccttgatggaaatcaagtattgtactgagaaatttattcaggacagtggtctggattatatcatcatccgtttgtgtggtttcatgcagggtcttattgggcaatatgctgttcctatactagaagagaagtccgtctggggaactgatgctccaactcggattgcttacatggatacccaggacgtagctcgactaacgtttatagctatgcggaatgaaaaggccaacaagaaactcatgacctttgctggcccacgagcttggacaactcaagaggtgattactttgtgtgagaggttagctgggcaagatgccaatgtaaccactgtacctgttgcagtcttgagatttactcgtcagttgacacggtgcttccaatggacaaatgatgtggctgacagactggcattttcagaggtgctctcaagtgacacagttttctctgctccaatgaatgagacctaccagcttctcggggtggatgggaatgacatcctcagcttagagaagtatttacaagattattttaccaacattttgaagaagttaaaggatctcaaggcacaatccaagcaaactgatatattcttttgatataggaaggatttctgtgacctagggacataattacaaatctgtgtctcaaatgacagatgagtgagcacaatttttcctgtatatttgcatttttgcatgtgcaagaatgctctgtgctattagtgatgtgtatataatcttaacattttgagctatcaaagttccgaaatttgtgcgaaaattatt

SEQ ID NO: 154479 - DNA, 427 bp, Zea mays
  unsure (1)..(427): unsure at all n locations
  Clone ID: MRT4577_72466C.1
gaagcataatcatttgttactgtattcactaaaatggtcatagcataccgtccggatgggctcttctggccgtcctgtcgcacagtcaatgacggcatgaataccaacaagtgtcgcaggtatggtctccggcttgctaaggtcggcctaaccagtgccaatgcaaagcacacaaaattaccaccaacagcaaaagcaagcacaattgcacagattggctactgcagtagcaccggcagcccaagcaaatcctacattgacaacggtggcaccccagtcccggaagaaatctgcgggcgctgggcgcggcctgacaaggcacctaacgtngtagccctcgtccagcgccctcctgaccacctgcctccccagcgtccccgtggcgcctaccaccaatatgctcgtnggccggacgggcgtcccctgc

SEQ ID NO: 154480 - DNA, 293 bp, Zea mays
  Clone ID: MRT4577_72467C.1
cggtctagaattcacgggtcgacgcacgcgtccacggtccacagctgcatcgagtggctggacgcgcagcggaccacgtcagtgctgtacgtgagcttctggagcctgtcggccatggactcctaccgagctccgggaggtggaatggggtctggctgagtgcggccaccccttcctatgggtcgtccggcgaaacatggtacgaggctgcgacgtctacaccgcacggcacctcccggatggtttccaggaccccgtcaagggcataggcgtggtggtccgctgggccccgc

SEQ ID NO: 154481 - DNA, 544 bp, Zea mays
  Clone ID: MRT4577_72468C.1
gtggtgtcaggcatgctatacgataccaccgagccactccaatacaggggcggcattgttgtagttctcttgcatgaggacctccgagagactgccaatgcgctgtaatgacccctgccgctacatagtgtcccgcggctagtttaaggaacatgcctgccatggctgagagacaggccctactacgatcccatgggggtcaacgtgaacgcggccatcaacgggttcaagaaggtgtgtcacatctaggtgaagctctggcacgcgcacaagaatgcctggaaccttgacgcgatactcatgaaccacaaactaggagaggatcatgaagtcctactggatactgacaaaaacgagctctgtaattattatggcaaggaggatcttgcccacgataacatcatgtatcctgatggtgacgttatgatgctcttgggaaaccactatctcgaagatcacgcttggcacgaggttctaatatatctagctatagaggacgctgacgaaaactcaaatcgcaagagggcggagcagcacatccaga

SEQ ID NO: 154482 - DNA, 727 bp, Zea mays
  Clone ID: MRT4577_72469C.1
ggagaaactactgtccaaaaaatcgacctcaccttagtagatatacatgtcggatgaacaattgaaaacacccgagctttttatgtactggggagaggtctaattaggaagttgaacaaaagcatgttccatgtatcaggtagccctggtaggcaccagtggctgcagtcactgtatgtgagtggttgttgccgttgctctttgctaagtggttttccttcgtgagtgatggtgtaaattgatgggtgtgcatcaattcggagttctgagaggcgagtgatgttcatatatacaataggcgttttcatcctcttgatgtttttctcgatgatgtctatcaaactttgtggaaaccatggagcgatgttccccctggagataggagccgtttggttgtagcaccaatttacgctgcacgatagaaggaatgtagtaagttgactaatgtagttggattgaatgtttgttgttcgagatatggacctcttgtgttcaggtgagacacttcggaagaaaactcgagttctgctagggtctatattgtagtcgatccacctagcccaggtcctcagtgctccatcgaaggcttcctcacctgccatctgcaccgtctttccgccccactcgagatgatcccacctgcatgctgatcgataagctgtggcaaatggaatttggcattctgaaggcatatgtgttactcacgccctgactttgccggtgtgag

SEQ ID NO: 154483 - DNA, 547 bp, Zea mays
  unsure (1)..(547): unsure at all n locations
  Clone ID: MRT4577_7246C.1
acctcgaggccggncgggaaactattttgagcccaatcccgtctgagctacatcatagatatgctgtcgccagggagtgggagtccatcaaggatgccgtgagcatgagagcgaatactctgatggggaattccatcagtgatggaagtcgagcccgtcgacaccattcaccatgtggacgtctagatcctcatgaaggagggcatctccccggaggtgcagtgcatcatctgtcgtcggctacatcatgtgggacacgtgacatccttgccgactacaagtagtcatgaaggactgaggacttcacacatggatgttcctcctccggggcggcggcacgatccgtatgaactgcaagggcatcaagcgcaggaagatcgagaacctgcgcaggaacgtgaaggtcccgtgctgcatgcttatagggcggaggtgaccactagacaaggtgaccagacctgctccatgagtggcactacacaaagtgggtacagcgagtgttcatggccaaactgttcgtgcgtttatactgctgtgaccgcggcct

SEQ ID NO: 154484 - DNA, 485 bp, Zea mays
  Clone ID: MRT4577_72470C.1
tttttttttttttttttttttttttttttttttttttttttttttttttttttttttttttttttttttttttttttttttttttttttttttttttgggcccaagggaatcccccctttaaaagggggcatggactttaaaacataaccttggggagaaaaagggccttgcctttttacaagacccccccttaagttccatttttaacaaaaccccaaggcctaaagggggaactgggctaaaaacaaaggaaacaaagccctgctttcctttctactccccaatttaaacctcaccactttttttggggcccttcctaaaataccccaggttcctaaagaacttggggcccctccccttgggggaggcctggcgggggcccttgggttttttaatgccctttttgggccccttaaacaactggttttgcccccggtggtttttcaacttggccattttttccggatccccaaacgatggctcc

SEQ ID NO: 154485 - DNA, 296 bp, Zea mays
  unsure (1)..(296): unsure at all n locations
  Clone ID: MRT4577_72471C.1
gggtcgtcttangcggccgctcccatcncacggacggttacccccaccttccggntccgctcgtcggcgagcactcttccgctccttccccgccccaccgcagtcccggccaagagatccggccgactccggtcgctcggactcggaggccggcgagccgctcgtgctgggcgcttggatttttgcggccggggggtgacggnnncccggatctcgccggcgccccgtctcggcgaggtgaggagtggaggcgcctcaattctctcgngctcaccttttctcggtcccgttacaaa

SEQ ID NO: 154486 - DNA, 299 bp, Zea mays
  Clone ID: MRT4577_72472C.1
ccctttgcccacctcccctcccagatccgatccgccccgccggtcgccggccggagcaccgccatggcgctcagcctccgcaagaagcagctcgatttgatcacgcggatgctccacctgaaccagcagcagccgtcgccggacggcggcggcggcggggagggcgacgaggaggcgtacaagatcctggtgatggacgggccctgcatctcgctcctctcgccggtgctccgcgtcggcgacctccgcaagcacggcgtcaccctccacctcaacatcgacaatgcgcgctttcatgt

SEQ ID NO: 154487 - DNA, 275 bp, Zea mays
  Clone ID: MRT4577_72473C.1
ggggaggaggggagtagcctaacattgttgagcaaaaaaatgttattttaaaaacaacttcgacctgccggatttgaaccaacgacctaaggatttcatttggaatccactacagtccttcgctttaccaaatgaggtaaggtggggttttaacaatttcttggccttaaaatatttataaccgggacatacaccttaaacactcatactggaactagggggaaacacccaaaaaaaagttggaaaccttgtccttttattttttttggaacttt

SEQ ID NO: 154488 - DNA, 664 bp, Zea mays
  unsure (1)..(664): unsure at all n locations
  Clone ID: MRT4577_72474C.1
ttttttttttttttttcctaacgaaccatatctagacacgtcggtcatcagagtatatattttttaaggctcgctctatcgacaaaagacaatactggccaaccctctatagttggctccgtttgtatccagatatccatacatggccagccatagtttcattatttaacttttttgcatggacggccaagatctgtcaatgtgccgtctttcttttggccatcttcaagcgatgttgatattcgttcactccatttctaagccttgtagccaacctcgaacaagctatccttaagagcgctgagagccttctcgatgtggtttcggctggggtcaagagcgctgactcccatatggccgaatcggatatacttgggagcaatagccttgtgaataccaccagcaaagacaacacccttggcggccaacttgggcagaacatcagcagcgccaatgccatcaggcaggtaaatagcagtcatggcgtgagcctggtcctcaggtttagtagcaacgaccttcagaccaaggtcggtaacagcccttcttgaccttgttggagacctcgatgtggccctggaatcgctcagacaggggcttagtaaggatctgagtaaggctantgtggagggcgtggatgatctggggagaaggagtagcgaag

SEQ ID NO: 154489 - DNA, 753 bp, Zea mays
  Clone ID: MRT4577_72475C.1
gattccattctcacgggcagcagttctgccagttcaacttgatccgcgcttctcgtgtcccctgccccttctgtcctcgccaccgcccagcttctcctcagtcctcaccctcgtgtgccttcggatccgcggttctcggagtcggagatagttgcaggtggtgtctggtcgcttgcggtagccggtaggcgggttcgctgcgggtggtcggcggcgcgatggtttccttcgagatgaacgacctcaagagtaagcgactcctcgcccacccgctctagttccctctcccttttgctggcggtttgtgaggccgtctggactctggcctctagtgctgcgtgtttgtgagatcatgagatgatcgggtcgcttttgcttgtacgtttcgcttgcccgtgagctgtttgggaggggagatttggtcgtgctcgcttcgctctctcgctcagtttgttgttcgtgcatgtgaaggaccggccgcgttggctgcctctcggttttgcgctgtttttatgcatgaatcgttttggtggagattgggctttattgggatggctgcctcgcatccaaatcatgaattcatgatgattatccgcgaccattggtagtaccgcagggcttaatgtgtaacctgtcttccttcagggtgaagaattctcatcaaaattcactgatcttctgcatttcattgtacctgcctgcggtcgtgtagtgtttagcatatgcattcgatacaacgtgctattagaaaga

SEQ ID NO: 154490 - DNA, 674 bp, Zea mays
  unsure (1)..(674): unsure at all n locations
  Clone ID: MRT4577_72476C.1
atccgtagccggccgggtatgctcaatacctgcctcaagacgcctacctgatgaacactaaccagctcatggaccgaatggccatgaccatgggtggtcgtgtgtctgaggagcttcacttccccactgtgacgacaggcgccagtgatgacttcaagaaggtttcccagatggcacgaaacatggtgactcaatggggtatgtctgagatagtgggccctgtgcattttgagaacgaccccaaccgcatgcaaaagccatttgccgagtccacagcccagcagatcgatttggaggtttctcgaattgtggaggaggcctacaagcgctgcaaggatctcttgacagagaagaagaatgaggttggcctcattgctcaggagctgctcaagaaggaggttctcgtccgagacgacatggttcgcatcttgggcaagcgacctttcggtgacaacgaggatttcgagaagtacttcggcggctccaagccggagagcacccctcctcccttccctgaggagaccgactcgcctaatgagccccctaccccatccccagctnttaagaaggtcgaataagctcgaaacataagttgtccgggcgctttattagagagagccgtcagcgcagcatgaccagtagttgttggtcacacacactgctgccaggaacct

SEQ ID NO: 154491 - DNA, 266 bp, Zea mays
  Clone ID: MRT4577_72477C.1
ctgagcatcccagggacggcgacaaatggggtcgggagatccatcgtgtctgcgaatctgcgtgcttgccgttgcggcggatgggaacggggacgggatagtgcgggatctgctttggaaagtttcctaattcctagtactatgcttttacgcaaaattggtccaatttctgtatggttcctctaaaatgtgctgtccaaacggggccgtgttctatgcaatagaaatcatgctactcttaccatacttcgatggttttggcaaac

SEQ ID NO: 154492 - DNA, 852 bp, Zea mays
  unsure (1)..(852): unsure at all n locations
  Clone ID: MRT4577_72478C.1
ccggccgtgatcctgttcgatgcatcaaagaaaaaacaggaggagaatactccacaccagtctagctacgtctgatttggcaagtcttgttggccgcagcgacgaccgtaacatcagatgctactgttgccctgaaattccaagaccaggtcgtccttctccttccactagctagcagaatgctagtttgccccacgcaactgcaaatgacagagagatcatggagacggcaaatatgggttctggtgcctgtggagggttaggttgctgcgcgatttggattgcagtaggtggccgccaagacttcactgtcaaacttgtccgccgcaatagtgccattccaccgttcggtgaagcgctctccggtgtcaagattatcttatcggaatactatgacttcgttaccgatgatgtttatgcaagttgggtgaatacaagcaatgttcacggcatgctacttgacattgcaatcacggaccaaccaagctgcgcgagtgctcagtcccaagagaacaaggatacctatgcatgcaatagtgaaagcatatgcaacgacgttctaccaccagcagtatctcaaggagcatacaattgcttatgccctggtcgaaaaaagggcaacccttatattgaagatggctgcatagcatattacaacccagagacgcccaataggaactgtatgagattatgtggaaacataagcgttccatttccttttgngattgaaagaggctgttccgcanatgatgaccctacgactcactgcacaaataacaacactcttggntcttgatcgagggtacgcacagtatcgcgtgaccaatttgtcacttgatgatgggcttctga

SEQ ID NO: 154493 - DNA, 547 bp, Zea mays
  Clone ID: MRT4577_72479C.1
tggaagcgtcgagcttttttcttctttgtcttgctgcgcaagaagaagggaaacgagaggagggcggcgatggcgaagaggctgctcccgtcgctgaaccgggtgctggtggagaagctggtgcagcccaagaagaccgccggcggcatcctcctcccggaaacatccaagcagctgaatgctgctaaagtggtggctgttggccctggtgagcgcgacaaggcaggcaatctgatcccagttgctctgaaggaaggcgacactgttcttctgcccgagtatggtggatctgaagtcaagcttgcggctgataaagaatcgcgggcaagcgggtggtgagatgcgtaggatttgaagctgggaacaaactccagaaagaactgtgccctgtcgtgatgtcataaatttgtggtgaaacatcatatcatgaggataaaacttgttgcttttttgtgatgcaattgagaaaactttcgaatttgaactggttcccaatattttgttctccctgtcccctgttgaagtgctctctgttttaagttaaaaa

SEQ ID NO: 154494 - DNA, 600 bp, Zea mays
  unsure (1)..(600): unsure at all n locations
  Clone ID: MRT4577_7247C.1
cagnaaaacagccgcttataaccaaatactcacactgctacaaaagatccgattctgggggcggggagtgggagaaggttcccatctggaatgttctgtatgtgcagttaagatgggaactctttactcctcttcataactccaaagtacaatgcattcatatctttaaagtgcctgaatcacctcgagaaattgtccctgtaaaggaaacacccatggctgctccccttgaaattgaaatacctcccactaaaggtatcgttcatcctgccattccttccttcatttattagagtgcttagcatgtacagggtgctagggaactggagaataataaacaaagacaattaatatgtggttcctctcctcaagattgtatacctcctcagattctttaaaggaatcatctttttagccataaatatcactttggttcagctcatttaattaatgtctccactgatccttttaacctctaaccataatactaatatcttcaaagcaccagaagctatgaaagaagttgtccctgaaatgaaaatatttgaggatgtacctgaagagccagaaactccacgtatganaagtacgttacctctg

SEQ ID NO: 154495 - DNA, 597 bp, Zea mays
  Clone ID: MRT4577_72480C.1
cgctcacgcgagtagagtcggaatcggtcgaagagcgcgagtggaactgtggaagcgtcgagcttttttcttctttgtcttgctgcgcaagaagaagggggacgagagaggagggcggcgatggcgaagaggctgctcccgtcgctgaaccgggtgctggtggagaagctggtgcagcccaagaagaccgcaggcggcatcctcctcccggaaacatccaagcagctgaatgctgctaaggtggtggctgttggccctggtgagcgcgacaaggcaggcaatctgatcccagttgctctgaaggaaggcgacactgttcttctgcctgagtatggtggaactgaagtcaagcttgcggctgataaagagtacctcctcttcagagagcacgacattttgggcacacttgttgactgattcgcgagcttgtcactagtcttcggttgaagtgtgagatgcttaggatctgatgctggcaaaatcgatgagaaagaactctgaactgtcgtgatgccatagagtttgtggtgaaacatcataaggataaaacttgttgcttgccttttgttgtcatgcaattgaggaaactttcgcttt

SEQ ID NO: 154496 - DNA, 821 bp, Zea mays
  Clone ID: MRT4577_72481C.1
ctcgagcacgagctggcacgttgcggcggcgcagagcacatccccaattccccaggaacaggctcgtaatttttccactgccatcgcaccctttcataaaaccctaaacccaggacccaggtttatcggtgaggcgagccgcgagtggaactgtggaagcgtcgagcttttttcttctttgtcttgctgcgcaagaagaagggaaacgagaggagggcggcgatggcgaagaggctgctcccgtcgctgaaccgggtgctggtggagaagctggtgcagcccaagaagaccgccggcggcatcctcctcccggaaacatccaagcagctgaatgctgctaaagtggtggctgttggccctggtgagcgcgacaaggcaggcaatctgatcccagttgctctgaaggaaggcgacactgttcttctgcccgagtatggtggatctgaagtcaagcttgcggctgataaagagtacctcctcttcagagaggatgacattttgggcacacttgtggactgattcagatcgcgggcaagcgggtggtgagatgcgtaggatttgaagctgggaacaaactccagaaagaactgtgccctgtcgtgatgtcataaatttgtggtgaaacatcatatcatgaggataaaacttgttgcttttttgtgatgcaattgagaaaactttcgaatttgaactggttcccaatattttgttctcctccctgtcccctgttgaagtgctctctgttttaagttagcaattaacgggatcggatttacttgtgaaaaaaaaaaaaaaaaaaaaaaatataaaaaaaaaaaggc

SEQ ID NO: 154497 - DNA, 2328 bp, Zea mays
  Clone ID: MRT4577_72482C.1
ctcgacagttccgtccgtggcaaacctgcagggcatggccaggccgtcgggcgtcaacatggcctctttctccgccgtgtccaattccggaggcgcgtggagggtttttttatatatctttatgggaggaggaagaagaataggccggtgagggtgttcccgacggacaaggggacgctctggaagacacgatccgccgatggccacgcgtccggtaacctctttgtcctttggagaagttcctcatcttcagagtcgtgtcgtggggcgtgctaggtgggagggcggggcggaggagctggaggttcctggtagcggctgccgccggccatggagaagaggaagcggatcctggagctgcgggatcggctggaccggacgctggcgatgcccgacctcgcggaggaggcctcgctcagggcgctggtgaagaagcagatcctggcgtcgtccctgcccggctccgatcaaggtgacatcgatctcattgctgaaacgcgggcaaaagaagtctctgagtttcttgaaatgctagatacttcgagggacggacgatcttccaaggtccatgggctgccacagaaggagtggaaggtgaagcaagatacagaccaattaagagtgatgtaccgtgagggtccagaggggacaccatttcataccttacttgctgaaggctttgcagatggacctattgacgtttgtacatgtgtgtcatgggaatcaactttatacaaaaaatggtttccacaatacaacctgccaacttttagaattgatcagtcaggctgcttgaaaaaagtgcggattggtgaagagatttgtatggtcagggtgaaggttccatggccggtttcagagagagaggctattctacactattttgaactggaatatcttaaagaagatgtcgtaattgtgataatgaaaactttatcagacttggatgccatagatgttcgaacccatggatttagtagggatggaattcctgaagctggtgacacagttcggatagatgtgtttggaggctttgtattgcaacggattacaaaagaaagaagctttttcagggcaatagctaatatggatatcaagctagattttgttccaccatggttgatcaacttcatgtcaaggcaactaataggcagcgggcataagctgtatcaaaaggcagtcagcaccgtggccagtcatgatgatgactacaggaaagctttgagaggaccgctctacgtcaggatccgtgagtaccaggattctgatgacaaggcgaaggtggcagcaacagaggaaaatgctaccgaggcgccccctgataatgccactacacaaaatcgtttgtcactaacaaataccgtatcgaatagcgagattgtggaggagtccgaacagaacacatccgtcactgtggatagtcttccaactagccaacaaccctatgtgccagttgagcaagcatggcaggtcggaaacaggccatacaccagtcctgaggtggagcgtgcgctgtgcatattagacacttctattgcacttctcagaggcgatgataaggctggaaatgtcaccacgctacaaaatctgctcagttacgatgcatctttggaagcgagtactgctgctggttccgtaacttgtcaaacaaacgttcttaacgcagacagtcttccgaatggccatcctgttgccgcagcgccacaagactccagagagaaagctagcgatagtgccgcagaggaagaagacgccggcgacgaaaactctctgaaaaatccgacagcttccactgtgacgaagagtgtgtcgatgacattgcgaagtgcaataagggtgcacggtgaagagagcctggacactgatggcttcttccatcagaacggtttcagcaacagcaaggagtcaaggcgagcgaggaagtctaagaagagatggccctgctgcttaatccctaccactatgggatgatgtgggcccatcgtaggacctcgttcgttcaagttaagttgctgattttttgagtgtactattaacaaacagtaaactacagaaatttagcgcttcgtcagttacacgatgtgggttcagacggtatgctatagcgcgtagataatgtcttgataaatgtaaagtagaatcgttgtaaacaacacgtaattcttctcacgagagctctgatttgggggtatatgggtaaagtatatgggtaaagtacatatactattattttcacgcatggtggttatgctcagcagagcatgtaaacgtataaaccactgttttatattatagactacactattataaaaaaaaaaaaaaaaaaac

SEQ ID NO: 154498 - DNA, 514 bp, Zea mays
  unsure (1)..(514): unsure at all n locations
  Clone ID: MRT4577_72483C.1
gccggccgggtcgcagactctatatcccttcttccagtgtatccgcctttctctctattataccgtgtacttcctcaacctaagagcgagacggccgtgggcgcgccttggcgctgtcatgcgctggtagccggcggcaaaggctccgcggtggattactaccggacgtacgccgccaaccactcggaggtgtgggggacgaaccaggagacctacatgatctgcttcaagggccagaagttccacggcgcatccgcactagtgggcaagtacgggtctattcccttcccggtgagggaggacagcattgtcgcctacgactgctggtcggggggcacccaggtcggcgtgctcgacttcgtctccgccatccatcacgctcggaaccgaggagacacccttcaagatctcccaggtcaccgattagtggccgagagctgtgaacttcttcgtgcccgacgacgtgtcccgcctgaactatggctattacgcangcgaaatgtcttgtgctgaa

SEQ ID NO: 154499 - DNA, 128 bp, Zea mays
  unsure (1)..(128): unsure at all n locations
  Clone ID: MRT4577_72484C.1
acccacgcgtgcgggccgncagcatgaacgccatcggctagtccatcggcttttcaaatgagctcgcctgcatctgaaccaatggactaacttgcctatattagctcctaggtctttgcccgcgcatt

SEQ ID NO: 154500 - DNA, 1175 bp, Zea mays
  Clone ID: MRT4577_72485C.1
tgcggcgctcgaggcggccgggtcgggaccaacaagctcccactgaccgatgcacgagcgtcgatacactggtaccagatcgagcattgacacaagctactccgaggcgtcacagtatagtgaaagggccgcccagcttcggcttcgctcaccactcgctcgcaccactcaacgtctcaacctgagaagctagctagctagctagctagcgccgggcgcccgcagcatggccacgaacagccaccgcattattgcgcccggcctcctgctggccgcggccacgctagtcgtcgtcgtcgtcatcgcgcagctcgcggcgccggctgccgcctgcccctactgcccgacgccgacgcccccgcccccgccgcccccggtggtgaacccgccgccgtcgtccacgccgtgccctccgcctccctactcgccgtccacgccgacgggcaagtgccccgtggacacgctgaagctgctggcgtgcgtggacgcgctcaacggcctcgcgcacgccgttgtcgggaccaacgccagcgacacctgctgcccgctgctgtccggcgtggccgacctcgacgccgcgctctgcctctgcaccaccatcaaggccaaggcgctcagcgtcagcctcgtgctccccgtcgccatctccgtgctcgtcaacgagtgcggcaagcacgtgccctccagcttccagtgcccgtaataactatattagggcgcgtacttactgatcgatcatcatctgcatatgtactgctactctactgtatatatatgatgtatcgtcactaaactatatacatcatatatgtacacgtacggtcaagttatatatacatccatatataacacaaacatatacataagcatgcatgtgcagcttcatatgcataagctctgccggcttgtgatatacatggagctgcgggggttgtgcatttttttgtaaccatgtaccagtattattgtatcataaaccagtgtgagagttgtggccttggtggggtcgatcgcttgtagtagtcattaaggaaacttatgaataaagtgcgtctgtaatatatatgatatgctgccggtggtgtaatgctgacaaaatctgtcaactattcctactatatgtgtaaaccaagcatgtcgactttttttttgccgtaatgtaatgtgcttctttt

SEQ ID NO: 154501 - DNA, 725 bp, Zea mays
  Clone ID: MRT4577_72486C.1
ctcgaggccggccggcgctcgcaccactcaacgtctcaacctgagaagctagctagctagcgccgggcgtccgcagcatggccacgaacagccaccgcattattgcgcccggcctcctgctggtcgcggccacgacgctagtcgtcgtcgtcgtcgcgcagctcgcggcgccggctgccgcctgcccctactgcccgacgccgacgccgcccccgcccccggtggtgaacccgccgccgtcgtccacgccgtgccctccgcctccctactcgccgtccacgccgacgggcaagtgccccgtggacacgctgaagctgctggcgtgcgtggacgcgctcaacggcctcgcgcacgccgttgtcgggaccaacgccagcgacacctgctgcccgctgctgtccggcgtggccgacctcgacgccgcgctctgcctctgcaccaccatcaaggccaaggcgctcagcgtcagcctcgtgctccccgtcgccatctccgtgctcgtcaacgagtgcggcaagcacgtgccctccagcttccagtgcccgtaaataactatagtaggcgcgtacttactgatcgatcatcatctgcatatgtactgctactatactgtatatatatgatgtatcgacactaaactatatacatcatatgtacacggaagatcaagttatatatacatgcatataacacaaacatatacacatacatatatatagctctta

SEQ ID NO: 154502 - DNA, 221 bp, Zea mays
  Clone ID: MRT4577_72487C.1
gttccaaaaccaaacacactataagcctccactaaaaacgtccgagagtttcaatactcttcaagcacatcacccctatatataaggtattccctctgcataaacaagcagtacctatgccatgcactgttcactacagtcacatccacaccgtgtaacagatgatcgcctcacacaaggatcatacaaaggcgtctcacataagaataccaactaggcat

SEQ ID NO: 154503 - DNA, 976 bp, Zea mays
  Clone ID: MRT4577_72488C.1
cattgggtacctcgaggccggccgggactcgctcgcaccgctcaacgtctcaacctgagaagctagctagagctagctagctccgggcgcccgcagcatggccacgaacagccaccgcattattgcgcccggcctcctgctggtcgcggccacgacgctagtcgtcgtcgtcgtcgcgcagctcgcggcgccggctgccgcctgcccctactgcccgacgccgacgccgccccctccgccaccgcccccgcccccggtggtgaacccgccgccgtcgtccacgccgtgccctccgcctccctactcgccgtccacgccgacgggcaagtgccccgtggacacgctgaagctgctggcgtgcgtggacgcgctcaacggcctcgtgcacgccgtcgtcgggaccaacgccagcgacacctgctgcccgctgctgtccggcgtggccgacctcgacgccgcgctctgcctctgcaccaccatcaaggccaaggcgctcagcgtcagcctcgtgctccccgtcgccatctccgtgctcgtcaacgagtgcggcaagcacgtgccctccagcttccagtgcccgtaataactatattagggcgcgtacttactgatcgatcatcatctgcatatgtactgctactctactgtatatatatgatgtatcgtcactaaactatatacatcatatatgtacacgtacggtcaagttatatatacatccatatataacacaaacatatacataagcatgcatgtgcagcttcatatgcataagctctgccggcttgtgatatacatggagcctgcggggttgtgcatttttttgtaaccatgtaccagtattattgtatcataaaccagtgtgagagttgtggccttggtggggtcgatcgcttgtagtagtcattaaggaaacttatgaataaagtgcgtctgtaatataaaaaaaaaaagggcggccgccaccgcggtggag

SEQ ID NO: 154504 - DNA, 1131 bp, Zea mays
  unsure (1)..(1131): unsure at all n locations
  Clone ID: MRT4577_72489C.1
tcgaggccggccggggctcgcagctcgcaccactcaacgtctcaacctgagaagctagcaagctccggccgggcgcccgcagcatggccacgaacagccaccgcattattgcgcccggcctcctgctggtcgcggccaagctagtcgtcgtcgtcgtcgtcgcgcagctcgcggcgccggctgccgcctgcccctactgcccgacgccgacgcccccgcccccgccgcccccggtggtgaacccgccgccgtcgtccacgccgtgccctccgcctccctactcgccgtccacgccgacgggcaagtgccccgtggacacgctgaagctgctggcgtgcgtggacgcgctcaacggcctcgcgcacgccgtcgtcgggaccaacgccagcgacacctgctgcccgctgctgtccggcgtggccgacctcgacgccgcgctctgcctctgcaccacaatcaaggccaaggcgctcagcgtcagcctcgtgctccccgtcgccatctccgtgctcgtcaacgagtgcggcaagcacgtgccctccagcttccagtgcccgtaataactatattagggcgcgtacttactgatcgatcatcatcgatctgcatatgtactgctactgtatgtctgtatatatatgatttatcgtcactacactatatacatcatatatgtacacgtacagtcaggttatgtatacatgcatataacacaaacatatacacatacatatatagctcttattaagcatgcatgtgctacttcatatgcataagctctgccggcttgtgatatacatgggagctgcgggggttgtgcatttttttttgtaaccatgtaccagtattattgtatcataaaccagtgtgagagttgtggccttggtggggtcgcttgtagtagtcattaaggaaacttatgaataaagtgcgtctgtaatatatatgatatgctgccagtggtgtaatgctgacaaaatctgtcaactattcctactatatgtaaaccaagcatgtcgacttttttttgtcgtaatgtaatgtgcttctttcaaatgtacgctcatttgctcaaaanaaaaaaaaaaaaaaaaaaaaaaaaaaaaaaaaaaaaaaaaaaaaaaagcggcc

SEQ ID NO: 154505 - DNA, 813 bp, Zea mays
  unsure (1)..(813): unsure at all n locations
  Clone ID: MRT4577_7248C.1
cctcgaggccggccggggagcagcgctataacgcacatgaacttggcgtccgtcgttccctgcgcgcaggcattcaccgtgttaatgactcccgccgctggctcccaccgtcgggtccacacgcatgcggcggcctccaagagcggattggcctgccgcgtcgcgcgcagcgggggcgcccggtggctgccggtctcctgtgcagccgggggcggtgcagttggtgacacttttgttactgaggacactacaaatgtgaagtttcctcgggaagtaacagttccaggctatacacacccattggttgcagttggcacaggttacagagaaaagttttttgtcaaagtatatgctgccgcgttctatgtagattactcacttcgccttgatactgagcaatggaaagcaaagactggtattgagagctttgacagttcctctgttttcgactccatttttaaggatctccatttcggaagatgaagatccacgtcaagttgatgcagagatcaaatctgctactgttaattatgctctatatgatggcttctttggtaaatccacagtgtgcccttctttaagatcatctacagcccagttgctggacgcgcttctgcttgcgaagtgacaaaccagtcgtggttccatatcaatggttacgagtggttattcccttctcccttgttttcccgagggaacacaggacgggctaggtgtccataatcataagtcccataaaggaaattaatttaattattatagagttcatatgcaacatttttgtcgtccctgatgaaatatgngtgaatttgt

SEQ ID NO: 154506 - DNA, 543 bp, Zea mays
  Clone ID: MRT4577_72490C.1
ccaacccgtccagcgactcgtacaagcgtatatcaaaagcatattttgcgaagcactgttgtatgccagtgaagactgatagaggtaactgatagagctaactgttagggtcgacaatgtcactagcgaggtgcaccaactttttatagaccttttggacggacctgagacactgtttcgatacattgttccgttggatagctccaccagctatcagaatgaactctgagactgccgccttatccagtgcacggatacactggaaggacacgcgctaagcgcatgtgttcaaggccgaactaacgaggatgaaaaaggaggaggtcaagaccgaagtctaatacggatacgtgctgatcataaccggccaaaggaggacggagacggaagacgaggacgactagagggcacgagtggagcgcatcagaggcgctttcgtctggcgcttaacgctgacggagaacacgaaagagcttcacttgaaagttggcctttaaaatggaccgctcacaatgaccaggacaaaaaccgtggagaaaaagc

SEQ ID NO: 154507 - DNA, 393 bp, Zea mays
  Clone ID: MRT4577_72491C.1
atgatacccagaaaaaggaacaatttgttaattcttggaatatatccatccgcgtacataccatgacccaatgagacaacccgatggaaatgatcaacttacgcatacctgagcaacaaatcttcaatttggagctgggattcagatttatatacatacattcctgttgatgctcttactactacgcgcactgattagcgctatgaactgatggataaaaccaattaacgtacggcatatatcttttgatgaaaactaaagcattactcccacgaaactaacaatgatagatgcctgcaactcagtatctatcataatacaggatttgccaccatccatggcctgagattgaatcggatctgtttggatggctgctaagctacctatattaaa

SEQ ID NO: 154508 - DNA, 836 bp, Zea mays
  Clone ID: MRT4577_72492C.1
accgcaacccgcaccgttccctttccccacctcgatctcgcgcgctagggtttcgtctcgccgccgccgccgccgccgccgccgctctcgccctcctccgcgaagatgccgaagaacaagggtaagggaggcaagaaccggaagaggggaaagaacgaggccgacgacgacaagcgcgagctcgtcttcaaggaagacgggcaggagtacgcgcaggtgacccggatgctcggcaacgggcggtgcgaggccatctgcgtcgatggcacgcgccgcctctgccacatccggggcaagatgcacaagaaggtctggatcgcggccggggacatcgtcctcgtcggcctccgcgactaccaggacgacaaggctgacgtcatcctcaagtacatgaacgacgaggcgcgtctgctcaaggcctacggggagctccccgagacgctcaggctcaacgagggcgtcgacgtcgatgggcccgaggacggcgaggagggcagcgactacatccagttcgaggacgaggacatcgacaagatctaagaaatctttttctccttgcggggctactctattattgtgtgactttgtgttctagtatgtggtggtatggtttaggctgggctggctgttgtggattagctatcctgcctgcgtggatcacaatcctgcctgagtgatcttgtaataggatcgaggtggttaaataatcgcggataatttcgtttttaatctggtacatgctgttacaggatgttctatactaagttgttattgttctggattgtgttctattatattgattgatttgccaagtagatccagtgtttattgagtcc

SEQ ID NO: 154509 - DNA, 810 bp, Zea mays
  Clone ID: MRT4577_72493C.1
acctcgaggccggccgggaacggaacttagctgccgagcgcccaaagccccaccgccgctcccatcaagcggcgctaaaggtttcctcgcccgcaacgcgatgccgaagaacaagggaaagggaggcaagaaccggaagcggggcaagaacgaggcggacgacgagaagcgggagctggtgttcaaggaggacgggcaggagtacgcgcaggtgacgcggatgctgggcaacggccgctgcgaggcgctctgcatcgacggcaccaagcgcctctgccacatccggggcaagatgcacaagaaggtgtggatcgccgccggggacatcgtgctcgtcggcctgcgcgactaccaggacgacaaggcggacgtcatcctcaagtacatgaacgacgaggcccgcctgctcaaggcctacggcgagatccccgacaacgtcaggctcaacgagggcgtcgttgatgaggaggaagccggcgcgcaggatgactatatacagttcgaggacgaggacatcgacaagatctgatgatcgcctcttccacacggtccctttccatggtaaactaaacgtatgcaaaacaattgtatccttctgttttgtggtggctaccatgactgaagaatggtagtcgtggtgatggtataatgatttgggcggagagtactgtgtataatgatttgggggcacttgttgtgcccaataaccccatatggtaatatagcaagtatgggactgaacgaaccgttcctctccctttctgttaatatgatatatttggttgggcatgatccaatttttttttttcg

SEQ ID NO: 154510 - DNA, 682 bp, Zea mays
  Clone ID: MRT4577_72494C.1
agaaccgcagaccgcaccaccaccgctccccatctcgatctaaagccgagggtttcgtccagctccgtcgccgcgacccaagccagagccagccccaccccagccagccagccatgccgaagaacaagggtaagggaggcaagaaccgcaagaggggcaagaacgaggccgacgacgacaagcgcgagctggtgttcaaggaggacgggcaggagtacgcgcaggtgacgcggatgctcggcaacgggcgctgcgaggccatctgcgtcgacggcaccaagcgcctctgccacatccggggcaagatgcacaagaaggtctggatcgccgccggggacatcgtcctcgtcggcctccgcgactaccaggacgacaaggccgacgtcatcctcaagtacatgaacgacgaggcccgcctgctcaaggcctacggggagctccccgacacgctccgcctcaacgagggcgtcgacgtcgacggccccgaggagggcgagggcgacagcgactacatccagttcgaggacgaggacatcgacaagatctaagcttttttcccctcctcctccctcgctcgatatactttgtgttctattctgttctaatagcgtccgtgtctgtctgtgtcggtcggtcggtgggctgttgtggattgatggatttggtaacgagaaatcgttgt

SEQ ID NO: 154511 - DNA, 420 bp, Zea mays
  Clone ID: MRT4577_72495C.1
gaaaataaatattaggggaagtttggaataagaatgaaaagatagtaagaggaagggagagaggggaaacatagaaattgggaggggggggagggggggggaaaaagcgcttcaaaaaaaaaacggggaaaagacgcccccaaaccaatacaggcacacagaagacagaaaagcccactctgaaagaatataaagagggaggaaccacgctgaaaaggatccaccgataaagaaagaaaaaaaaggggaggaaaggactgaaaaagaagggaaaccgagtaaaaaaggaacaccccaaaaaaaaaagcggaacagaaaatcccagaccaaaagaccagaaagggaaaaagagaggaatcttttggtatcccaaaagaagagggaacccgccatcagaagtatcgataaccaaaacttgaa

SEQ ID NO: 154512 - DNA, 330 bp, Zea mays
  Clone ID: MRT4577_72496C.1
aaaacaaaaaggccccaaaattgggcccatttcgggggaacaaggcccaaaaccccaatggcatgggggctttcgccaaaaaggttgggggcctcgacaaccggggaaaacaaaacaaagggccaatttgttgggaaaaaaaacccgggtaaacacccaaacaaaaatcccgcccaactttggccaagaaactggctagcaacaacccccaagttttgggtctttttttgggccccaagggggggggggggaccacacttttttttggggaagttgacacccctagggggcccccgcgcataatatttggggaaaaacatcttggccggg

SEQ ID NO: 154513 - DNA, 427 bp, Zea mays
  Clone ID: MRT4577_72497C.1
gggaggacaagctttttttttttttttttttgattttttttttgtttttttttttattttgttttattatttattcatgatattaggagaaactcctcaatagagcttgatgtatctatatatgaagtaatgcatgaagacgacgcagagggggggggaagtacgaccaagaatatatgcatggtgataataaagataaggatagaatgaatgtagcggccgattgtaatgtataacgggcagaacaaaagaaaaaaacagagaaggttgcctttggggaggaaccacgataagggcaaattgcaaaagaggggaagtatgatacaacggatgatgagctccgaaccaagcgtggtgaatgatggggccaaacatgatgactgagtgaaaatgtgactgtgaagacatctagaaaataatagaacag

SEQ ID NO: 154514 - DNA, 693 bp, Zea mays
  unsure (1)..(693): unsure at all n locations
  Clone ID: MRT4577_72498C.1
gccggccttttccgaatttttattaacataatatacaactaaaaaaatggaatgtctttttggcatcactggtaatggttttacattactttctgctgatactgttagcgctcgcagtattgttgtaatgaaaggaacagaagacaaatctcgtcaattaaatgcacacactgttttactttattctggtgagccaggtgatactgtcaactttgctgaatatatccaaagaaacatcaaattatatggcattagaaatggtattgaactcagtcctaaagcaactgcaactttcactcgacgtgaattagctgattctcttcgaagcagacacccatattctgttaatttaattgtaggtggctatgatgtaaagaagcaaaagtctgaattgtattggattgattatcttggagctatggcatcattgccattctgtgcacaaggttatggtgcttatttttgtacttcactaatggatcgccattacaaggaagatatgtctgtagacgaggcaaagactttgatgaaaatgtgtatacaagaactcaagacgagattcattgttaatttaccanatttcaaaacgacattaatcgataaagatggagttcactcgattgaattgtaaaattactgacacttgtacacagacgcacacacaaaaaaaaaaaaaaaaaaggcccctagggc

SEQ ID NO: 154515 - DNA, 251 bp, Zea mays
  Clone ID: MRT4577_72499C.1
ggtttctgatgtgccacatcaaacaccaatgctataccatacatgagaaagaccaaggcttgccaaaaaaaacaaaaacaagagtcaagaacacagaaaaagaccaaataccaaaacaaaaacaataaacaacaaaaaaaaaaaaaaaaaaaaaaaaaaaaaaaacaggggcggcccttttaaaaaacccaaatttacctaccctgcattacaacgtcatacctttatgatgcagtccccaaaattaaatt

SEQ ID NO: 154516 - DNA, 321 bp, Zea mays
  Clone ID: MRT4577_7249C.1
cccacgcgtgcgcccacgcgtccgaccagttgtcttatcccgccatggttagctcttacgccacctgtcgcgcctcgccaagcggttcactctgcttggtccctgctatggctcgccatcgtttttcccagctcgaatcttgcccgacccaagctgaacttcatccatggccactatctattcttcctagacggactcaagcgccctagacttcggtggttttagcttgacaccaactattctagtcgtgcgtgctgatgtccgagctcgtcctaaatgaactacattggtgtccgtaccatgcccgtgcttatccatggt

SEQ ID NO: 154517 - DNA, 830 bp, Zea mays
  Clone ID: MRT4577_724C.1
attgggtccctcgaggccggccggggcgccaattattagcctcgcgtacgtacgggattttaaagatgcattcaaaaagtccgggccgccggccagatggcaccgggtgcgtgagacgtgttaccgaagcaatctggaaccgcgcctccggccggacgccgctggactgggagacgcggtcggcgatcgcgctggcggcggctcgcggcgtggcgcacatccactccacggggcccatggcgtcgcacggcaacatcaagtcctccaatgtccttctcaccaagaactacgaggcgcgcgtgtcggaccacggcctccccacgctcgtcggcccctccttctcgcccaccagggtgtccggctaccgcgcaccggaggtcaccgacatccgccgcgtctcgcagaaggccgacgtctacagcttcggcgtcctcctgctggagctgctcacggggaaggcgcccacgcacgccgtcgtcaacgaggaggggctcgacctgccgcgctgggtgcagtccgtcgtgcgggaggagtggaccgccgaggtgttcgaccaggagctcctcaggtaccaaaacgtcgaggaggagatggtgcagctcctccagctcgccatcgactgctccgcgcagcaccccgacaggaggcccgccatgtccgaggtggccacgcggatcgacgagatccgccgctccagcctcggcgaccggcaggtggccgacagcgccgaaggcgacgagccatctctataacgccatagcagtagctcctcccctgatcaccaccacacgtactgtgtcaatcccagtgaatgaaaattgcttagtccg

SEQ ID NO: 154518 - DNA, 1238 bp, Zea mays
  Clone ID: MRT4577_72500C.1
ccaccgtccgcgatcctcgccctctcgagaccaccgaccgctcgtcctcatcccgtcatccgtgcccgcatctccgcagtcgtcgccagtcgccaccgctatccgagctcccccccccccccccccccaaccctcgcaacggacacacgtcctcatcctcgaaatgcctcgcagtcatcgttccaccgcaatagagcgcaatggctgtgcccgacgcaactccatgccgcactatggctcttgcctcgaatccgcccactccccacatcgagaacagccatcgacgccgcaagaggagacgcacccaagagagaggaggcgaccatgagggccaaggtcccgaagcgggagggttggtgggggaggaggaactaacgatagccatcgccatggccaccgacgacgactgataggactgcctcttcttcatcgatgtggtaacgacagaaatcaagtaatggggacggggctctccaggccatgcgggtcaaacgactggaacacgtccccttagcctccgaacgggaaccccgggctggagctctacagcgagaagaccaagcttgctgaagggccgcaggcttggaacatctagattttgttttgctaaggggagcgctatgtgagggtgggcaggttgctcaggtcaagtgggttcacggctgcgagcttcatggagagactattgatagcagttgtgtcctgcatcattctttgatcaagattgatgagggaaagatcagtatgccgaggatgggaccgggttgtagcttgcgatgctagatctgctcatcatgaaacccatcatgactaatgcatttatctgccatttaagtgtacaccagattatttgtatgtttgctgcttactatgcaaaatggcagctaaaagaagccctaaagcatgcgagctgcacctctaccggtttagtggccaaactggctgttactacgtttcaggtgttttatctgtaacttttattttgttctttttcttgttactcacttatttctgaataattaagtatatatgtcacttaaaaaaaaaaaagaatgcagatctggcatgtttgggaactaaaaatcataaaaattaaaataaaaaaaacaaatttaacacccccctcctttttcccaattttattttatttccaaaaaatttgggggggggccccttaaaaaaaatttattttttacccccggggggaggaaaaaattttttttttttctggcgccctt

SEQ ID NO: 154519 - DNA, 164 bp, Zea mays
  Clone ID: MRT4577_72501C.1
aatgcattggttcaagtttcatgtggtgagctgctgcaaatatggaggtatgacgacactttagaagaaggggatggcgaagaagaatatcattcggattctgaacttgccttcgatcgtgagttaccttggtacagtaactccatgatcaaagtcataaaggg

SEQ ID NO: 154520 - DNA, 654 bp, Zea mays
  Clone ID: MRT4577_72502C.1
ggccctaggggccttttttttttttttttttctttttttttttttttttttttttttttttttttttttttttttttttttttttttttttttttttttttttttttttttttttttttttcccaaggccgaaaccaaccccattgggggaccttcctaatcgcaaaaaacaaaaccccaggggggaaaaacccccccccggaaaaaaagggccgggtaacccaagaaaaccccaaaggggcccccaaaaaccggaaagggcagggaaaaagaaagcccccccccccaagggttggaaaaaacccccgccccccccggaaccccccggggaggggaaaattcggggtaacgggcccaaaggaaagggaccggcgggggctctcccccacccggggggggcggcccccttccccggaaaaaacacccccgggagaccgcccccccttttaaaccccccaacaagaggcccgggaagggtccccaaaaaattggcccacccaggaaccccaaaggggggggcccccaaaaaaaaaaccgcgggaactttcggggtggggcgggaaaataactggatcctccaaaatggggtgggcctggcaaaacccgggcccggttccaaaaatggggggaccttgggttgctcctccccaaaaa

SEQ ID NO: 154521 - DNA, 263 bp, Zea mays
  Clone ID: MRT4577_72503C.1
tattgttcaaacattgtgtgctagaaggaaatcagggctgaatcttgatgttccacatcgtcggaatgcaacctataatatgctaaatgaagcactaaattataagcttgctctcaataggcatgcagtagaggaacaccatgaatttctaattgaagaagattgagtaaaggtagaagctcttcatggtcctctataagagatcaacgatacaaccaaattattctcagctgtgagatgcctatctggatctagatcgcgag

SEQ ID NO: 154522 - DNA, 153 bp, Zea mays
  Clone ID: MRT4577_72504C.1
acgagacaagtacacggtcggggtgctcagaaaccaccaaacattgagtttttaatcaggtgccgtgggggggcttgatcatgaaaactactaacctatccacagtcggtgtactacagaacggttggcacagtcttgttaattggtaacaat

SEQ ID NO: 154523 - DNA, 200 bp, Zea mays
  Clone ID: MRT4577_72505C.1
aaaccgaaccagaataccgtttgttttttatcgcgtgccacgaaaatattggggaccatcaaaaggtgctaacgcgggtacaccagtacgactactataaattgagcagctactgggccagccagtcactgcagcatacacacgagactgacacaatccgtttagtccaccttctctatcttggtgcctgggccaccttt

SEQ ID NO: 154524 - DNA, 200 bp, Zea mays
  Clone ID: MRT4577_72506C.1
catacgcgcagtacggtccgtatccgggtcaccacgcgtccgccacgcgtccgagcgtagtcgtcgccacttctcccatggccgctccctccctcagccgtggcgtgggccgactgcatagcgctcatcatcatcactaaccttcctgtggtggatgcgccattgcctgatgcgagccgcggggacatgacggatccttg

SEQ ID NO: 154525 - DNA, 396 bp, Zea mays
  Clone ID: MRT4577_72507C.1
aaaaagcaccgtatgccccttatgttttacttttaacatattctgtcgggacgtacagcatttcttcgaccacagtccacgcggcccgttgcatgggcaagccggagccccctgttttacgccgcacaaacaacaaaaacataacgaacgggcaaccacaaacaaagatgggcaacaacctctattacgaaggggggaaaacccggggactagggaaaacatcacgagagccatcaggataacggggccccgtgggaaaaaacaaacaaaccctccaggttcggaagagttgacaaaaaaaaacgcacggggggcaacaccgtgtccttcacaacaaaaaacggggcacaccgggggaaacgtagccgccgaagaaaaaaacgtagtctttttccc

SEQ ID NO: 154526 - DNA, 301 bp, Zea mays
  Clone ID: MRT4577_72508C.1
gaatcaatacgccgcctccgcccgtccactccctcgccgcccccgtctcctcttctctcctctcccccgcatccacggccgcaggccgcagccagccactcgacgatctagtcgtttctctccccccgttctgacgcatagatgctgttgttttgctattactacaataaactcctaaccacctagataaatgaagcatcttaagtttttaattactgccattattattataatgatcaattattcttgttaattaattaaacaaaaatgttaatagtataaaaatataaaaatgtttttt

SEQ ID NO: 154527 - DNA, 484 bp, Zea mays
  Clone ID: MRT4577_72509C.1
ggaccaaacaggaagttttttggggccataacacaaaacccagttaaaacttaaaagcaggggggaaaaaaatctcccccgggggggcccatcctcccaaaacagccaaagcagggcccccggaccagggggtttcccaaaaggggcaaacaaaacccccgccccgggcctaattcgcccaaaacaagggccggttccttggacggcccgaggtccccccctgggcaaccggccccggaatcgtggaaccccccccttggggggggggggggggggcaagggccggggcccggggcggagtcaagggccccctaaccctgggaaagggagggtttgaaccccccccggaaggaaagggacccaaaggccacggcccccaacccccccccccctgagcccattgggttttgccgcccccggttccccccccccttaattgccaacagggacccccccccctgggttgggcccctggggccaaatt

SEQ ID NO: 154528 - DNA, 711 bp, Zea mays
  Clone ID: MRT4577_7250C.1
actaccagcgctctccagttccacttcactttttccctgatcggcgatcgcgccgagcgagcagcgcaataacgcacgatgaacttggcgtccgtcgttccctgcgcgcaggcattcctcgcgttaatgactcccgccgctggctcccaccgtcgggtccacacgcatgcgtcggcctccaagagcggattggcctgccgcgtcgcgcgcagcgggggcgcccggtggctgccggtctcctgtgcagccgggggcggtgcagttggtgatgcttttgttactgaggacactacaaatgtgaagtttcctcgggaagtaacagttccaggctatacacacccattggttgcagttggcacagatctccatttcggaagatgaagatccacgtcaagttgatgcagagatcaaatctgctactgttaattatgctctatatgatggcttctttggtaaatccacagtgtgcccttctttaagatcatctacagcccagttgctggacgcgcttctgcttgcgaagtgacaaaccagtcgtggttccatatcaatggttacgagtggttattcccttctcccttgttttcccgagggaacacaggacgggctaggtgtccataatcataagtcccataaaggaaattaatttaattattatagagttcatatgcaacatttttgtcgtccctgatgaaatatggtgaatttgtc

SEQ ID NO: 154529 - DNA, 634 bp, Zea mays
  Clone ID: MRT4577_72510C.1
attgggaccctcgaggccggccgggagtagttcccgacaataggataaggtatcaccgtcgagacgatgatggtaggctcgatccaagacgtgaacaccgtgatgtacatgcccaagatgggagtccgaacatgctttgcttagctggcgtaccgcccggccgccgaattcgactgtatgaaggtcggcgacaacgacattgacgttagcatcacctgttccctgcagaacgacaccagtaagggtttcaacaccgccaacatcgacggattcaagctcgacaactccttgatccttgcatcgtgtggaagtgggaagggaacgcccaagatgctgacctatgatctacgatccactagcataacggacatggagctgaaggacatcgatacttagaatgagcgctcgaccatcgatttcgacgaggaggcgaacgcgcatccagaacgtctagcatcacatgaacaagctgggcctgaagacgactgacttcacctccattgtggagggaatcgacgacaaggaccccgcctcgagatcaagaagacccagctcatgagccgtctcacatacactctaggagacatcgaagctcgtatcgaggacgacttccgacggaaccgtctgagaacca

SEQ ID NO: 154530 - DNA, 237 bp, Zea mays
  Clone ID: MRT4577_72511C.1
cggccggaagcaagaacagagtactcgatctccatctcgaccgtagctcaccgggcagctacgctacgacgaagcatggcgtccgtcaccgcccgcgccccggtcgcggtcctgcgcccgtaggagtctctcaagtagacgacaaggttcttcacaagtttacgagtgaaatcaacaagagatcgatggactgtgacaccgtgctcaagtactccttccttaacaagaagtccgaat

SEQ ID NO: 154531 - DNA, 1140 bp, Zea mays
  Clone ID: MRT4577_72512C.1
ggtgtgctgcgtgagctcaggggcgatgatggtgtggcttatgccatcattgagctgcaggaggagtgtgattcgcggggcacccagatcctacgccgttatactgattacaggaagcttgcacgacttgcatcagatataaactcctacacgaagaacctcctttcagtcatgggttccatggccagtgctgctggaggcaatgaagggcctgatcccagggaaattgagctttatcttgaggagattcttgcgttgacacagcttggggaggactacactgaatttatggtgaacaagatccgtggattgagagatgtcaagcctgagcttgggccgcgggcgatgaaggccttccgtaatggtaacttctataaaacggagcaggatctgactgggttctatgtgatctttgaggagtttttcatggtggagaatgtgaggaaagccatacggattgatgagcccatatcagatggtctcacaacgtctatggtggatgatgtattctttgtactgcagagttgctgccgccgggctgcttccactgcaagcataaactctgttcttgctgtgcttggtggggcaatgagccttctaagcaatgagtatcaggaggcactacagtggaggatgcgggagccaaatttgggtgcaaagctcttccttggtggtgttggagtgcagaagacaggtgaggagattgcgactgcactgaacaacattgacattagctctgagtatgttctgaagctccgtcatgagattgaggagctctgcgtagagatttttcatactccagctgatcgagagaagatcaagtcatgtttatcagagctaggagagatcagtgcttcctttaagaagatccttcattctgcgctggagcatttagtggcatctgtggcgccacgcatccgtccaatccttgacactgttgctactgtcagttatgggttggatgatgctgaatatggggaaaatgaggtgaatgatccatgggtgcagaagctaatacttgcagttaacactaatgttgcttggctccagccagtgatgacaccaaacaactacgattcctttgtgcacttgatcattgacttcattgtcaaaaggctcgaggtgattatggtgcacaag

SEQ ID NO: 154532 - DNA, 282 bp, Zea mays
  Clone ID: MRT4577_72513C.1
tttttttttttttttttttttttttttttttttttttttttttttttttttttttttttttttttttttttttttttgcggggccgccccaattaatttttaaataattgacgtttttgttttcccaaaatgaaaactggaaaactgtttttgaatgaggggccggttttttttttcaggagtgggtttttgtttgcagatttaaaaattcaaattttgggccgcaggggttcaacaacaaatagtttccccgtccttttggtggtgcagttttttacttac

SEQ ID NO: 154533 - DNA, 326 bp, Zea mays
  Clone ID: MRT4577_72514C.1
catataaaaaaaaaactttatggtacttttcttgatccaccaaaccgtgtgcccacattttaaatatcgaggtctctttttttctttccctttaataaaaagaggacaccggacccgctttttttttccgttgagggggaatgcttccttctttgctgagataccatatcatataacgggggataaaggattttttattgtgtttccacggaaattaattacaatcggccggccgattggggcaacccctgctgaggaggtgcctacatgacgaactgattgtgcgaaacataaaacattttcaaacaagacaaggaacgtttctg

SEQ ID NO: 154534 - DNA, 1232 bp, Zea mays
  unsure (1)..(1232): unsure at all n locations
  Clone ID: MRT4577_72515C.1
aattcggcacgaggaaacgatccccctgctcgatccctacacgtctcctgaaacgcacgccctcccttggctgccccccctccccttccctttcgccccctctcgcgcaatttccccaacccggaccccaaccccggcggcgctgcagtccaccgcaagtcacctccacctcacgcgaggcctccagccctcgtcgccccgcgcttctcccccacgacccggccgccttcgcgcttgcgccccgcggatcgccggcgcgaccctcaggtgtgtgcgtctggcatggcaagggacctatcaactggccctgctttctcttttcatgaatgatgtccttccgttcgaaggacgcacatgcacaaacaagacttaactggccatggagaagccaatcgccgttatcagcgcagctgcttgttgatattccacctgaaatagagttgtccgactaccggagattgccaagttctcgaagcgagagcccatctggacttctccatggcgaaggcgtcaaggaagaacctatccctgatctggacattttctttgaaaggctttacgaatatttctgcgcaaaagggctcaggtgtatcattaccaaatggataatagagatcctcaatgtactttttatggtatgctgtatcgggttctttttcttatttgttgattgggatactcttattcatttgaaatgcggtgtggaggcacttgagtctggggagaaaccatgtgatcttatgaaggccattaagcatgatccattagttcccttcacattgcccaaaatgataactgttggatcaatggtcataatgacagcttatggacttaccaactttctcaagttctttgtacagttaagaagtacactcaatgttcgtcagttctactatgacagacttaaggtcaatgatcttgagattcaaactatatcatggcccaaaataattgagaaagttgtcctgctccagaaatctcaaaaactatgtgttgttagggatctctcagagcatgatattatcatgagaatcatgaggaaagaaaattatttgattgggatggtcaataaaggcattctttcttttccaattcattcttgtgtgcctggggctggcccaactggatcacatgagcatggcaggagaaactatctgatacttccaaagtcccttgaatggaccttanactggtgcatctttcaaagtatgttcgatagtaaattttgtgta

SEQ ID NO: 154535 - DNA, 1598 bp, Zea mays
  Clone ID: MRT4577_72516C.1
ggcgtccacatccattatcgcgctcaggctcgtgccgctcgtggtcgtacgctgcagcaggcgatcggagcaaactaagaagcgaacaggccgcccgtcgacgccatggcgccggatctggtgaacggcgtgctcaactgggtggggacgccggccatggtggccagcctgctgctcttctacccgccctactatctcttcaagacatgctactccttcctttcctggctcttccccgaggacctcgccggcaaggtcgtcctcatcactggcgcttcctccggcatcggcgagcaactggcctaccagtacgcgctgaatcgggcgtccctcgccctcgtcgcgagaagggagtcgagcctccggcacgtcgccgaccgagcactcgagctcggcgcgcgcgacgtcgtcgtcctcccaggcgacgtctccgcccccgacgactgcgacaggttcgttcggaccgcgatcagtcactacgaccgattggaccatctcgtgtgcaatgccggcgtcgcgagcgtcggcgcgttcgaggagatcccggacgtcaccagctacagctcccagcttgacgtcaatttctggggttccgttcaaacaaccttcgctgccctgcctcacctgaagaggagccgaggaagaatcgtggtgacggcatctgcgaccggatggaacccagttcctagaatgagcatctacaacgctgccaacgctgcgctcatcaacttcttcgagacgctgcggaccgagctagggaaccaggtcgggatcacggtggtgacgcccgggtgggtcgagtccgagatgtccagagggaagttcctcaaggagcacggccaagtggaggtcgatcaagagatgcgcgacgtgagtgaggaacacgaccatgcaccggtcgagtgcctgctgatgaatcaaccccctgcgacgcgtgatcgtagtagttaataatacgctgctaactaatagcgacgtgtttccaggctcagatcggcctgttcccggtggagtacgccaagaactgcgccaaggccatggtgcaggcggcgcggcaaggcgagcggtacctcaccgtgccggcgtggttcggggcgatgtacctgtggcggctgttcgcgccggaggtggtggaggcctgctaccgcctcctgtacatgcacggccatggcgccaggcaggccgacgcgcccagcaggaccatggccgaggcgggtggcaagcagctgctgtacccgacctcgctgcgctctgaggagattaaggagtgacctaactgccaactgttgtgtgtgtgtgtgtgtgtgtgtgtttgtgtgtgcagcagagctctcagaacacctgtggtcatgtttaatatgtgctagctgtgtgccttgacaatgaataagctgctgctctctcttttgcatagtttaaatctacaattctgtagtcgatataattgttttgtttgaagctgttgaagtctacaattctgcagttgataattgtttttgtatcaagttgtttagagcatcggatataacgttctatttttcaagattttagaatttgaattgaaagtttcccaaataacatcaaatgttgacatggtc

SEQ ID NO: 154536 - DNA, 465 bp, Zea mays
  unsure (1)..(465): unsure at all n locations
  Clone ID: MRT4577_72517C.1
ctaaggttacattccattgttatcttcttacgtgccccatgcagtcgctgacttcttggctaagctctagcacgacctgcattgctatataagtcggttaaggctantgcactagggatactgagtgtgagcactccatagaacaaatggaagacattctttgcactagagaaggtgtttgtcacccatgatcacagactatatgcagatgacatagctgacaagctgtgagaatccttagctacatactgttgtggagtggcgctgacatggcgaggtatttttggtcgactccaacgaacagggacaatggcgctctggatcacccaggaggatgataaacttgttaaacacatctcagagcatcgcctttgctaatggattgctattgcacaactctcttggctcacacagtgaggagagagatgcccacatgcagaggtgaactatctaacgcgctaactg

SEQ ID NO: 154537 - DNA, 500 bp, Zea mays
  Clone ID: MRT4577_72518C.1
aaaaaaaaaaaaaaaaaaattaaaaaaaaaaaaaaaaaaaaaaaaaaaaaaaaaaaaaaaaataaaaaaaaaccaaacaaaagaaaaaaaaaaggacggcccggcggcggccgccaaccaaacccccccctccctgccccgcccatgcaacttctatactgtgactgcagcgcacttcaatgcccgggcccgggcccacggcttccccggaccagccaatccatcccctgccctaccccaattgaatcgcatccccttccagccccctagcatactttggagtagtgccgaacagaccgcctcctcactcctttcctaccccagtctggcctgtggagagccaccgcgccccgccccgtaccgccccaccagccgcggggtttggcgcagctacccccaccctttcccctgcccctgcccgccccctcgttccggttccttcccttcctttccctccccgtccgccccctttccccgcccggcccgacaaaggtggaacc

SEQ ID NO: 154538 - DNA, 810 bp, Zea mays
  unsure (1)..(810): unsure at all n locations
  Clone ID: MRT4577_72519C.1
atggcccatctcgtgtgcaatgccggcgtcgcgagcgtcggcgcgttcgaggagatcccggncgtcaccagctacagctcccagcttgacgtcaatttctggggttccgttcaaacaaccttcgctgccctgcctcacctgaagaggagccgaggaagaatcgtggtgacggcatctgcgaccggatggaacccagttcctagaatgagcatctacaacgctgccaacgctgcgctcatcaacttcttcgagacgctgcggaccgagctagggaaccaggtcgggatcacggtggtgacgcccgggtgggtcgagtccgagatgtccagagggaagttcctcaaggagcacggccaagtggaggtcgatcaagagatgcgcgacgctcagatcggcctgttcccggtggagtacgccaagaactgcgccaaggccatggtgcaggcggcgcggcaaggcgagcggtacctcaccgtgccggcgtggttcggggcgatgtacctgtggcggctgttcgcgccggaggtggtggaggcctgctaccgcctcctgtacatgcacggccatggcgccaggcaggccgacgcgcccagcaggaccatggccgaggcgggtggcaagcagctgctgtacccgacctcgctgcgctctgaggagattaaggagtgacctaactgccaactgttgtgtgtgtgtgtgtgtgtgtgtgtttgtgtgtgcagcagagctctcagaacacctgtggtcatgtttaatatgtgctagctgtgtgccttgacaatgaataagctgctgctctctcttttgcac

SEQ ID NO: 154539 - DNA, 1191 bp, Zea mays
  Clone ID: MRT4577_7251C.1
cgttccccccctcgagccggcggggacgacagataactgggtaaggccctcggcatccttcggcactcaccagcgctctccagttccacttcacttcatccctgatcggcgatcgcgccgagcgagcagcgctataacgcacaatgaacttggcgtccgtcgttccctgcgcgcaggcattcaccgtgttaatgactcccgccgctggctcccaccgtcgggtccacacgcatgcggcggcctccaagagcggattggcctgccgcgtcgcgcgcagcgggggcgcccggtggctgccggtctcctgtgcagccgggggcggtgcagttggtgacacttttgttactgaggacactacaaatgtgaagtttcctcgggaagtaacagttccaggctatacacacccattggttgcagttggcacaggttacagagaaaagttttttgtcaaagtatatgctgccgcgttctatgtagattactcacttcgccttgatactgagcaatggaaagcaaagactggtattgagagctttgacagttcctctgttttcgactccatttttaaggcaccggttgtgaaatcattgagtataattcttgttagagccgttgatggcaagacctttgtgaatgctctaaatgatgtcattgcccgccaaataaaaaacccaaacgccgaggaagaatcttccctgtctaccttgcagaatacctttcttgggcgcaatctcaaacagggaacaagcatatacttaacttggcttgaacccaaaagaatgctgatctccatttcggaagatgaagatccacgtcaagttgatgcagagatcaaatctgctactgttaattatgctctatatgatggcttctttggtaaatccacagtgtgcccttctttaagatcatctacagcccagttgctggacgcgcttctgcttgcgaagtgacaaaccagtcgtggttccatatcaatgggttacgagtggttattcccttctcccttgttttcccgagggaacacaggacgggctaggtgtccataatcataagtcccataaaggaaattaatttaattattatagagttcatatgtaacatttttgtcgtccctgatgaaatatggtgaatttgtcacctattatgattggcagattgctttacattttcattaaaaaaaaaaaaaagaaa

SEQ ID NO: 154540 - DNA, 5409 bp, Zea mays
  Clone ID: MRT4577_72520C.1
atggctcgtcttagacacactgcacataagtcggtgattcctttcctgccgtctcgacttgcggagcgtcctctgcaccgcaccgtgtccggacagtcgagtcacctggagaggctgcaccaccgcctgcgtgaggagcaggaacgccggcgccagcacggagagcagcagggctcttcctcctcaccccagcaggaggtggagaccgtgaggccccgttcctctgttgctcagctggaggcgccccttgttccaccgcgggacgtcccggctgttggaggagctactggaggagatcccgacgacgacgactcagaccacagcacagagtcttctgagccgcaggaggcggaaggatgggctttcgaccgacacacctggttgatcgagtatcgttgtgtagtctaccagcacagtcgcgggaggtacccggaccgctgggaggctacctgcctagttcgccgtccggaggatgacctccggggtgcggaggccgtttcggagcactattccatctccgagagggacactgcagaggcggctatgcaggatgcagcacgacgtgcactctctcagtactgttctttgttcggtggcgtggccgacggtcttaaccttcggtactacccccgccgccctactggcagcacagagagtgtggttgtttcacctgttggtgaggctaaccctaggttgagcagcacagtcaacctagtcgcagtgcttaacacggagctggatcactctctggacgagctaagcagggctcgcacggagattgcggagttgcgtgctgagttggcagagcgccatcaccaggagggtggttctcccgctcctgtcgggactcagcacccataccgctcaccgccacgtggtcaccacacttatggttcccctattgtaagatcaatgctgatgtatgaatgtcttccacagatgtctgacaacaggcgccgatgcaacaggcgtgctcagctggagcagcatgaccagcaggaggaaaatcagaggcagcctcccccaccacccccgatgtcagtggagcagatgttcttgatgcagacccaggcagtgcaggccattgggcagactctggcagccatgcagcaggctcaacagcagccccaaccccagttgcaagtgcagatgccccagatgccacgagataagcgtggtgagttcatgagagggcaccctcctaccttcgcccattctgctgaccccatggatgcagaagactggctgcgcgcagtggagagggagctacgcacccccaatgcgacgacagggagaagcgagagtttccgtcggtaccatgtgccagagggactgatgatcgtgaagaaggaggagtttctggctctgaagcagggacccatgtctgttagtgagtacagagacaagtttctgcagctgtctcgttatgcacccgaggatgtcaacactgatgccaagaggcagtacaggttcatgagaggtttggtggatcccctgcattaccagctgatgaatcataccttcccaaccttccagcacctgatcgatagggcagtcatgactgagaagaagcgtaaggatatggaagatcggaagcgcaagatgagtggaccccagtccggaggcatcagccgcccacgtttctcaggcagttcatctcagcaaggcagatctggtcacccacagggatatcagaatcagaatcagcgtccgcatcagcagcagtttcagagacagtacccgcagcagcagcagcagtatcgtcagcacagccagcagggaggtaatcagtatcagaagcagaacaaccaggcacctcgccttcctgccccagcagcgaatcagaacaaccaagcagccccagcacaaggaggaggcagaggatgtttccactgtggagatcaaggccactgggcgatgcagtgcccaaagaagtcggctcagcagcagatcaaccccaatgctccagcaaggcaaggtgtactgcagccggcagcaggcaatcgtaaccaagcgtacaaccgtggaaaggtgaaccacttggaggccgaagcgatccaggatgcaccagatgtggcagtaggtatgttctcagtcgaatctcatcccgcgaaagtgctatttgatactggtgcaactcattcttttgtcactgcaacatgggtagaattgcataacatctcagtagaggcaatgatgccacccatgaggattaattcggttggtggcaaggtgcaaacagataaaatatgttcaaacataatggtggaaataagggggataggattccccagtgacttaatagtaataggcacccctgggatagatgtcattctaggaatgaactggttaatgaagtatgaagcaaatgttagttgtgacaagaggaccataacattgaagtcctcgtcaggagaagaggtagtggccgagctaaggatgcccaagtcagaagagggagtctgtcaccagatttcagttgatagtaaggagcccaacccgctcgaggctatcaaggttgtgtcggactttccggatgtgtttcccgaggagctaacgggcatgccacccgagaggaaagtcgaatttgccatagagcttatccctggtaccgcccccatttcaaagagagcctatcgagtgtctggaccagaattggtggaactcaagaagcagatagacgagatgttagagaagggttacatcaggccaagcacctcgccttgggccgctccagtgttgtttgtagagaagaaagatggtaccaaaaggatgtgcatagactacagagccttgaatgaagtcactatcaagaacaagtaccccctgccaaggatagaagatttgttcgaccagctcagaggtgccagcgtattctcgaagatagatctgagatcaggttaccatcaactcagaatccgaccctcggacataccgaagacaacattcatcaccaagtacgggttatatgagttcacagttatgtcctttggtttgacaaatgcgccagccttctttatgtacctgatgaacagtgtgttcatggactatctagacaagtttgtggtagtgttcatcgatgacattctcatatactctcaaagtgaggaagatcatgtagagcatttgaagatggtattgcaaaggcttcgagaacatcagttgtatgccaagctgggcaaatgcgagttctggattcatgaagtcttatttctgggtcacatcataaaccaagatgggttagcagtggatccaaagaaagtagcagatatcctgaactggaaagcaccgaaagatgttcgtgggatcaagagcttcattggaatggctgggtattataggcgtttcattgaaggtttctcgaagattgctagaccaatgacagcgttactcgcgaagaaagttgagtttaagtggactcaaaagtgtcaggaagcatttgaggagctgaagaatagattgactacagctcctgtgttagtcctgcctgatgttcacaagtcattctcagtgtactgcgacgcttcttacaccggtttgggatgtgtgctaatgcaagaagggagagttgtagcatactcatctcgacagctgaagatccatgagaagaattaccccacacatgacctggaattggcagcagtggttcatgccttaaagacctgtagacattacctgtatgggcagaagtgcgacatctacacagatcataagagtctgaagtacatattcacccagtcagagttaaacatgaggcagcgaagatggttggaactgatcaaagactatgagttggagatacattaccatccgggcaaagccaatgttgttgcagatgctctgagcaggaaaagtcaagtcaatatgttggcctcgcacccaatgccgtatgagttagccaaggagtttgacagactgagcctcggtttcctgaatagtacgcaaggagtgacagtggaattagagcctaccctagagcgggagatcaaagaagggcagaaggatgatgaaaacatcaacaagatctggcagctgatcctagaaggaagaggcaaagactttcgagaggatgaagaaggagtaatctggttcaaggaccgattgtgtgttcccgacctcaaacctattcgggaattgatcctcaaggaagctcatgagacagcctactccatacacccagggagtgagaagatgtaccaggatttaaaaaggaggttttggtggtatggtatgaaaagggagatcgcagaatatgtcgccatctgtgatagctgtcagagaaccaaagcggagcatcagaggcctgccggattgttgcagccattgcggattcctcagtggaagtgggatgagatcgggatggatttcatagttggcctacctcgtacccgggccggctacgattccatctgggtggttgtggaccgcttaacaaaggtggcccacttcataccggtgaagacgacatacaccggagcaacgttagctgagttatacatgtcacgaatagtctgccttcatggtgtgccgaagaagatagtgtcagatcgaggaacgcagttcacatctcatttttggcagcagctacaagaagctttgggcacacatttgaacttcagctcagcttatcacccgcagacagacggtcagactgaaagaactaatcagatcctagaagatatgttgagagcctgtgcgttgcaagacaagtcaggatgggacaaaaggttaccttatgcagaattctcctacaacaatagttaccaggccagcttgaagatgtcaccgtttcaggcactctatgggcggagttgcaggactccgctgcattgggaccagcctggagagagacaggtgtttggccccgacatcttgcttgaagccgaagagaatatcaaaatggttcgggagaatctgaagacagcccagtcaagacagcgaagctatgcgaacagaaggagaagagaactgagttttgaagtgggagactacgtctatctgaaggtgtcacctatcaggggagtcagaaggttcggagttaaaggcaagttagcaccccggtacgtcggaccatatcagattcaagcaaagcgtggagaagtggcctaccagcttgacctaccagagagcttgtcagcagtgcacaatgtgttccatgtgtcgcaattgaaaaagtgtctgcgagtaccagaagaacagttgccaatggagggtttggaggtccaggaggatctgacatacatagaaaagccaacgcagattctggagtttgcagacagagtcacccggaggaatactatcagaatgtgcaaagtcagatggggtcaccactctgaggaagaagcaacctgggaacgagaagatgacctgaaggccaaataccctgaactctttgctgaccaaccttga

SEQ ID NO: 154541 - DNA, 3840 bp, Zea mays
  Clone ID: MRT4577_72521C.1
atgtctgacaacagacgccaaggcaacaggcgtgttcagcaagagcatcgtgcccagcaggaggaagaaccccagcaacaccggaggcagccttccccgccacccccgatgacagtggagcagatgttcttgatgcaaactcaggcagtgcaggctattgggcaggctctggtagccatgcagcaggctcaacagcaacctcaaccccagttacaagtgcagatgcctcagatgccacgggacaaacgtggcgagttcatgagagggcaccctcctaccttcgcgcactctgccgaccccatggatgcagaagactggctgcatgcagtggaaagggaactgcgcaccgctcgatgtgatgacagggagaaggttctgtacggtccccgccaactaaggggagcagcccagtcctggtgggagtcctacctcgccacccatgctgaccccgaagccatcacttgggaggaattcagagagaatttccgcaggtaccatgttccagagggactgatgatcgtgaagaaggagtttctggctctgaagcagggacccctgtctgttagtgaatacagggacaggtttctgcaactatctcgttatgcacctgaagacgtcaacactgatgctaaaaggcagtacaggttcatgaggggtttggtggatcccctgcattaccagctgatgaatcacaccttccccaccttccagcacctgatcgatagagcaatcatgaccgagaggaagcgcaaggaaatggaagatcggaagcgcaatatgagtggaccacagcccgggagcaacagccgcccccgcttctcaggaagttcatctcagcaaggcaagcctgcaacgaatcagaacaaccaagcagcctcagcacaaggaggaggcagaggatgcttccactatggagagcaaggccactgggcgatgcattgcccaaagaaggtggcgcggcagcagacaaaccccaatgccccaacaaagcaaggtgtacctcaacaagcagcaggtaatcgtggccatgcgtacaaccatggaaaggtgaaccacttggaggccgaagcgatccaggatgcaccagatgtggcagtaggtatgttctcagtcgaatctcatctagcaaaagcgctatttgatactggtgcaactcattcatttgtcactgcaacatgggtagaaatgcataacatctcagtagagtcaatgatgccacccatgagggttaattcggtcggtggtaaagtgcaagcagataaaatatgctcaaatgtaagggtggaaataagggggatagggttccccagcgacctaatagtaatagacacgcctggggtagatgtcatcctagggatgaattggttaatgaagtatgaagcgagtgttagctgtgacaagaggaccgtaacattgaagtccccgcccggagaggagatttcggttgatagcaaggaggccaacccgctcgaggctatcaaggttgtgtcggactttccagatgtgtttcccgaggaactaacgggcatgccacccgatagaaaagtcgaattttccatagagcttatccctggcaccgcccccatttctaaaagagcctatcgagtgtctgggccagaattggtggaactcaagaagcagatagatgagctgttagagaagggttacatcagaccaagtacctcgccttgggccactccagtattgtttgtggagaagaaagatggtaccaaaaggatgtgcatagattacagagccctgaatgaagtcaccattaagaacaagtaccccctgccaagaatagaagatctgtttgaccaactcagaggtgccagcgtattctcgaagatagatctgagatcaggttaccatcaactcagaatccgaccctccgacataccgaagacagcattcatcaccaaatatgggttatatgagtatacagttatgtcctttggtttgacaaacgcgccagccttctttatgtatctgatgaacagtgtgttcatggactacctagacaagtttgtggtagtgttcatcgatgacattctcatatattctcaaagtgaggaagaacatgtggaatatttgaagatggtattgcaaaggctacgagagcatcagttgtatgccaagctgagtaaatgcgagttctggattcatgaagtcttgtttttgggtcacatcataaaccaagatgggttagctgtggatccaaagaaagtagcagacattctgaactggaaagcaccgaaggatgttcgtggaatcaagagtttcattggaatggccagatactataggcgtttcattgaaggcttttcaaagattgctagaccaatgacagcgttgctagcaaaggaagttgagtttaagtggacccaaaagtgccaagaggcatttgaagaactgaagaatagattgactacagcacccgtgttggtcctgcctgatgttcacaagccattctcggtgtactgcgatgcttcctacactggattgggatgtgtgctaatgcaagaaggaagagttgtagcgtactcatctcgacagctgaagatccatgagagaaattatcccacacacgacctggagttggcagcagtggactacgagttggagatacattaccatccaggcaaagccaatgttgttgcagatgctctgagcaggaagagtcaagtcaatatgatggccacgtacccaatatcatatgagttagccaaggaattcgatagactgagcctcggttttctgaaccgtacacaaggagtaacagtggaattagagcccaccctagaacgggagatcaaagaagggcagaaggatgatgaaaacatcaacaagatccagcagctgatcttagaaggaagaggcaaagactttcgagaggatgaagagggagtaatatggttcaaggaccgattctgtcaaagaaccaaagcagatcatcagaagcccgctggactgttgcagccattgcagattcctcagtggaagtgggatgaggtcgggatggattttatagttggcctacctcgtacccgggccggctatgattccatctgggtggttgtggaccgcttaacaaaggtggcccatttcatacatgtgaagacaacgtacatcgaagcaacattagtcgagctatacatgtcccggataatctgccttcatggtgtgccgaagaagatagtgtcagatcgaggaacacagttcacctctcatttttggcagcagctacaagaagctttgggcacgcatttgaacttcagctcggcttatcacccgcagacagaaggtcagactgaaagaactaatcaaattctagaagatatgttgagagcctgtgcgttgcaagacaagtcaggatgggacaaaagaaggagaagagaactgagttttgaagtgggagattacgtctatctgaaggtgtcgcctatcagaggagtcagaaggtttggagtcaagggcaagttagcaccccggtacgttggaccatatcagattcaagcaaagcgtggagaagtggcctaccagctcaacctaccagaaagtatgtcggcagtgcacaatgtgttccacgtgtcgcaattgaagaagtgtctgcgagtaccagaagaacagttgccagtggaggaattggaagtccaagaggatctgacatacatagagaggccaacgcagattctggagtttgcagacatagtcacccggaggaacaccattagaatgtgcaaagtcagatggggtcaccactctgaggaagaatcaacctgggaacgggaagattatctgaaagccaaataccctgaactctttgctgaccaaccctga

SEQ ID NO: 154542 - DNA, 4326 bp, Zea mays
  Clone ID: MRT4577_72522C.1
atgtcagtggagcagatgttcttgatgcagacccaggcggtgcaagccatcgggcagactctggcagccatgcagcaggctcaacagcaaccccaaccccaattgcaagtgcagatgccccagatgccacgagataagcgtggtgagttcatgagagggcaccctcctaccttcgcccattctgctgaccccatggatgcagaagactggttgcgcgcagtggagagggagctgcgcaccgcccaatgcgacgacagggagaaggttctgtatggtccccgccagctgaggggagcagcccagtcctgtgagtacagagacaagtttctgcagctgtctcgttatgcacccgaggatgtcaacactgatgccaagaggcagtacaggttcatgagaggtttggtggatcccctgcattaccagctgatgaatcacaccttccccaccttccagcatctgatcgatagggcagttatgactgagaagaagcgtaaggatatggaagatcggaagcgcaagatgaatggaccccagtccggaggcatcagccgtccgcgcttctcaggcagttcatctcagcaaggcagacctggtcacccacagggatatcagaatcagaatcagcgtctgcatcagcagcagtttcagagacagtacccgcagcagcagcagcagtatcgtcagcacagccagcagggaggtaatcagtatcagaagcagaacaaccaggcacctcgccttcctgccccagcagcgaatcagagcaaccaagcagccccagcacaaggaggaggcagaggatgtttccactgtggagatcaaggccactgggcgatgcagtgcccaaagaagacggctcagcagcaaaccaaccccaatgccccagcaaggcaaggtgtactgcagccggcagcaggcaatcgtagccaagcgtacaaccatggaaaggtgaaccacttggaagccgaagcgatccaggatgcaccagacgtggcagtaggtatgttctcagtcgaatctcatcccgcgaaagtgctatttgatactggtgcaactcattcatttgtcactgcaacatgggtagaattgcatagcatctcagtagaggcaatgatgccacccatgaggattaattcggttggtggcaaggtgcaaacagataaaatatgttcaaacataatggtggaaataagggggataggattccccagtgacttaatagtaatagacacccctgagatagatgttattctagggatgaattggttaatgaagtatgaagcaaatgttagttgggacaagaggaccgtaacattgaagtccccgtcaggagaagaggtagtggccgagctaaggatgcctaagtcagaagagggagtctgtcaccagatttcagttgatagtaaggagcccaacccgctcgaggctatcaaggttgtgtcggactttccggatgtgtttcccgaggagctaacaggcatgccacccgagagaaaagtcgaatttgccatagagcttatccctggtaccgcccccatttccaaaagagcctaccgagtgtctggaccagaattggtggaactcaagaagcagatagatgagatgttagagaagggttacatcaggccaagcacctcgccttgggccgctccagtgttgtttgtagagaagaaagatggtactaaaaggatgtgcatagactacagagccttgaatgaagtcactgtcaagaacaagtaccccctgccaaggatagaagatttgttcgaccagctcagaggtgccagcgtattctcgaagatagatctaagatctggttatcatcaactcagaatccgaccctcggatataccgaagacggcattcatcaccaagtacgggttatatgagttcgcggttatgtcctttggtttgacaaatgcgccagccttctttatgtacctgatgaacagtgtgttcatggattatctggacaagtttgtggtagtgttcatcgatgacattctcatatactctcaaagtgaggaagatcatgtagagcatttgaagatggtattgcaaagacttcgagagcatcagttgtatgccaagctgggcaaatgcgagttctggattcatgaagtcttatttctgggtcacatcataaatcaagatgggttagcagtggatccaaagaaagtagcagatatcctgaactggaaagcaccgaaggatgttcgtgggatcaagagcttcattgggatggccggatattataggcgtttcatcgaaggcttctcaaagattgctagaccaatgacagcgttactagcaaagaaagttgagtttaagtggacccaaaagtgtcaggaagcatttgaagaactgaagaatagattgactacagctcctgtgttagtcctgcctgatgttcacaagtcattctcagtgtattgcgacgcttcgtacaccagattgggatgtgtgctaatgcaagaagggagagttgtagcgtactcatctcgacagctgaagatccatgagaagaattatcccacacatgacctggaattggcagcagtggttcatgctttaaagacctggagacattacctgtatgggcagaagtgcgacatctacacagatcataaaagtctgaagtacatattcacccagtcagagttaaacatgaggcagcgaagatggttggaactgatcaaagactatgagttggagatacattaccatccgggcaaagccaatgttgttgcagatgctctgagcaggaagagtcaagtcaatatgttggcctcgcacccaatgccgtatgagttagccaaggagtttgacagactgagcctcggtttcctgaatagtacgcaaggagtgacagtggaattagagcccaccctagagcgggagatcaaagaagggcaggaggatgatgaaaacatcaacaagatccggcagctgattctagaaggaagaggcaaagactttcgagaggatgaagagggggtaatctggttcaaggaccgattgtgtgttcccgacctcaaacctattcgggaactgatcctcaaggaagctcatgagacagcctactccatacaccctggaagtgagaagatgtaccaggatttaaaaaggaggttttggtggtatggcatgaaaagagagatcgcagaatatgtcgccatctgtgatagctgtcagagaaccaaagcagagcatcaaaggcctgccggattgttgcagccattgcggattcctcagtggaagtgggatgagatcgggatggatttcatagttggcctacctcgtacccgggccggctacgattccatctgggtggttgtggaccgcttaacaaaggtggcccatttcatacctgtgaagacgacatacaccggagcaacgttagctgagttatacatgtcacggatagtctgccttcacggtgtgccgaagaagatagtgtcagatcgaggaacacagttcacctctcatttttggcagcagctacaagaagctttgggcacacatttgaacttcagctcagcttatcacccgcagacagacggtcagactgaaagaactaatcagatcctagaagatatgttgagagcctgtgcgttgcaagacaagtcaggatgggacaaaaggttaccttatgcagaattctcctacaacaatagttaccaggccagcttgaagatgtcaccgtttcaggcactctacggacggagttgtaggactccgctgcattgggaccagcctggagagagacaggtgtttggccccgacatcttgcttgaagccgaagagaatatcaaaatggttcgggagaacctgaagacagcccagtcaagacagcgaagctatgctgacagaaggagaagggaactgagtttcgaagtgggagattacgtctatctgaaggtgtcacctatcaggggagtcagaaggttcggagttaaaggcaagttagcaccccggtacgtcggaccatatcagattcaagccaagcgtggagaagtggcctaccagctcgacctaccagagagcttgtcagcagtgcacaatgtgttccacgtgtcgcaattgaagaaatgtctgcgagtaccagaagaacagttgccagtggagggcttggaagtccaggaggatctgacatacatagagaagccaacgcagattctggaggttgcagacagagtcacccagaggaataccatcagaatgtgcaaagtcagatggggtcaccattcggaggaagaagcaacctgggaacgagaagatgatctgaaagccaaataccctgaactctttgctgaccaaccctga

SEQ ID NO: 154543 - DNA, 287 bp, Zea mays
  Clone ID: MRT4577_72523C.1
actccattctctactgttccaatttgtattttcctcttttcgttttgaaaagaggacaacgagcggacgcccgttaaaagtcttaaacgccatgtgcttcagcggggaaaaaggaccactcggaagattgcccacaaacgaatcagagtggcccggggccccaaaagcaacaaatcaactgcttatcctatgagacctgatccactttcaataaaagacgtgccgcccccctcaatggaaatcgaacttcaggaccctcaaacgaagaaacctttgtctaaaaagac

SEQ ID NO: 154544 - DNA, 5400 bp, Zea mays
  Clone ID: MRT4577_72524C.1
atgagggttgtccacattgcaaccactgctcaggagaaggcgaagtcgtggaaggagacttccaggagttccaagactacgacgaattttagatggctcgtcttagacacactgcacctggaggcgccccctgcaccaccgcgggacgtcccggctgttggaggagctactggaggagatcccgacgacaacgactcagaccacagtacggagtcctctgagccgcaggaggcggaaggatgggtcgcccgacccatcacccgtgacgccgctcgcggttgtcacttccacgacgcactcgacaccttgctgcgccaggctttcgaccagcacacctggtcgatcgagtatcgttgtgtagtctaccagcacagtcgcgggaggtacccggaccgctgggaggctacctgcctagttcgccgtccggaggatgacctccggggtgcggaggccgtctcggagcactactccatctccgagagggacactgcggaggcggctatgcaggatgcagcacggcgtgcactctcccagtactgttctctgttcggtggcgtggccgatggtcttaaccttcggtactacccccgccgccctactggcagcacagagagtgtggttgtctcacccgttggtgaggctaaccctaggttgagcagcacagtcaacctagtcgcagtgcttaacactgagctggaccactctctggacgagctaagcagggctcgaacggagattgcggggttgcgtgctgagctggcagagcgccatcaccaggagggtggttctcccgctcctgttgggactcagcacccataccgctcgccgccacgtggatcaatgctgatgtatgaatgtcttccacagatgtctgacaacaggcgccgatgcaacaggcgtgctcagcaagagcagcatgaccagcaggaggaacaacagaggcaacctcccccaccacccccgatgtcagtggagcagatgttcttgatgcagactcaggcagtgcaggccattgggcagactctggcagccatgcagcaggctcaacagcaaccccaaccccaattgcaagtgcagatgccccagatgccacgggataagcgtggtgagttcatgagagggcaccctcctaccttcgcccattctgctgaccccatggatgcagaagactggctgcgcgcagtggaaagggaactgcgcaccgcccaatgtgacgacagggagaaggttctgtatggtccccgtcagctaaggggagcagcccagtcctggtgggagtcctacctcgccacccatgctaacctcgaagccatcacgtgggaagaattcagcgagagcttccgcaggtaccatgtgccggagggactgatgatcgtgaagaaggaggagtttctggctctgaagcagggacccctgtctgttagtgagtacagagacaagtttctgcagctgtctcgttatgcacctgaagacgtcaacactgatgctaaaaggcagtacaggttcatgagaggtttggtggatcccctgcattaccagctgatgaatcacaccttccccaccttccagcacctgatcgacagggcagttatgaccgagaagaagcgtaaggacatggaagatcggaagcgcaagatgagtggacaccagtccggaggcatcagccgtccacatttctcgggcagttcgtctcagcaaggcaggcctggtcacccacagggataccagaatcagaatcagcgtccgcatcagcagcagtttcagaggcagtacccgcagcagcagcagcagtatcgtcagcacagccagcagggaggtaatcagtatcagaagcagaacaaccaggcacctcgccttcctgccccaacagcgaatcagagcaaccaagcagccccagcacaaggaggaggcagaggatgtttccactgtggagaacaaggccactgggcgatgcagtgcccaaagaagttggcgcagcagcagaccaaccccaatgctccaacaaggcaaggtgtactgcagccggcagcaggcaatcgtaaccaagcgtacaaccgtggaaaggtgaaccacttggaggccgaagcaatccaggatgcaccagatgtggcagtaggtatgttttcagtcgaatctcatcccgcgaaagtgttatttgatactggtgcaactcattcatttgtcactgcaacatgggtagaattgcataacatctcagtagaggcaatgatgccgcccatgaggattaattcggtcggtggcaaggtgcaaacagataaaatatgctcaaatataatggtggaaataagggggataggattccccagtgacttaatggtaatagacacccctgggatagacattattttagggatgaattggttaatgaagtatgaggcgaatgttagttgtgacaagaggaccgtaacattgaagtccccgtcaggagaagaggtagtggccgagctatggatgcctaaatcagaagagggagtttgtcaccagatttcagttagtagtaaggagcctaacccgctcgaggctatcaaggttgtgtcagactttccggatgtgtttcccgaggagctaacgggcatgccacccgagagaaaggttgaatttgccatagagcttatccctggtaccgcccccatttcaaaaagggcctatcgagtgtctggaccagaactggtagaactcaagaagcagatagatgagatgttagagaagggttacatcaggccaagcacctcgccttgggccgctccagtgttgtttgtagagaagaaagatggtaccaaaaggatgtgcatagattacagagccctgaacgaagtcactattaagaacaagtaccctttgccaagaatagaagatctgtttgaccaactcagaggtgccagtgtattctcgaagatagatctgagatcaggttaccatcaactcagaatccgaccctcggacataccgaagacagcattcatcaccaagtacgggttatatgagttcacagttatgtcctttggtttgacaaatgcaccagccttctttatgtatctgatgaacagtgtgttcatggattatctagacaagtttgtggtagtgttcatcgatgacattctcatatactctcaaagtgaggaagatcatgcagagcatttgaagatggtactgcaaaggcttcgagagcatcaattgtatgccaagttgggcaaatgcgagttctggattcatgaagtcttgtttctgggtcacatcataaatcaagatgggttagcagtggatccaaagaaagtagcagatatcctgaactggaaagcaccgaaggatgttcgcgggatcaagagcttcattggaatggctggatattacaggcgtttcatcgaaggcttttcaaagattgctagaccaatgacagcgttactggcgaagaaagttgagtttaagtggacccaaaagtgtcaggaagcatttgaagaactgaagagtagattgactacagctcctgtgttagtcctgcctgatgttcacaagccattttcagtgtattgcgatgcttcttacaccggattgggatgtgtgctaatgcaagaaggaagagttgtagcatactcatctcgacagttgaagatccatgagaaaaattatcccacacatgacctggagttggcagcagtgaaatgcgacatctacacagatcataaaagtctgaagtacatattcacccagtcagagttaaacatgaggcagcgaagatggttggaattgatcaaagactatgagttggagatacattaccatccaggcaaagccaatgttgttgcagatgctctgagcaggaagagtcaagttaatatgttggcatcgtacccgatgccgtatgagttagccaaagagttcgacagactgagccttggtttcctaaacagtacgcaaggagtaacggtggagttagagcccaccctagagtgggagatcaaagaagggcagaaggatgatgaaaacatcaacaagattcggcagctgatcttagaaggaagaggcaaagactttcgagaggatgaagagggagtaatatggttcaaggaccgattgtgtgttcccgacctcaaacctattcgggagctgatcctaaaggaagctcatgagacagcctactccatacacccgggaagcgaaaagatgtaccaggatttaaaaaggaggttttggtggtatggcatgaaaagagagatcgcagaatatgtcgccatctgtgatagttgtcagagaaccaaagcagagcatcagaggcctgccggattgttgcagccattgcggattcctcagtggaagtgggatgagatcgggatggattttatagttggcctacctcgtacccgggccggttatgattccatctgggtggttgtggaccgcttaacaaaggtggcccatttcatacctgtgaagacaacatacaccggagcaacgttagctgagttatacatgtcgcggatagtctgccttcatggtgtgccgaagaagatagtgtcagatcgaggaacgcagttcacatctcatttttggcagcagctacaagaagctttgggcacccatttgaacttcagctcagcttatcacccgcatacagacggtcagactgaaagaactaatcagatcctagaagatatgttgagagcctgtgcgttgcaagacaagtcaggatgggacaaaagattaccttatgcagaattctcctacaacaatagttaccaggccagcttgaagatgtcaccgtttcaggcactctatggacggagttgtaggactccgctgcattgggaccagcctggagagagacaggtgtttggccccgacattttgcttgaagccgaagagaatatcaaaatggttcgggagaacctgaagatagcacagtcaagacaacgaagctatgcggaccgcaggagaagagaactgagttttgaagtgggagactacgtctatctgaaggtgtcacctatcaggggagtcagaaggttcggagtcaaaggcaagttagcaccccggtacgttggaccatatcagattcaagcaaagcgtggagaagtggcctaccagctcaacctaccagagagcttgtcagcagtgcacaatgtgttccacgtgtcgcaattgaagaaatgtctgcgagtaccagaagagcagttgccagtggagggtttggaagttcaggaagatctgacctacatagagaagccaacgcagattttggagtttgcagacagggtcacccggagaaacaccatcagaatgtgcaaagtcaggtggggtcaccactctgaggaagaagcaacctgggaacgagaagatgatctgaaagccaaataccccgaactctttgctgaccaaccctga

SEQ ID NO: 154545 - DNA, 354 bp, Zea mays
  unsure (1)..(354): unsure at all n locations
  Clone ID: MRT4577_72525C.1
ggttgcgggtttggagtgtacttgaaattcttacgggtccgaggccagtcgaaagacattaatcggccttccgtcaggacatgcatttaaagctcgagaccacaatagggacaacaaaaccgaggcgagtattttttttttataccaccccccgttgggggggggggttgcaacgcgggcgggctgaatagagtgtaaccttggcggggggcatggtgacccctatagccgaccactctttcttctgcctgatggggcccgttcttgggactctgcatgagggcactggcgtcgccgntggttgtagcggcctgccaagggcccgcgtgccttagggctgggtgttcatggcgg

SEQ ID NO: 154546 - DNA, 294 bp, Zea mays
  Clone ID: MRT4577_72526C.1
cgcccgtcagcgacaggtgcgtttttctgggcatgcccaggcatgccagcccgaagaatgccaccttccgactgccattggccgtgagcaggaagtaggacggcttgttgataaaaagcccgatccggtgttggaactccatgggcagggacctgaaacccttaagcttaccgacagagaagcccaagcaaagttccccaatcaagccttttggccccaaaccgtgctggacaaaaaaaactgcttaaaaaagggacgtattcaacgacccccctttccaaatactttaaaaat

SEQ ID NO: 154547 - DNA, 554 bp, Zea mays
  unsure (1)..(554): unsure at all n locations
  Clone ID: MRT4577_72527C.1
aaagagcacaagaaggccggggcaggnnnnncacnancagaaacgggggagaaccnccggagnggancagcagacaaancnanncgggnangggaaagggcacagcgcaagcnagagngcgnggaganganncagacaagagaggcngnacaaaaacnngananngggggggacaaaanncnngnacnnacacagaacagcgnncncaagnncncnggggcancaagaagcacccaaacannnnacaggagcaagcangncaaancncnagcngnanaccagggaaaagcnnaccnnggangcaaagacgcaagnanacaggaaccagacgngncagnngaanccaacagngcganganaagganaccnagaggaggcngganggnnaggaaacaanccannagcnccaaagnngnanacagagannggangnacngngccggngcncaggncgaagggncagccccaaaggannggaagaaacgangcaaaccnaanangacaangccaanaccaaagggaacaagngnagaggccanggcagngggngaaga

SEQ ID NO: 154548 - DNA, 1344 bp, Zea mays
  Clone ID: MRT4577_72528C.1
cattgggtacctcgaggccggccgggccgggagcaacagccatgacgacgacgaagcggcactgcttgcgcttcaccaccgtcctggcgacgacgcttctctccgccaccgccgcctgcctcgacgtcggcttctacgacaggacatgccccactgccgagaccatcgtgcagcagaccgtggcggccgcgttcaggaacaactccggcgtcgctccggcgctgatccgcatgcacttccatgactgctttgtcaggggctgcgatggctcggtgctgatcgacacggtaggcaacctgacggcggagaaggacgcgccacccaacaaccccagcctccggttcttcgacgtggtcgaccgtgccaaggcgtcactggaggctcagtgccccggcgtggtctcctgcgccgacgtgctcgccttcgcggccagggacagcgtcgtgctctccggtggcctcggctaccaggtgccggccggacgccgtgacgggcggatatccaatgacaccgaagccctcaacaacctgcctccgccgttcttcaacgccaccgagctggcagacaggttcgcctccaagaacctcactatcgaggacctggtcgtgctctccggcgcgcacaccatcggcgtctcgcactgcagcggcttcgccggcccgacagacctgaacggccccgttgaccggctctacaacttcagctcgcctgacgggattgacccgacgctgagcaaagcctacgcatttcttctcaagagcatctgcccggccaacaccagccagttcttcccgaacacgacggtgttcatggacctcatcacgccggaaaggtttgacaacaagtactacgtcggcctgaccaacaacctgggcctcttcaagtcagacgtggcgctgctgaccaacgcgacgatgaaggccctggtcgactccttcgtgcgcagcgaggcgactttcaggaccaagtttgccaggtccatgatcaagatggggcagatcgaggtgctgacggggacgcagggcgagatcaggcgcaactgcagggtcatcaaccccgttagtgccaccgatgatgtcgtcctcgcccgcccatcaggattcactggagtggctgcgagctagctaaccaactgtcggttcatgcacatgcgttgtgcacagtgtgtgatgtctagtgtgagttgatgtgtgaaattgtaataagtaatgagcagattatcttggtaagctcgcttgttactgtggcaaaagttgttttgttgcatgaaaaaatgtatactcatcggattattgaaaacaaaactgatatttgttcacgcaaaaaaaaaaaaaaaaaaaaaaa

SEQ ID NO: 154549 - DNA, 4773 bp, Zea mays
  Clone ID: MRT4577_72529C.1
atggcgatatacttgtggcattttaggggactcgggccgtttcccgagtacctctcctatttcctctctaaggagatggctcgtcttagacacactgctcgtaagtcggtgatccctttcctgccgtctcgccttgcggagcgtcctctgcgccgcaccgtgtccggtcagtcgagtcacctggagaggctacaccaccgcctgcgtgaggagcaggagcgccagcgtcgtcagagggagcagcagggctcttcctccccacctgagcaggaggtggagtccgacgccccggctgttggaggagctactggaggaggtcctggaggagaccccgacgacgacgacgacggcagctcagaccacagcactgagtcctctgagccgcaggaggcggagggatgggtcgcccgacccatcacccgtgacgccgctcgcggttgtcacttccacgacgcactcgacaccttgttgcgccaggctttcgaccagcacacctggtcgatcgagtatcattgtgtagtctaccagcacagtcgcgggaggtacccggaccgctgggaggctacctgcctgtgtcatgaagaattctgtattcccttttcttatgctgaaggattatgtctgacaacagacgccgatgtaacaggcgtgttcagcaagagcagcgtgcccagcaggaggaacatcggaggcagcctcccccgccaccccgatgacagtggagcagatgttcttgatgcaaactcaggcagtgcaggctattgggcagactctggcagccatgcagtaggctcaatagcaacccaaccccagttacaagtgcagataccccagatgccacgggacaaacgtggcgagttcatgaaagggcaccctcctaccttcgcccattccgccgaccccatggatgcagaagactggctgcgtgcagtggaaagggaactacacaccgcccaatgtgacgacagagagaaggttctgtatggcccccgccagctaaggggagcagcccagtcctggtgggagtcctacctcgccacccatgttgaccccgaagccatcacttgggaggaattcagcgagagtttccgcaggtaccatgttccagagggactgatgatcgtgaagaaggaggagtttctggctctgaagcagggacccctgtctgttagtgaatacagggacaggtttctgcagctatctcgttatgcacctgaagacgtcaacactgatgctaaaaggcagtacaggttcatgaggggtttggtggatcccctgcattaccagctgatgaaccacaccttccccaccttccagcacctgatcgatagggcaatcatgaccgaatggaagcgcaaggagatggaagatcggaagcgcaagatgagtggaccacagtccgggagcaacagccgaccccgcttctcaggcagttcatctcagcaaggcaagcatgcgaatcagaacaaccaagcagccccagcacaaggaggaggcagaggatgcttccactgtggagagcaaggccactgggcgatgcattgcccaaagaagatggcgcaacagcaggcaaaccccaatgctccggcaaggcaaggtgtacctcaacaggcagcaggtaatcgtggccaagcgtacaaccgtggaaaggtgaaccacttggaggccaaagcgatccaggatgcaccagatgtggcagtaggtatgttctcagtcgaatctcatccagcaaaagtgctatttgatactggtgcaactcattcatttgtcactacaacatgggtagaaatgcataacatctcagtagaggcaatgatgccgcccatgaggattaattcggtcggtggtaaagtgcaagcagataaaatatgctcaaatgtaagggtggaaataagggggatagggttccccagcgacctaatagtaatagacacccctggggtagatgtcatcctagggatgaattggttaatgaagtatgaagcgaatgttagctgtgacaagaggaccgtaacattgaagtccccgttcggagaggaggtagtggctgagctaaggatgcctaaaacagcgaaaggagattgtcaccagatttcggttgatagcaaggaggccaacccgctcgaggctatcagggttgtgtcggactttccagatgtgtttcccgaggaactaacgggcatgccacccgagagaaaagtcgaatttgccatagagcttatccctgagaagaaagatggtaccaaaaggatgtgcatagattacagagccctgaatgatgtcaccatcaagaacaagtaccccctgccaagaatagaagatctgtttgaccagctcagaggtgccagcgtattctcgaagatagatctgagatcaggttaccatcaactcagaatccgaccctcagacataccgaagacaacattcatcaccaagtatgggttatatgagtatacagttatgtcctttggtttgacaaatgcgccaaccttctttatgtatctgatgaacagtgtgttcatggactacctagacaagtttgtggtagtgttcatcgatgatattctcatatattctaaaagtgaggaagaacatgtggagcatttgaagatggtattgcaaaggctacgagagcatcagttgtatgccaagctgagtaaatgcgagttctggattcatgaagtcttgtttttgggtcacatcataaaccaagatgggttagctgtggatccaaagaaagtagcagacaatatgaactggaaagcaccgaaggatgttcgtggaatcaagagtttcattggaatggccggatactataggcgtttcattgaaggcttttcaaagattgctagaccaatgacagcgttgctagcgaagaaagttgagtttaagtggacccaaaagtgccaagaggcatttgaagaactgaagaatagattgactacatcacctgtgttagttctgcctgatgttcacaagccattctcggtatactgcgatgcttcctacaccggattgggatgtgtgctaatgcaagaaggaagagttgtagcatactcatctcgacagctgaaggtccatgagaaaaattatcccacacacgacctagagttggcagcagtggttcatgctttaaagacatggagacattacctgtatgggcagaagtgcgacatctacacagatcacaaaagtctgaaatacatattcacccagtcagagttaaacatgaggcagcgaagatggttggaattgatcaaggactacgagttggagatacattaccatccaggcaaagccaatgttgttgcagatgctctgagcaggaagagtcaagtcaatatgatggccacgtactcaatgtcatatgagttagccaaggagtttgacagactgagtctcggttttctgaacagtacacaaggagtaacagtggaattagagcccaccctagagcgggagatcaaagaagggcagaaggatgatgaaaacatcaacaagatccgacagctgatcttagaaggaagaggcaaagactttcgagaggatgaagagagagtaatatggttcaaggaccgattgtgtgttcccgacatcaaacctattcgggacctgatcctcaaggaagctcatgagacagcctactccatacaccctggaagtgaaaagatgtatcaggatctaaaaaggaggttttggtggtatggcatgaaaagagaaatcgcagaatatgtcgccatctgtgatagctgtcaaagaaccaaagcagagcatcagaggcccgccggactgttgcagccattgcaaattcctcagtggaagtgggatgagatcgggatggattttatagttggcctgcctcgtacccgggctggctatgattccatctgggtggttgtggaccgcttaacaaaggtggcccatttcatacctgtgaaagacaaccagctacaagaagccttgggcacgcatttgaacttcagctcggcttatcacccgcagaccgacggtcagactgaaagaactaatcagatcctacaagatatgttgagagcctgtgtgttgcaagacaagtcaggatgggacaaaaggttaccttatgcagaattctcctacaacaatagttaccaggccagcttgaagatgtcaccgtttcaggcgctctatggacggagttgtaggactccgctgcattgggaccaacctggagagagacaggtgtttggccccgacattttgcttgaagccgaagagaatatcaaaatggttcgggagaatctgaagatagcacaatcaaggcagcgaagctatgctgacagaaggagaagagaactgagttttgaagtgggagattacgtctatctgaaggtgtcgcctatcagaggagtcagaaggttcggagtcaagggcaagttagcaccccggtacgttggaccatatcagattcaagcaaagcgtggagaagtggcctatcatctcaacctaccagaaagtctgtcggcagtacacaatgtgttccacgtgtcgcaattgaagaagtgcctgcgagtaccagaagaacaattgccagtggaggacttggaagttcaagaggatctgacatacatagagaagccaacgcggattctggaatttgcagacagagtcacccggaggaacaccatcagaatgtgcaaagtcagatggggtcaccactcagaggaagaagcaacctgggaacgagaagatgatctgaaagccaaataccccgaactctttgctgaccaaccttga

SEQ ID NO: 154550 - DNA, 898 bp, Zea mays
  Clone ID: MRT4577_7252C.1
tgcacgcgtgcgtaggctcggaattcggctcgaggcgctcgccaatcgccattgctaacaggaggagagagaaccgtgagcgccaaaccaggatccgatccctgtgaacagagagaaggggtagccaccaccgaaggattacgattgtcaggcggccgggtttgagaacgccaatgccgggagagagattaagaacgacctgtacggatcttcctcaagcctcgttcgttttcagaggatcagcccattccaggccttgttccgggtggaacgaatgagcctggtttggaatttggtagaacttatttatattgttcgtttcggcccgaattggaatggaaactggcctggattaaaattttccttcacctcacggcccggaaccaacccttgtgtggtaccctccggatcgaagcctggacacacgcgaccgacgcggcggcggctcgacgcaaccggcgcgacgcgcggctttgacgcgaccggcacggcggcggcgcacagccccgacgtcgaccctccccgctgccttctccccggtgaggatttgctctcttccttccctatctcctatcctctgctctcgctgccccaatctgtcaccctcgatctcggtcctctccgctctcaccaagtgcgccgccacctgcaagaactgcgtccctgtgttttggtgcatcggcgactcccgagcctgcgcgcgcaacggctcaacggctgcagacaggatgagtgggcggaggacaggatgagtgggcggcgcaacggctcgggcgagccggatcctgcggagaagaggtcgtcctcgtataacgaaggaagtacagtttggaatgaaatccctgttactagctgatgctgtgcagtttttatttatttattaatatactggctttct

SEQ ID NO: 154551 - DNA, 4674 bp, Zea mays
  Clone ID: MRT4577_72530C.1
gttgtccacgttacaaccactgctcaggagaagacgaagccgtggaaggagacttccaggagttccaagactacgacgagttttaggtgtgggttggcggcaaccccagtcagatggctcgtcttagacacactacacctggaggcgccccctgcaccaccgtgggacgccccggctgctggaggaggtcctggaggagaccccgacgacgacgactcagaccacagcacggagtcctctgagccgcaggaggcggaaggatgggtcgcccgacccatcacccgtgacgcctctcgcggttgtcacttccacgacgcactcgacaccttgctgcgccaggctttcgaccggcacacctggtcgatcgagtatcgttgtgtagtctaccagcacagtcgcaggaggtactaccccctccgtcctactggtaacacagagagtgtggttgtctcacccgttggtgaggataaccctaggttgagcagcacagtcaacctagtcgcggtgcttaacactgagctggaccactctctggacgagctgagcagggctcgaacggagattgctgagttgcgtgctgagctggcagagagccgccaccaggagggtggttcccctgctcctgttgggactcagcacccataccgctcgccgccgcgtgaagactggctacgcgcaatggaaagggaactgcgcaccgcccaatgtgacgacagggagaaggttctgtatggtccccgccagctaaggggagcagcccagtcctggtgggagtcctacctcgctacccatgctgaccccaaagccatcacctgggaagaattcagcgagagtttccgcaggtaccatgtgccagagggactgatgatcgtgaagaaggaggagtttctggctctgaagcagggacccctgtccgttagtgaatacagagacaagtttctgcagctatctcgttatgcacctgaggatgtcaacactgatgctaaaaggcagtacaggttcatgaggggtttggtggatcccctgtattaccagctgatgaatcacaccttccccaccttccagcacctgatcgatagggcagttatgactgagaagaagcgtaaggatatggaagatcggaagcgcaagatgagtggaccacagtccggaagcatcagccgtccctgcttctcagacagttcatctcagcaaggtaggcctggtcacccacagggatatcagcatcagaatcagcgtccgcatcagcagcagtttcagaggcagtacccacaacagcagcagtatcgtcagaatagccagcagggagaacaaggccactggacgatgcagtgcccgaagaagatggcgcagcagcagaccaaccccaatgctccaacaaggcaaggtgtactgcagcaggcagcaggcaatcgtggccaagcgtacaaccgtggaaaggtgaaccacttggaggccgaagcaatccaggatgcaccagatgtggcggtaggtatgttctcagtcgaatctcatcccgcaaaagtgctatttgatactggtgcaactcattcatttgtcactgcaacctgggtagaaatgcataacatctcagtagaggcaatgatgccgcccatgaggattaattcggttggtggcaaggtgcaaacagataaaatatgctcaaatataagggtggaaataagagggatagggttccccagtgacctaatagtaatagacacccctgggatagatgtcatcctagggattaattggttaatgaaatatgaagcgaatgttagctatgacaagaggaccgtaacattgaagtccccatccagagaggaggtagtggctgagctaaggatgcctaaattagcggagggagtctgtcaccagatttcagttgatagtaaggagcccaacccgctcgaggctatcaaggttgtgtcggactttccggatgtgtttcccgaggagctaacgggcatgccacccgagagaaaagtcgaatttgccatagagcttatccctggtaccgcccccatttccaaaagagcctatcgagtgtccagaccagaattggtggaactcaagaagcagatagatgagatgttagagaagggttacatcagaccaagcacctcgccttgggccgctccagtattgtttgtagagaagaaagatggtaccaaaaggatgtgcatagattacagagccctgaatgaagtcactgttaagaacaagtaccccctgccaagaatagaagatctgtttgaccagctcagaggtgccagcgtattctcaaagatagatctgagatcgggttaccatcaactcagaatccgaccctcagacataccgaagacagcattcatcaccaagtatgggttatatgagttcacagttatgtcctttggtttgacaaatgcgccagccttctttatgtatctgatgaacagcgtgttcatggactatctagacaagtttgtggtagtgttcatcgatgatattctcatatactctcaaagtgaggaagatcatgtggagcatttgaagatggtattgcaaagacttcgagagcatcagttgtatgccaagctgagtaaatgcgagttctggattcatgaagtcctgtttctgggtcacatcataaaccaagatgggttagcagtggatccaaagaaagtagcagatatcctgaactggaaagcaccgaaggatgttcgtgggatcaagagcttcattggaatggccggatactataggcgtttcattgaaggcttttcaaagattgctagaccaatgacagcgttactagcgaagaaaccattctcggtgtattgcgatgcttcttacaccggattgggatgtgtgctaatgcaagaaggaagagttgtagcatactcatctcgacagctgaagatccatgagaaaaattaccccacacacgacctagagttggcagcagtggttcatgtgttaaagacatggagacattacctgtatgggcagaagtgcgacatctacacagatcataaaagtctgaagtacatattcacccagtcagagttaaacatgaggcagcgaagatggttggaattgatcaaagactatgagttggagatacattaccatccaggcaaagccaatgttgttgcagatgctctaagcaggaagagtcaagttaatatgatggccacgtacccaatgtcatatgagttagccaaggagttcgacagactgagtctcggttttttgaacagtacacaaggagtaacagtggaattagagcccaccttagagcgggagatcaaagaagggcagaaggataatgaaaacatcaacaagatccgacagctgatcctagaaggaagaggcaaggactttcgagaggatgaagagggagtaatatggttcaaagaccgattgtgtgttcccgacctcaaacctattcgggagctgatcctcaaggaagctcatgagacagcctactccatacaccctggaagtgagaagatgtatcaggatttaaaaaggaggttttggtggtatggcatgaaaagagagatcgcagaatatgtcgccatctgtgatagctgtcaaagaaccaaagcagagcatcagaggcccgccggattgttgcagccattgcggattcctcagtggaagtgggatgagatcgggatggattttatagttggcctacctcgtacccgggccggctatgattccatctggatggttgtggaccgcttaacaaaggtggcccatttcatacctgtgaagacaacatacaccggagcaacgttagctgagttatacatgtcacagatagtctgccttcatggtgtgccgaagaagatagtgtcagatcgaggaacgcagttcacctctcatttttggcagcagctacaagaagctttgggcacacatttgaacttcagctcggcttatcacccgcagacagacggtcagactgaaagaactaatcagatcctagaagatatgctgagagcctgtgcgttgcaagacaagtcaggatgggacaaaagcttgaagatgtcaccgtttcaggcactctatggacggagttgtaggactccgctgcattgggaccagcctggagagagacaggtgtttggcctcgacatcttgcttgaagccgaagagaatattaaaatggttcgggagaacctaaagatagcacaatcaagacagcgaagctatgctgacagaaggagaagggaactgagtttcgaagtgggagattacgtctatctgaaggtgtcacctatcagaggagtcagaaggttcagagttaaaggcaagttagcaccccggtacgttggaccatatcagattcaagcaaagcgtggagaagtggcctatcagctcaacctaccagaaagtttgtcagcagtgcacaatgtgttccacgtgtcgcaattgaagaagtgtctgcgagtaccagaagaacagttgccagtggaggacttggaagtccaagaggatctgacctacgtagagaagccaacacagattctggagtttgcagacagagtcacccgaagaaacaccatcagaatgtgcaaagtcagatggggccaccactctgaggaagaagcaacctgggaacgagaagatcatctgaaggccaaataccctaaactctttgctgaccaaccttga

SEQ ID NO: 154552 - DNA, 3337 bp, Zea mays
  Clone ID: MRT4577_72531C.1
atgtctgacaacaggcaccgatgtaacaggcgtgctcaacaagagcagcgtgcccagcaggaggaacatcagaggcagcctcccccgccacccccgatgacagtggagcagatgttcttgatgcaaactcaggcagtgcaggctattgggcagactctggcagccatgcagcaggctcaacagcaacctcaaccccagttacaagtgcagatgccccagataccacgggacaagtgtggcgagttcatgagagggcaccctcctaccttcgcccattctgctgaccccatggatgcagaagactggctgcgtgcagtggaaagggaactgcgcaccgcccaatgtgacgacagagagaaggttatgtatggtccccgccagctaaggggagcagcccagtcctggtgggagtcctacctcgccacccatgctgaccccgaagccatcacttgggaggaattcagcgagagttttcgtcggtaccatgttccagaaggactgaggatcgtgaagaaggagtttctggctctgaagcagggacccctgtctgttagtgaatacagggacaggtttctgcagctatctcgttatgcacctaaagacgtcaacactgatgctaaaaggcagtacaggttcatgaggggtttggtggatcccctgcattaccagctgatgaaccacaccttccccaccttccagcacctgatcgatagggcaatcatgaccgagaggaagcgcaaggatatggaagatcggaagcgcaagatgagtggaccacagtccgggagcatcagccgcccccgcttctcaggaagttcatctcagcaaggcaagcctggtcacccacagggatatcagcatcagagtcaacgcccgtatcagcagcagtctcagaggcagtacccacagcagcagcagtatcgtcagaacagccagcagggaggtaaccggtatcagaggcagaacaaccaggcacctcgccttcctgccccagcagcaaatcagaacaaccaagcagccccagcacaaggaggaggcagaggatgcttccactgtggagaacaaggccactgggcgatgcattgcccaaagaagatggcgcagcagcaggcaaaccccaatgctccggcaaggcaaggtgtacctcaacaggcagcagaaatgcataacatctcagtagagtcaatgatgccgtccatgaggattaattcggtcgttggtaaagtgcaagcagataaaatatgctcaaatataagggtggaaataagggggatagggttccccaacgacctaatagtaatagacacccctggggtagatgtcatcctagggatgaattggttaatgaagtatgaagcgaatgttagctgtgacaagaggatcataacattgaagtccccactcggagagaaggtagtggctgagctaaggatgcctaaaacaacgaagggagattgtcaccagatttcggttgatagcaaggaggccaacccgctcgaggctatcaaggttgtgtcggactttccggatgtgtttcccgaggagctaacgggcatgccacccgagagaaaagtcgaatttgccatagagcttattcctggcaccgcccccatttctaaaagagcctatcgagtgtctggactagaattggtggaactcaagaagcagatagatgagctgttagagaagggttacatcagaccaagtacctcgccttgggccgctccagtattgtttgtagagaagaaagatggtaccaaaaggatgtgcatagattacagagccctgaatgaagtcaccgttaagaacaagtaccccctgccaaggatagaagatctgttcgaccagctcagaggtgccagcgtattctcgaagatagatctgagatcaggttaccatcaactcagaatccgaccctcagacataccgaagacagcattcatcaccaagtatgggttatatgagtatacagttatgtcctttggtttgacaaatgcgccagccttctttatgtatctgatgaacaatgtgttcatggactacctagacaagtttgtggtagtgttcatagacgatatcctcatatattctcaaagtgaggaagatcatgtggagcatttgaagatgatattgcaaaggctacgagagcatcagttgtatgccaagctgagtaaatgcgagttctggattcatgaagtcttgtttctgggtcacataataaaccaagatgggttagctgtggatccaaagaaagtagcagatatcctgaactggaaagcaccgaaggatgttcgtggaatcaagagtttcattggaatggccggatactataggcgtttcattgaaggcttttcaaagactgctagaccaatgacagcgttactagcgaagaaagttgagtttaagtggacccaaaagtgccaagaggcatttgaagaactgaagaatagattgactacatcacctgtgttagttctgcctgatgttcacaagccattctcgaagtgcgatatctacacagatcacaaaagtctgaaatacatattcacccagtcagagttaaacatgaggcagcgaagatggttggaattgatcaaggactacgagttggagatacattaccatccaggcaaagccaatgttgttgcagatgctctgagcaggaagagtcaagtcaatatgatgaccacgtacccaatgtcatatgagttagccaaggagttcgacagactgagtctcgattttctgaacagtacacaaggagtaacagtggaattagagcccaccctagagcgggagatcaaagaagggcagaaggatgatgaaaacatcaacaagatccggcagctgatcttagaaggaagaggcaaagactttcgagaggatgaagagggagtaatatgtttcaaggaccgattgtgtgttcccgacatcaaacctattcgggagctgatcctcaaggaagctcatgagacagcctactccatacaccctggaagtgaaaagatgtatcaggatttaaaaaggaggttttggtggtatgacatgaaaagagaaatcgcagaatatgtcgccatctgtgatagctgtcaaagaaccaaagcagagcatcagaggcccaccggactgttgcagccattgcagattcctcagtggaagtgggatgagatcgggatggattttatagttggcctgcctcgtacccgggccggctatgattccatctgggtggttgtagaccgcttaacaaaggtggcccatttcatacctgtgaagacaacatacaccggagcaacattagctgagttatacatgtctcggatagtctgccttcatg

SEQ ID NO: 154553 - DNA, 756 bp, Zea mays
  Clone ID: MRT4577_72532C.1
ctcttcttggtgcttgccgaatcctggtcatgttgatctcggggagtgtgtaatcggtaatctaattaaactgaaggcgcagcaagctggggactatgttctattgctgaacacttatgcagcagttggggaatggagcaaggtatctgaaatcaggaagttgatgcaggaagaaggaatacaaactactcccggctgcaccactgtggagcataatggtacagttcatgagtttattgcagatgatgatgcacacccaaggaaagtggagatttatgaaaatctcagtgagatatataagcagttaaggattgctggttatgttccaaatgtgtcatcagagttgcatgatttggattcagaagggaaggaaagtgccctcacctatcacagtgaaaagctggcaattgcttttgctttgcttgtgacgcctcaacacagaccaataaggcttgcaaagaatcttcgtgtttgtgttgactgccccaatttcccaaagatgttttctgctatttacagacgaatagttattgtcagggacagaacaaggttccatcatttcctgggagggaaatgttcgtgtaatgattattggtagtccacccttgcttgtttgttgcagttgcagcacaccacaagtgtagccacaactaagtgtaggcaaagtgtagccaacaaatctggcgccacatctgagagttttacatcaaattgagtctactacatgtggtatgtatggctaagaaagttctgcac

SEQ ID NO: 154554 - DNA, 4287 bp, Zea mays
  Clone ID: MRT4577_72533C.1
atgaccgtggagcagatgttcttgatgcagactcaggcagtgcaggctattgggcagactctggcagccatgcagcaggctcaacagcaacctcaaccccagatgcaggtgcagatgccccagatgccacgagataagcatggcgagttcatgagagggcaccctcctaccttcgcccattctgctgaccccatggatgcagaagactggctgcgcgcagtggaaagggaactgcgcaccgcccaatgtgacgacagggagaaggttctgtatggtccccgccagctaaggggagcagcacagtcctggtgggagtcctacctcgccacacatgctgaccccgaagccatcacctgggaagagttcagcgagagtttccgtaggtaccatgtgccagagggactgatgatcgtgaagaaggaggagtttctggctctgaagcagggacccctgtctctgatgaatcacaccttccccaccttccagcacctgatcgatagggcagttatgactgagaagaagcgtaaggatatggaagatcggaagcgcaagatgagtggaccccagtccggaagcatcagccgtccccgcttctcaggcagttcatctcagcaaggcaggcctggtcacccacagggatatcagcatcagattcagcgtccgcatcagcagcagtttcagaggcagtacccacaacagcagcagtatcgtcagaacagccagcagggaggtaatcagtatcagaagcagaacaaccaggcaccttgccttcctgcccccgcagcaaatcagaacaaccaagcagccccagcacaaggaggaggcaggggatgtttccactgtggagaacaaggccactgggcgatgcagtgcccaaagaagatgacgcagcaacagaccaaccccaatgctccaacaaggcaaggtgtactgcagcaggcagcaggcaatcgtggccaagcgtacaaccgtggaaaggtgaaccacttggaggccgaagcaatccaggatgcaccagatgtggcagtaggtatgttctcagtcgaatctcattccgcaaaagtgctatttgatactggtgcaacccattcatttgtcactgcaacatgggtagaaatgcataacatctcagtagaggcaatgatgccgcccatgaggattaattcggttggtggcaaggtgcaaacagataaaatatgctcaaatataagggtggaaataagggggatagggttccccagtgacctaatagtaatagacacccctgggatagatgtcatcctagggatgaattggttaatgaaatatgaagcgaatgttagctgtgacaagaggaccgtaacattgaagtccccgtccggagaggaggtagtggctgagctaaagatgcctaaatcagcggagggagtttgtcaccagatttcagttgatagtaaggagaccaacccgctcgaggctatcaaggttgtgtcggactttccggatgtgtttcccgaggagctaacgggcatgccacccgagagaaaagtcgaatttgccatagagcttatccctggtaccgcccccatttccaaaagagcctatcgggtgtctggaccagaattggtggaactcaagaagcagatatatgagatgttagagaagggttacatcagaccaagcacctcgccttgggccgctccagtattgtttgtagagaagaaagatggtaccaaaaggatgtgcatagattacagagccctgaacgaagtcactgttaagaacaagtaccccctgccaagaatagaagatctgtttgaccagctcagaggtgccagcgtattctcgaagatagatctgagatcaggttaccatcaactcagaatccgaccctcggacataccgaagacaacattcatcaccaagtatgtgttatatgagttcacagttatgtcctttggtttgacaaatgcgccagccttctttatgtatctgatgaacagcgtgttcatggactatctagacaagtttgtggtagtgttcatcgatgatattctcatatactctcaaagtgaggaagatcatgtggagcatttgaagatggtattgcaaaggcttcgagagcatctgttgtatgccaagctgagcaaatgcgagttctggattcatgaagtcttgtttctgggtcacatcataaaccaagatgggttagcagtggatccaaagaaggtagcagatatcctgaactggaaagcaccgaaggatgttcgtgggatcaagagcttcattggaatggccggatactataggcgcttcattgaaggcttttcaaagattgctagaccaatgacagcgttactagcgaagaaagttgagtttaagtggacccaaaagtgtcaagaagcatttgaagaactgaaaaatagattgactacatcacctgtgttagttctgcctgatgttcacaagccattctcggtgtactgcgatgcttcttacaccggattgggatgtgtgctaatgcaagaaggaagagttgtagcatactcatctcgacagctgaagatccatgagaaaaattaccccacacacgacctggagttggcagcagtggttcatgcgttaaagacatggagacattacctgtatgggcagaagtgcgacatctacacagatcataaaagtctgaagtacatattcacccagtcagagttaaacatgaggcagcgaagatggttggaatttatcaaagactatgagttggaaatacattaccatccaggcaaagccaatgtggttgcagatgctctaagcaggaagagtcaagttaatatgatggccacacacccaatgtcatatgagttagccaaggagttcgacagactgagcctcggttttctgaatagtacgcaaggagtaacagtggaattagagcccaccctagagcgggagatcaaagaagggcagaaggatgatgaaaacatcaacaagatccggcagctgatcttagaaggaagaggcaaagactttcgagaggatgaagagggagtgatatggttcaaggaccgattgtgtgttcccgacctcaaacctattcgggagctgatcctcaaggaagctcatgagatagcctattccatacaccctggaagtgagaagatgtatcaggatttaaaaaggaggttttggtggtatggcatgaaaagagagatcgcagaatatgtcgccatctgtgatagctgtcaaagaaccaaagcagagcatcagaggcccgccggattgttgcagccattgcggattcctcagtggaagtgggatgagatcaggatggattttatagttggcctacctcgtacccgggccggctatgattccatctgggtggtcgtggaccgcttaacaaaggtggcccatttcatacccgtgaagacaacatacaccggagcaacgttagctgagttatacatgtctcggatagtctgccttcatggtgtgccgaagaagatagtgtcagatcgaggaacacagttcacctctcatttttggcagcagctacaagaagctttgggcacacatttgaacttcagctcggcttatcacccacagacggacggtcagactgagagaaccaatcagatcctagaagatatgctgagagcctgtgcgttgcaagacaagtcaggatgggacaaaaggttaccttatgcagaattctcctacaataatagttaccagaccagcttgaagatgtcgccgtttcaggcactctacggacggagttccgaagagaatatcaaaatggttcgggagaatctgaagatagcacaatcaagacagcgaagctatgctgaccgaaggagaagagaactgagttttgaagtgggagattacgtctatctgaaggtgtcacctatcaggggagtcagaaggttcggagttaaaggcaagttagcaccccggtacgttggaccatatcagattcaagcaaagcgtggagaagtggcctatcaactcaacctaccagaaagtttgtcagcagtgcacaatgtgttccacgtgtcgcaattgaagaagtgtctgcgagtaccagaagaacagttgcccgtggaggacttggaagtccaagaggatctgacctacgtagagaagccaacgcagattttggagtttgcagacagagtcacccgaagaaacaccatcagaatgtgcaaagtcagatggggccaccactctgaggaagaagcaacctgggaacgagaagatgatctgaaggccaaataccctgaactctttgctgaccaaccttga

SEQ ID NO: 154555 - DNA, 551 bp, Zea mays
  unsure (1)..(551): unsure at all n locations
  Clone ID: MRT4577_72534C.1
gttttttttttttttttttttttttttttttttttttttttttttttttttttttttttttttttttttttttttttttttttttttttttttttttttttttttttaaaaaggaagcccaggaaaacaccccccattgggccagggggggggggaagggttaaaaaaaccggggccccaaatacaaagaaaatcccgacacatggtttaaaaggggggtacaaaatcaccggggcaacatagggggaaaggtatacattccaaattttctacaaggttaaaacaggggacggacaaacttttggggggggggccgggggggttaactccccttaacctaagggggggtgaaaagggtttcggggaaaacgggaagggccttctggagggacaaaaacctgtttttttttggaactggggcgttgaacattctaaaaaaaaccccagggggggggtcaacgcttcccttgggggggccaccaaaagcgcccaaagctcccttgccattttnaagaaggatgcccttgactaaaaagggaatttggttcccc

SEQ ID NO: 154556 - DNA, 1047 bp, Zea mays
  Clone ID: MRT4577_72535C.1
atgccacgggacaaacgtggcaagttcatgagagggcaccctcctaccttcgcccattctgctgaccccatggatgcagaagactggctgcgtgcagtggaaagggaactgtgcaccgcccaatgtgacgaaagggagaaggttctgtatggtccccgccatctaaggggagcagcccagtcctggtgggagtcttacctcgccacccatgctgaccccgaagccatcacttgggaggaattcagcgagagtttccgcaggtaccatgttccagagggactgatgatcgtgaagaaggaggagtttctggctctgaagcagggacccctgtctgttagtgaatacagggacaggtttctgcagctatcttgttatgcacctgaagacgtcaacaccgatgctaaaaggcagtacaggttcatgaggggtttggtggatcccctgcattaccagctgatgaaccacaccttccccaccttccagcacctgatcgatagggcaatcatgaccgagaggaagcgcaaggaaatggaagatcggaagcgcaagatgagtggaccacagtccgggagcaacagccgcccccgcttctcaggcagttcatctcagcaaggcaagcctggtcacccacagggataccagcatcagagtcagcgcccgtatcagcagcagtctcagaggcagtacccacagcagcagcagtatcgtcaaaacagccagcagggaggtaaccagtatcagaggcagaacaaccaggcacctcgccttcctgccccagcagcgaatcagaacaaccaagcagccccaacacaaggaggaggcagaggatgcttccactgtggagagcaaggccactgggcgatgcattgcccaaagaagatggcgcagcagcaggcaaaccccaatgctccggcaaggcaaggtgtaccccaacaggcagtaggtaatcgtggccaagcatacaaccgtggaaaggtgaaccacttggaggccgaagtgatccaggatgcaccagatgtggcagtagtgtgttcatggactacctag

SEQ ID NO: 154557 - DNA, 682 bp, Zea mays
  Clone ID: MRT4577_72536C.1
gagggatacgtcaaggaaacatgtcgaacagcaaccctgaagataagttcaagaaccggttgcttcaacaagagtctgtccatgaggatggcagcattacttgcccttcgattgagctgggtggctgcggtgacgccatgctgaacctgatatatgcatctccatcgagccagtctgaagagctcagttcagaatgtgagctggatgctgcaggcaatcattctggagtgaaggatgctgaagttcacggatcacctgtacctgagagtaatggaagattagcagcagcttcccaggcagaaacaatgtccacatagtctcagaagatgcaattcttgttggctcatctttcaggtgggagcgcaagcgtttatattacattgaagcctgaagatagtgtatgatatggtcagaaatcggtagagggtaggttgcctgattaggttgcttgatttaggaggttgccagcctatatggccattgattttaggcctgtgacctggggataatcccaattgttgtgttgttcatctttgaccagggagcgaacatcgttgtacatatggttatggctttgtttttgtcattaccgaggggcgagagctgatgaatggttgtactgtcgttcgttcaagggattacctggctattttgtgacaaaaaaaaaaaaaaaaaagcggcc

SEQ ID NO: 154558 - DNA, 157 bp, Zea mays
  Clone ID: MRT4577_72537C.1
actcctaaagcaggtatcggcaattcttgggccgcattttgagggacagcgtgaatttcaacattgggggtgttgatgctgaataacaaatatataggattgagttggttaataaataatggccttgcaaaacctgtccatatttgatatctatagc

SEQ ID NO: 154559 - DNA, 645 bp, Zea mays
  Clone ID: MRT4577_72538C.1
atggctacgcaagacatagctgaacagaaggtgttatttgggtcccaattatccgaggaacaagaaaaagcactattaaaatacttgttcaataataaggatgttttctcttggtcttccaatgatctttgtggtttcaacagagatgttatagagcactccaacaatgtagacccaactatcagaccgaggaagcagaagcttcggaaaatgtcaaatgataaagtcgaaggtgcaagaaacgaagttaaaaggctccttagtgccggggtgatcagagaagtaacatacctagaatggctagccaacactgtgatggtaaagaaggccaatggaaagtggagaatgtgtattgatttcacagatctcaacaaggtgtgcccgaaggatgaatttcccttgccaagaatagacaccctcatagatgcagcagccacatcggagctcatgagcctactagactgctactcaggctatcatcagatctggatgaagaaggaaaatgaacctgtgataccacaattttctaaaaagaagttaaatttccttttctcttttctttcatgttctgtggcattggggtttggagtttcaggaggcattcctcagggaaacaatagatcttttggcatttttttccgctag

SEQ ID NO: 154560 - DNA, 386 bp, Zea mays
  Clone ID: MRT4577_72539C.1
aaaaacacaggggaaactctggttacatttctatataaaaacacacgggagcatgcgtattatgtatttggagcttggagcataaggtgaagaaaatactaggacctgccacgttctagcatgccttaatatacgaacggaacacatagagtaacggcgctagcactatcaaccccctctggagagttagctatgataaatgaacagaacgataccatattctatatacggctgaatgcagggggtggcactctaacaccactcatggtatttcggcgccaggagaatgctgatggtcagacaagcaactaatgggccgagtacaggggcgccctctttgattgcgtgggtcttacacagtaatcatggtttcggtaccattactg

SEQ ID NO: 154561 - DNA, 607 bp, Zea mays
  Clone ID: MRT4577_7253C.1
ggtaccggtccggaattcccgggtcgacccacgcgtccggcgctgtgagcattccaagctagagccgagtacacgggccggccatcatgtcacgctacgggcggtatggaggagaaaccaaggtatatgttggtaacctgggaactggtgctggtaaaggagagttagaaagggcattcagttactatgggcccttaagaactgtgtggattgccagaaatcctccaggattcgcctttgtggaatttgaagaccctagagatgcagaggatgcagttcgaggattggatgggaaagtgatttgtggttctcgagtgagggttgaactatcaacaggcatgcctcggagatctcgttttgataggccacctgcccgtcgtccctttgatcctaatgatagatgctatgagtgtggtgaaaagggacattatgcttatgactgtcatcgctatagccgacgaagaagaagcaggtcacgatctagatcccattcccgatccaggggaaggcgatactctcgctcccgcagcaggagccgaggacggaggtcaagatcagcatctcctcgccgatcaaggtctgtgtctcttcgtagatcaagatcagc

SEQ ID NO: 154562 - DNA, 1075 bp, Zea mays
  Clone ID: MRT4577_72540C.1
gccggccgggtcgtgctcacagtcgaccgactccctcgacgctccccgaccttcgcctccgactcggacagttcgactcgaaccctaacgccggctgccgaggtcgcagcgtcaccgtcaggcgcgccacgtgaacgcctgcggcttgctggtcgcggtctctcgggcaggcacgccgtgcgtgccagccagcaggagacggcggtcatctgcggggcgcgccgaccgccggcgccgacaggtggagcggccgacgcaccgcgattcggcgaagcggaagctccaccctccattgctcaagaaagcaatcggaagttatcctatactggacctgcccctgcttggatgagatgattttagagaagccaagctggatccgtcatgaggggctgcagatattctccattgacatccagaccggcggcctccgcttcgccactggcggcggtgatcagaaggttcgaatatggagtatggaatctgtgcataaggacaataccaacaatgattcgaagcaaaggttgcttgctacactgcgtgatcattttggatcagtgaactgtgtgagatgggccaagcatggccgctaccttgcttcaggatcagatgatcaggttatcctaattcacgagagaaaagctggctcaggtacatctgagtttggtagtggagaaccaccagatgcagagaactggaaggtcattatgaccttgagagggcatactgccgatgtgggagatcttagttggtcccctgatgattcaacgttggccagcggtagcttggataataccattcacatatggaacatgaacaacggcatttgcactgctgtcttgcgagggcacaccagcttagtgaaaggggttacctgggaccctattggttcctttattgcaagccaatcagatgataagactgttatgatatggcgtacaagtgactggagtcttgctcacaaaacagaaggccattggacaaaatctcttggttcaacattttttagacgacttgcttggtcaccttgtgggccacttcataactaccactcatgggtttccagaaacctaagcat

SEQ ID NO: 154563 - DNA, 298 bp, Zea mays
  Clone ID: MRT4577_72541C.1
ctattttttaaatagaaagaaagaaagaaagaaagaaagaaagagagagagagatgttgtaaacatctcacatgatgcctgatgagtaatgcttccctctggcctctgtacatgattgctagctactagattctgattctgtaaagaactccagattcgaacagttaattcaactgtgtaatttatcgccgcaaccctttccgtctctgttaccgatgcagctaactatgggctcgcgacgtgcgccttcttcggcgtcggcgtgaacctcgtggtgttcctgcgccgggtgctccac

SEQ ID NO: 154564 - DNA, 582 bp, Zea mays
  Clone ID: MRT4577_72542C.1
ccccaaaacattcttttcttctgcaccggcattgggtttcaaggtctacataatttttcagggccaatgttctcaaggggatgaccatgattagagggaaaaaaaccttttttttaaaaccctgaatcataactgcgggtctaaatccttcaaaaagcaccccaaccttgtaaatgaatcaaccttcccatttttttggggggcccctcgaaaaaaggggtgtttcaaaaaatttaagggctaatctctcaaaaattccctaatagcccccaaagcaaaaattccttttcagtctggaaacatctgagggaatctgccttgaccacccctcctccgggaaagggaaattttttccaattggttcattttggccttttccccaaattctgcaaggattatcattttatttgaaaaaaaatagccccttacctccttgggggaaaatcaaaccctgacctatttttggggcttgccacaaaacacattgtttttggccctattccaagtttatgaggatcaaaaagttttttcccctagttagcatcaaaaagcattttttgggccttactccctatgaaaaag

SEQ ID NO: 154565 - DNA, 118 bp, Zea mays
  unsure (1)..(118): unsure at all n locations
  Clone ID: MRT4577_72543C.1
tcgntccgaaaagctcgacctagttattttctcgcgcttgctctacaagaaaagcaacccatcacagcgctctttcgaggcggataggacaggatctagaggtcgctagccatggcgg

SEQ ID NO: 154566 - DNA, 212 bp, Zea mays
  Clone ID: MRT4577_72544C.1
tcgcaaagcggcagtgcgtaaagaggatcggggaacaaaacaacatggaaatgggcatcggtctcggcgggtgccttgcttttgcaacttgccaccccttttgcatggaaaatcccttgccctgcgcggggcttgcaggcttgtacggcgcttgcgccggcctgacgacgatgatgggcgccggcgggcttgtacccctacgcgggagtacc

SEQ ID NO: 154567 - DNA, 639 bp, Zea mays
  unsure (1)..(639): unsure at all n locations
  Clone ID: MRT4577_72546C.1
tcgaggccggnccgggaaaaaaaaaaaaaaaaaaaaaaaaaaaaaaaaaaaaaaaaaaaaaaaaaaaaaaaaaaaaaaaaaaaaaaaaaaaaaaaaaaaaaggccccccgccgcgtagcacagcccattattgccgtctcctttttgcgtgaccaaaaaaagaaagcgagaaaagcagcccccttgtttggcttcatccacaaaatcgaggaaaacctccacatggggggcgcccccaagagggaggatgagccccacaagaaggccggggagccccacaggaggggggggggggagccccacaagaaggccgggggggagcataaggaaggcatcggggaaaaaatcaaggacaaaatcaccggcgagcacggggacaagtccggcgaccacagggaaaagagggccaagaaaaagaaaagggagaaaaagaaccccggggagggccacgaccacaacgggggccacagtagcagcagcagcgacagcgactgaaatctggtgtcgcagcacaggtgcaacacaagtatgcttgctggatggaggattcataccacctgatgctgatgtagggtttcactggggtcatgcatgcatgtatcgggctattataataaaaaaaaaaaaaaaaaagcggcc

SEQ ID NO: 154568 - DNA, 481 bp, Zea mays
  Clone ID: MRT4577_72547C.1
gctgaaaaggaacgagcattggtgaaccataaaacatgcgcaggacatgcacatacttccgcttgcagcgcataagataagcgcaacataggccctggagcactgggacacctatcgaagcatgctacaccaaactaaaaatctgctatcatcggacgtgctcagacatggggacctctcgtcacaccattttccaacacgtttttaccattgacacgaccattgacattcaacctagatagaccgcatgtctggtaacaagtcgactagaccattgctgacaattggactaattgcccgtaccaagcactcccttgtgcccggacgatatgatggacctgtggaacagacatactctcaagacatatacaacacagattgcacacatcagctgcagcaaaactgttctctggaccatcaagacacttagagtctggcctgtaaaacagcacttgcgtatccttcgaacacaatcccatgc

SEQ ID NO: 154569 - DNA, 181 bp, Zea mays
  Clone ID: MRT4577_72548C.1
tcgatgccctcttagccgagggtgaaggggccatacagcctgatagaagacgaccattacggagagaggacttccaggcttccccaagcgatactgaaggcccatttctggctcctgtttcgaacatgctcgtgtgagattgtgatctggaatcacccgccttaataagtatgccggagat

SEQ ID NO: 154570 - DNA, 382 bp, Zea mays
  Clone ID: MRT4577_72549C.1
aaaaattatattgtgttgtcttttatgtttaaacattaaaatgaatttggaagaaagtaaaaccgctgaaaatgggttcaccccacttttgtatcttactcagcaggaacatcaaaccacacgaaaacgaaaacgaattgtgacggacatcccgcggatttagattaaacaactacctgcatgtttaggttcacccaagggcactagataacgcaaatacccccgttcatttgtggataatatggcccatggtttattttccaaaaaattggggtttcaataaaccgatagaaatttttttttgggggagggggcctgttacggggtcgccatgctcgagctcgttgccaacgaagattggactgctttcacctcatgggat

SEQ ID NO: 154571 - DNA, 547 bp, Zea mays
  unsure (1)..(547): unsure at all n locations
  Clone ID: MRT4577_7254C.1
cacgcatacgcaagctcggaattcggctcgagcttcgtctctctctcgcgctcccaatttctccgccggcgggaaaaccatgtcgcacttcggaaggtcaggtccaccggatatcagcgacacctactcacttctcgtccttaacatcaccttccgtacgactgctgatgatctctatcctctattcgcaaagtatggaaaggtcgttgatgtgtttattcccagagatcgaaggactggtgattcgcgtggttttgcgtttgttcggtataagtataaagacgaagctcacaaagcagtggaaaggcttgatggaagagttgttgatggcagagaaataactgttcagtttgcgaaatatgggccaaatgctgaaaaaatttccaaaggaagagttgtggaaccaccgccgaagtcacgaagatctagaagccgtagtcctaggcggagtcgtagtcctaggaggagccgtagcccgcctagacgccgtaatcccagaagaagccgcacttctcgtaggaggccccgagatgactttagnggaaaa

SEQ ID NO: 154572 - DNA, 345 bp, Zea mays
  Clone ID: MRT4577_72550C.1
cccttccggccccccttggttccattccaaacttccgggccaaagcacaccaccagcggttccggggagggagggaagccatggccgaggaggcggccaaaaaggaggaggtggagaagcccaaggaggccgcggcggcagaggagaagaagaaggacgacaagcccaaggaagtaggcggcggcggcggcgtctagaagcccaaggacggggaggaggaggagaagaagaaggaggacgcgcccccgcctccgccaccggaggaggtcgagatgcgggtctacatgcactgcgaggggtgcgcccgcaaggtcaagaaaatcctcaaggcgcttcgacggaagt

SEQ ID NO: 154573 - DNA, 338 bp, Zea mays
  Clone ID: MRT4577_72551C.1
aagacagtgaatgctacactgacaacatgctgcagtctgaacttggatggttaggggatcattgcacgtgtgacctccaattcagatgctgcacaagtcgcggagaccctcatttagaatatctgtaggaccaacgttgatggagtgccaggttgattgaatggtgacctcaacatctaggttgtggaaacaacatttgagacttgatcagtatgtaaggctaattcacagctagtaagccatgcttgacttgatgcgatctcagctggaaagtactatcattgcgatcggctgatggcacgaagagcatctcaagatgacttgtaatgagctcttta

SEQ ID NO: 154574 - DNA, 319 bp, Zea mays
  Clone ID: MRT4577_72552C.1
actgctaatacatttatctttccattaataggcctaaatcaggaggcaagcctgttataggcttgggattgcctttcaaacattgtaatagttgaactaccattaacctcaagagagggtagcaacaatcacacccacgcaccctgctgactgtggaccgaatgctcaatcattccccccattacaagggaacgatatgtaacaaaacaaaacactcttgggcccacatgccatcctattacatgtcatctgctaaaagctcatgactaatgcagatttctagcggggtgaggaaccctagccggggcggcacttctct

SEQ ID NO: 154575 - DNA, 270 bp, Zea mays
  Clone ID: MRT4577_72553C.1
tgaagaccctagagcagagggcgcggaagcagcaccagaggtgcctggcacattcactggtggggactccaaactacatcgcacccgaggtgctcctccgcaaagggtacactcaactctgtgactggtggagtgttggagtgattctcttcgagatgctggtggggcagccgccctttttggcacctactcccgcagaaacccagctgatggtgatcaactgggagaacacgctccacattccagcccaggtgaagctgagccctgagg

SEQ ID NO: 154576 - DNA, 922 bp, Zea mays
  Clone ID: MRT4577_72554C.1
tttgcttcgtcaactgtatcttacatatcctagatgtacacgacgaaagggtcacccgttctctctatcgagtttcgtgaaaaaccaccgtctcacttccgtcacacagatagtacataacatggtctcgcatgtggtagtttcttattatttcttcagctccttctcgatcttggcctcctgtgcctctgttgcgacaggatcgatctgcttggccgcctctgactctgccccaagttgtgtccactcggcagcgttggtttcatcctcgtatgccgatggtgtgtaggcctgcccatctccgccttcaaagttgatctctgggtcgttcatggcaacgtcgacggcatcttgccaagtatagtatcgctccgtcagcacatgcttgatggctcgctgtgtcttcatgacctcctcgtctcggctatcaatttctcgttcaccgaatccgactttggttctgaggagctctgcccttgatgtggaaagcatgtttctctctttacaacatacccaccacagtgcatgcagatcctcccacgacttctttctcaattcctcgacagtccatgcccgtccatgctcctcggtttccttgggtgttgcgagcagcttgccttgtccggggaagaatccccatagaccatgattggggtcaacctcgatcttgggcttgaaatcacggggcttcggtagtgggatgtttgacatggacagaggctcgcggggtccggaaccatacaagctactgacacctcgcttcgggttgttgtccttcgttttgcgcttgcattgtggtgcggtcgtggagaagcgagcaacttgagggacggcggacgagatccttgtcgaggaggcctgggccatccgaccggcaagtggccgtatcgtactggtagataccattgtgaatatattgccc

SEQ ID NO: 154577 - DNA, 590 bp, Zea mays
  Clone ID: MRT4577_72555C.1
ttgagatagaccccatcaccaaggaagtcttggcaacgccgatcgccgatgccctggggcgaaaatttacccgctttggacatcaagccaaggaagacaggcaggccgccattttccggtctgagaatgggaacgtatggcaggtaaaaatctttggtgaagacaagacgggcaagcggtcagggcagtatctagcaccgacaggcataggggacgtgccctatctgccaacaattccccgccggatcattttggcgatcgccgaaaagcatggggtcaaaccaccggaagatggtcaagatttttggccctggtttgtggatcatcctgagattcccttgattgtgacggaaggggggaagaaagctttagccgccatcagccaaggttacgtggccctgagtctctatggctgtttatgtggcaacgatggtctaaccatcaaaccgtcattattgccctatgtgcaggggcgagaagtagcgatcgcctatgaccaggatgcaaagggtagcaagggacgaaaggcagtctttaagggcacaaaacggctggctcgtaacctgacctatcacgctaaggcaacggtc

SEQ ID NO: 154578 - DNA, 451 bp, Zea mays
  Clone ID: MRT4577_72556C.1
aaaccgggcaagggtcttttcttattccatgggggggggggaacagatttttgcccaaggcccttggaaggcccggatttcattcaaaaggggccccccaaggggaaaggggggggtagaagggccccgccttggaaaaataaataaggggcatcagggtttccccctttaaaccccaggggggttcttcaagggaccccttggttttgggcaggtgggcagcaacatggtccatggtcattttttttgaggggggggcctttgaacatgaaacaccaactcgttttaaaaaagctaagcaactgggcatttcaggggcaggggcatacagctccccattgaaaagatctggggcaaagaagggggatatcctggaagggaaccccgcctcagaaaaaaaggggggggggaagccttctatgaacaaggaatcagggtgggggtttccccg

SEQ ID NO: 154579 - DNA, 1179 bp, Zea mays
  Clone ID: MRT4577_72557C.1
ttgggtccctcgaggccggccgggctctgctgcttcgtcgcgtcgtcgcctctctgctgctccaccgatccctgaagtgctgctgctcagacgccacgggcggcgccctctggcagccggctgccaggggcgcgtggaggatgtagattggtcctggtggcggcgacagcggagggccagcagctgcgagcggtaccgtgctcctgcggtggcttcgtatgcaggggccggaggtctacagtagcgcgcatctagccggctcagcatcgtggatctaaccagaggaggccacggctgttgctcctccctcggcaatggcgagggttcgagacaggacgaagcacttcaaaggggccgcaatgctctcacatggatacatcgagaaaatgagaaccactcgaaaacgtcgctcactctggctgaggtggttggaacacctgttggacgaattgtgaagtgtgaggagtttctgaaggctgcaggacctgttatgtcaaggctgtgaaagaaattgagcctgcacttaagaagcagctcatcatctccaccaccctgatgactgttggtattgctgtaatcagctggttggcccttccagctaagttcaccatcttcaactttggtactcagaaggatgtctccaactggggcttgttcttctgtgttgcaattggtccgtgggctggtctgattattggttttgtcacataatactacactagcaatgcatacagtcttgtgcaagacgttgcagattcctgcagaactggtgctgccactaatgtcattttgggtcttgctcttggatacaagtcagttatcatcccgatttttgctatcgctgttatcatctatgttagtttctccattgctgcaatgtacggcatcgcagttgccgctcttggtatgctgagcacaatcgcaactggtcttgctattgatgcttatgctcccatcagtgacaatgctggtggtattgctgagaactgatgctgttgatgctgctggcaacaccactgccgctattggaaagggatttgccattggttcagctgctcttgtgtctctggcgcttttttggtgcctttgtcagcagagctggagtcaaggttgtcgatgtcctctccccccaagttttcattggtttgattgttggagccatgcttccctattggttct

SEQ ID NO: 154580 - DNA, 748 bp, Zea mays
  unsure (1)..(748): unsure at all n locations
  Clone ID: MRT4577_72558C.1
ccggccgggacctcctcaccaaacgcagcgcaggatgccgccattggcaagcgaggaagagtgagagtacatgcgccgatgcctgcatgtgaagccgcatggcctcggctgttcgctcgggtgggagtgatgccgccgggccatacgcgtccacctgggtacgtgcgtgcaccctcgtcgcgtgagagaaagcaccggggaggaagccgctgtgcgcgtcaccgattcaccgtttgccgtgtggtgcctgtgcggagtggccggagttgggtgattcctcgccgaagtcatgggccgtcgcgacctcaccctgcttcgtgggggcatgcccctgcggcataatcgctggtaagggctctccctttagattcgtagtattccctggatcgtgtagctccgcttgattaggaaattgggggattatgcgcggcaggcagggcgccgttgtgctgtcttggcgcgccgccgtggtggactgcgccgccgtgctgagtggctggtaggagaagatgacatgggttggaaacggtgaccgttagatcggtaaggtatggttaagattagagcagaaataatcattcacgatcttgaatctaggccgtccgtagcggatcgagtggtctagagttaaccgtaaccctttggcctcgtacgttttaccaaagagaccccacagaaattagatataaacccgtcgtcccgagcactggtgactgggtctggngattcttttgataaagccctggac

SEQ ID NO: 154581 - DNA, 1757 bp, Zea mays
  Clone ID: MRT4577_72559C.1
cccacgcgtccgcccacgcgtccgatgtctgtgaaagaaattgagcctgcacttgggagcagctcatcatctccaccgtcctgatgatttttggtattgctctaatcagctggttggcccttccagctaagttcaccatctacaacttcggtactcagaaggaggtttccaactggggtttgttcttctgtgtttcaattggtctgtgggctggtttgattattggttttgtcacagaatactacactagcaatgcatacagtcccgtgcaagatgttgcggattcgtgcagaactggtgctgccactaatgtcatttttggtcttgctcttggatacaagtcggttatcatcccgattttcgctattgctgttagcatctatgtcagtttctccattgctgcgatgtacggcattgcagttgccgctcttgctattgatgcttatggtcccatcagtgacaatgctggtggtattgctgagatggctggaatgagccacagaatccgtgagagaactgatgctcttgatgctgctggcaacacaactgctgctattggaaaggggtttgccattggttcagctgctcttgtgtccctggcgctttttggtgcctttgtcagcagagctggagtgaaggtcgtcgacgtcctctcccccaaggttttcattggtttgattgttggagccatgcttccgtactggttctctgccatgaccatgaagagtgttggaagcgctgccctgaagatggtggaggaggtccgcaggcagttcaacaccattcctgggttgatggagggaacagccaagcccgactacgcaacctgtgtgaagatctccactgatgcttccatcaaggagatgattcctccgggcgctctggtcatgctgactcccctcatcgttggaaccctctttggcgtcgagactctctccggcgttcttgctggtgccctggtttctggagtgcagatcgccatctctgcttccaacaccggcggtgcatgggacaatgccaagaagtacatcgaggctggtgccagcgagcacgcgaggaccctcggtcccaagggatccgactgccacaaggccgctgtgatcggtgacaccattggtgaccccctgaaggacacctccggcccgtccctcaacatcctcatcaagctcatggccgtggagtccctcgtgtttgcccccttctttgccacccagggtggcctgctcttcaagtacctgtaaaagggacaacaccaagcacacagcagaagtatacgatctcccgaccgaccgtggacaatatcgaataactcctgccaaatcgccagttccttttgtgtactgtgcgctagccgccgcctagctgcactgctgtatttttgtttcaggattgctgctgctgttcgcattcaatctttgggcctcccggagccgccggaggcgcgttttactgttagccttactactcttactccctgtagctccacgtagaagaaaccgatgtcctgcgtctggcaatttttcttagtcccttgatgatggcgatgatgctgaaacctttttttgaacaatgatacatgatgattgttgcgttgtactggtggtaaatcacggtccgtattggcctgttctgttggtgcccatttccaatcatccaatgtcgtgctctgcgttatacgattgctgtttgtactgtcatagctgctgccgacaaggtcataaagaaccttaaacttaagccaaaaaaaaaaaaaaaaa

SEQ ID NO: 154582 - DNA, 698 bp, Zea mays
  Clone ID: MRT4577_7255C.1
gtaaaacaggatgacatcggaaaggttatcggcttggatccacagctcttgggctgtagtatcgcacataagctagaagttagtgtcaagtacttccggtcgctgggcatctaccactttgtgctgggtcagatgattgccgacttcccaacgcttctcaggtacaatgtggatatcctgagaccaaaataccagtacttgaggcgtgtaatggtgcggccactgaaagatctcattgagtttccaaggttcttcagttactccctggaggacaggatagaacctcggcaccgaactttggtggcgaacaggatcaacatgaagctgcgttacatgctgactggttctgatgaagagtttgcgcagagggtgcgagaggctgttgagaggagagcgagatttgaagctggaaaggctgctggtctggagacattctcatgttcttcagagacatctagtgatgcagaagctacagaagcagcagcatgccaaaacagcacggatgtggtcggggttctgcaaaaacaagcatagcattgcttccttaccgtgtgcatgttctaaatgggaaggaaaagattacatatatttcactgtgggtaagaatgcaaaaatgctaatgttgtgacaaaataataaagtagagaatggaatagcaacgtccacgagtaaagtgaaaccctagcgattcgtgcatc

SEQ ID NO: 154583 - DNA, 402 bp, Zea mays
  unsure (1)..(402): unsure at all n locations
  Clone ID: MRT4577_72560C.1
ttcatgcatgtcttcgaggagggcattaagacctaatacctatcctttcaggggctagagtctttaacagaagaggaccagcaaaatctcanatccttcctgcccgcccacccgtgcccatcgacgcgtcgttcttgccaggcgagccgcacctcnctcctcttcttctccagggggatcaaatacaccacangctgcgcgattgtgctgtgggtcttcggctacagctccctcatctggaaccccggcttctacttctacaacaaaatcctctacttcatcaagggctacaagcgcacctttaatctcgcttgcattgaccacagaggcacaccggatcatccggcgaggacctgcacgcttgaaacctactactaggccatatgctggggaatttcatat

SEQ ID NO: 154584 - DNA, 196 bp, Zea mays
  unsure (1)..(196): unsure at all n locations
  Clone ID: MRT4577_72562C.1
cggccgccccnaactaaattccccccccaccccccccccatggacttcgtggagaacaccccggccaccacagnagggcaggacagaacanaganaanccagannnaaaacancggggcaggaaacgccccgagaggcaaggacgcccgaaaagggacaaaaaagagcnacggcnanaanaccncgacaaaanggc

SEQ ID NO: 154585 - DNA, 818 bp, Zea mays
  Clone ID: MRT4577_72563C.1
ggatggccggactcgctctcgctccatccatccatcagtggagtgaagtgaataattcaacaccagcaaaacacacacaagttcgttcgcagcaagtaatggcgagaacgagagagaagctgacgctcctggtggccgcagtcgccgtgggcctcctgctagccggcggcgcgggcgcgggcgtggcgtcggcggcgcgtggccgtgaggggcggcggcgcgtgcacctgcggctgtacatgcacgacgtgatcggcgggccgaaccggacggccatccgcctcatctggggcgtgggcccgccgcacgcgtccatgccggggcgcaccttcggcgacacggtggccatcgacgacctcgtcacggacgggcccggcgtcggcgcagactccaggcccgtcggccgggcgcagggcacctacatgctgagctcgcagcacgaggaggtgatcgtggtcagcatcaccgtcgtcctcaccgcggggccgtacaacggcagcaccctcgtggtggccggccgcgacaggatctacgaccagacgagggagctcgcggtggtcggcggcaccgggggactccgcggggcctccgggtacgtgctgtggacgacggccaaggtgtggtcggaggtgcacatggtgctggagctcgacgtgcacgcgtccgtgccactgcccgacgaggaccacgacgacaacgacgttcttgttcttggcagtagggatgcgtagtaagatagacatggtctgtatctgtccctgtctaccaccgatcccatcaatgaataaataaacaaatataaaaggagcttgaatttt

SEQ ID NO: 154586 - DNA, 665 bp, Zea mays
  Clone ID: MRT4577_72564C.1
ccatggtggcgatcgaggcggccgccaaggttccgggtggtgtggtcgtcagcgtccccaagcgtcaggccaggagaaggtggcggatacgcccggccccaagctccgcggaagccaggagactgtgaacccggccccggtggtgtccggcgccggcgccgaggaggccgacaagcaggagggggcggcggccctggaggagaagaagaagaggaacatggccaaactccgcggcggtgcctaggcccagcagagcagatggatcggagcaggtgcctaggcccagtctgccaggccgcgctgcgctcccgtcatcatctattcatctcctcacccagattttgcttccctcgctcgctctctcattcgtttgtgcagctgattacgctaggtctatttacgcaactgtcgtgtgtcgaattttaacagcgacggccatgcaccaaacccccaccccacacatcattttctttcttcctttcttttgattcgacgacgcctgtgattcatgcatgctctcgatcgaggcaaagctgttgtatgttgttatggtgtactattctatttttttatttataaagttttgatattttttattaaaaaaattttgattaaaaaaaacatacggacgcgtgggaaaaaaaaaaaaaaaaaaaaaaaaaacc

SEQ ID NO: 154587 - DNA, 574 bp, Zea mays
  unsure (1)..(574): unsure at all n locations
  Clone ID: MRT4577_72565C.1
ttatttttttttttttttttttttttttttttttttttttttttttttttttttttttttttttcttttttttttttttttttttttttttttttttttggcccagaaaaattaaaacagggtcaggttcaggaatggaaaagacgaggcattaccccttattcattggggccaggcccaaaaggtaaaaattccaaacgggcccatcaggttcagactaaaaaaatcccggcacaaacgggagggaaacccccctcctcgcagccccgggggggggaacgacgtttccgggggcccgggaccccggtaaaaggaacttccggggggggcggccgggatccccgtcctggatatggaattcggggacaaagcccttgtaaacgagggtggggacagggaggcccaaaaggcccacaacggggagggtggggggggcccaggggaaattgaacccgggggtttggggggcggggttccacttttggaaccaccggttttggggcacctccatgccgccacccaattcccccttcctttctttctttnatcccccggacgcggggggggacccggg

SEQ ID NO: 154588 - DNA, 392 bp, Zea mays
  Clone ID: MRT4577_72566C.1
actacatcatataatatcgctcgatctctctcttggagggtatacacagtccaacacagagtggccgccgccacctccctggaagaggaggagcagcctccacagctaccgggccttctacgtagatgtccttgtggactcccggacgacgactgtcgtccaagtcatgaccgcgctgccagcagacaaggtcaactgccgtccgaagaggcaagctgtgcgcgtaatccagcaactgcgtcaagctcatcacgacgcacgtggtggtaatagtccagatcaagatgtcaggcgacgccgacatcctgtaatatgccgagaaacaagtggagagactgctgtactcctgaacggcaagagcctgctcctcctggaatacaaaaaatcatatc

SEQ ID NO: 154589 - DNA, 225 bp, Zea mays
  Clone ID: MRT4577_72567C.1
ggtcgagcccgcgtccgacacgagtccgcgcaccagtgccgacagcgacagcatctcgctcattctcggccatcaagttctggatcgacaacatctccatgtccaaatgcaaagacagcgtcatcgacgtcatgcagacctccactgggatcatcatctccatctgccacttcagcaaccacagcaacgtcatgctcttcagcaccagcgattcctgggcggaag

SEQ ID NO: 154590 - DNA, 367 bp, Zea mays
  Clone ID: MRT4577_72568C.1
cgacaacatcacaatcatccctcaataatggctaagagagttctcatcactggtgcggccgggcagatcgcctactccctcgtcttcgctattgcccgtggtgacttgttggggcccaaccagccagtcatcctccacctcctcgatatcccccagatgattgagggccttaacggagtggtgttggagttggaggattgtgctttccccctcatcgcaggaattgttgccaccactgatgtgaaggaggcattcactggcgtggacattgctcttttggttggtgccatgccacgcagggagggaatggagcgtgctgatttattgaaggccaatgctggcattttcaaaggtcaaggcaaggctc

SEQ ID NO: 154591 - DNA, 237 bp, Zea mays
  Clone ID: MRT4577_72569C.1
ctgtgggttttttttttgatttttttttttttacttttaacacttttcatattgttttgacagaacatatttgggtggagtaaattgccccttctttattgggcattaaaggataaagatacaaccaattgcgttcgagcttccgactgcaaataactttggggaacaaagttgggcgctgaaaacaaacaagtgaaatttaaaaaaacgtgagttaatattacaaagattcccatg

SEQ ID NO: 154592 - DNA, 847 bp, Zea mays
  Clone ID: MRT4577_7256C.1
gactcctatagggcgattgggatcatcaaggccggccgggagaaggccggggaccacctcactcggtctcttgctctctccctccttgtgcacagccatgtctagacgcttccagctgccccccatcctcacctgcctaatcaccgtgctgatcagcggcacggcgtcggcagacacgccggactgcccatacccgtgcctgccgccgccatccgctgcaggagccatcaacagctacccgccaccgcaaccgtccactggaggcggcggcggcctcggcggcagctttccgccacctccgccagggagcttccagctgaccccgccgggggcgattcccgcgggcttctccccaccgtacagtggattcccctctgggccagccccgccgccgccgaaccccgtcctcccgtggttcccgtggtactaccagcgcaccaacccgatcacggggtcgacgacgtcggcgtcctcacctgccatggacgcccggtcgacaacactcacagtcgcggtgcttttccatctgtccttgctcgttcttgttcgtgttctgtagagagtacctggctacctgcagccgataggcgagttaattaaggtgcttcgttttgctattttacttaaagtgctagaaacgtgttatatatagaatatattacttaagtttgtgaagtagtgttattttatttttggtgtaatttattttgtctgtgagtgacccctcacatgcatatcgctctttttttactgtattcttagcaaagttttacatggttatcatgatcagattttagaggactatacatttttttgctaaaaaaaaaaaaaaaaaaaaaggccccta

SEQ ID NO: 154593 - DNA, 479 bp, Zea mays
  Clone ID: MRT4577_72570C.1
acgcacctacgcacctaggggccgtcgcgccagccgcaacaacgcagcaatacacgacctcacgaaccaagaagaagctaagaaacaagatacgaaaaaaccccagaatcccctaatggattagtgtgcgcacttgcactccgataatgcccaaaggcacaaccacgcactgacgcactggcaagctaccatgctgagcttctgaacgggccgattggtcggctggagggctagaaggtaagagctaaatagctatcgttctatcaatgtatcaatgtgtcatgtaagctagcaagcgctgatgtgacgatatgattaagatattaagaagctgggacgcggagacaaaaatagaactactgcgctgctccggaagaccccaagaatccttgctatgctgagatactaaccgacgatcccattatataagtatagatgcagtgatggagggcctgaggtccaaaaaaaaaagcggccct

SEQ ID NO: 154594 - DNA, 141 bp, Zea mays
  unsure (1)..(141): unsure at all n locations
  Clone ID: MRT4577_72571C.1
tgcgcctctacatttcttctctcnctgcncntgcggnctccggcctgattccatccaatanagggatcgncatgtccggnattcggagngagcanccacttcgaatcgaggngatgctngngntcntagagctaancgnag

SEQ ID NO: 154595 - DNA, 360 bp, Zea mays
  Clone ID: MRT4577_72572C.1
gcggccgccctttttttttttttttttttttttttttttttttttttttttttttgttttttttttttttttggtggggtttttttttttttttttaaaaaaagggggcaagcccttgatttttgttgaaggggtccaaacccagttcctttttgtagctgggcaaaaacaagccacaaatttattttttcacctcttaacggggcagggggggatacctcctgataaaacctcctttgtggggagaaaattcccctattgttttgtcccggggaacaccttcacattaatttttccctccccagctttttcgggaaacaaaaacatattgcccttataatttgtcccccctgccttttt

SEQ ID NO: 154596 - DNA, 444 bp, Zea mays
  Clone ID: MRT4577_72573C.1
atgttacaaggctttggcattggcagatggatgttcttcatatacagaacccaatggtttttttttcttataccaccaaggcaccaacacattggctggattctccagaccatctgagagaccaaacccaaacttctagacggccagcattgacgaaccggcggtgaacaatctttcccgaatcggtctctaccgcgggaagtatgtatcctaaaaacctaaattttccttgttttcaaaagggcaatttaagaaccaccaaaaagaattccgttgtaacttttgtcggggcaaggtattggcccaaccttaacccgaattttttgggcggcattttaggaaaactccgcctccaaaacctccaattgggccaacaacttcaggtgccccacgaacagccgtccttccccggggggccccccttggtcccccccaaccacaacc

SEQ ID NO: 154597 - DNA, 238 bp, Zea mays
  Clone ID: MRT4577_72574C.1
gcggccgcccttagaccgtttgataactttgaacatgctgatgaagaaacagagacaaagggtacatgagacagggcttggaggctgcccatcatggctcctgtcggatttaggcctatgacaccaaaagaattatattcttcaacggcgcatgatggacggactatactcaacaaactaagacttggctatccacaaatgctggaaagtgctgagtgaacacttgatggatcctaga

SEQ ID NO: 154598 - DNA, 2475 bp, Zea mays
  Clone ID: MRT4577_72575C.1
atgggcaagagcaaaaagggcgggagttcttctcaccactccggtgataagcggaagcgcgagccgaccccccatcggaggacttcggcgactccgagtacttggaggaggagttctccttcgggtcctatggctcaccgacccccgcttctccccgggcgtcgtctgatgactcagacgactcccagggaatcgctacggaggtatagacctacatccgggccatcgagcgtgccgggctcgagggctcggatgagtcggaggactccccagacgaggaggactcctcggactcgtctgaggagagcggcgggggcgacgatggcgagggcgacgattgcggcagaggcggcggcgatggcgacggagacagcggtgaaggcagcgacaagggcgacggtggcagcggcggcagcaagggcggcaacagcaagggcagcggtaggggcagcaacaaagccagtggctaagcgccactggtttaaatggagacaacctgatgttcgtgcttcgagttggattgagtctcccacggatttggaggtagccgaggctagagttctacttgctaaagttggtttgctgaaggagaggggtctaactgctgaggccatagttgtagattttgtattcaagaacattcagccactgaaggacatagcgtacccggcctacctgtatcgtggcattgctgactcgacccgggttaccaacagaaggattcctgctatggatctggtgagccggctcgagatgattcttaggggcaaggtatcgatcgttggtgctcctattgcatattctgtctggaatctaccgccttctaaaaccttcatcagttttgtgtcaaaccctcctgctgaagggaacggtttgggtcttagagtgcgaccctcccccgaagaggttgaggcattggttgctttgctgggtgatatccctgatgacgaaaggcaggttcattttgagatgcctgttaaccccagtgatgcagaaataagtgctatgctggatttgctggccgatgattcctctgactcggtccccactgaatcactagttgtggccatcattccggagcctgaagagatcctggatattcagagactcgatagcactcgcccgaagcgtcctcgtcgagctaaccaaccaacttctcctactgaggggaagaaaaagagacggcttcggcgagtgtcatgttcgaatcaggatgccgacccttctgttccagctgctgagggagtgcatgtggaactttcttctggagctgatcccaatgggtgtgactcagctgatgctaaccccaatgggtgcaatccggctgaccttgatgatactgatcccaatgggtgcggtgttcgtattgtcgacgaggatgaagaagaggaggaggaaatccccttgattcggaagaacaatcggcgttatgtagtcagtggagagagtagtgaaattccttctccagctttgtctgcccatgttggtctgcaggaattgtctctggcaaattttgaccaggctcttgaagatgtgatccctgaagatctgctgtccgagccggcagatggtgagttgtctcaatcagcatctcgggcctcatcgaccttagagcgcggtcttcagagtcaagaagctgatccagattgctctgttcccatgggaatggctgagaaccctctagccttagaggtggctggagcggagagtccggtcctcaaggatggcgctggcgtttgcccagcccccaagggtattgccggtaatgatccggctcaggccttggttgacgagatggccggtcggctgaaatctcaaggtgcttctgtcccgaaaagagctctgtctctaacacattggaatccaacgctgcttcagcggcgaatatctgatttagagatggcgaatgccgatatggcccggcggtactctgatcttgaagagaaatattctcaaggtcagacggacttggcccgggtttctgcttctctgaatgatgccaacatgctgaattccactctccatgctcagcttggctctgaaaaggaggaaaaacgtgcccttgcaacttctcgtgataatcttgacaatttatatcgcgacgccagcaactcgttgactatcttggagaggagccataacttcaccatggatgacttgaataaccaacactacaaactggagttgatgtcgagcaaagattctattatcaaggatctgcgtgcttccaaaaaatcaattgcctgggaattagaggctgcccagctggctgtcaaggtcgctgaagacacttccgctatgttgagggcccaacacgacagagctatggataaagccgttcgtgcggggcgaatcttgatgaggagacctggtgtaattgttcctaacgacatagttgcagatgtgaatgctgctcctgattcttcgagttgcccctcttcatcgatcgctcctgagaaaaacagtaccaagtag

SEQ ID NO: 154599 - DNA, 166 bp, Zea mays
  Clone ID: MRT4577_72576C.1
gattgatcgcatattcacatcccaaacccccggcctctccgctacgcgacaccgcgctcgccgcctcgaggaatctcatcccatcccgttcccaccaaaccgatccgatcgaatagtccgcgagcgacgcccatggaggcggcggcggagctggcgctgcgcctcc

SEQ ID NO: 154600 - DNA, 534 bp, Zea mays
  Clone ID: MRT4577_72577C.1
aaaaaaaaaaaaaaaaaaaaaaaaaaaaaaaaaaaaaaaaaaaaaaaaaaaaaaaaaaaaaaaaaaaaaaaaaaaaaaaaaaaaaaaaagtttgtacttgggccgaaaccccttttggggggaattgtggggattttcgtgcctgttgggggggggttcccccttgcttttagggggcccatttttccttttagggggccgtttttcacttatgtggggggggtttaacacctgggggccggggaataccctggcttgacccggttaaaccttttggcggcccatcttattttggtgggggggggtaatattgagggggcccgcccttatcgcctttccgagcggttgggccgccttttggggggggggaccccccttgtgggggggcgttatcccccgcggggggggggtttacccgcggggggccggggtcccttctcagtgcccttgctcccgttcctttcgctttatgccctccctttttcccccgttacctttgttttcccggctaggttttagattgggggttccttt

SEQ ID NO: 154601 - DNA, 326 bp, Zea mays
  Clone ID: MRT4577_72578C.1
gctacagggcgtctacccaataaaccatcctccaaatcacatttcataatttcattaaacaccagcaaacactaggtactagcttctaagcatctaaacccccctttacttcctccttcttaagtcttacttgggcccctcccttattttttccgcagggtcctccgagatttcaaaagtccatagggtcaatttatcacaaaggagcttcattatcaaaggtctttccttttaagactccttttttagggtttccatttcccaaatggcctcttaaaaatcctttttttcaaaacttaacccccaatttgttttattttaaattt

SEQ ID NO: 154602 - DNA, 273 bp, Zea mays
  Clone ID: MRT4577_72579C.1
tccgcccgccatgtagggagacatcatcgacgtcgagctcgtcaccccgggcctgctcttccgttccatccgccgatggggtgggagagtcgggccgcgctgtggtgctggccgaagttgcggtggttgtcggtgcggctgtggggcgtcttgctggtggcgtcgatggagagggcgggggcgctgggggtcgtgtacttcttgtgcggcgtcgcgaggtttttgttgcgggtgtggtggggcttggtgttcgccttgggctccttgtacggg

SEQ ID NO: 154603 - DNA, 230 bp, Zea mays
  Clone ID: MRT4577_7257C.1
ctgactccaaggacgtcatggagtacgacgccggcttcaaggggccgtgggtggagtgattcgacggctagtagctctccctacataacatggagatacccaccacaatgccatatacccaaagaatgcaaattgaagtttccaaagtagtaacacaattatcttgttgcttggtcaccttaagttctcgcaaacactatttggaagaataacttattagtctactacac

SEQ ID NO: 154604 - DNA, 1243 bp, Zea mays
  unsure (1)..(1243): unsure at all n locations
  Clone ID: MRT4577_72580C.1
ctgtgcggcgctcatcgagcccgggcggacgcgtgggcgagggctcagttcgcacgcttcccaacatggctctcggtgccctagcccgcctcctccgccttgcgcccacccctcgcctcgcgcgccccttcgctgcaaaggtccgtgcgtctcggccgcaggaaccggagcttccgtcggaggacgacaacgacttcgccggcggcgagctcaccgcccccaccgagggcatcggcaagccgctcgccgaggtgctcaaagagctcgggaagagggttccggactcccttgtcaagacccgcgtcgagaataatggcttcgctatcaagtacatcccatggcacattgtgaacaaaattctcaacatacatgctccagagtggtcgggtgaggtacgcagcattgtttactcatttgacgggaaaacagtatctgttgtctatcgagtgactcttcatgggattgatgcagagatctatagagaggctactggaactgcttctgttgatgatacaagctatggtgatcccatacagaaggcagaagctatggcttttcgtcgtgcttgtgcacgtcttggtcttggactccatctctaccatgaagatatgtcatagactcgtagttgactaatgttagtgtttgtggcggaccattgtcccttaatgggctacccatttgcactgggcatgcttctttttcttaaatgtggtatgtatgtgcaagtgtttgaagtttaggctgtcatgctatatgtcagctatcaaagtaccaaatgcaactactgttctgagctgtttgcttgttacgaaacagctttccagtatctaaattcccgagtttcatgaaaaaaaaaaaaaaaaaaaaaaaaaataataaaaatnataaaaaaaaaaacaagaaaaaaaaaaaaaaaaaaaaaaaatggttaaaaagggccaaaatttggttaacctttaaaaaaaaaaaaaaaaaaaggccctaagggccggggccgtttaaaaaaaagggaaccccccgggtggaagaaattcaaaacaaagttaatcaaaaccgcaaaccccaagggggggcccggaaccaaattcccccaaaaggaagccaaataaccggggttcatgggcggcggtttaaaaaggcgggaatgggaaaaacctgggggtaaccaaatttaaccccttggaaaaaaatccccttttcccaagtggcggaaaaaccaaaaaggccccacccaatccccttt

SEQ ID NO: 154605 - DNA, 291 bp, Zea mays
  Clone ID: MRT4577_72581C.1
atggccgccgcgctcatggacgtcgcggccgcctccgccgtcgtgttctcggccgtcgcgtccgtgtctaccgccgcgtcgtcgtgctcgaacaagaaggccccgacggccttcgtggctgctgccttcgccaagaagccggagacgccgacgacggccgatgtcgcgcaggagaagcacgaggagcttgagcgatgcatcgacgagtgcgagagcggcagcgaggtggtgttcaggagcattgttcggaatagggtttcgttgctcaacatccatagtccggcgatctag

SEQ ID NO: 154606 - DNA, 1243 bp, Zea mays
  unsure (1)..(1243): unsure at all n locations
  Clone ID: MRT4577_72582C.1
cttcggcggcaacggcgtgatcgcgagcatngagcactgcaacgacttcatgctgctgggcacggaggcggtggcgctgggccgcgtgggcnacgacttctggtgcacggacccctccggcgaccccaacggcaccttctggctgcaggggtgccacanggtgcactgcgcctacaactcgctgttgatgggcaacttcatccacccggactgngncaggttcgggtccacgcacccctgcgccgccttccacgccgcgtcccgcgccatctccggcgggcccatctacgtcagcgactcggtggggcagcacgacttcgcgctgctccgccgcctggcgctccccgacggcaccgtcctccggtgcgagggccacgcgctgcccacgcgcgactgcctcttcgccgacccgctccacgacggccggaccgttctcaagatctggaacgtgaaccgcttcgccggcgtcgtcggcgccttcaactgccagggcggcgggtggagccccgaggcgcggcggaacaagtgcttctcggagttctccgtgcccctggccgcgcgcgcctcgccgtccgacgtcgaatggaagagcggcaaggcgggaccaggcgtcagcgtcaagggcgtctcccagttcgccgtgtacgcggtcgaggccaggacgctgcagctgctgcgccccgacgagggcgtcgacctcacgctgcagcccttcacctacgagctcttcgtcgtcgcccccgtgcgcgtcatctcgcacgagcgggccatcaagttcgcgcccatcggactcgccaacatgctcaacaccgccggcgccgtgcaggcgttcgaggccaagaaagatgctagcggcgtcacggcagaggtgttcgtgaagggcgcaggggagctggtggcgtactcgtcggcgacgcccaggctctgcaaggtgaacggcgacgaggccgagttcacgtacaaggacggcgtggtcaccgtcgacgtgccgtggtcggggtcgtcgtcgaagctgtgtcgcgtccagtacgtctactgagccggacgggccgatgactctgctccctgctggcctgctcaggacgcaataatctaatgtttagagcttaccaagttttacagctctatcagtttacttttgtttttctgctcttcgttttttaagaattatttctattgtgtgaattaatgagtgctttccttctagttttctgattaaaaaaaaaaaaaaaaaagcggccct

SEQ ID NO: 154607 - DNA, 282 bp, Zea mays
  Clone ID: MRT4577_72583C.1
gggcaggtattgccggataaaaaaaataataaacaggggcgaaaaaaaggccaacgggttccacacggcccaaacagcaaaccttgaaaaacaaagggggaattaaaaaaacccaaaaaggggccgattacaccaaaaccaacccaccgcatggaaaaaatctcaaatggtccaccctattgttccccaacccctctggggacaaagggaccaaggcccccctgggcatggtaagcaacccccacctcagtgtccaagctggggggccacgggaacaactcc

SEQ ID NO: 154608 - DNA, 411 bp, Zea mays
  Clone ID: MRT4577_72584C.1
aaaacggcctaaatttacgtttcattcatactctgttttcaagagttacacatttccaaatttacattcattagcacaaaaggaagcagccaattagcataccaattgtgactctttctatcgattccaatatcacaataaagcaggttaccattgtctttttcattaattttttttaaacacttaaacccaaggaaaaaagacaaaaatctacacatcgatgccaaacccaaaatgggaagccaacaagttttggtatctaaaacataaggttggtgcatgttaaggtgattgtggtctttatttatgtgaggtggttaattgaatggtgcattaaaaattttggatttaattttaaatcgaaatttcgagtatttaaacaaaaaaaaaattatggttttggtggttttt

SEQ ID NO: 154609 - DNA, 270 bp, Zea mays
  unsure (1)..(270): unsure at all n locations
  Clone ID: MRT4577_72585C.1
cgggncgggaatccccgggtggaccacacccttccggccccaccaaaccaaaccattaagcattttcttcaaccaaagaggcagcgaccacccggggggccccaagagggagaagcgggcgtccaccagccctcctttcaatccaattggccttggcggcagcgaccggcaaaagccggaggttccccctgccctgcgggttgcttagccatgcctttaaggccgaccagcaccaattgggggccccggccgccccggccacaattacct

SEQ ID NO: 154610 - DNA, 340 bp, Zea mays
  unsure (1)..(340): unsure at all n locations
  Clone ID: MRT4577_72586C.1
cacgacaccacgtgaggggcaccggggaccagcaaagatgcttgttatccgggcttaccangcggcagccccgatggacagcatccggcatcacctcctggacgagccgcctgcggacgcacaccgccagcgcggctcctcggccggtgtactgccgcagcacgagcttccgcagcctagtggcggaccaatggagcgagtcgctcccgttccgccccgaccaccccgactacatggtcgtcttcggcgcgctacgcgacgccttttcccagggctggctcccccacggctccttcgccgccatgaagcccgagcccctggcgttcccggacttccccta

SEQ ID NO: 154611 - DNA, 1378 bp, Zea mays
  Clone ID: MRT4577_72587C.1
ggagatgatacaggatggcctccttggcatttttgcgggtctctatagtgagagattgctggaattcccggggaaattcacttcaagacagtctcagtcatccacttcccctctgcaccttgaacgtcctccgcagaggcagctccccaactgttagaatggacgacacggaagccgccaagaacacggccaccaccggccccactttcgcctcccctctcttctctttctccaacctcggcggtgcttccttcggctctggctttggcttcaaatccagcgctcctctgccgcctgccatcgaggtccagctctgcgaggaatcacccgttccggcagctaggttggagccagtcgtggtcgatgactccttgacgatctacaagggcagagtgagtacatctgacgtgtttggtgtcaaagactctgatttggtccctggaaaatatgaaggtgggttgaagctgtgggaaggttcattagacttggtgaaagccctgaattctgatatcaaagaagataaatttcatctggaaggcaaacgcgtattggagcttggatgtggacatggcctccctggcatttttgcgggtctcaagggtgctgacctgattcatttccaagatttcaatgccgaggtgcttaggtgcttgactataccaaatgtaaaagtcaatcttttcaaggattcaccagaaggaacatgtacatgtccgattgttggtttctttgctggtgattggagtgaaatggataagctactactttgcggggatgctgagcaagacaaaacagccagtggtgatacagaaggtaaaatgtgtaatggttatgatatcatcctgatggctgagactgtttacgcggtatcttgtcttccaaatctctacaggctcatcaagaagtgcttgcgctaccctgggggtgtggtttacatggcagggaagaagcattactttggagtaggtggtggcacaaggcagtttctgcgcttggttgaaaaagacggtgccatgcatcctgagcggctcaatgatgttgctgatggatcatccaatgttagggaggtttggaaattctcattcaaatagattagcactgcccctgcgattgtcgggagaactggaaacatgtactggactccatattgggtgagagggaggtcttataggacttcctggttctgttaatctacctgtgactgtttcaaaaagctgatctttctcttttggagcactgctttgctcttgtagactaaaaaaaatcgcttttacctctggtttctgtttgttaaacttgtttagcctttcatatgaaacgatgaattctccttgatattatcgaaaaaagaaaaaaaaaaaaaagtcgacgcggccgc

SEQ ID NO: 154612 - DNA, 580 bp, Zea mays
  Clone ID: MRT4577_72588C.1
cacctttccagtaccagccttcgcttgggattattgaaaataatggcactcctcctgcggtgataggaacaggaggctacatcaatccacatcaaaaccagaaactacctgtgctgagttaagagtatccatgtcgattctgtgaacaccaagtatcaggttctgaaaatgaccctattaaggcggtcaagctgcctgaaagatgtaaaatctccaaagatcataaagttctgccaatagatgtcagggttcttaatgacatgactacacatgctagctatttgcctgacaaacagcatcccacaacacagaaatgcaatgattctggagaagattctaagaatgtgataacttcaagtcaacaggaaagttcgtgttctggcagaaaaccaatacttttgggtgaacatggtggcagtcttacaggaagcataagtgaactaatgagtaaaagtgtgatgaatcctattgctattactcctagagttcatactgatcatttaacaacaggaatcccacatggaaatattttttctgcagcggtggagaaagaagaaagcactcacaagagaggtgaaga

SEQ ID NO: 154613 - DNA, 312 bp, Zea mays
  Clone ID: MRT4577_72589C.1
caccccccaaaacccggggaataaaaaaaaccgaacaacaggactggaaggatctatttaaacgcaccccccctttttccggggtggaaaaattaaacagactacaaaaagattcccccccccccaaaaaaacgaagggggaaaaacaaaaaagcgacccggggaaaactatatggacccaaacaaaaccggaagggaattcagggggggaacatcggccgaggaaaaaaaacaccaggatgggcatgaaatcgggaacaggcccctttggtccggaggccctctacgggcttcgccaatgcaaaaacccag

SEQ ID NO: 154614 - DNA, 569 bp, Zea mays
  Clone ID: MRT4577_7258C.1
ttcctcagagggaacacgccaccacctgaggatcgaattatctatctccctgtcgcaggctccctcctctttgctccagctaaggctcctctccaacgccgaccaggggctagtcctctgacctctccgagcacgacctccgctgtcaggaggcatggatgcgcatgctactgtcccgggcccgagtggggcgagagataactccctccgactgcgcctgcgtctgatcgcgggaggtgtgcgaaagacgcgccactgtgaccagcgtgagagaactaggtacttctatgacatgcttgaccagcaccagatcagcggtagtcaacgacgatgaaatagttcttctcaactataatcacagaactgtctcgagagcatgaccaagagaccgcttcatgaggagagttgtcgcgactataagcgcaaccatttcgtaacacatgatgagtcgaattttcctttcatgatgatgcatgtttgaacaaagacctgggaatgatgacgcctctgaatctttacactctcatgtatatttacgtatgactgtgcggaactctgcgagaacgtct

SEQ ID NO: 154615 - DNA, 380 bp, Zea mays
  unsure (1)..(380): unsure at all n locations
  Clone ID: MRT4577_72590C.1
gggtacctcgaggccggccggggatggttagtanagcccgttcgcgagatcgggcggtaacttcggagggaagtgatgaggaacaaggacacgagatggtggccatgaagttcataagcgaggtaaacaggacgacgagaacggtccgcgagatcgagaaccaccgtccctccggcaccccaacatcatccggtcaaggagggggtgactcccacgcaccttgcgatcgtgatggagacgctgcgatcgagattgttccaggctctgcgacacggcggtccataggagaaggggcncccccccggccccccncaaaacacccccctctttttttttcccccttttttttttttttttttcccccccccccctcccccccc

SEQ ID NO: 154616 - DNA, 165 bp, Zea mays
  Clone ID: MRT4577_72591C.1
gacgagggcaacgaagaggagggcagcgaggcggagacgccaggcagagaggctagccgacgagccatgctgtccgtggggagattggtggatgcctacttgggggagatcgcgacagatgccaacctgaagccggacaaattctgcgacctcgcctgggcgttg

SEQ ID NO: 154617 - DNA, 702 bp, Zea mays
  Clone ID: MRT4577_72592C.1
gggccggaattccccggtcgacccacgcgtccggtgggaagcagtcatagaagctgctgatactaccttggtcaccaccgagtgggccatgtatgagattgcgaagcacccagaaaaacaggaatacctttatcaagaaatccgaaaagtctgcggcaacaagacagtcaccgaggatcacctgccagagttaccgtacttgaacgcggtgttccatgagaccctaaggcggcactctccagttccgctggtgcctccaagacttgtccatgagagtaccaacttggctggctacgaagttccagccgggacacagatgatcataaatctgtacggatgcaacatgaacaagagcgactgggacgcgcccgaggaatggaggccagagaggtttctggacgggagcttcgaagtcgcagatatgtacaagaccatggcattcggcggaggaaggagggcctgtgcgggaagcatccaggcagtgaacatcgcgtgcacagccatcgcgaggttcgtgcaagagtttgcgtggacgctcaaggaaggcgacgaggacaaggacgacaccatccagcttacaaccaacaggctttacccgttgcatgtgtacctcacacctagaggaaggaaatgagcatcacatttatttggtctctggtctgtgagcatatgatcgaataacaatttattttaaatgaaagc

SEQ ID NO: 154618 - DNA, 500 bp, Zea mays
  Clone ID: MRT4577_72593C.1
gcgcagcaggccgcggagacgaacgcgaagcgagcggaggacggcggcggtggcgacagggtgacgctcagggacgtggtgggcggcgacgccgcggcggcgatggccgccgacaaggtggccacgagggaggacgccgagaaggtggcggctgccgcggcgcgcaacgtggggaagggggccggcggtggcgtcgccgaggctgtcgtggcggcggcggatatgaacgaggggaggatgatgtaacagtgtagtatatagttgacgtctgtacttgtatcctagtaccgttttacgtgcgttaataataaattcgactcgtttggaccgtcgtggtcatgagtctgcctctatttggatcccttcgcgcctggatccattttgtaaacttttgggacacctgtaagcttaactttttgaacttgtgaagattctctagtttaaggtttgtttggtttctagaatcaattcatgaggcggtgtatcaaatttactggaat

SEQ ID NO: 154619 - DNA, 215 bp, Zea mays
  Clone ID: MRT4577_72594C.1
gaggttcatgaggttttacagggcccgacttcaagggatcggcggttcgaggctggggaggctgctgtcgccaaacgctactcatgtcgagcgctctggtctgcgcgaacaataagatactccgtctacatgaatcctctgtgatgaggcaagtgtcctataattcagaattctctagtttcggggtaccgctactaataaaagctactggtaga

SEQ ID NO: 154620 - DNA, 330 bp, Zea mays
  Clone ID: MRT4577_72595C.1
gctgtttgctcttgcgagtgctcaatccagttactggttctcaactccgctccacattacttcagcggatgtagctgatttcaggggttgttatcttaatacctgcctctacgtttcccagagccctcgcaatcctgtcgacagcaagctttttggatatccccaaccacatcctgtctgggcggtacttacaatgactctttggttctatttttgagctctcctgaacgtccattggaaagttccaacaccttgtacatctctcccgttcacacttcgcacttcacggaaagtagcttcgatcctactccctatgttagagccgatcct

SEQ ID NO: 154621 - DNA, 427 bp, Zea mays
  Clone ID: MRT4577_72596C.1
attcccggtcgaccacgcgtcgaccgtcgtcgcgcccgccgtcagatctagctatctggcaccactgcgttgcgcgagtgcacaataaccatgtgatccggatgattcacggtgctcttttgtagcccattgtatccctctaccgggtgaccggagctagactaacaagtcttcggcgccaccggttgccgatttgggttggcggtacaaggagccaccgtgctaacctcagtttgtatgcttgctttttcttgttcgcacttcgtgtcttcagctttccttcattttgttcttgtccactcggttttcgtatggatctttgattgtctgaggctctggatctatgaactaggagaaatgcgataatatattgcaaatgatttagagtttcaggcttaatcgcgagcttggtatatgattaatttat

SEQ ID NO: 154622 - DNA, 567 bp, Zea mays
  Clone ID: MRT4577_72597C.1
ggaacatcgggcggcagttaccgttcgcgccgaggactctatagaacgaacacctcaaccacgcgcactacgcgactacccgttggcgggcgtgacaggcggctacggcgtgacagataacacctagttcggcagttcccgcactcgtccttcgtctgccatagtccccttgcggcagttaccacacgtgaagttcctaagtctggactagcatcgaccaacgttctttacacgacaggaacaggaggtccaggtaataataatccacgtaatgtaaacgtaggtaacgtaggtccaggtaatgtaaatgtaggtccaggtaatgttgttaatgtcaacgtaggtccaggtaatgttaacaacgcaaatgttaatgccaacaatgtcaacgctaagaacccttaaaacgtgaacaatgtgaatagcgttaacgtctccctaggtgtgtagaacgcctattactattagtattactacaagaaatagctacggtaaaaatgaaaacgtgttaaaaatgttaaaaataatgttagtagaaacgccaaagttgtctcgtctaattttgct

SEQ ID NO: 154623 - DNA, 131 bp, Zea mays
  Clone ID: MRT4577_72598C.1
tgggccatccaatcgggatgtctggagctcggattgttgttcacttggctcatgccttgaagcacggagaattcggtctggctagtatttgcaatggtagaggaagggcttccgccgtgctgattgagaag

SEQ ID NO: 154624 - DNA, 651 bp, Zea mays
  Clone ID: MRT4577_72599C.1
gtcgggcccatcccgtcgtccctggccgcactccccggcctccggtacctggacctcagcggcaacatgctgagcggcgccatcccgccggagctgctgcacgggagctccaggttcctgatcctgtccaacaaccggctcacgggggagatacccggcgactacggcgacggcgacgtcgacaccatcgacctctcgcacaaccagctcaccggtgacccctcgtcgttcctgttcggcatcacgaagccggcggtcaagatcgacctgtcgtggaaccagctcgagttcgacctgacggaggtcaggttcccgcaccacctcaggttcctggacctgagccacaacagggtcaggggcagagtggccaagtcgctgatggacgtgaggctggagcacttcgatgtcagctataacgagctctgcggcgagctcccggcgggaaggttcatgtccatgcacggggcagagtgctacgcgcacaacaagtgcctgtgcggcacgccgctccctccgtgcaactgaatcactgcattggttcaggctgtgcaatgatcactggtttaatcttgtgcgaacaagttgttagttgtaccagaacagcgaatcagttggtcgggtatccacgctcaatgttggctttggtatcgg

SEQ ID NO: 154625 - DNA, 1228 bp, Zea mays
  Clone ID: MRT4577_725C.1
gcgcgcctcagcggaggtgcttggcaaaggcgcgttcgggacggcgtacaaggcggtgatggagaacgggtccgccgtggcggtgaagcggctcaaggacgtggacctcccggagccggagttccgggagcgcatcgcggccatcggcgccgtgcagcacgagctggtggtgcccctccgcgcctactacttcagcaaggacgagaagctcctcgtctacgactacatgtccatgggcagcctctccgccctgctgcacgggaaccgcgcctccggccggacgccgctggactgggagacgcggtcggcggtcgcgctggcggcggctcgcggcgtggcgcacatccactccacggggcccacggcgtcgcacggcaacatcaagtcctccaacgtccttctcaccaagaactacgaggcgcgcgtgtcggaccacggcctccccacgctcgtcggcccctccttctcgcccaccagggtgtccggctaccgcgcaccggaggtcaccgacatccgccgcgtctcgcagaaggccgacgtctacagcttcggcgtcctcctgctggagctgctcacggggaaggcgcccacgcacgccgtcgtcaacgaggaggggctcgacctgccgcgctgggtgcagtccgtcgtgcgggaggagtggaccgccgaggtgttcgaccaggagctcctcaggtaccaaaacgtcgaggaggagatggtgcagctcctccagctcgccatcgactgctccgcgcagcaccccgacaggaggcccgccatgtccgaggtggccacgcggatcgacgagatccgccgctccagcctcggcgaccggcaggtggccgacagcgccgaaggcgacgagccatctctataaccgccgtagcagtagctcctcccctgatccaccaccacacgtactgtgtcaatctcagtgaatgaaaattgcttagttctttgcatggatcgatattgctcttgcttcacatcagcaacttgtgcatgtatgctttttctctttttcttctcttctttatctttttttttggcctctttctcacgggctttgatgattcgatctattctatagcacatgtcactgtactcttttattcttggaaagcaacatttggtgatgccttacttgtatcgatctaagaccaacaccattgccagctgcgaaaaaaaaaaaaaaaaaaaaaaagtactctgcgttgttaccactgct

SEQ ID NO: 154626 - DNA, 373 bp, Zea mays
  Clone ID: MRT4577_72600C.1
aagcaccgcatagaccggagccgtgccgtcgcgctcgtctagggcgaacgtgtacaggtagcccagaaatgctcattagtcctctccgtggcaccgcctcgccgcgctgccgcgttcgcagcgcggtcgatctctggcgttgcgtcgggctcattctctgccactctcctatgtacagagaagagtggatatcgaagacgcctggcgacatggtgcctctgatgtctacaggtacgggtcccccgttttggaccgcggttttgatttagacgtaaaagtggatagtttgcacaagggctgctaatccatgttatttattccttgcaaaggacacagaggaaaaccggagcgtccactggggaaacttgggcct

SEQ ID NO: 154627 - DNA, 583 bp, Zea mays
  Clone ID: MRT4577_72601C.1
atataattaccctgacgcctcaccgcgctctatcactctgagaccgcatatccgctggccgactgagtggaaagcgcacgaacccatgacctccggcgagattgcctgcacctacgccgctctcatactcaacgacgatcgaatctgcatcaccgccgagaagatcgccactatcgtgaagcggggcaacatcaacgtgctagctctactgcgcgaaactcttcgagagctcctggagaagcgcaacgtctagcactcatcctctccgatgaatctgctggagaagctgctccacttgctgctgacgcacctggtgacgacgatacaactgctgctggcccggctgtctacgagtagaacgggagaggccgaggaggagtcagatgactgctggattcacctgttcgactgaggagacccctcacccagacattaacaaattttacttgcgctgcgaagactatcatgtcttatgctatgtctctagggtattgctacagctacccaagtttctgagttttggagatgtggctatgtgatgaactcaaaacatcttatgagggtgaaagctgtctctaatttc

SEQ ID NO: 154628 - DNA, 331 bp, Zea mays
  unsure (1)..(331): unsure at all n locations
  Clone ID: MRT4577_72602C.1
gtcagcaaccaaagtgcgcgcccactggccggctcttgttgaggcctgatcctgcggcctatccacctgcgactcttggtggacgccgtcgttgctgagcgtggcggcgcaggtttggaaacgatagtcgcgaacctcaggagccntggacaggtgggctgtcacatcggggtgggcccccttgtgctgctgcgcgtgctcgccgngagggagcccggcgttgggaggagtctcggggtgccatgcgctgctcattaggccttcgcgccgctggtgcgtcctggaccgggacccctggacctggcgctcacccggttctcagggctcttgc

SEQ ID NO: 154629 - DNA, 318 bp, Zea mays
  Clone ID: MRT4577_72603C.1
tttgcttacacggtctacctctttctgtcagtaatacaatgagagtgtggcaaccagtgtgacacaaggagaaatggcgaacgtagcgcatgggagcgatgcacctgcggcggcctgcgaggtggaggacaacatggcggaataagtgcttgccaagaacaccctcaagatcatgcccttcaagctcccgcacgtcagcctttatgatgtcctcgtgcgcatgatcgcagtggagatctgcggtagcgatgtgcactacctaacggagatgcgcatcgcgcacttcacagtgaaggaaccgatggtgatcgggcacga

SEQ ID NO: 154630 - DNA, 1388 bp, Zea mays
  Clone ID: MRT4577_72604C.1
cgggcttccttgtttgtgttactactaatcatctctagaatataaagggtagtttacaccattagattgcttctgtttatcgatgcctggatattaaacttattacccatccaacatacatccagtttccttaaatgtatattgccaacactcttaattcatgtaagcatagattctagagaatatagataggaaaaacgtatgcaaaaaatattccagttgctgcatgctttactttttgtggacctggaaggcatgtctttgtataaagttgaagtaccttgaagtgctgctaactggaaggcttcagagaccttattttcttcacagcatccaagacaatgttcatttcatttcaaccccaccattactcctttcctaccataaagaaccatgtgttcccatgaatagatgtgacacaactcacaaaatatcagtaaagccatactacagaacgagaactgttaggatagtgattacatgcttgagaaatgcaatgtcaacataaagagcttgacacgagatcgattgtcgaggcaccatctattgggactgctatacccaaaaggtaggctgcatcatgtttgatccccctcctctctctctctctcaaccttgggaataacatgtcatgtttctctgtgcttaggtggatcaatgccaacatattgttgaacaaaggtcattctgcactttggaagatagtaatctaatcgtagatttcatgaaatgttaggcattgttcatgtcctcgggtccagttattgctgatttaagtcttaggataactgcagttggtgaaggaatcaaaccaagaccaatgtggccatagaaagagacctcccaaccaaagtaggttactggttgcacttgtttgtgaatacttggagtgaccacaactaagtcacacaatgaaactttaagtgtaacctggtgaccggtgaccattcataatatttcatttttacattttggatatcccggacttctgatagaatgaactgaaagacttctctaacaaaagtggagctgaggggagcaagagtgctgaaagtggtccaatgtttttagatgttctcgaatgttatctgaaatatgaggtttatctcttgcttgatcaacaatagaagcaaaaaatcatccttttgtttatttatgtttcccaatataaaggaaaaggggaaatattttggtgcagtgtgcccaattcttttgtctctagaaaactaggtagtcacctatagcaggcgctatagtcagttttagctattttagacaccactactatttgtacacacatttctattatcctattttagcctgctatattcatgtatgagccttatgggaactctgcaactactatggatcctcttatacattgtgtt

SEQ ID NO: 154631 - DNA, 1223 bp, Zea mays
  Clone ID: MRT4577_72605C.1
attgggtacctcgaggccggccgggttgcaagctgctcataacatggaatggttttacattctaggatttctattgcttgcagataggttactggctgcacttgtttgtgaatacttggagtgaccacaactaagtcacacaatgaaactttactttccagagtgtaacctgccggacttctaatagaatgaactgaaagacttctctaacaaaagtggagctgaggggagcaagagtgctaaaagtggtccaatgtttttagatgttctcgaatgttatctgaaatatgaggtttatctcttgcttgatcaacaatagaagcaaaaaatcatccttttgtttatttatgtttcccaatataaaggaaaaaggggaaatattttggtgcagtgtgcccaattcttttgtccctagaaaactgtgtagccgcctataacaggcgctatagtcagttttagctattttagacaccactactatttgtacacacatttctattatcctattttagcctgctatatccatgtatgagccttatgggaactctgcaactactatggatcctcttatacattatgttcgacatgcagacaaggtattatattgagttggaccaataatccttcatatttattgatgtgaattatgttgtactggtgtcctgtccttttgtttgtgctttataatttgtaattcttagctattgatatggtatgatggatgggaggtggctgaaatcgttcagataagtgccaatttgttgttttcttttttaatgaatggttttctatttcagctgatgaaccttttatagttcttttattatatactgccactgattgctaatagggtgcatgtcttctatttctaggtatggtgcataaaaaagtaggaaccacaatgagattgtgatgctgcacatggcacatcaaggtgcgcaagatatgtaccatagaaattatcgtaaagtgcacacagctgtatgtatagatgtttagaagtggccgaagttaggcttgctcaaccggggcaatgatttacttagcctgctgaaatgtactataggtagcattcaagtttgtgaccatcatgcaagtacatgtgggtttgttgaaattgtgtggtcatcggagatgtagcaaaatgttccttaaaaaaaaaaaaaaaaaaaaaaaaaaaaaacggacgcgtggttgttgatgtaggactattacaaagttct

SEQ ID NO: 154632 - DNA, 1273 bp, Zea mays
  Clone ID: MRT4577_72606C.1
tgctgaaagagctgaatgagaaggacagctcactcaaagaccatagacttcgagtgaacaatctaggtgagcagcttgatcttctccagaaggatgtacaagcaagggaggtcacacaaatgcaacttaaagatatagttataaggatcgagaccaacatcatggatgaagttgccaaagcttttgaaattgcgatgttgagagggggaatcggaatattgtctactcactggacgaacaaaaccaagaaccttgaatcacaggttactggttgcacttgtttgtgaatacttggagtgaccacaactaagtcacacaatgaaactttaagtgtaacctggtgaccggtgaccattcataatatttcgtttttacattttggatatcaatatccattaatatgtttccctattttgtttgtatatcagccgaacttctgatagaatgaactgaaagacttctctaacaaaagtggagctgaggggagcaagagtgctgaaagtggtccaatgtttttagatgttctcgaatgttatctgaaatatgaggtttatctcttgcttgatcaacaatagaagcaaaaaatcatccttttgtttatttatgtttcccaatataaaggaaaaggggaaatattttggtgcagtgtgcccaattcttttgtctctagaaaactatgtagtcgcctatagcaggcgctatagtcagttttagctattttagacaccactactatttgtacacacatttctattatcctattttagcctgctatattcatgtatgagccttatgggaactctgcaactactatggatcctcttatacattgtgttcgacatgctattttgtttgtaaatcagccggacttcggatagaatgaactgaaagacttctctagcaaaagtggagctgaggggagcaagagtgctgaaagtggtccaatgtttttagatgttctcgaatgttatctgaaatatgaggtttatctcttgcttgatcgccaatagaagcacagaatcatccttttgtttatttatgtttcccaatataaaggaaaaggggaaatattttggtgcagtgtgcccaattcttttgtctctagaaatctatgtagtcacctatagcaggcgctatagtcagttttagctattttagacaccgctacgatttgtacacacatttcgattatcctattttagcctgctatattcatgtatgagccttatgggaactctgcaaccactatggatcctcttatacattgtgttcg

SEQ ID NO: 154633 - DNA, 467 bp, Zea mays
  Clone ID: MRT4577_72607C.1
ggccaacgggttcccttgtttttttttttacaacaccccccttaacacaaggttttcgttgaacaatgcagtttggtccaaaaagaattagccattgcccaagatcacaaccccccccagggggggacagggacccaattaacacagcccatgactggttcttttacttctaactaaggggaaaacgatcgaacagggtttcccctgaccccgaaccattagtttgcccccactttgacgggagcgcctttttgacgaggcccccggcgacaaggattaaaaaaacgggagagcaagccacggccaggacccacccccgggcccccttttcccccccctttttgggccccggtgcgggcggtacccccaggttctttttttgggccgaccccctgggaaacaatacgggccccacgggcacaagcaggacttgaacgggggaccccatttcgagcaaagcgacccgg

SEQ ID NO: 154634 - DNA, 230 bp, Zea mays
  Clone ID: MRT4577_72608C.1
attcggctcgagggcaaaatgggacttttggtggccgagggctactcatcgggtgtggtgaaggagctatggtcacacggagcgggacaaggtgttgaggctggatggaaccgcaggtaaggagccagctgttggtggcaggagggtttacatgaacataaggcatgcctctctgagcttgaagggagaggcaagggtcgggagcttctccatgtggatctggcccagct

SEQ ID NO: 154635 - DNA, 439 bp, Zea mays
  Clone ID: MRT4577_72609C.1
ggtccctcgaggccggccgggatgcataatcacatcacaatccttcatcacatacagaagaaactacctatgtacccatgtcgacatgcggcgcagcgcgcagcgcgcagcggaacggcacgaaggaacatggagtggaaaacttgtgttgaacatgatctgtcatgtctttttacgataaatggcatgcatgaagctacactctcccgagacagtaaaagccttggctagtattggcacgagaggtcgaatctttcattaatatcgacaagaacaagtccactggatgacccttgactgacattgagaaccattggccgatgacattagcacgagaccaagtattgatgctattcaacactaaaaagtcctaagataatagagacacgcacagtaataaaatggaacagataaaaaaaaaaaaaaaaaacccgcggcc

SEQ ID NO: 154636 - DNA, 178 bp, Zea mays
  unsure (1)..(178): unsure at all n locations
  Clone ID: MRT4577_7260C.1
acgaccatcncctgctagcacagacaacaagcctttcgccacacattcgacactatgggaggcgcccaccatcgatacaggcgtcttccccaccgacagtccaccgtactcttatttgctagactgcttcccttatgcatcgctcacttgcttcactactctcaagacgcaatcatcc

SEQ ID NO: 154637 - DNA, 401 bp, Zea mays
  unsure (1)..(401): unsure at all n locations
  Clone ID: MRT4577_72610C.1
tctctctctctctctctctctctctctctactctctctctctctctctctctctctctctctctctctctctctctctctctcccctctctctctctgaagagagcgctctctctactcgggcgactctctctactctcgggagagactctcgggggctgactctctctagactcactctcatgaagctctctctctctctctctctgactctctctctctctctgactctcgggggggcgccctctgactctganactctcgggcgcgcgcgcgtactctaactctctctctctctctctctctctctctcggggactctctctctctcgggggcgctctctctctctactctctctctctctctctctctcacccgngctctctctctctctctctaga

SEQ ID NO: 154638 - DNA, 1234 bp, Zea mays
  Clone ID: MRT4577_72611C.1
gagacatatatactggctggtacatgagaagataaaagagagtcaagtcaatttcaagtacttttgtgactttttcaaatgttggggaacttgaagcgaacgatttttatgaagatactctttatgaggatcaccttacgtagttgtatacaagaaacttggacactagagcctgggcatcttactgctttttgcaacacttgcttctcttctgatggaatgtttgtaagttgttgactgtgcttcgctgagaaccatagagggcacagtgaatatttgaatttgatgggagcctcgaggatttgcctttgtagagtttgttgatccttacgatgcctctgaagcccagtatcacatgaatcgccaagttttctttggtcgggaaatagctgttgttcttgctgctgagtcacgaaaaaggccagaagaaatgcgcagcagaactagagtaagaggttactctggtcatgaaggtcgccggtcttcttactatggtcggtctcgttctcgctctcctcgctatcggggccgtcctcggtcgagatcatactctcctgctccaaggcgggggaatgactactctgcctctccaaggagacaggaagcccatcgctcatctcctcccaggcgcctgccaaaggagcatgatgaagataagaagcggaggtcctactctcctgccagtagagatgatgctgacaatgtttatgagaagaggtcgcccccagcagacagcgatggatctcctctgcaccgcaggtcccccaaggagtactcgggctcacctcctggatcccgctccaggtccgccgacgattctcctgttgccagtgactgatcgaccgatggatgctacaatatgaatggtatgcgcatgcggtcatcagtcctatgtctttgtcagaccgagctcactaaacttacccccctttgggggtcgatgttgtattgctaagttcttctaaccagcatggtcatgcggtcatcagtcctatgtttttgtcagaccgagctcactaaacttacccccctttgggggtcgatgttgtattgctaagttccgtttgtgctaagtattagcgcatactgctagactgcccctgtcgtttgtgctatgcatgcttttgatctcgagtgatgtttgaggaaccagtgatcgtgttgatggtgctgaacattggaacctgcagtacagtgtagcatgatgcttgcttgttgggccccggcccgttcc

SEQ ID NO: 154639 - DNA, 250 bp, Zea mays
  Clone ID: MRT4577_72612C.1
tcattcgtgacagtgggggccgacttcatttttggccagtattttgatgcctaccaactttcactatgttaagcaccattagaacctgccattgttaaggctaataaaccttttaggtgagattgtggtagacagcaagaattttgatgaacatacaatcatgaagcatattgattatagcacgatgcgtagagtgatgaatctagacaagatcaatggcatcgagctatatgtcatgttttttttccaa

SEQ ID NO: 154640 - DNA, 805 bp, Zea mays
  unsure (1)..(805): unsure at all n locations
  Clone ID: MRT4577_72613C.1
accgcgccggcctctcctgcgagcagctcctccagggagcttccttctccctcaactcccgcggctctccctctccaagctccctcccccagttcctctgcgtggtactccttgttccgagctcaccgtgaagctccactgctggcgcgccagcgctcttccttccctgcgacctggaccttcccagctcggcctctagctgctgcgcgcgctctgcctccatggccgcgcccgctgtcgcgcccggccaggctcctctacgcgcgccggagcttcctctactcggtcccctgtcggcctgctccatcttcctggcggcgctcagctctgtcctttctccctctgttcgcccacgcgcaggcatgcttcgccgagctcgcccctgcacgtcctgctctccccagctccgctctggtcgtgcgcgctcctctgctcgccgaggccccttctctgtgcactctccggccagccgaggtctcgccagccacagttccgctcaaagttctctgctcggttcccttgcgtgcgccctggtggctgcgcgtgctattacctgccgagctcggtactgtctgtctcgccacgctcggtctctagctccttgtgcgcacatctgtttatggccgtggtgatattatggcgtggcgacgtcgtgcgtgtcgcgacagttgtcttggcgtgaagcagtccgcgccatagagttcacccggncatgatttcatcaaattgcgaagcttcctcaccatgcgctctagcatcggctgccgccgattccgccataaagttcacgagcgctccttgctca

SEQ ID NO: 154641 - DNA, 429 bp, Zea mays
  Clone ID: MRT4577_72614C.1
gaaacgcaacaggtcccagtgaacgggccgtggcccagcaagcaagcttcatgctacactgtactgcaggttccaatgttcagcaccatcaacacgatcactggttcctcaaacatcattcgagatcaaaagcttgcttagcacagacgacagtggcagtctagcagtatgcgctaatacttagcacaaacggaacttagcaatacaacatcgacccccaaaggggggtaagtttagtgagcttggtctgacaaagacataggactgatgaccgcatgcgcataccattcatattggagcatccatcggtcgatcagtcactggcaacaggagaatcgtcggcggacctggagcgggatccaggaggtgagcccgagtactctttgggggacctgcggtgcaaaggagatccatttctttttgttgggg

SEQ ID NO: 154642 - DNA, 258 bp, Zea mays
  unsure (1)..(258): unsure at all n locations
  Clone ID: MRT4577_72615C.1
aaaggcaaagcccggttatccaaggtaaaccttttaactaaaatggcagaaaaaaggggggataaaaaaccataaacacacacaagtccgcgagaatatgggtcaaaaaaaaagtaagcttaggaaactactacagcaaatagcttaaaaagcccgacccacggggggctctgtccctttaatctgggcaaccgggggataatggtgggtaanaaaaccaggggccccagggggttgccacgggtaactcacggcagg

SEQ ID NO: 154643 - DNA, 2350 bp, Zea mays
  Clone ID: MRT4577_72616C.1
ttcctcttggtcataatcgtcaaactaattttctaggggcatgaattatagaactgacatcctatatttaacaaagtgaacactagtgcatacttcagtttcagtgcaatgtctaatttgcaatgtgtttggtgcgcttaagctctgatgagtctcatgttatttttttttgcaatcgacttgcaccatcaattgatatctaacaacatgatggagtatgaacttgtactctgctttcccatagccaattcatcattgcactatgtggattatattttcttaatgattcccagggttgtgttagtttgaagtataagcatactctttgtttctcaaagaatgccttttaacattactaacaattcatttgcttggcaagatagagtcttgtccaatgaagttcttctatgaagacaagatttgatactttgagaaaattaatttcatgaagagaagatgagagacatatatactggctggtacatgagaagataaaagagagtcaagtcaatttcaagtacttttgtgactttttcaaatgttggggaacttgaagcgaacgatttttatgaagatactctttatgaggatcaccttacgtagttgtatacaagaaacttggacactagagcctgggcatcttactgctttttgcaacacttgcttctcttctgatggaatgtttgtaagttgttgactgtgcttcgctgagaaccatagagggcacagtgaatatttgaatttgatggtaaaatgccaacaagacaccattgtgaacacattgggtacctcgggccggccggggcacggcccatcacccatcacgtatcgctccctccctcggccctcgatcgtacggcgcgagcgttgcgctccacgccttcctcttcctcgtctggcatcgcgaaccgccgcaccccacccacccgcccacaggccacagcccacccccttctccaggtctctccccggcggcggcgggtgcggttctccggccatcaccgtgcgcaccaggaaaaactatgaggaggtacagccccccttatcgcagcccccccaggaggggatatggtggcagaggaagaagcccccctcctcccaggaggggatatggaggacgcaaggagggtagtggaagccttttggtccgcaacatcccattaagtgtcagagcggaggatcttcgagttccttttgaaaggtttggccctgttcgggatgtttacattccaaaggactattactctggggagcctcgaggatttgcctttgtagagtttgttgatccttacgatgcctctgaagcccagtatcacatgaatcgccaagttttctttggtcgggaaatagctgttgttcttgctgctgagtcacgaaaaaggccagaagaaatgcgcagcagaactagagtaagaggttactctggtcatgaaggtcgccggtcttcttactatggtcggtctcgttctcgctctcctcgctatcggggccgtcctcggtcgagatcatactctcctgctccaaggcgggggaatgactactctgcctctccaaggagacaggaagcccatcgctcatctcctcccaggcgcctgccaaaggagcatgatgaagataagaagcggaggtcctactctcctgccagtagagatgatgctgacaatgtttatgagaagaggtcgcccccagcagacagcgatggatctcctctgcaccgcaggtcccccaaggagtactcgggctcacctcctggatcccgctccaggtccgccgacgattctcctgttgccagtgactgatcgaccgatggatgctacaatatgaatggtatgcgcatgaccagcatggtcatgcggtcatcagtcctatgtctttgtcagaccgagctcactaaacttacccccctttgggggtcgatgttgtattgctaagttccgtttgtgctaagtattagcgcatactgctagactgccactgtcgtctgtgctatgcatgcttttgatctcgagtgatgtttgaggaaccagtgatcgtgttgatggtgctgaatattggaacctgcagtacagtagtagcatgatgcttgcttgctgggccaaaaagaaaaaaaaaaggcccctaccctgggccctgttgcgtttcaaaaaaaaaaaaaaaaaaaaaaaaaaaaaaaaaaaaaaaaaaaaaaaaaaagtacctcgggccgcgaccgatagcgatccacacactggcgggcgtttactagccgaagttacccacatttaataaaaaaatggaaccgcctgctgtatacatactagacttggtggctgtttactgacgcctctttcccccccgcgtgtctgtttgt

SEQ ID NO: 154644 - DNA, 126 bp, Zea mays
  Clone ID: MRT4577_72617C.1
cggctatttctgtaccgctacctgcatgctaccaccttttacctatagaagagcccatattaatagccttggcagctaatcactggagcacttagcttgtcttgcctcgctgtggaatattagatc

SEQ ID NO: 154645 - DNA, 353 bp, Zea mays
  Clone ID: MRT4577_72618C.1
aaatatgccatatgggatggatggtgatgtttaagaagaacaatcgagggtagagaaaaagcgagctgctcactaccagctgagagtgggctagctactcactgactccaagactctctatgagaaagagatgtggaccaaatattaaatatacagcttgtatcatgaggaggttattatatgagcaaccttttagttggttatatgacataacaatatcataaagcgcgttatatgctatattattaaacatgctcttagatcattctcaattgaggttgcatgatattaattagtagactgcatagaacagtcatgacatagcactatatttattatgaaataaatgaaaa

SEQ ID NO: 154646 - DNA, 548 bp, Zea mays
  unsure (1)..(548): unsure at all n locations
  Clone ID: MRT4577_72619C.1
cggcccgtggtgctgtttgtcggctggggggagcacactcggtaggtcccatacactgtgggcagacaggattgtggcataccatcatgttgtgtgactgcgcggtcagtggtcggcgtcctccctcggctggtcgagcggcactggccagcgccccacaaccacccgtcgaccatcgacgaccggggggggggctgtaactccctcaagcaacgagcgccgccggcgcaagcgcgctcaccgccggctaccccgccaccctgccatcggagcgcggactcatgcatatcctcttccatcactgcttcgacccgactgttccacggctaactgctccttaactgcacaccacgcgaccatagcgacaagtctccacgatcccatctatcacatgctcagtttgcacgcgctgatcgacccctcgtgcacatttgaagctccttacgcatgcatcgtcacctgttgcctgttcactactgctccgggcccnactactgcataaaccccctgcgcgctcacgtcctacttccctttgtgcgcctgtacag

SEQ ID NO: 154647 - DNA, 276 bp, Zea mays
  unsure (1)..(276): unsure at all n locations
  Clone ID: MRT4577_7261C.1
agagcggncgcggnggtgaccttggccgttgcgctatttctcccctaggagctcccctagcgacacgggagggtggacttcttgggaaccgcgggcccgccctggcatgtgcccgaggcgtcgactccggtcgacttgtcctgctttttgcggttctttcgggtgcccttcttgctcttctccttagtcttctccttaccctcgccgtcggtggcgttcatggatgagttgccggagccccgagagcggtgccgtctcgaccggcgggtggcggag

SEQ ID NO: 154648 - DNA, 692 bp, Zea mays
  unsure (1)..(692): unsure at all n locations
  Clone ID: MRT4577_72620C.1
cctcgaggccggccggggagtttttcacctaaaatangtggaaaaaaaaaaaaccatggtcacccaccttttcttcaacaactatatcattgtagtgatcctaaactcctgaagttctcttctttgtacgcccgagtttggtggatgaagtttctcctattgggtttcgtaaaacataaggatataaatatatcatgccattcaccattacaaagcaccaaattcacatggtaagggcggattagtggattaccagtaagggcgctggatcggcagcagcaccgggtactctggtcgggtaggcagacaagctccaggcgggcttcaggccgacgaccaggccgacgaatggccggagatgagcagcagccgccaccaccgtcggccggagatgagcagcagccgccaccgccgtcgctactgctaggtttagagtgctttgctcagtgctcgagtcgctgtgcttgtgcggctggtcggctgcgcgtgagccgtcgatcggcaatgcacttgcactccgtggtgggctggtggcatggtccgtgggctactggactagcactagcaggccaaggagctaggacgttgggtgaggcctgactaaatgctttcgtgggctggcagctgccttatggcaattcggataaccggatgtatccgtttatatccgaaatcgacaataaaacggatat

SEQ ID NO: 154649 - DNA, 611 bp, Zea mays
  Clone ID: MRT4577_72621C.1
agagacacagagataggatagtgcgctagctcactttaccatatatattacctaacaatcgagatactatgaataaactagaattgaagaagatatgcatggctagctctctcgccataatctgtgacaatgctcacaacatctctccattatggctactgtcctggtaagtccatcgctcgacacctaaaacgacagcgaccgcaccattctcctccccagaagctcaatggctataatgcaaccacgacgaagctggatagctatcaaaccaattacctaattatcagtgacttcaagcgccagagaacgctgctgacacactgagcgctcaaatgctgcaacgacatgccatacactgcagatagcctctgaccacataacggattcaactgcgatgactgcctcttacaactacttgatccatgggaatggacacgcacacgccggcgaagactgcatcgacatttcgcaacgtttggacaagcgcaatacataacctggaatcgtgcggcgcacacgacacgacaccagtaccgaccaacgagatgccctgtgtcgagagcttgaggagccggaaccacctcgataccgattactagactccttaa

SEQ ID NO: 154650 - DNA, 201 bp, Zea mays
  Clone ID: MRT4577_72623C.1
ttataatttcaaaaaacccaagacaaaatggaggggcaaaatctagagtaactgacggacatccaaaagataactgaggagaacaagataaccaacccacagaacgaaaatcattcatacaactgcacaagcttcacacaactgagcttcaaatccagaacagacactcatcggacacagaaatcgcaccattaggcactt

SEQ ID NO: 154651 - DNA, 193 bp, Zea mays
  Clone ID: MRT4577_72624C.1
aattcggcacgaggcatcttgctggtgctcgcctaactactggacaaacgactgactctctctcctccgatttcttcaatgctgctctagcgcccgagcagtgacgcccgtctcaagcagcatacggggctgcgtgtgcgtcggacgtcggcgacgctggtatccaggactgacgtccgcagggagagcacgg

SEQ ID NO: 154652 - DNA, 1847 bp, Zea mays
  unsure (1)..(1847): unsure at all n locations
  Clone ID: MRT4577_72625C.1
tttttcattcgaaacatcggaaaaaacgagtaaatattgtcaccgttttcatctctagcgcgcgtcgccgtcttctacgttccttctccggcgaccgaagccaccgccccagcctcgccatggactctctcctcgccacctacgcctcttctgacgacgacgctgactccgacgaggccccgtccaccgcccccgccgcctcctccggtggccgcgccggcggactcttctcgctcccgcagcccaagtcagcccccgccccgctcttctcctccctcccggcgcccaaatccacccccgagccgctcttctcctctctctcggcgcccaaatccgccaacgcccccaccttctcctccatcccggcgcccaagacttccggaggaaaccctaagcgcgtcgtccagtaccgcccgcagccgatcctgcagtccgcaggcgacagctccgacgacgacgaggacgacgccaagaagcgccgcgccagcaacaacgaggcgagcttgccgcacgtgtctgctggcttggggcccgtgtcctcgttcctcccgccgccgaagcactcgctcgggctcggctccggctctggcgctggagccaggaggtcggcaatcgatacggctgcgccggagaagccaaatctcagcaacgccgtgccttcaagctcggttaccaatacaggagccccggaaaggcccagcactggcgcgtccgatgacgacgattcggaggatagcggcagtgagggcgacatgcctgcgccagagctggaggaggaacatcaggagcagccgagttttaatgctgcagctgcagagcagcagcaaggccatgatgctggagctgggagcactagtggatatggaacctatgcatgggatccaaactactatgcccaatacggtgcgaattatggctgggatcctagtgccagtgcaagtgatgagaatgcaatatagtatgccggatatgtagagtggcaaagtggggggtaggctcattcgcacggatgggagcaaggctgccgctactggaagattgcagaatggcgggaatgttcaggcgcatgggggggagatggtcatgaggtagcagcaacggcgttgccaccggtgcaagaaccagtactgccaccaaggatgggtaggattggagggaagagaggtaggaatgatatgccggcccagattttagaggtaaatcaagcagagctgatgaagaacagaccgaagcaggataagtccaagctcactgggctggcctttggtcctagttatcagcctgccccttcagcaaaaggaaagccatcgaagttgcataaaaggaaacaccagattggttctctgtacttcgacatgaagtcgaaggagatggagcttgcagagaggcgctccaaaggcatccttacgaaagcagaaactcaagcaaaatatggctggtgagcatgtaagaaaaactcaggatacctatatgggatctgttgaattgaattggccgaggttttgttgcaactgttatggactttgtaaacccaatgcagaacagatagttcgatgatcagtcgattaatgagccaacacttgtgttaacccagctttcctttcttctacatttcaactcaacttgtattgtgatattggtatgaatagtagtaaaagaatgctggtagtgtactagtatgtcactgtccatcccaatggcgaaaggaagtgttgtaaaaaaactgaagaggccattgttataaaaaaacgcggaaatgctgcgtacacaccaaaaaaaaaaaaaaaaaaaaaaaaaaaannnnnnnnnnnnnnnnnnnnnnnnnnnnnnnnnnnnnnnngtgatta

SEQ ID NO: 154653 - DNA, 224 bp, Zea mays
  Clone ID: MRT4577_72626C.1
cctcggtgggaagtgagattgctgtaccatctcaagtaccacctttaccagtatcgtcgacgctgtcaagttaaaattttcctttcaccatatatttctgcgcggatcctatattgaaacaaataactctgctgcatgtggaccattcatccctgtgtctgtcgactttgtaaatccgacggttgtgggttatcagaattttgtaggctatgaattgctcgttc

SEQ ID NO: 154654 - DNA, 295 bp, Zea mays
  Clone ID: MRT4577_72627C.1
ggaataggcaccgacgtggggctagtggaggtaggggaagaggcgtcagtggcagaggagaggtccagtggtgggagaggaatcgtcgccattcaataagaattacaactacagagccttcaaaataaaatccttgaaagaatctaatgcacttattgttgtgtcacagtactgaagtattggggagggaggagatggcggctgaatgtccatggaggtgatggttaagagagcagggaggggcagaaactggagaaacagaagagagcttggttaattggctaataggtgtcta

SEQ ID NO: 154655 - DNA, 844 bp, Zea mays
  unsure (1)..(844): unsure at all n locations
  Clone ID: MRT4577_72628C.1
ggaagatctcgcgtccggagtctgcgtctccattctccaccttcttcaacggttcaactcagagaggagagaactagagaaagatccccacccccaggcgacgcgaccggcgagccccgaaaccctaggtcgcgcgacccgggcagcgcgcttctgcgtgactgcgtgtctttcggggaggggacagcgttaggacgcgacgaggttagcgaggccgtctggccgactataagcggaagaatctcctccgaagccttcctagagctgtgaagagcgcgtggatctcctggatttgcagactcgaggggagctgagacaaggtcatggcagaagtgtctgtgtgatgtgtgcgcttcttgtcgcattagggttcgctgaagattggaaagctgctgcacaaatgatccgtgagaagcgaccttctattagcatgaatactcttcaccgcaaaagcttggaggaatggtcaaaacatttgctctcctctaaaagaagtggggaatcagatgtgagttctgttatacattcggattataaccggaaataaaattgaaccagcaagggacaggcgtgttcagttgctgtgacattgaagatgcattacattcggtagtattgtttgctgctgtcctagtgaatgcctatggttcattttaaattatccttttgtggcatttgtgttgtaaaaactatatgtatcaaattatattagtactgtaggtttacccggctagttcttcaaggaagatgtactgtccttgtctccttttttctgataccagtgcccttgcctctcatcgaatgcttgccagggaagtgctgntgccggaccctttggggcgag

SEQ ID NO: 154656 - DNA, 831 bp, Zea mays
  unsure (1)..(831): unsure at all n locations
  Clone ID: MRT4577_72629C.1
attgggtacctcgaggccggccggaatcttctctgtnnnnnanaaaannaaaaaaaaaaaaaaaaaaaaaaaaaaaaaaaaaaaaactagagaaagatccccacccccaggcgacgcgaccggcgagccccgaaaccctaggtcgcgcgacccgggcagcgcgcttctgcgtgactgcgtgtctttcggggaggggacagcgttaggacgcgacgcgtctggcgaggccgtctggccgactataagcggaagaatctcctccgaagccttcctagagctgtgaagagcgcgtggatctcctggatttgcagactcgaggggagctgagacaagatggtgtgtttgttggagggtggccttcttcagttgaacacctgccaccaggtgaccccgcgatcatagattgcacgtgcgagctgccaaaaagctcgactatctctaacaatgcatatttgtgcattgctacctgggacacgagggctcctcagccatcacagattgagtctgccgtgcaatgggctgtgagaaagcggtcacagaacaagcctgtctatgtccactgtgcctatggtcatggcagaagtgtctgtgtgatgtgtgcgcttcttgtcgcattagggttcgctgaagattggaaagctgctgcacaaatgatccgtgagaagcgaccttctattagcatgaatactcttcaccgcaaaagcttggaggaatggtcaaaacatttgctctcctctaaaagaagtggggaatcagatgtgagttctgttatacattcggattataccggaaataaattgaccagcaagggacaggcgtgttcagttgctg

SEQ ID NO: 154657 - DNA, 419 bp, Zea mays
  Clone ID: MRT4577_7262C.1
gcaacatctctgaatatatcggcttatcaactgcatgcactgcatttgaattggatataatgtgtcagtaagatgcagctctgctcttgatcttttctggttgacgagcatgtatggtccttgcaaagcgatcattggtccaaagcgactttaatctgacgagacctcctcatttttaggttttttggtatttagaaccagaataatttgtgcatactcattactcccttggatctgaaacaaatgtcgttatattgaatgagtggttctctgatgcactaataacctgatagccggagaatcactaacattatatgcaagaactttatctaaaagccagtcaccatggccccctgagaaccccgacatgctgcaactgaggcaagcttttatgctcaagatcttgatgaggtattcat

SEQ ID NO: 154658 - DNA, 1329 bp, Zea mays
  Clone ID: MRT4577_72630C.1
aattcggcacgagggctccatgtctccggcacgaggcaaaggttcaactcagagaggagagaactagagaaagatccccacccccaggcgacgcgaccggcgagccccgaaaccctaggtcgcgcgacccgggcagcgcgcttctgcgtgactgcgtgtctttcggggaggggacagcgttaggacgcgacgaggttagcgaggccgtctggccgactataagcggaagaatctcctccgaagccttcctagagctgtgaagagcgcgtggatctcctggatttgcagactcgaggggagctgagacaagacatgggttggggaatatccaggttgattggactgaaggctgctgccctgctttctgtagcatgttttttccaaggactaggagtgacccttatctcatttcctctcatatatgcatccataattgcaatactagtctcgatagcttcccgcccatctattgatcttcctttactccttggcaaggcatccgatggaagttttccattgtggtcatggatcatcttctcaccatttcttcttttcattcacctgttcgtgctgctacggagatttgtgaaaaacgagcccttatacactgaggttgcagatggtgtgtttgttggagggtggccttcttcagttgaacacctgccaccaggtgaccccgcgatcatagattgcacgtgcgagctgccaaaaagctcgactatctctaacaatgcatatttgtgcattgctacctgggacacgagggctcctcagccatcacagattgagtctgccgtgcaatgggctgtgagaaagcggtcacagaacaagcctgtctatgtccactgtgcctatggtcatggcagaagtgtctgtgtgatgtgtgcgcttcttgtcgcattagggttcgctgaagattggaaagctgctgcacaaatgatccgtgagaagcgaccttctattagcatgaatactcttcaccgcaaaagcttggaggaatgcaaccgcctaattcagctgtccatggcagatgatattggaagcagagttgattttggaattttgagcctactgataagtgataagttgatctcaaataatgtgaaaattgcttctcctttccttcatttgtccatcgatcgctctggtcttgcatcttacaatttacttgtcagtttatgtgacagattattgtctgcccacgaaaatgtgttcgccaaaatacttgatttgaaaaaggcatttaatggttactctgtcactctaactgcaattagtgctctctggcaaggcttgcagttccgttgctgtggggctgaggctctctga

SEQ ID NO: 154659 - DNA, 766 bp, Zea mays
  Clone ID: MRT4577_72631C.1
ccggccgggagtttccagagctaagaccccgcaacagccgcaagaatcgcgagcgccatctgactcttcatcgtcgcctttgcccacctcccaagcttccgcctcctcccctcccgcgctttctccgattcttccacgagcttccagatcgcgaaaccaccatagccgcagtcaggcgagacgagtgcccacccgcgccgcgggattcatcggaatggcgtacgtggaccacgccttctcaatcaccgacgacgaagacctggtcggcggcgcggtgggaggcccgcgtggcgccccggtcaaggaaatcgcctttgctgccgcgctcctcgcttttggcgtcctcggtgtcgtcgcgggatccttcatggccgcgcaccaagtcggcggcgaccgcgcccacggcattttctttgcagttctgggaggggtgatgttcatcccagggttctactacacaagaatagcgtattatgcttacaaagggtacaagggtttcaccttctccaacatacctcctatctgaagaagcaattggattggctcatccaactatccaacacatggctgtctctctctctctctgtctctcttttttgtttcttattaacctttgtataaagtcgacagcgtggcaagtgatctgtacatataaaaacaccaccgtaatgtaatgtgtcatcacaacattatgttaccacgtgaagttgttcgttatgagatataaacgttgacctaaaaaaaaaaaaaaaatttgggtccgaat

SEQ ID NO: 154660 - DNA, 317 bp, Zea mays
  unsure (1)..(317): unsure at all n locations
  Clone ID: MRT4577_72632C.1
tcgctcgccgctcccacttttttaacgtaaacgccccacctacccacctggcgcgcgnaccgtacgcctggcgatgctccggcttgtcgtaccctcgcggcgcctnctccagagcagcagcgacagcggnggcgccattcccgacccgaaccccaaacgcattccgggcatcccgnccgncgacccgcccgtggtcgttaactccgatgtggtggtgattctngncgtgttgttttgtgtgctgatctgcgtngtggggcttgccgtcgttgnccgttgggcttgatcccggngcaacaggggcgcgggcgcggggg

SEQ ID NO: 154661 - DNA, 374 bp, Zea mays
  Clone ID: MRT4577_72633C.1
ctcaccgcgactaccgtcagatattcatgccgacgaccatgcccggccgtggcagtgtgcggcgcttcaaggacgggagcgaagtgcacgacacgactgggaccgccggccttgacgacgcgagtaacgctcctgacgctctgctagggctatacgactgcccgctcacagagtatacggccacttcatacaactattgccagcccctagccgtgggaaggatgaccggagcccgtcttccaatatggcaggtatacgagaagtctttgcgcatgcactaccgcctcactagccggcaggcggacgaattgatgaacgaggtccaggacaacctgaaactgattgctcagatgaaggagtgggatccatgggag

SEQ ID NO: 154662 - DNA, 359 bp, Zea mays
  Clone ID: MRT4577_72634C.1
cgtccttttttttttttttttaaacatgttaccccctttttttctctattatgaatgtaattcctctacttttttggttttggacaaaaagattatcagcgcttgaccatgtgcttttatcggggcacaggccagggatttcatctcccagctttttttgtacaaacagaaaactgcatgcatggtctgcaccttacccttccccctattgctaagagagaccgagttctttgtctttttgcaacggcaaaagaagaggaagggccgttgttattattattttacaaatgcgccttttttaataaccatatgattggagggggacaccctcttgctgaacctcttgttaccctttccga

SEQ ID NO: 154663 - DNA, 460 bp, Zea mays
  unsure (1)..(460): unsure at all n locations
  Clone ID: MRT4577_72635C.1
acccaaccaaatttcttatacacccactccttctaattatgtcaaaagatcccctccatcatatcctatctcaatcatttttttctatatttttcaatccatcacaacatctcctcaatccctaaaaaatattctttttaaccttaatccactttcattttacaatacttctttttttttcgggggggtgggggggcgcgnacncaccnccaccnacccaaaaaaaaatcctaaatatactaatattcttttacacattctcaaatatatcctttccaaatcttttttatttactctaatattcatcttaatttacatatatttaactttactcaantataaatttctacctcaatcaactctcatatatatataattatgtgaatactatattaacatataaaccctaaaatgatttacacataataaaaaaaaaaatgtcttcctctctatactatcc

SEQ ID NO: 154664 - DNA, 232 bp, Zea mays
  Clone ID: MRT4577_72636C.1
ctccctccttccttccttccccgccactgcgcagcgcgagtgcggcgacagccaatcacacactcacactccctagaccgatctaggccccgtacgaatcgacaaaaagcgaggaggcggtggcggcgggcaggaatggcaccttcggggacaccagggcggccttcgaacggatctacaaggggctcaaagaggagctgctcaccgacccggtcttcaagtgcaccgagga

SEQ ID NO: 154665 - DNA, 242 bp, Zea mays
  Clone ID: MRT4577_72637C.1
gcagtgcaggtgtttaattgtgtgatagtgacgaccgtggcctgtcaagtgtcatatagcaagacagcttcttgtaataatttatattaattttcaaggccaatcattaattcttaaaaaaaataatcaattaaaaaaataaaaaaaaaaaagaaacaaaaaagggccggccccaaattaggaagttgttgaaccgggaatttaattccgaacgggaacttgaaggctaaccagttttcctt

SEQ ID NO: 154666 - DNA, 195 bp, Zea mays
  Clone ID: MRT4577_72638C.1
gaggggaggtgtataacacagtaaaaatcactacccgaccgaatctgaatgggaacatgtgatgcctgtagtcttgggcgcattctggcccgaaggataggggggttgcgaggaaaaaggacgggcaccgaaaaaaaagcaggaagctaagatggaagggaaaatgattaggcgtggggaatcgacttcttcgcc

SEQ ID NO: 154667 - DNA, 128 bp, Zea mays
  Clone ID: MRT4577_72639C.1
agggataacggggtttaacacacacaatacgaatcagttggaggcctggcaacatgcccttgccactaagcacttgccagatcacacccaagataagtgggaccggaactcccttgggtcaccgacct

SEQ ID NO: 154668 - DNA, 613 bp, Zea mays
  Clone ID: MRT4577_7263C.1
tgtccggggcggccggtcgcgcgtagagctcgagacggactttggggaccttctagtggtaggggcgccatgggcaggggctcgtacgccgccgtacctgtttaccgctgcttctgccatgctccacgctgtctgccggacctgccatcgatgcgatagcgcggggggaatatctatggcgtgcgtcaacacgcttctacgatgctcacgacatacgccatggttgaactctggagaaagtgctgctgctatctatgctgcaggaagccgcattgaatgtccaatggctgaggaattcgcggattaggtcgctactatgaaagatgtgaatcactcactgtgctacacactaagggctgtgatgagcactcgcttgttcctgctgagcagattgacctgccagtggtcttcgatataagcactgagtatgatacataccccaatgaggtcggtgggaacattgtagagcttctgcatacgttcttaacggggcacgagaggcaggtaccgggcctaccaaatcgcagtgctgcgaaaacagcacttgagatatacctatgcgcatgtgctgcgtaagagcatctgatgttaaaacaagaggatcaagtggtac

SEQ ID NO: 154669 - DNA, 1029 bp, Zea mays
  Clone ID: MRT4577_72640C.1
ggtaccctccgggtcggccgggtcggaaaggcgtctttgccgagtgtgacccaggggacactcggaaagattatgtcattcactttgccgagtgtcacccagttgacactcggcaaagaactctttgctgagtgccagtcgttggctctcggcaaagactgacggccgtcagctttgggatggccgctgatggccctttgctgagagccccctttgccgagtgctgtcctgtgccgagtgttcagcactcggtaaagtggctctttgccgagatcctaactttgccgagtgcggcactcggcaaagcattctttgccgagtaaccgacaaaaggcactcggcaaagaatacaacactcggtaaagactaggattccgtagtgatacccttaagacagatcacgttgtacgtgcatatacgccgttgtggcccatcacaaaggtctactgcaaggtaagaaaagcccctcacgttgtcacactgatctttgtcttctttatcttcgtgttgtgttgtagatatgaaatcaggaacaagtgctaaatttgatatcatgccaaaaataattatactccacacataggtataaattatcatgaatatatgcggtaagttgtacgtggaaatcgaaattctatgttaaatattgttcaaaaaatatatatttgtgcgcttcatcggcaagaaattccccgtcaagcacctctctctaaggcataccttagagagaagctggctcaaaaaacttcaagggcatacccttaccccatcaagcacctctctataaagcataccttagagataaacaggcttaagaaaccgcacggtgttatacaccgttgtagcctatcaaaaaaaataaatatttagtgcaaggtatggtggccgatcagactgccaagatgagaaatgggaataatcgtttgtctccacccttcataagatcaacgtgtgtgctacctgttagggtattcataccaattttttaagccataaccgctcatgctaattagactgctacgtcatcat

SEQ ID NO: 154670 - DNA, 190 bp, Zea mays
  unsure (1)..(190): unsure at all n locations
  Clone ID: MRT4577_72641C.1
ccggggcgacgcacgcgaccgngcccaaccaagcagcaanaaagccgctggcacagcatgcggcaacaagctnggcacagggctgaaaggggggagcgnaaggcgagaaagaagagcgactggacagggagagcatnaacggancgactaaactttctgaagagtatataaacattatactcacctgtac

SEQ ID NO: 154671 - DNA, 537 bp, Zea mays
  Clone ID: MRT4577_72642C.1
tcgggctcttcccctcgcgaccgctcctgagtcctgtccaccctgccaccgccgacgccgcgccgccgcagcaattgtcaccgtcgctatggcccgtatcaaggtgcacgagctccgggggaagagcaagacggacctgcaggcgcagctcaaggagctgaagtctgagctctccctcctccgcgtagccaaggtcaccggcggcgcacccaacaagctctccaagatcaaggtggtgcgcacctcgatcgcgcgcgtgctcacagtgatctcgacctccgccctaagaagacccgtgccatccgccgccgtctgaccaagcaccagctctctctgaagaccgagagggaaaagaagcgtgagaagtacttccccatgaggaagtatgctatcaaggcctaggtcagaactgtgagatgctgcgcttagcatatcatcggctgtgttttaatttttggtttgtatggacatttgctgtgggtcggaagtacgatgtattcctccatttccataaatggctaaattggtttgactgac

SEQ ID NO: 154672 - DNA, 669 bp, Zea mays
  Clone ID: MRT4577_72643C.1
gccggccgggtcgggaacccctcgcgcaccgctcctgagtcctgtccaccctgccaccgccgacgccgcgccgccgcagcaattgtcaccgtcgctatggcccgtatcaaggtgcacgagctccgggggaagagcaagacggacctgcaggcgcagctcaaggagctgaagtctgagctctccctcctccgcgtagccaaggtcaccggcggcgcacccaacaagctctccaagatcaaggtggtgcgcacctcgatcgcgcgcgtgctcacagtgatctcgcagaagaagaacctgctccccctcgacctccgccctaagaagacccgtgccatccgccgccgtctgaccaagcaccagctctctctgaagaccgagagggaaaagaagcgtgagaagtacttccccatgaggaagtatgctatcaaggcctaggtcagaactgtgagatgctgcgcttagcatatcatcggctgtgttttaatttttggtttgtatggacatttgctgtgggtcggaagtacgatgtattcctccatttccataaatggctaaattggtttgactggcaattcgtattggcgttcatatttggtggcaacttttctttgtattcttctaaactagatgtttgctgttcattatatttgtgtgaccgttgctcatggt

SEQ ID NO: 154673 - DNA, 205 bp, Zea mays
  Clone ID: MRT4577_72644C.1
ggattctgtttttgtttattgtccttatggcaacatgaacccaaattgacacacaaacacattcagggagaaaagttaaaagagcggcaaactgaagaaattagaaactagccgacaaggaaccctgctgaaaacccaaatattacgtcctaaaaaaacacaaagtatgaaggctaaatggctaaagcaaaataaagtgaagacg

SEQ ID NO: 154674 - DNA, 699 bp, Zea mays
  Clone ID: MRT4577_72645C.1
ccggccgggctcttcccctcgcgcaccgctcctgtccaccctgccaccgccgacgccgcgccgccgcagcaactgtcaccgtcgctatggcccgtatcaaggtgcacgagctccgggggaagagcaagacggacctgcaggcgcagctcaaggagctgaagtctgagctctccctcctccgcgtagccaaggtcaccggcggcgcacccaacaagctctccaagatcaaggtggtgcgcacctctatcgcgcgcgtgctcacagtgatctcgcagaagcagaagtcggcgttgcgggaggcgtacaagaagaagaacctgctccccctcgacctccgccctaagaagacccgtgccatccgccgccgtctgaccaagcaccagctttctctgaagaccgagagggaaaagaagcgtgagaagtacttccccatgaggaagtatgctatcaaggcctaggtcagaactgtgagatgctgtgcttagcatatcatcggctgtgttttaatttttggtttgtatggacatttgttgtgggtcggaagtacgatgtattcctctgtttccataaatggctagattggtttgactggcaattcgtattggcgttcatatttggtggcaacttctctttgtattcttctaaactagatgtttgctgttcattatatttgtgtgaccgtttgaccttaattaatta

SEQ ID NO: 154675 - DNA, 173 bp, Zea mays
  Clone ID: MRT4577_72646C.1
aattcggcacgagggcggtccttgcattcactctatacaatcatggaaagcttgatggagcaactctggctgctgaaatcaagcgggtgctcgaaagctcttgtaatactcttggtcgcacatccctgcaccctcatccggtcagaacgcattaacttatcataatctgtctt

SEQ ID NO: 154676 - DNA, 1623 bp, Zea mays
  unsure (1)..(1623): unsure at all n locations
  Clone ID: MRT4577_72647C.1
catattgagcgcctaatttctcttttgaggaaaccagccagaattctgatcctccatttatgcataaaaggtatttctgaattttatgtagtgcttattttgtagcctccttttgtgttttttgttcttttaactatgttgcacacttatgaggatatgatgaccctttccccagatgatcgacatgaacatactgagcgctataatttctcatctgagaaaaccaagacagaattctgatcctctgtttgttttgctattttgctttattcgttgtgtatcttaatttctgaatttatcttaagcttgtacataaaatttgttgtcattgcttgctctttttaggtgactgtttattccaaacagttattttatgtgactgacatttgagttctgcgttgaaaactgattatcaatggatgaatttatatggccattgtgtatgagtcaacgccataataatcctctccatgttttgtgcgtatatggtacatgtgcatgatatcactggttgagcatgagtgggggatatcttctttcagatttatattttatgtcaagatggaaatacgacattgagagaaggagaatagggctcatgatctcagccgctatgaactttgtggcaaaatattctctggacgacatatttttatcgacacgtcactcaatgtttgttcactctatacttaatgttatcagnggaaggtcagatgatcgacaatgaacatactggagcgctataatttctcatctgagaaaaccaagccagaattctgatcctccttcccctcgcgcaccgctcctgagtcctgtccaccctgccaccgccgacgccgcgccgccgcagcaattgtcaccgtcgctatggcccgtatcaaggtgcacgagctccgggggaagagcaagacggacctgcaggcgcagctcaaggagctgaagtctgagctctccctcctccgcgtagccaaggtcaccggcggcgcacccaacaagctctccaagatcaaggtggtgcgcacctcgatcgcgcgcgtgctcacagtgatctcgcagaagcagaagtcggcgttgcgggaggcgtacaagaagaagaacctgctccccctcgacctccgccctaagaagacccgtgccatccgccgccgtctgaccaagcaccagctctctctgaagaccgagagggaaaagaagcgtgagaagtacttccccatgaggaagtatgctatcaaggcctaggtcagaactgtgagatgctgcgcttagcatatcatcggctgtgttttaatttttggtttgtatggacatttgctgtgggtcggaagtacgatgtattcctccatttccataaatggctaaattggtttgactggcaattcgtattggcgttcatatttggtggcaacttttctttgtattcttctaaactagatgtttgctgttcattatatttgtgtgaccgttgctcatggtatgtactccgtcccagaaacagaagttgagccgaggctcgacagtactggagtgtttggtttgaggaatgatgtagtccatcatcttctccctcattttttgtttggtttgtagaatggagtgagttaatccatcaccaccctcattctc

SEQ ID NO: 154677 - DNA, 368 bp, Zea mays
  unsure (1)..(368): unsure at all n locations
  Clone ID: MRT4577_72648C.1
gccgaggagcgcgcccatttccgccgcggncgngggcggaggggccgcggcncnnngcanggagggaggaggcggcgncccgaggcgcgggaanggacccnagccngaaggaggaggngangaaggcggnggaggaggcgaggnccgcgacggagccgcggngccgggnggngcggancaacgngcacgacgaggnccacgggcgcgcggcggcgcccgaggggccggagggcggaggaganncgagacccgangcaccggcgncgagacaggcacggcaccnnagacaccgncgaggaggccgccgaggacaacgaagacgagcgccaccgaaaccgagggcccaaggcgaccggaagcaaccggca

SEQ ID NO: 154678 - DNA, 675 bp, Zea mays
  Clone ID: MRT4577_72649C.1
atggacgctctgaatttcgaataccttgattacgagcgtctaaacaaaggtgccgaaggggcaaaaaggaagagagttgtcagtgttctgagcagacaggctgctaggatggtgagagaggacgaaaaaactctaaagaagaaaaaatctagtcctgagccgaagttggcgacttcaaagaagagaaaaactgcaactcccgagccgaagatggctgagatagaagaggaagctccttcaacgccttctactgccgaagtagaagaaattttaaaggtaatgactgaatccttacctatcaagctgctaagtcctctagggccgcatctgacgaagcttttacagaagaaggacgatccttcgacagcgaaaaaggtggttgggccaaaaaagcgaagaattgttactgttatgcaagctattgaggaaacgccaccatcggcctcagcatcaaagatgacaccagctgccaaagcagatacttctgccgaagctagggccatcgaagctaccaatctagagagtacattatctgttattgataaagtgctcttggatatggccgcagaggagaccgctgtggctacagaagaagccctggccgtagtgcctgagaaagggaaagaaattgccgaagataattcggaagaaaaggcttcagctttcaaaatctag

SEQ ID NO: 154679 - DNA, 252 bp, Zea mays
  unsure (1)..(252): unsure at all n locations
  Clone ID: MRT4577_72650C.1
ccggttggatgantancgnctcacttaaggtntgncagtagccganatancattgaacctaccgactatcacgaggnccaaaaaaataancaccacaanagtaccatccacacacaattancgtttacnnggacacaccncaccanctgatgataactctcggtagcaactgggnccagtcagcaaagtgcagcacactcaagactgacaacaatnccgcttagtccacctcctcggatcttggggcagggn

SEQ ID NO: 154680 - DNA, 809 bp, Zea mays
  Clone ID: MRT4577_72651C.1
ccggccgccggggaacactctcaaaccaaacaacatcataccaactcagttctcaaaatcccacaaacatctgctactacaatgtctgacgaaacggccaccaaatttgaaaccgtctccgatcttccaccgtctctggccgctgccgcctctcagatggtgcagtacgccggaacctgcgtcgaactcgagacagatgaagtaaccaagcaagacaaacgccgattcgactggccatctttcaagaaatgcttcgatgattatggaggcatcgacctcgctatgctggattacaaagaattcaccatctctcgtagcgaaatcgatctcagcatgatggtccagaggatcgtggagtccttcgtcagggagttccatatcatcggatatgaaaatgttaccacgttgctccggactaccattgagaagacatttaccaacctggaagaaaaatcctcgaatgagtgtttgtatttcagcaagtctgctggcgggcaaggttcattttgggaatatggtgttcatatagcggtccctatcccgagttcggccaattccttccacagttttatcactaccatcaaattggaggcagatgtgtctgaccagaatgattggtggggtctgacaggctcctcgagaaagaacttttccgctacgatgaacggaatgaagttcgaggtggaagaaggcttcaagaactaagaactcgacacccctcttgtccagctctcttctagccaagacagaaattgactgtacttgattagcttatatcaaaaaaaaaaaaacagaaaaaacccgcggcc

SEQ ID NO: 154681 - DNA, 640 bp, Zea mays
  unsure (1)..(640): unsure at all n locations
  Clone ID: MRT4577_72652C.1
tcgatcttcattcctccganaagatcgagagagaaggcaacgggggcagtcgggcaccgagaaccaacaggngaagaaggcaagatcgagccgagcctaatccgtcgtcgtcggatcacgatcggatggcgcgtgctgcgtccagctatatatccaggaggggcctctctgcagcgataacggtggcggagtcgtcggcgaagaaggtggaggagaaggcggtgaagctgggcacggtggccaaggacatcgccagcgccatggcgaccacgacggaggagaagacggcgttctgggagccggaccccgagaccggcttctaccgcccggtgaccggcaccaaggaggtggacgccgccgacctgcgcgccgagatgctcaagcagaggatgctgcagcaggactgacgcacgcactactgtccctgactccctgttcgtcaagatcatcacacgaccaagctactgtacctagaatgtgcatgtgtacatctgaagatggcagccgattattactggctatcttcggggcccaatttgagaggaaattcgtgtaatttctgtgccaactgatctggttcctcatcgggaattcttgtgggatatcataccaaaagcaacagtgaaagcccagaataact

SEQ ID NO: 154682 - DNA, 251 bp, Zea mays
  Clone ID: MRT4577_72653C.1
ccgttgtgtttggctcacttgttcaaatttcttgggtacacaggcaggaccaaccagtgggatcaccaggctacaacacccgggaggcgtattacttgcgatctacggaagcacaggccaatttggggccgaactcctaaagtctccactgtttcccctaactggagcagcttgacaatctctggctcacataaaagtgcataatatgatgcaaaaagtggaaactgctctggcagctctgaacatacaat

SEQ ID NO: 154683 - DNA, 631 bp, Zea mays
  Clone ID: MRT4577_72654C.1
atattgtaatgaacactcccttacgtgcagtgccgcgagctgacctcccgaggaccgaaacaattatcgccagattggccgcttcacctcgacagccacgccaccaccactgcgggtctgcggcagtcggcacatggagctcctgcgggacagcatctccatggtgtccctggctgtcctggtgaccgcggtgtgcgcgcgcgccgcgtcctcgtggctccgccccggtctccctcgcctggcgtcgttgctcccgatggtcgcctttcttgccgcggctcccctggctttctcctctgcaatcatccggggacttgcaggcttcttcctcgggtggctcggcgtgttcaaggtcgtcctcctggccgtcggccgcggcccgcttgaccccgccctccccgttctcccgttcgtcttcaccacagcgcttcccgttaagctcagatgcagcagcaccggcgctgcagcagcgtgcagggccaaatcggtctccctcgtctcgtgcgcggtcaaggtcgcggtcatagccgccatcctccatgtgtaccagtacacggaccagctgcatctctacactcgcctcgctctgtacagcgtccacatctactgcctcttggacttcctcctcccg

SEQ ID NO: 154684 - DNA, 404 bp, Zea mays
  Clone ID: MRT4577_72655C.1
gaggcggcggacggggtgcggcggctgggcaactgcgcgcacgcgttccacgcgcgctgcatcgaccgctggatcgacctcgtacgggtaacgtgcccgctgtgccgctcccacctgctgccgcgccggcgcgccggcctgcttgccatggcacggcttggcgacggctagtatagtcgcccgtccgtccgtacctggttgtttccttgccacgtgacgtgcgtgcccgtgcccgtgtgcttggctttcaggcgcgcggcactggtgccggatgggggcggaccaaccgtgaactgatcgcgattaggacgatggactaaccaccaacctgatgttattaatgaatgggcgcaagttaaattaaccggaggaggttggcattaactacttgttgacgcgatacc

SEQ ID NO: 154685 - DNA, 280 bp, Zea mays
  Clone ID: MRT4577_72656C.1
gggaaaagacttcaaactgtgaagttgcctgttgataaaacaacttcatgctgctttggagggaagaattactctgaaatgtatgtgacctgcgcccgggatgggatggaccccgagggtctattgaggcaacctgaagctggtggaattttcaagataactggtctgggggtcaaaggaattgctccctactcctatgcgggatgaggacaggtcttctttcctgccagagggagctctgaagacaactagagaattctgggcctgaaatttcaatcta

SEQ ID NO: 154686 - DNA, 694 bp, Zea mays
  Clone ID: MRT4577_72657C.1
gggtactcgaggccggccgacagcacaggtcgccacacaaagctcttgagctccaaatctagcagcaccactctagctatagcaagctagagctatacacacgactttgtgcaacaatcaccgacacacacagctagagctagagatggcggcgggaaagctggggcagcagctgatgacgaggctgcacctcgcgaggacccgatcgtcggcgacggcggacgtgccgcggggccacctggcggtgtacgtgggcgaggggcggaagcggctggtcatcccgacggcgtgcctcagccacccggccttcgtcacgctgctcaagcgggtggaggacgagttcggcttcgaccaccgctgcggcggcctcaccatcccctgcgcctccgagaccgagttcgctcacatcgtcggcgccgccgccgccgccggggacgaccaccaccatcactgacgatcgcgtgcgtgcccgcgccgatcgatcgagtccggccgtgtcgatagattaattccgcttccagttccacctagctaggacaaaattattgttctctttggggtggtgtcgtagcagcaatagtgattgggtttttgcttgacgacactgtaaagattgtgattggggattggaagaataagctctcttctcaccctgcttattattctgaacaaaaaaaaaaaaaaaaaagcggcc

SEQ ID NO: 154687 - DNA, 272 bp, Zea mays
  unsure (1)..(272): unsure at all n locations
  Clone ID: MRT4577_72658C.1
cgatgcaatgtgtattatcagtcgtgctcagatcgctcgttgcgccgcaggttaccgatataattagagagacagggcggtacgtatctgctgcagatgctgctcgtgtctgatgccgcgatgccccccttttttcatcctgttatgtttggctgttgtttggttgtggtgcacctccagtgtttacaacagtttgcccttcgaattggtgtctagacctcgccatctgnaagacctttgttttgcatccagctagaacaggaagacttgat

SEQ ID NO: 154688 - DNA, 285 bp, Zea mays
  Clone ID: MRT4577_72659C.1
agttgcttctcaagtcagaaaacttttcaggaaggtttccctgtgcatttgcaccagatgaatgtttgatgctatgaagagctttccatatcatcaaaactaatttgtgtagatttttgcatgagaaaaatcataaatttccctcaaaatagactgtgttgcagtacacaagttgccataatagtataatgacagtaaatgtgcttaaaaggccatccttttcattttcagagatgacataaagatctttgcatgaggtaaatctacagcatagttcatttttag

SEQ ID NO: 154689 - DNA, 546 bp, Zea mays
  unsure (1)..(546): unsure at all n locations
  Clone ID: MRT4577_7265C.1
cgcacgagccccggtgcgcagtaacggcaaggcggcatgcgccatggacgcgtctccggtgacacggcgcgggcgtgacgtccgtgtgcatgcaggcacaggtgcgtgggtgtgcattccctgcacagcgcctccgccagcgatccccattcgtactcaagcaacaccgttctttanaagtcaaaagaaactaggtgcatcatacatacgtacgatttttgatgatcgaagtctctgttccttctttcaagcgacatgttctctttcttcaatttctctgatcccgccaatttctctgatcccgcagcagtgctgataacgtgttgaagtactcagtggcaaaaagagttcagagagagacaaatgacagttgtatcttttattgcagggagaattctgtttatatacaggtgaaggggtgcgttctcaaggggtgtcccttgggaattatctgtcgcaccccttggattgatcacaaatacaatattttgtaacagatctatccgacgtttgcccactttgtctactcaagctgttggtcactcg

SEQ ID NO: 154690 - DNA, 249 bp, Zea mays
  unsure (1)..(249): unsure at all n locations
  Clone ID: MRT4577_72660C.1
ggtgctttctcaccttnannttngaatgnnatttctattcaaaaaaccctagggggggtggggactcagagagggacccgatggggcgcactgcgctacaagaaaccggaggcgaagaatcccgcaaaggaggagccagcgaccccggcggagaaggctcccgctgcaatgaagccgaggggaagtaagcccctccccgccctataaggggggggcgaggaaagatccgtaagcatgaagggggcactg

SEQ ID NO: 154691 - DNA, 480 bp, Zea mays
  unsure (1)..(480): unsure at all n locations
  Clone ID: MRT4577_72661C.1
ttgtacggcgnnccggcgtggtggctatgctagcagnctgtaaccttccaccaccagtacctcagnntactcacatcgaacancacacgaaccatnncaataacccctctgcagggctgaggggaaacgtgtaaggctcaggccnnagctgtgttctggctcacgggggagcggnacgaaagacagcttagggtccttgggatcgtgaacacaccatggtcgagggccgccgtgtctgcgacaagggagggtgcgtcaagaagggncccgtgtgacgcccggaggaaggacctnncgtcctcgtctcctacatcccagggaccacgngcccccggcaaactgggcgcgccggtccccacccagaaaccgggctgatgtcggtgcagncaagagctgccgtgcttcggtgggaccaactacctctcggccggggcatcagggcgcgggcaacttcacggtagcgggagggagaagctcatc

SEQ ID NO: 154692 - DNA, 792 bp, Zea mays
  Clone ID: MRT4577_72662C.1
gccgaatcctccaggggttgttatgggttcccggccctctccctctagcactaatctaccagccgcaactcccctgcctcctcgtttcgtttcaccagagccaaaatcgagcactagtaccagagcagaggtgagctgagagcagggagcaccgccaacaccgacctattcctcgaccgatgttcggggatccgcggcgagtctgggagcctcgtggagttgcttgtgaggcacctgtagccgagtggggaaggattgaccaccgaggcggctggaattcttcgtcgaacactgtgatccgtcacgcttcatgggttgggcttggcgctacttgaatcacggtgagtaacccccttgacgatatcctatcattaccgctgctcgttactaccttcggaatgaagtttaagcacaggaatcgggtcctaggaaaacttcggccatggcgccgccgtaggggcctaggcgttgtcgggtttcggtgtccaggggatggaagggaacatggtctttggattcgtggccaacggtatgtattagatcgaggataacagtttagtaggatcgatcggtggtcatctgttttgtgatcgacggtccggattagatcgtgtgttcattaaatctgggcccggatcgctgatccaacggctcacactgcgtgccggtttacaacgttataagatctaatcccgtccgctgtgatccgaccagacggctcccatgcgcctgtaccccttcggtgcgggcaaagttgtaaaagagaccttggggaattagctaatcaacccg

SEQ ID NO: 154693 - DNA, 321 bp, Zea mays
  Clone ID: MRT4577_72663C.1
atttcggcacgaggccagtgggccgctgggagcgacatccaggacgagtcaggagcatcgctagggcatgcgccatcgtggtacgttccgccgtcacgaagctggacatagcacctatccgtcgcccgtcgaccaacgtggctgccattcccgggcggactcctacactgctctgattccgatcttatcggaccatgtttttatggccaacttcgacactcaatacaacaaacccgccgtcgtctacaccggtaccatcctcccatgcgccacacgcgtcgacgtcctgaatagcatgacccgatccgacgcgcagttcag

SEQ ID NO: 154694 - DNA, 297 bp, Zea mays
  Clone ID: MRT4577_72664C.1
gagggataatgagaggggccatttcaagcctggtgactaacgacctccatgggttccatgatttaacagtggacccccgatcacgttgactcagtgttgcatctaccattggacccgactgcgcactataccgtttcaaaacacaaaccttcactgctgcgtatatatacaatccatatggtatagatggaacacaatgggccggttaatagttccccagtatgcatgggatgcactctattgttagatccacgtaaggtgccttcccggactgctaagtctgaccagatttttatt

SEQ ID NO: 154695 - DNA, 811 bp, Zea mays
  Clone ID: MRT4577_72665C.1
ggccgcttttttttttttttttttgcctggagaatagtagtagtatcaattttaatatcagcaaatacaatatagtatgagattctgaatggatatggctgcgacaaatctgttttcatggggcttacaacatatggacatagccccagaaggaacatgtatgagaagcaatcactcccccatcatacatttgtagctacagatcaatacttacaacacccatttgtgcgacccaagattgtcgtaagaaagaactcgaaaggcggaaacagaaacaaaccatgcacaggaggcctcctttgtcttcgatctccccgctttggtctcctccattgtgaccccacttatatctcctctattggtcacacttcatagttaaattagtttaggtcacggtccgtgtgatttgcttccaatagaggatgctagtaaccattctgatcttctgccagatggaaccgctgtttcttgggccttggttcccttaggcctccacatggtccgggccttcactatggtcggacctgattcaaggctcagcacatgctcacagtgcaaggttgtttctccagactcaatgttgcaatcctcatggacagaggtgtgtgactgcagcacactatcgcggacacactcccttttgtaatccagcacaatgctggccagctcatgattctcaaaaatagtaatcggtgcactctcaagaatccacgcaatgtatttaacattattgacatgctggtttatatcaagatcagccccacgaggagtcaggcctgtcctcacatatttagctggcagagtgctttga

SEQ ID NO: 154696 - DNA, 335 bp, Zea mays
  Clone ID: MRT4577_72666C.1
gcagggcccaaaaattccttgataagaaacggaacaaagcttgaatttttttttaaaacaaacaacaagtcgatcgggtccatttaaatagcagcatcagagtttttccggggggaaccgtttttttagcgggtttgaatgaacattttgcggaaaagaaaaagaaaaaaaaaggggggaaattaagtgggctcggaacaacaaaactttaaaagaaaggcggttaacaacggcaacggcgtaagggaataattgtaatggtctttaaaagcgacagcgcaatctgccaatttgccttggcttaactttggactaacatggaatgaaaccttttt

SEQ ID NO: 154697 - DNA, 306 bp, Zea mays
  Clone ID: MRT4577_72667C.1
tcgagggacgcgccaggcgttcgatctgctcgctgactcaaaggcatccaagagcgggttaccttcgacatcactgatgctacggactacccgtcgctgctcgaagatccgccacagtatgctggggagattagggagcatcactgggtgctgatgggatggacatcgatcgccaacctggccctgacggtgcaggcatactgcatctgccataatgagctgatggacatgacagttagcctggatgagtacgccagggctgatctaccagctgcatgactgcagctgcctgtgggacctacaact

SEQ ID NO: 154698 - DNA, 2497 bp, Zea mays
  Clone ID: MRT4577_72668C.1
gtcgacccagcgttcgctgaagcaacgtccgctatggagtggagtcccgggcaaccgctgtccgctgggcaggggcaaccactttcgtctcgtccgcacatgcacggcgaagagaggactcctgttgattcattcattcacttgatctgctcagctcagcaacaggaagcatcgtatgcatggccagccagcccaggcccgctctccatacccggctgccacgcactcaccgaccccacgctctccaaacgggttaaaaggtcgcggtggacaacgcccggtgcgggtgtcagtgccagcgccagcggagaaaagaaacagaggttcgaaccggcccccgccccgccccgcccggccgaacagagttcgaccccccccgccccccccgccccccaccgcacccccccgaacccgccaaacagcccaccaccaccccctcccatccgccagacccctcttccctccctcgctcccaccggcacccgcccactggccatgtgcgccaggggacgcgaaccaggcggaacgcgcaagcacccacgccccctgcgccttcgccctcgccgcccgcgcgacattgggatcccggattcagacaggtgcgaccattcgtttcgatttgccgcggcccacgcccccctccccgccgggctggtctccatgtccatcagcatgggcataatcgccactagcgcgaggggattcggcgcagggcacccctcagaacgcccgtggatcgcgcgctgaggggcatggcgccggcttacttgcgggggtgtgggggggatcgtgtgctgccgtcacgcaccgctagacgcgcgcccaggctgcggtccccaagaggaacgggctaagtctgcggtggcggttctggggcacgaaaccgtaccgaccccttcgtcggtcccgacgactttctacaaccagcttcccgactggagcatgctccttgctgccatcaccaccatcttcttggccgcggagaagcagtggacgatgcttgactggaagcccaggcggcctgacatgctcactgacacttttgggtttggccggatcatacatgatggcctcatgttcaagcagaacttctccattaggtcctatgagattggggctgataggacggcatctatagagacactgatgaaccatttgcaggaaacggcacttaatcatgtgaagaccgctgggctgctaggtgatggattcggctccacaccagagatgagtaaacggaacttattctgggtggttagccagatgcaggctatcgtcgagcgttatccatgctggggtgatactgttgaagtaaatacatgggttagtgctaatggtaaaaatggaatgcgtagggattggcatatacgtgattctatgacaggccacacaatactgaaggcgacaagtaaatgggttatgatgaacaaactcactaggaagcttgcaagaattccagatgaagtgcggactgaaatagagccatacttttttgagcattctgctattgttgatgaagacaaccgcaagcttccaaaactgccagagggacaaagcacgtctgtagctaaatatgtgaggacaggcctgactcctcgttgggctgatcttgatataaatcagcatgtcaataatgttaaatacattgcgtggattcttgagagtgcacccatctctattcttgagaatcatgagctggcgagcattgtgctggattacaaaagggagtgtggccgggatagtgtgctgcaatcacacacctctgtgcacacggattgcaacattgagtctggagaaacaaccttgcactgtgagcatgtgctgagccttgaatcaggtccgaccatagtgaaggcccggaccatgtggaggcctaagggaaccaaggcccaagaaacagcggttccatcttcattctgattttgtcagatgttcgagatggtgactttggcagcaaactatctggcagaagatcagaatggttactagcatcctctattggaagcaaatcacacggaccgtgacctaaactaatttaactatgaagtgtgaccaatagaggagatataagtggggtcacaatggaggagaccaaagcggggagatcgaagacaaaggaggcctcctgtgcatggtttgtttctgtttccgcctttcgagttctttcttacgacaatcttgggtcgcacaaatgggtgttgtaagtattgatctgtagctacaaatgtatgatgggggagtgattgcttctcatacatgttccttctggggctatgtccatatgttgtaagccccatgaaaacagatttgtcgcagccatatccattcagaatctcatactatattgtatttgctgatattaaaattgatactactactattctccaagctaaaaaaaaaaaaaaaaaaaaaaaaaaaaaaaaaaaatgaactgtttcatgaaacggcacttaatcatgtgaagaccgctgggctgccaggtgatggattcggctcc

SEQ ID NO: 154699 - DNA, 1238 bp, Zea mays
  unsure (1)..(1238): unsure at all n locations
  Clone ID: MRT4577_72669C.1
gcctgcggtccggtccggattcccgggcccagcgtccgcggccgcgtgggcggacgcgtgggagtagatcatgggttagtgctaaggtaaaaaggaatgcgtagggattggcatatacgcgatcctataacaggcctcacgatactgaaggcaacaagtaaatgggttatgatgaacaaactcactaggaagcttgcaagaattccagatgaagtgcggactgaaatagagccatacttttttgagcattctgctattgttgacgaagacaaccgcaagcttccaaaactgccagagggacaaagcacgtctgtagctaaatatgtgaggacaggcctgactcctcgttgggctgatcttgatataaatcagcatgtcaataatgttaaatacattgcgtggattcttgagagtgcaccgatttctatttttgagaatcatgagctggcgagcattgtgctggattacaaaagggagtgtgtccgcgatagtgtgctgcagtcacacacctctgtccatgaggattgcaacattgagtctggagaaacaaccttgcactgtgagcatgtgctgagccttgaatcaggtccgaccatagtgaaggcccggaccatgtggaggcctaagggaaccaaggcccaagaaacagcggttccatcttcattctgattattgtcagatgttcgagatggtgactttggcagaagaatggttactagcatcctctattggaagcaaatcacacggaccgcgacctaaactaatttaactatgaagtgtgaccaatagaggagatataagtggtggggtcacaatggaggagacaaaggaggcctcctgtgcatggttttctgttttcgcctttggagttctttcttacgacaatcttgggtcgcacaaatgggtgttgtaagtattgatctgtagctacaaatgtatgatgggggagtgattgcttcccatacatgttccttctggggctatgtccatatgttgtaagccccatgaaaacagatttgtcgcagccatatccattcagaatctcatactatattgtatttgctgatattaaaattgatactactactactctccggctaagtccaaaaaaaaaaaaaaaaaaaaaaagaaaaaaaaaaaaaaaaaaaaaaaaaaaaaaaaaagaaaaaaaacaaaacaaagagggcggcnncgcttctagagggatgnccaagncttagcgtagcgcgtgcatgcga

SEQ ID NO: 154700 - DNA, 361 bp, Zea mays
  Clone ID: MRT4577_7266C.1
cacgcgggcacgataataaactcacgaggattccactatgaccggctagcgataccgtgagcactaccatgttgtgaatcgggcgtgctttctgtgctacttgtaccctgctgaggcgactgcagcttaggaccgcgcccgaaatctctcgactggttcgaccagggactcggtcttaccacgaacactctgcactttgatggactactcagctccggaggaaaagaaggcgcctgctgatgccaactgccaagctaggtatgcacttatatctactctattgattcgaatataagagcatgccaagctagctgtgcacttatatctaatctattgatttgaacaacacactggcggacgt

SEQ ID NO: 154701 - DNA, 381 bp, Zea mays
  unsure (1)..(381): unsure at all n locations
  Clone ID: MRT4577_72670C.1
gtggacccctcggcccactcgacatcatcatcatcaaccagaccgggaggcgtcaagcatgtgtcccacctgctcaagtacgactccacgctcgacatcgtcgatgtcgacgtcaagcccgtctgcgatgacgccatctccgtcgacatgaggtcatcatgcgacggaccgaccgcaaccccagcaagctgccgtgactacgagctcggcatcgacctcgtcatccagggcaccggcgtcttcgacgatctgcaggtcgagnagaagctcatccaggaggcggccaacatagcgctcatcacggtgcccgacaagtgcgacatccccacctacgtacgtcggattaatgccgaccggtacaaccccgaccagcccatcatc

SEQ ID NO: 154702 - DNA, 161 bp, Zea mays
  Clone ID: MRT4577_72671C.1
gttgtcttaacatgtatgtttctcgtctttcaaaataataataagatgtgagtctgatagaaaactaggatgtgaaaattttatatctataataatgtatgctattcgttttttgtgcagttattgtacattaccattttatcgaatttgtgtgtcattgc

SEQ ID NO: 154703 - DNA, 2027 bp, Zea mays
  Clone ID: MRT4577_72672C.1
agttttattatcagtttatttctgctaactgccatattacgatttacactgcattcatattttctctgcttgaagtacatgtaagttatacggaacaccctgtcacattttttttttctaatttatgtctttgtgcagtaaatgggttatgatgaacaaactcactaggaagcttgcaagaattccagatgaagtgcggactgaaatagagccatacttttttgagcattctgctattgttgacgaagacaaccgcaagcttccaaaactgccagagggacaaagcacgtctgtagctaaatttgtgagggcaggcctgactcctcgttgggctgatcttgatataaatcagcatgtcaataatgttaaatacattggtcggattcttgagagtgcacccatctctattcttgagaatcatgagctggcgagcattgtgctggattacaaaagggagtgtggccgggatagtgtgctgcaatcacacacctctgtgcacacggattgcaacagtgagtctggagaaacaaccttgcactgtgagcatgtgctgagccttgaatcaggtccgaccatggtgaaggcccggaccatgtggaggcctaagagaaccaaggcccaagaaacagttgttccatcttcaatttgaattgtgtgagacgttcgggatggtgattttggcaacaaactactactatttggcaaaaagatcagaatggttactagcgtcctctattggaagcaagtcacacagggcgagacctaaactaatttaattatgaagtgtgaacaatagaggagatataaatagtgtgaacaatggactggaagagacagaagcggggggagatcgaagacaagggaggcctcatgtgcatgacaatcttcggtcgcacaaatgggtgttgtaagtattgatctgtaagctacaaatgtatgaaggggagtgagtgcttcccatacatgttccttctggggctatgtccatatgctataagcccctcgaaaacattgtcgcagccatatattcatgcagaggattttaatctcgtacgtatattgtatttgctgatattaagattgatattattactacttttctccaggctgccaaagcgttttgaaacttggacagatattgaaattgtgcaatttgtcatttactttgacgggcatgacctaaactaatttaattatgaagtgtgaccaatagaggagatataaatagtgtgaacaatgaactggaggagacagaagcggggagatcgaagacaagggaggccttatgtgcatgacaatcttcggtcgcacaaatgggtgttgtaagtattgatctgtaagctacaaatgtatgaaggggagtgagtgcttcccatacatgttccttctggggctatgtccatatgctataagcccctcgaaaacattgtcgcagccatatattcattcagaggattttaatctcgtacgtatattgtatttgctgatattaagattgatatgcctaagggaaccaaggcccaagaaacaccggttccatcttcattctgatttttgtcagatgttcgagatggtgactttggcagcaaactatctggcagaagatcagaatggttactagcatcctctattggaagcaaatcacacggaccgtgacctaaactaatttaactatgaagtgtgaccaatagaggagatataagtggggtcacaatggaggagaccaaagcggggagatcgaagacaaaggaggcctcctgtgcatggtttgtttctgttttcccctttcgagttctttcttgcgacaatcttgggtcgcacaaatgggtgttgtaagtattgatctgtagctacaaatgtatgatgggggagtgattgcttcccatacatgttccttctggggctatgtccatatgttgtaagccccatgaaaacagatttgtcgcagccatatccattcagaatctcatactatattgtatttgctgatattaaaattgatactactactattttccaggctgctc

SEQ ID NO: 154704 - DNA, 812 bp, Zea mays
  Clone ID: MRT4577_72673C.1
ttgggtacctcgaggccggccgggatgaagggatatataaacgcttccccccacaccggactacaagaaccttccggcgccgccgcctgatcgctccagcgccctcgccgtcggcagctcagccgccgtactcccgctaccgagctaggaggcatcaccttcgccggtccaacatgggtaagacacgtggtatgggagctgggcgcaagctcaagacccacagaaggaaccagaggtgggctgacaaagcctacaagaagagtcatctcggcaacgagtggaagaaaccatttgctgggtcatctcacgcaaagggaatcgtccttgagaaaatcggcattgaggctaagcagcctaactctgctatccgtaagtgcgctcgtgtccagctggtgaagaacgggaagaagattgctgcctttgtgccaaacgatggttgcttgaactacatcgaggagaacgatgaggtgctgattgctggattcggtcgtaagggccatgctgtgggagatattcccggcgtccgtttcaaggtcgtgaaggtctctggcgtttccctcctcgccctcttcaaggagaagaaagagaagccgagatcttaaaacgctgcatgggttttggagctttgtgcctggtggcgcaccgcacacctgtagcgctcacacaagccatagcagacctcatgttgagatgaaccagcaggtgattttgccatagttttgttgagacatctgaattcgaactttaaatccgaaattgctagtcagtgtgtgatttgtgaagaaaaaaaaaaaaaaaagcggccctcgagc

SEQ ID NO: 154705 - DNA, 500 bp, Zea mays
  Clone ID: MRT4577_72674C.1
gtacgagcacaaaaccaatgacttctattgtcccaactgcatagcgagcataactagacaggtgatccttaataagagaaagacaacactcacggaacaaacaggcttggaaccaccaaaaagaccacagctagcatagactgctgccaatgcttcaagtcaaacaatcaataaaggactcggcggaagacatttatatgctagcagagcttcacttaatacatcccaacaggctgcagctgaacttattcgcgtatatactgaaggatggatggataccaactggcttaatctgaccattgttctgcgtgagtggaaaattgtagaaaatggctactttcttgggtccggacaatagatagtccagagccattacataatgcacactcatcggaggaacctgatattcagagatttcaatagtactgacagtataactctagatcaagagaacacaccattgcatacggatgacacaatatgctaagcagaacaatcga

SEQ ID NO: 154706 - DNA, 851 bp, Zea mays
  unsure (1)..(851): unsure at all n locations
  Clone ID: MRT4577_72675C.1
ttactccttccggcgccgccgcctgatcgctccagcgccctcgccgtcggcagctcggccgccgtactcccgctaccgagctaggaggcatcaccttcgccggtccaacatgggtaagacacgtggtatgggagctgggcgcaagctcaagacccacagaaggaaccagaggtgggctgacaaagcctacaagaagagccatctcggcaacgagtggaagaaaccctttgctgggtcatctcacgcaaagggaatcgtccttgagaagatcggcattgaggctaagcagcctaactctgctatccgtaagtgcgctcgtgtccagctggtgaagaacgggaagaagattgctgcctttgtgccaaacgatggttgcttgaactacatcgaggagaacgtaagttctatttctccagctcataggactcttcaccatgggatgaggtgctgattgctggattcggtcgtaagggccatgctgtgggagatattcccggcgtccgtttcaaggtcgtgaaggtctctggcgtttccctcctcgccctcttcaaggagaagaaagagaagccgagatcttaaaacgctgcatgggttttggagctttgtgcctggtggcgcaccgcacacctgtagcgctcacacaagccatagcagacctcatgttgagatgaaccagcaggtgatcttgccatagttttgttgagacatctgaattcgaactttaaatccgaaattgctagtcagtgtgtgatttgtgatgaaaaaaaaaaaaaaaaaaaaanaaannnanaaaaaanaaaaaaaaanaaaaaaaaaaaattttgggttgttaccactggttaanggcgaat

SEQ ID NO: 154707 - DNA, 880 bp, Zea mays
  Clone ID: MRT4577_72676C.1
cattgggtacctcgaggccgggccgggaaaaaaccttccggcgccgccgcctgatcgctccagcgccctcgccgtcggcagctcggccgccgtactcccgctaccgagctaggaggcatcaccttcgccgatccaacatgggtaagacacgtggtatgggagctgggcgcaagctcaagacccacagaaggaaccagaggtgggctgacaaagcctacaagaagagccatctcggcaacgagtggaagaaaccctttgctgggtcatctcacgcaaagggaatcgtccttgagaagatcggcattgaggctaagcagcctaactctgctatccgtaagtgcgctcgtgtccagctggtgaagaacgggaagaagattgctgcctttgtgccaaacgatggttgcttgaactacatcgaggagaacgatgaggtgctgattgctggattcggtcgtaagggccatgctgtgggagatattcccggcgtccgtttcaaggtcgtgaaggtctctggcgtttccctcctcgctctcttcaaggagaagaaagagaagccgagatcttaaaacgctgcaagggtttgggcctggtggcgcaccccacacctgtagcgctcacacaagccatagcagacctcgtgttgacatgaaccagcaggtgattttgccatagttttgttgagacatctgaattcgaactttatatccgaaattgctagtcagtgtgtgatttgtgatgaaccaagcagctgcggtcattccttgcaatcaattggtacagccacggtgctgcgattgatgggagcctgcttacctgccaatgtcgaacttaacacctgttttttgactgttcgtcgaaaaaaaaaaaaaaaaaagcggcc

SEQ ID NO: 154708 - DNA, 855 bp, Zea mays
  Clone ID: MRT4577_72677C.1
attgggacctcgagccggccggaaaaaccttccggcgccgccgcctgatcgctccagcgccctcgccgtcggcagctcggccgccgtactcccgctaccgagctaggaggcatcaccttcgccggtccaacatgggtaagacacgtggtatgggagctgggcgcaagctcaagacccacagaaggaaccagaggtgggctgacaaagcctacaagaagagccatctcggcaacgagtggaagaaaccctttgctgggtcatctcacgcaaagggaatcgtccttgagaagatcggcattgaggctaagcagcctaactctgctatccgtaagtgcgctcgtgtccagctggtgaagaacgggaagaagattgctgcctttgtgccaaacgatggttgcttgaactacatcgaggagaacgatgaggtgctgattgctggattcggtcgtaagggccatgctgtgggagatattcccggcgtccgtttcaaggtcgtgaaggtctctggcgtttccctcctcgccctcttcaaggagaagaaagagaagccgagatcttaaaacgctgcatgggttttggagctttgtgcctggtggcgcaccgcacacctgtagcgctcacacaagccatagcagacctcatgttgagatgaaccagcaggtgattttgccatagttttgttgagacatctgaattcgaaaaaaaaaaaagaaactttaaatccgaaattgctagtcagtgtgtgatttgtgatgaaccaagcagctgtggtcatttcttgcaatcaattggtacagcccacggtgctgcgactgatgggaacctacttaaaaaaaaaaaaaaaaaaggccccta

SEQ ID NO: 154709 - DNA, 287 bp, Zea mays
  Clone ID: MRT4577_72678C.1
cctacgcgtccggaacgaagaaagaaagctcgagacttgtttcctcagcgaatcagcactataacaaacccttcagctggaaggccccagccattattttggccttcgaattcttggagagcattgcttactctggcatagcactcaacctggtctggtaccttgtgggcacgttgcacctgaatatgcaatgactggccatcttctggtaaagagtgacgtttacagctacggcgtagctctccttgagctccttacagggacgacaccggtggctttgttcaggc

SEQ ID NO: 154710 - DNA, 200 bp, Zea mays
  Clone ID: MRT4577_72679C.1
caagcatggaaacactaccaaatagctcagtaaataatactgagcttaaccaggaaaatgagaagaccatgtatgctagtaagtatgaagaagcacgggatatttttgtttacagagaagatgtactgagcttgaagtccaaggaggatgtccgtggtgtagtattggaggtagctggggaatatgattatgatggtagc

SEQ ID NO: 154711 - DNA, 662 bp, Zea mays
  Clone ID: MRT4577_7267C.1
gggtacctcgaggccggccctgctagtgccatgcgaacagtcgacttgccgactgccgccgcccatcggccatcgcccagggcccaggcacccagttgcgagccattggccgcccggtgtggcggcaccccgttctggcgtcctgccgaccgccgtgggcccttggtggcttggcgccctccacggctccgccgtgtagcgtgtgcagcactgcagcagagccacgctgtcggctggcggctgtcgccgtgcgccttgtggccagcgcccgtcgcagcgtcaccccgtccaccgtcctggtggctggtgcagtggtgctgcgtcgtcgcgccgagatgcccaggcagccagccgtcgaggccaaggctcatcctaggaggcagccgtccgccgatttgtgaagttgaagttgaggtcctggtttgtccgtttgagtatcactaatttgtgatttgagtgaatcttaatttgttttagactaggcattgaattgcgtgtattgtgatttatttgcatatttgaaaatgaagaggaagagcagtgctaccactgatttgagagcttttttagcaagagctgctgcaaaaaagaaatatagtgctgctccatcttccaatgaaaaaaaaaaaaaaaaaaagaaaaaaaaaaaaaaaaaagcggcc

SEQ ID NO: 154712 - DNA, 837 bp, Zea mays
  Clone ID: MRT4577_72680C.1
cattgggtacctcgaggccggccgggaagaacttccggcgccgccgcctgatcgctccagcgccctcgccgtcggcagctcggccgccgtactcccgctaccgagctaggaggcatcaccttcgccggtccaacatgggtaagacacgtggtatgggagctgggcgcaagctcaagacccacagaaggaaccagaggtgggctgacaaagcctacaagaagagtcatctcggcaacgagtggaagaaaccatttgctgggtcatctcacgcaaagggaatcgtccttgagaagatcggcattgaggctaagcagcctaactctgctatccgtaagtgcgctcgtgtccagctggtgaagaacgggaagaagattgctgcctttgtgccaaacgatggttgcttgaactacatcgaggagaacgatgaggtgctgattgctggattcggtcgtaagggccatgctgtgggagatattcccggcgtccgtttcaaggtcgtgaaggtctctggcgtttccctcctcgccctcttcaaggagaagaaagagaagccgagatcttaaaacgctgcaagggttttggagctttgtgcctggtggcgcaccgcacacctgtagcgctcacacaagccatagcagactgcagacctcatgttgagatgaaccagcaggtgtttttgccatagttttgttgagacatctgaattcgaactatatatccgaaattgctagtccgtggtgtgatttgtgatgaaccaagcagctgtggtcattcgttgcgatcaattggtacagccacggtgctgcgactgatgggaacctgccactgtcgaacttg

SEQ ID NO: 154713 - DNA, 441 bp, Zea mays
  unsure (1)..(441): unsure at all n locations
  Clone ID: MRT4577_72681C.1
tgttctttggaggccttgtgggttttttttgcggtcttttaaagccgtatttggtgaagatatttgtgggtggtccttttattcactaatctttgtagcgtgatcttcaagctccggcaaacaatggacgttccattttggttttttgatgtaccctttttttagatgttgttttgtagaacaccatgcaagcttcacactcatagggcgaggcaccaggaaaaaaatctcgctggaacctattttgccagctagtattacatgctgagttgccggtgaaactaaggcaccagttacattacgtaatgagcacacgaagactgtcgtacaatctgngagcaaggatcaccaaaccgttttgggtaaaaaaaaactgctatccacggtagaccggtgaaaaccggcaaaatcgacaaggatcaccaaccgggtttttttttg

SEQ ID NO: 154714 - DNA, 4357 bp, Zea mays
  Clone ID: MRT4577_72682C.1
cttcaggtttttaatgatactgatgagcaagtgttccttgaacatcaaagttattaataccaccatctattttaacgctcggccgccggacgtcgggcccgccggacgaacgcgtccaatagtggatactttgtctccaagtctcaaaacccaattcgacccacctggaaccggccttgttccccgttggacccagcctaataaaattccccattccaacacacacagatctcgcacccggcagtggcgacgaatctcgcggggcggaggtggtggcgcgacagaggcggtgtcgactccgacgaactcgcagccaccggtggagacgcaccagcagcaccggcgcactccaccgacgttcatatttaaggacttggtttggataattctactcgtcaacaaaagtgattaaaaatggtggttcttgcagcttcaatcgtttcaaagtcgggaaaagcacttgtttcaagacagtttgttgacatgtctcgcataagaattgaaggattacttgctgcgttcccgaaactggttggaactgggaaacagcacacttatgttgaaactgaaaatgtgcgttatgtttatcaacctattgaaggattatatcttctacttatcacaaacaagcagagcaatattcttgaagatctggacacattgaggctcctctccaagcttgtgcctgaatactccccttccttggatgaggacggtatttgtaaaacagcatttgagattatatttgctttcgatgaagccatctctcttgggaacaaggaaaatgtgacagtgcaacaagttaaacaatattgtgagatggagagccatgaagagaaggcacacaagctgatgatgcaagccaaaatcaacgaaaccaaggatctcatgaagaagagggctaatgaacttgacaaaatgaggatggaaagaggcaagcttgacaaaggaggatactcatcaatatctggtccacgcgtgattgaaaaaacgtttagtgacatgagcatcagtggttctggatttggtagtggttctggattaggtggactgagcactgacatggactcatttgccagcaagcccaaaggtcgtccatctacagcagctactgcacctggtaaaggttttggtatgaaattaggcaagacacagaagacaaatcaattcctcgagtctttgaaagctgaaggagaagtcattttggaggatgtacaaccaagtgcagtttctacaagatcatctgctcttccaccaagtgaccctgtcacagtgaacatagaagagaagctcaatgttgttgttaaaagagatggtggtattagtaactttgatgttcaaggaacacttgctcttcaggttcttaatgatactgatgggttcatccatttgcagattgaaagccaagatatgcctgggcttagcttcaaaacacacccaaatatcaataaggatttgtttaacagtcagcaaattttgggagcaaaagatccaaacaggccctttccgagtggtcaaaatgaaactcctctggtgaaatggagaatccaggggatggatgagtcatctttacctctgtcagtcaattgctggccgtcagtatctggaaatgaaacctatgtgaacattgaatatgaagcttctgagatgtttgatctgcacaacgttgtcatatctatacctctgccagcacttcgggaggctccgagtgttagacagatcgatggagagtggaagttcgactcaagaaaactctgtgttggaatggtctattctccttatcgatcagtcgaatcgcagtggttccatggaatttgttgttcccccagctgacccatcatcgtttttccccatctccgttggattttctgcatcgagtactttcagtgatctgaaggttactggaattcttcctctgaaggaaggcaaccctcccaagttttctcagcgggctcgtttgctcactgctaactaccaagttgtttaacgcttgtaccgcgagtgttggtccacttgaatgctccaatagcagatgttattgccgtggacttatgcaagccatggcacgggagattattttgtgtttggaaaatttctttactatgcgcttctcattgttatagcatattgcacaaatgttgttctaatgtattgccaccagagaaataagtaatgttcttgcattttgttggcatgcattttgtaccaaaaaaaaaaaaaaaaaaaaaaaaaaaaaaaaaaaaaaaaaattaacgggaaaaaaaaaaaaaaaaaaaaaattccccattccaatacacagatctcgcacccgtaagtggcgacgaatctcgcggtgcggaggcgcgacagaggccgtgtcgactccgacggactcgcagccaccggtggagacgccccaccggcgcactcctccaacgttcatagtttaagggcttgatttggataattagtcatcaacagaagtgataaaaaatggtggttcttgcagcatcaatcgtttcaaagtcgggaaaagcacttgtttcaagacagtttgttgacatgtctcgcataagaattgaaggattacttgctgcgttcccgaaactggttggaactgggaagcagcacacttatgtcgaaactgaaaatgtgcgatatgtttatcaacctattgaaggtttatatcttctacttatcacaaacaagcagagcaatattcttgaagatctggacactttgaggctcctctccaagctcgtgcctgaatactccccttcattggatgaggagggtatttgtaaaacagcatttgagattatatttgctttcgatgaagccatatctcttgggaacaaggaaaatgtaacagtgcaacaagtcaaacaatattgtgagatggagagccatgaagagaaggcacacaagctgatgatgcaaaccaaaatcaatgaaaccaaggatctcatgaagaagagggctaatgagcttgacaaaatgaggatggaaagaggcaaacttgacaaaggaggatactcatcaatatctggtccacgcgtgattgaaaaaactttcagtgacatgagcatcagtggttctggattaggtggactgagcactgacatggactcatttgctagcaagcccaaaggccgtccatctacagcagctactgcacctggtaaaggttttggtatgaaattaggcaagacacagaagacaaatcaattccttgaatctttgaaagctgaaggagaagtcattttggaggatgtacaaccaagtgcagtttctacaaggtcatctgctcttccaccaagtgaccctgtcacagtaactatagaagagaagctcaatgttgttgttaaaagagatggtggtattaataactttgatgttcaaggaacacttgctcttcaggttctcaatgatactgatgggttcatccaattgcagattgaaagccaagatattcctgggcttagcttcaaaacacacccaaatatcaacaaggatttgtttaacagtcagcaaattttgggagcaaaagatccaaacaggccttttccgagtggtcaaaatgaaactcctctggtgaaatggagaatccaggggatggatgagtcatctttacctctgtcagtcaattgctggccgtctgtatctggaaatgaaacctatgtgaacattgaatatgaagcttctgagatgtttgatctgcacaatgttgtcatatctatacctctgcctgcagttcgggaggctccaagtgtcagacagatagatggagagtggaagttggactcaagaaactctgtgttggaatggtctattctccttattgatcagtcgaatcgcagtggttccatggaatttgttgttcccccagctgatccgtcatcatttttccccatctctgttggattttctgcatcgagtactttcagtgatctgaaggttactggaatccttcctctgaaggaaggcaaccctccgaagttttcccagcgggctcgtttgctcacagctaactatcaagttgtttaatggttgtaccgttgtccgagtgttgatccacttaaatatattcgaatagcatatttttgtgacatggtatgctactggcatgaacttttgcaagtcatgggatggaagatcattttgggttttgaaaatctttactatgtgcttctcattgttagcatgttgcacaaatgttctgatgtgttgctaccagagaaataagtaatgttcttgcctttcgtttgcctaaaaaaaaaaaaaaaaaaaaggcccaaagggaaaaaaaaaaaagggtacccccaaaaaaaaaaaaaaaaaaaaaaaaaaaaaagtactctgcgttgttaccactgct

SEQ ID NO: 154715 - DNA, 873 bp, Zea mays
  Clone ID: MRT4577_72683C.1
cccgcgtccggaaggaatccgatccatccaagccaagccaaggcagagaagaagaagaggaggaagaagaagcatcggcagcatgtcggaggggactgccaactgcgtggacatcctgatcgccatcatcctgcctccgctgggggtgttcctcaagtacgggtgcggccacgagttctggatctgcctcctcctcaccttcctcggctacatccccggcatcaccttcgccggtccaacatgggtaagacacgtggtatgggagctgggcgcaagctcaagacccacagaaggaaccagaggtgggctgacaaagcctacaagaagagccatctcggcaacgagtggaagaaaccctttgctgggtcatctcacgcaaagggaatcgtccttgagaagatcggcattgaggctaagcagcctaactctgctatccgtaagtgcgctcgtgtccagctggtgaagaacgggaagaagattgctgcctttgtgccaaacgatggttgcttgaactacatcgaggagaacgatgaggtgctgattgctggattcggtcgtaagggccatgctgtgggagatattcccggcgtccgtttcaaggtcgtgaaggtctctggcgtttccctcctcgccctcttcaaggagaagaaagagaagccgagatcttaaaacgctgcaagggttttggagatttaggcctggtggcgcaccgcgcacctgtagcgctcacacaagccatagcagacctcatgttgagatgaaccagcaggtgtttttgccatagttttgttgagacatctgaattcgagctttatatctgaaattgctagtcggtgtgtgatttgtgatgaaccaagcagcgccggtgctacg

SEQ ID NO: 154716 - DNA, 297 bp, Zea mays
  unsure (1)..(297): unsure at all n locations
  Clone ID: MRT4577_72684C.1
atgaanttaatttttggttttgatttattttattctatttttctaatttttttttttttcttttcttaaaaactgtcccaaacaattttttgacataccaaaaaacttaattgttaaattaacaacccattgtgaaggttcgtttcttttatttaaaatttcaaaaggccatgtatttttgccaaattaaactggtttgttttataaagaccagagggatttagtgactaatagttgttggataacctaaattatatggacggtggccttgttccaaaccttttttttttggggggt

SEQ ID NO: 154717 - DNA, 2475 bp, Zea mays
  unsure (1)..(2475): unsure at all n locations
  Clone ID: MRT4577_72685C.1
gatcctacattcctagccgcacgctctgggcacacggtcgttgtgaacggatgagtgaggcggagtgagcaacgggaccctctccccacatggcgccaccgccgctgcccctcttctccccgtccctaaaggccccgccgccgccgccatggctccacgggtcctctacccaaagccgcgactccgcacccccggtgcctccactccccgccgaggcaactccttccaagttccgcaccgacagccccaaaccggcaccggcaaggaaaaacaccaaaacagcagccaagcccctcactgccggagtccccgggggccgcacccaccgagcggtcctcggcatcatccggcgcgtccgctccctcgagctctccgatgctccgagtccgaattccgtccacaccagcaacagcggtgccgccgccgccgcattccaccttacgatcgagctgtccccgccgcgggaaccaggccaatatgtggttgagaaggagaagtcacgggctgttccgtgggcggctgctagggacgagggcctcaaggttgcgctgcggcgggagaagaagccgcgggagccgacgcgcgcggagaccgagctggagacccacgagctgcgtcgcctgcggcggttggcgcgtgggataggcaggtgggcgcgggccaagaaggccggagtcaccgacgaggtagtcaaggaggtgcgtagggaatgggccagtggtgaggagctcgccgccgtgcgcatagtcgagccactccgccggtccatggatcgcgccagggaaattcttgagattaaaacaggaggcttagttgtgtggacaaaaggagacatgcattttgtctacagaggaagcaaatatcagcaaaacgcaaagcatagtcacacttttctaactaatgttcataaagatgatgcttttcaagaaaatgatcaaagcatttgtggccagaaggatgaagaacctgtcaagggtacactatatgagagagaagtcaatagactattggacactttgggccctcgatttgttgattggtggtgggacacaccattacctgttgatgctgatctcctcccagagtttgttccaggctttaagactccatataggctgtgccctcctggggtgagaccaacactagctgatgaggagctgacatacttgcgcaagcttgcacgccttttgccaacacattttgcccttggtagaaacacaagattgcagggtttggctgctgctatactgaagctttgggagaaaagccttatagcaaaaattgcagtgaaaataggtatccagaatacaaacaatgaacaaatggcatggaacctcaagcatcttacgggaggcactgttatattgagaaacaaggattttattattctatatagaggcaaggattttcttcctggtggagttgctcaaactgtcattcaacgagaagctcaggtacatgatgaacaggtgaaggaagaggaagcccgactgaaagcagttgactcacttcagatggttggtgaattatctgaagaaagttctttaggaactttcagggagtaccagggtttccatgctaagtttgtgcatgaaaatactgaaaactctaacaccatgattgaactagaggctgagaagtatagattggaaaaggaactgaaagaccatgagtggaagctttccgttctcaacaagaagattgaaagatctaaccaggcactggcaaagcttcacagttcttggagcccttcagagcagtctgctgatagagaacacttgacagaagaggaaaaaataatgttccgccggattggccgcaaaatggatgggcttgttctcctaggaaggcgtggtatctttgatggtgtaattgaagagattcatcagcactggaaacataaagaggttgtgaaagtaattacaaaacagaatcaaactcgacagatcatgtacaccgcgagtctgctcgaggttgagacaggtggaatattaatagcagtagaaaagctcacaaccagccatgccataatactttaccgtggaaaaaactatcgccggccagcaaaatcatcatttagtaatctcctaacaaaaagagaagcgctccgaagatcaatcgaggtccaacgacgagggtcaatgaaatactttgttcgggagagacagaagtccattttggaattgaaaaggaaactgaggtatgtgacaaggcaaatcaggtatcgaacccccatgatcatgaagagtttggatagcatggttagtaaatgatagttagaatttgcaataatgactgcatccaatttttttccttaatatgggatagccgtgtaaactgtgaagcccaacatgaacaattctgaagtgtacagattatataatagtgtctgttgtacatatgtgacacttttgactttacccatatttcatgaaacaagagatttttcttcaaaaaaaaaaaannnnnanaaaa

SEQ ID NO: 154718 - DNA, 616 bp, Zea mays
  Clone ID: MRT4577_72686C.1
cattgggtacctcgaggccggccgggagaccttatcaccaccatggcagcccctatgtcttgctaccgctcgggagctggcgcgactactacaccgacgagccatggcaggagcagccgcggcgggcaaccagcaaggcgcgggcgagccacaacgacaccctgaggtgctccgcgacaacaccacggccatctgcaagccgcggagcccatcgcctggctacatgcgtcggcgtgctccgcctgctcccgcctaatatactaggagaccgtggaggccttgcggatccatgcatgaccatcaccatggcgaacctcttgcacctatcaccgtatcacgctgcgccctcatgaccggctactcatcgcgtgacgtctctatactagctaatgcgatcatctagcgctccactctaacgctatcttctgctgcttccccacgccacgactaagtggctaacactactctacacgtgctcctgtcccatgaattatgacgtgctatgaccagataaatatgagccccgcgcatgtcctgagacctgtctcctcctaaatatgatacaataggttgaccactgttgtgtgattgcaaaaacagaaagaaacaaggggtc

SEQ ID NO: 154719 - DNA, 658 bp, Zea mays
  unsure (1)..(658): unsure at all n locations
  Clone ID: MRT4577_72687C.1
tcccttactctcagcgaacaacaattgtctgtccatttcataccaactgtgctacacttggaactcgtgctacgcttatcttgcaggcaactaactacgttaccattcagtccagtctgagctacctgggcctactctgcagcaacatacaactaccaacacacttgtggctttagcaaatccttgctngtcctactctgcagcaacaaccagtttcgttccatttcaacccaacgtagctgcgatnntgaactctggcttcttatcttgcaacaacaacatactaacccattcanngccagctatgctgcgtgcctacnnccccagcatatttctgtccatctgcaaccaactggacagcgtttgtaacctctccgtgcttattgtaccagcaggcaaccaactacctacgncattcagcccagctanngctggtggntgagccctggctacncnnttcttgacaccaaccaccaattgtgtgccggtgtctaccagcacgctttgcgcgctaacgcgtggcacccttcttacaactggcaacaatgtgcgtgccgattcaacccaaccttggcttgtgacgagaccccaacagccatttctacccaacaaccccattcattgggtgggtgcccctctttttagattttcttatgga

SEQ ID NO: 154720 - DNA, 394 bp, Zea mays
  Clone ID: MRT4577_72688C.1
aagccccgtccagcccccaactccagcactccagaagctccccctgatccgacgtcgtggtggccgacggctggatccctccacccccgcgcgcagatgcccctcgcgccgcggtcctcctcgtcggcgaaccggcacagggaagcaccaccgcctccgacgcctagaaattctggagcgtagcagggtaccgtaccgcgcgtcggcgagctctgtttgcggcgtttggtactgaagatgaagaagtccgactgatggtttcttataataatatgcatccaagacatcgtacgttacagtctcccatgatctgtgtatgtaacgtggatatacaattgaatatgtggaggactgtgcgacatgcgttgaagtcggagggaggattgtatgctgt

SEQ ID NO: 154721 - DNA, 645 bp, Zea mays
  Clone ID: MRT4577_72689C.1
ctttccttttctttcttttttttctcttttcttttccttttctttttctgttgttgtcgtaaccgaaggagaaaaataaggaagcgatgttgactcggtgcgtggcatgatcaaacggaagattgtgacgacgcgctagggtttgaaaagtggaagaaagaaggatcgcgaactaaaacacaatgcaactagcaacaaatgacacgacaacacacaaattcaacaatgcaaattattgaaaggaagtgcgaggctcaaaagggtgctaggataaggtctaacctgaaatctaatatggtttcgtggactgtaagagatgaaaacactcgataaactcaccgatcaacctggaaatctgataacacttgataagtatgaaatgcccgatctttcggtgattgaagataattaagatctggcggaagatgaccctcacgattcgactacgacgagcaagcccgaggtgccaatgcaatcgctgaaccaactccctgtggttaccaaccttgccggtgcaagatcagtctgatcacaaagatcgtttcctgcacgcaatcgaagaatgaacaagaaaaagatgtgagcaatctaatctattactcaagaatggagttcaagcatacgtgagcatacaagtgcataccc

SEQ ID NO: 154722 - DNA, 198 bp, Zea mays
  Clone ID: MRT4577_7268C.1
cggccgggccgtgcataccacagtaccacaccactccgctctcacctgaggacggtacagcggcacagaggtgcgacgtacgacgacgacgtcgtttgtgccacacatggaatcccagctctccgtcgtcgtgccccggttccacggcctccggtgctacgtcgcgcccaggtctacggtgttggcgctgtcgttcgt

SEQ ID NO: 154723 - DNA, 529 bp, Zea mays
  Clone ID: MRT4577_72690C.1
aaaaaaaaaaaccaaaaaaaaaaaaaaaaaaaaaaggttttaaaaaaaaaaaaaaaaaaaaaaaaaaaaaaaaaaaaaaaaaaaaaaaaaaactttattacaacccgaccaacgccgttttgaaacggcccccgttgaaataaggcccccggggggaaattgccctgcccttgagggctagttttcgccgttacgaagggttttttggccttgcgtcctccgtttttggtggttgaaacatgggggtataaaaaaagctgccgggttccgggcagaaaaggccgccgccgcctgaaaaaatggccgatttttccgggttaagggggctgggtttcttattcctaaccttaaactaaggcaggggaattaatgggcccaagggggaccccggttccgtcgtttgggggtatttaatttcaaccggggggccttgttcgcttgttggcgctactacaagcagtgggataagaagaattccaaaaagcgcgcgagggtaaaggttggggttggaagcctaacaaccttcttt

SEQ ID NO: 154724 - DNA, 322 bp, Zea mays
  Clone ID: MRT4577_72691C.1
gtgaaaacctcttaataaaaaggtcttgaacaatcttcagtttgatgtctggtggatcttatttggcatgtggtctttaaatgtcagatgaccacgctcgcacgtgcaatgtccagcagtggacaaagctctgggatggctctgggcaaacaacaatgacatcagcctgaaagggaaggagaagcgtggtcaggtgtggcccaaccgacccaggctcacaccttataatgcggcagctaccaagcaaaatccctgttcgctgagctcgacatcaaatctggttctcattcgacttttggacctaagcgatcgtaaagcgctg

SEQ ID NO: 154725 - DNA, 336 bp, Zea mays
  Clone ID: MRT4577_72692C.1
cagaccagcaagcaacaacacacgtagaacacaatagcaacaacaacgcaacaagggggaccaaaacacttgcggggcgtacgcaacctagctaacactacatgcgttgctaacgcgacacaaatcccacaatgctcacaagctgctataacttacctcataccaccataccttccatcaattatagcgtcaccatgtgaacacccaactatacaaccatatacgcttcaacaagccatcgaagcaagcaacataccccaatcgaccatgctattacaacaataaccaaccatataagcgatgcaatcatcgctacaaacaatgagggcacaaaca

SEQ ID NO: 154726 - DNA, 556 bp, Zea mays
  Clone ID: MRT4577_72693C.1
aataatctcgaccaatggcggcaccaacggtggtgctcatcccgttctgcgtcaccggccacctgacgtccatgctccaagccggcaagcggatgctgatgagcggcggcggcgacctggccatgtcgctcaccgtgctcctcgcgccactgccgatggccaggttcgcgcacatcgtagagcgggaggccacctcgggctcggggttcgacatccgcttccaccgcctccctgacgtggagctccccgccttctccggcccggaggacatgatctccagtttcatccagctgcaggcgtccaacaccaaggcggccattgccggcctggcaagccccgtcgccgccgtcgtcatggactacttttgcaccacgctgttcgacgtcgcccgcgagttggcactgccggtgtacgtgtacttcacgtccccggcctccatgctcgcgctcatgctgcggttgccgacgctggaccgggaagttgccggggattttggggaggcggaaacggcgttcaacgtgcctggtatgccgccggtgccagcggctttcctgcc

SEQ ID NO: 154727 - DNA, 251 bp, Zea mays
  unsure (1)..(251): unsure at all n locations
  Clone ID: MRT4577_72694C.1
attcggctcgagctctcctgacgctcgtatttatctatcccccgctgctcactgacacagtgcgatgctcctacctgctctgattctttcccgtgcacccagacatttcggtgtcccggccagatgggtcgctcatccttgagtccgtccacacccacanncaccccccaccacctcncctcccgccagctcgaccatggcagccaccatccttggatcccggctcaagtcctcagggcggccctgcctgg

SEQ ID NO: 154728 - DNA, 234 bp, Zea mays
  Clone ID: MRT4577_72695C.1
ttgtttctactccttgcggagatagcggcctgtgcatatcggtcccgatagactggagctctgttcctgtgaggacaagccatggaacccactctacgccggcaagagatggccccttgaccacacctggaggtagctcgaacattacattagcaagaatgattggttaccagcatcagacccagccatgtcagccttgggatggatggtggcatgggaggagttgatatacac

SEQ ID NO: 154729 - DNA, 150 bp, Zea mays
  Clone ID: MRT4577_72696C.1
tttttcttgggttttttcttcctgtgtctttgtctgtttcaacatcaccagacgctagaggctgcaggatccagcgatacaaacaggcagcactgttgatctactggcggcacttgcgcaacttgttgctctgcgtctcggcgcccactg

SEQ ID NO: 154730 - DNA, 300 bp, Zea mays
  Clone ID: MRT4577_72697C.1
gcggcgttctacggccgtagcgacgacgcgccgttcggaggcgacgtcgccgccgcgtcgccggagctgaggttcggctctggcctgaacgtggcgggaagcggcgcgttgcagccgcagccgcacaagtccacgggatcctccaacgccaattggttctactgactgactgctgcagaatcatggatggaatggagctttgttagttttagtcagtcctgtactacttatttaagctttgtaagcctgcaaatgtccagccataaaccacttcgttcttaatgggaacttccgtcttgc

SEQ ID NO: 154731 - DNA, 578 bp, Zea mays
  unsure (1)..(578): unsure at all n locations
  Clone ID: MRT4577_72698C.1
cccaagacccacaaaaataaccaaaccgcagncaagggagggggggggaaggccaaaaaaacccgcaagaggggcgaccaccccaaaggccacgccagngaacaagacgaaacagagagcacaacgggcaaagcagccaaggaanaaagaagagcgnnncagaccaaacccaacgcgaagcacaaacaacgaggggggggcaacccacaataattttaaacnacanaaaaccaaaggaagaacncgcagggccggaagaaggnacaaaacccccccccggagccngaagacacaacaaagaagaaganaaaagagggaccccaaagacaaaaaaaaccacggaggccagaaggggcaagcaccacaaaaaaaaagaacaaagaacagcaaacacaaaaacaaccaagagaaggagccaagaaaaaaaaaagaaaaaaacggaagaaagaaaaaaacaaggaaagaaaaaaaacacacagaaacgaccagcaaaacacacacaaaaacaaaaaaaaaaaaaaaaaaaaaaccaaaccaccacaccaaaaacacaacacaaaaaccagcgacgaaccaac

SEQ ID NO: 154732 - DNA, 410 bp, Zea mays
  Clone ID: MRT4577_72699C.1
gtcaaaacgcctagaaaagcgcctagaagcgcctaagaccgagtactcccgactaggcgctaggcgaatgggtcaccggcgagatgtccgcctagcgcctagctgaaccttggctgctactgtgatgttttgatctaatcctggtagcaattgtggtgtgcattccatcatggaagtgatggattcatcagtgattcgttgttattgtctagtccagattagttcatagaccacattttagcaaaaaaaaaggtagggaacaattgtaggtttgagaatctcatattatatactatgtcatatctagagatgtgctacattgcagtatgttgttcgcaataattatcttaccttcatctgtgatttttaattacttattcttttttttattcaggaagtgtggatatggc

SEQ ID NO: 154733 - DNA, 351 bp, Zea mays
  Clone ID: MRT4577_7269C.1
agaaaacagaacgcatcatgcacctattttcaacactattattctactcgttgctaccagcgggaacaaccacaggtacaagggtatcggttcacatgactaccgtatgatccatcgccagccaaaggccaagtgtttttgtgtgctcgaccactcgtacactgtagcttgggcaggactccatgggaaaccaatgaataaccctaccgtgcctagcaggacaaccagctttgcgtatacaagagccataataataccttggagtatttatgccataagtggtttctgaggaaaaatagatccggtcacaatatcactcgaactatgagccgagaatgtaccttatccaga

SEQ ID NO: 154734 - DNA, 1814 bp, Zea mays
  Clone ID: MRT4577_726C.1
cgccatacacagcctggcaatattctgtgacgcgttggggacggcgtacaaggcggtgatggagaacgggtccgccgtggcggtgaagcggctcaaggacgtggacctcccggagcctgagttccgggggtccctcgcggcccttgccgcagtgccccgcgccccgccccgggggtattgcgtgttttccgtcatgccagtgcagccatggcgcggcgtagttgctgtgtcgctgcgaacgaaccaactgtttgctagcaattggttatagcggcattggcagctagcccagatagtcgagtttaaggccagacgtgacaaccatgactggtcctggagaccgccgtttcgaggccagctcctccacccacccacccctgccttgcttggtcctttgaacatctctctatagtttctactttctaaatgctgagcactgaaccggtagtagattcgtggaggcaaagtcccagggcaagttgcgcatgtgagccggtgtccggagttgcaggccgggccggctagggtagtttcgctgatccatgtgacattagttggcgccactgttcctcttcctcgggattccttcctctctcttcccgcgccaattattagcctcgcgtatgtacgtacggtacgggattttaaagaagcattcaaaaagtccggaccgccggccagatggcaccgggtgcgtgagacgtgtaaccgaagcaatctgtacgcgccggagtaattggcatcgaccgtgaattttatcgagcagctgacattcctgtggcgtggtgccgatctcgtggttatgttatgtttcttcctcttggtgtgacgcagggaaccgcgcctccggccggacgccgctggactgggagacgcggtcggcggtcgcgctggcggcggctcgcggcgtggcgcacatccactccacggggcccacggcgtcgcacggcaacatcaagtcctccaacgtccttctcaccaagaactacgaggcgcgcgtgtcggaccacggcctccccacgctcgtcggcccctccttctcgcccaccagggtgtccggctaccgcgcaccggaggtcaccgacatccgccgcgtctcgcagaaggccgacgtctacagcttcggcgtcctcctgctggagctgctcacggggaaggcgcccacgcacgccgtcgtcaacgaggaggggctcgacctgccgcgctgggtgcagtccgtcgtgcgggaggagtggaccgccgaggtgttcgaccaggagctcctcaggtaccaaaacgtcgaggaggagatggtgcagctcctccagctcgccatcgactgctccgcgcagcaccccgacaggaggcccgccatgtccgaggtggccacgcggatcgacgagatccgccgctccagcctcggcgaccggcaggtggccgacagcgccgaaggcgacgagccatctctataaccgccgtagcagtagctcctcccctgatccaccaccacacgtactgtgtcaatctcagtgaatgaaaattgcttagttctttgcatggatcgatattgctcttgcttcacatcagcaacttgtgcatgtatgctttttctctttttcttctcttctttatcttttttttttttggcctctttctcacgggctttgatgattctattctatagcacatgtcactgtactcttttattcttggaaagcaacatttggtgatgccttacttgtatctaagaccagcaccattgccagctgcattagtgctgtattgtttgctatactaaaaaatacgcgcgaaatgaaatgattcgttcatggacc

SEQ ID NO: 154735 - DNA, 354 bp, Zea mays
  Clone ID: MRT4577_72700C.1
ggggggcgccatgccagccttctctcagagtatagcgggcatcccgtgacggagcatcgcgaggcaaggcctctcccgcctgttcctggtggccaaggcctattgcttgatccacgtggccaacgaccacctctgctcagagacctaagaggggggggcctctctttcttttcttttctgaacctggcggactacaccgaggcgatggacaaggtgatctgcgaggctatgtcggttcctgcacgcggacatagtgctgatgatcctcccccgaggacccacgcaaggcactcgataagcaggtcatctacatgcaggtggactccgccacctaccttgtcaaccccgccaaaa

SEQ ID NO: 154736 - DNA, 345 bp, Zea mays
  Clone ID: MRT4577_72701C.1
acatctacagatagacataaaatgaaagcgtgagtcatctgagataattcaacattacaaccagtttacgtggttaataccaagtttattccatatataagagggacaagatactttttaaaagaatagctggagcaatatacttacagactgacttatagcttaataaggtaatgctcatttcaggattggatacatagacaaacaggttatcgtatgatctgatagagttcattccatgtaattcttgatttgtagaccattgactttgggcttagattgaaaggaggcaactatgtgttcctagatcagtgttaaccgtacaaacaccacatccagttccta

SEQ ID NO: 154737 - DNA, 681 bp, Zea mays
  unsure (1)..(681): unsure at all n locations
  Clone ID: MRT4577_72702C.1
gccggccgggccggggaaaatcaaatgaatgtgagaatacacgtcttcacctgatactgctcttctgtttcatctgattgccgaagtagcgaggctatacaactgaggagacatttacaaagctaatacatcatggcaaccaccgcggactcatccctcgactctacctacctattcaaccagcttgacaactaccaatgggacgatgatcaagagtttcaaaacggcttgaaggccattacaggctccaccgaggaccaggcgcaattagaacacctcacgctacgggccaaatgcttttactacgctcgcaagtccggcacaaaggtggacttcgagggctacaaacggtgggttgagaatggaaagggagatgggcaaatcaatggacttgggtctcaatcagtggaagaagcaccagcagtgcaagtggccgcgtcgcaaagcacaacacaggatcgggtgctatgggagatgcaccgaaacccgcttccttcgccgagatctgtgaaatgatcgcagaggggaagcctatacctggaattaaggacatccccggatacgntctggaaagtcagtctacgattagccagggcggcgaagaggacaaagccttgggagaaggntggtggaaatattgagaaagccagttggatggaatggaattgattcgaccatgac

SEQ ID NO: 154738 - DNA, 391 bp, Zea mays
  Clone ID: MRT4577_72703C.1
gcaggacgtacgtacgtacatagatcgatccatcgatcgctagctagctgacgaccatggcttggctacaatctgccggcggcaggggccgttaatgtaaggtcgttcgacgacgcgcaggtgtcaaaactgaagtactgtcactcgtgcggtgcctgtctaactagggccactagacaatgcagtccaggcctgtgatgcatggtgccgttgccgcttgtgcgtcatgatcaatagaccgttgctcatgctacatcgcctgcacctagcgagcctgtcaaactactcgtggtctataccatcatactcttattcatacatctacttttcatacaaggatgtattcaacttacatattggattagggtgcaatgaacgagtaacatgttca

SEQ ID NO: 154739 - DNA, 265 bp, Zea mays
  Clone ID: MRT4577_72704C.1
ggtgctaaatacgttttttgattaaaaccggtctctatatggatcatgcacattcttttgttttcaggggggaaaccccagcgcggcgggtttaaaaatacaccacatttttcaagaccccagaaaaagcaaaacaaattcccaccgccaggaaacaaggggaggctcattccaaaactgcataacaaaaaagcattttacattacccacccgaaaaaccttgacctgggggaaaaaattttttcaattgaaggggcgggaaaaa

SEQ ID NO: 154740 - DNA, 1622 bp, Zea mays
  Clone ID: MRT4577_72705C.1
gcccatgtgcgcagcggagtaggtgggcggggttctcctccactcccgctccagctttctctggcccgatcgatgctacattcccgcggcgagccgctcgccttcctccgcgggccttgggctacccaacccatcgccgagccgcctcgcgcggtccccgctccatcttcgcccggctctctcgcctcggaggacggacagagaaagagaggatgagaagggactccttgacccgcgtatcgcgctcgggctattggaccgaggggtgatcatattgacccacgggtccgcgttaataattttttgaaggggacgccgttcgagagctttttgaatggctcaaggagatgacatcgctagctgatgtatatagggctatagtgtgctgcccttttgacgctttggtacccctttctaaggttaacagagttagcacagtaggcaaaaaaaatttgacatcatgatcgaataagtttgggtcagtgagagaaatagttaggaagcagaagtagatatgcttgatccaggttagtctcatagatatggacttcatgacagcagaatgaagacgagaaacaatacctttggggttatcaaatattcaatgcaagaacttgtaaaagctgtctggactcattcatgaatacatcgaagtttacacttgaaaatgatagcccagccggattgccgccccggataggttgagacattgttgaatagccgtcctaatattagctccaatggagagatcttctctgtcaaagaaagacgcagcaatatcaccgcgatcacgaaaacactggacagattgtacaatctggattggtatagcagtgctgctaagaacgaatgtacggctgccgtggggctgaaatggatgctcaatcagggtctaatgaagcaccatcaagagatagttgaatacttcaaccgaaggggtgtttccgcaatttttctactaagaagaaatcttcttcggcgttacgtctctatattagcaaatgctcatgatagtgccatgaaacagttgaatggaactcataaagctcatgtgcactccaaacatgaggctgaaatccttgctcaatataagccaaccattgacaaaaaaacattgattactgaactaaaacggtctgataagttggcagctgatgctctggtgaatttcaagaacaccaggcacgttgtcctgtactacgaggatgttgtcagcaatcgcacgatgctcatggatgttctggattttctcagattgccaaagaggaagctgttcagtcgacatgtgaaaatccacacaaaacgattgtgcgatcatatagataactgggcagatgttactgattttttgaagggcacaccgttcgagagttttttgaatggctcaagaagatgacatggctagctgatgtatatagtgctatagtgagttgtccttctggcgcctcgtaggtttttttttttgataccatgatgaaataagtatgggccactgagagaagtagttaggtagagatgcttgatccaggctattagtctcatagatatggacttcagagctgtagaataaagattaaaaacaatacatttgtgattatcagatatccaatgcaagaacttgc

SEQ ID NO: 154741 - DNA, 596 bp, Zea mays
  unsure (1)..(596): unsure at all n locations
  Clone ID: MRT4577_72706C.1
cccagcgtccgcccacgcgtccggntaagttggcagctgatgctctggtgaatttcaagaacaccaggcacgttgtcctgtactacgaggatgttgtcagcaatcgcacggtgaggcgctgttgttccgtatcgttctgttgaggctaaaacacactcctcattttcctgaccagcttgttgttcctgtcttcagatgctcatggatgttctggattttctcagattgccaaagaggaagctgttcagtcgacatgtgaaaatccacacaaaacgattgtgcgatcatatagataactgggcagatgttactgattttttgaagggcacaccgttcgagagttttttgaatggctcaagaagatgacatggctagctgatgtatatagtgctatagtgagttgtccttctggcgcctcgtaggtttttttttttgataccatgatgaaataagtatgggccactgagagaagtagttaggtagagatgcttgatccaggctattagtctcatagatatggacttcagagctgtagaataaagattaaaaacaatacatttgtgattatcagatatccaatgcaagaacttgcaaaa

SEQ ID NO: 154742 - DNA, 344 bp, Zea mays
  unsure (1)..(344): unsure at all n locations
  Clone ID: MRT4577_72707C.1
aactagtttttttaatggtgggtgtaacgatcttttttttatttncttatacggacccttaacacaaactaacacatggctataaaaagctcaacaaaaaagcctgcgtacacaaattatccttagcgattggcctgcctcttttgaacttgaaaaaacttatacaaccttaaaaagaccggtgggtgatctaaattccaaccttgaaactactaaatagcaattacaactacgattcttcatgcatacgttatacagggtggttattccttaactcaaacctatagcccccctaatcctgcatagaatatgtgttaaatagtccatttcataacactacacac

SEQ ID NO: 154743 - DNA, 128 bp, Zea mays
  Clone ID: MRT4577_72708C.1
cggctcgaggtattatggaggtctcatctctgcacagtgatgagcagcttgcttcagaggatggcggcagaacagcaagaggtgtgaagccgcttaatagatagagaatcgcctggatgagaattcgt

SEQ ID NO: 154744 - DNA, 405 bp, Zea mays
  Clone ID: MRT4577_72709C.1
gttgtgcactgctacagttaacaagtgttcattcactttgtcttagtgtaccactcagcgggctgaaacctgtcattctcccatcagggcacttagttagaccatcctccatatgcgcacatggcgcatccgcacactaaataggacatgctcatcatctctctttatgtacatatgtcatatgcgcatgctcaaatgcataccatgtctagcgaactagattctaaaacttgctgcacctgccaatgctatagagtacttggataaccactttctatgcctttcggaacatggtttttaaatttgctttaccattactctaccaatcctctccacgtgaccatttaccatctcttataacggtgacagacctgatgacaacattatgattattctccgatctgt

SEQ ID NO: 154745 - DNA, 148 bp, Zea mays
  Clone ID: MRT4577_7270C.1
ttttgtgtagtttttggctattacgagcggcaagaatagaacacaggctgtcgattacgttggaatatgtgtctaagagccatcacttcttggtccaggaggcaaggactaagagcaaattaatacgatcagtagtataataaagtta

SEQ ID NO: 154746 - DNA, 212 bp, Zea mays
  Clone ID: MRT4577_72710C.1
gggcaccaaaaaaaaaaataaccctttaattccaagggaaaaaaaggaaaaacaaaacaggggggaaaaataagggaaccaattaaacccttacgggacaagaaaggccttttgtggcaaaaaactaggaaataaccaaacactgtgggggagcccaaaaacgattggtaatggccctcccagggtaccccaagaaccctaaaaaactgggg

SEQ ID NO: 154747 - DNA, 381 bp, Zea mays
  unsure (1)..(381): unsure at all n locations
  Clone ID: MRT4577_72711C.1
gggggggngggttcaaaaggggcgannncatcttttcccnactctctagaanccagcagtcacaccacgatcgactcagcaggttccgcaaggaaggcgggcgcgaggtcgaggtggtggtgccggggccggcggcggccatgaatgggtttcgctgatccacgctcctgcccgcagtgctgctcgatcatcgttgctctgcgctagcgttgataaagaggagagcaacacactcgtgacggtgatcggaatggatttagttaacacctactccagtgttggggactacaaaaacaagaaatgtcaagatcatcatctatgtctatgtttatccgtatcaccacctgactgggctgcctttacccatagcgataggctcat

SEQ ID NO: 154748 - DNA, 496 bp, Zea mays
  Clone ID: MRT4577_72712C.1
gtgttttattttttttttttttttttttttttttttttttttttttttttttttttttttttttttttttttttttttttttttttttttgctttcacaaccccacaggggaaaaaatttccccttccattgttttttgattggaatgttggaaaaagggcgggtggttgaaaaaaaaaaaaatggtaattaaccccccctttctttttttttttttggcagcatttaacttaaggaaaaattgaaaatgaaacaaaagttggtaaaaccctttttccgttttcctttaatttaaaaaccaaaaaaaatgggggggaaaaaaaatggtttctggtttttgtcatttgaacaaatgggtgttttgaacccaaccacccaaaccgggcgaatggaacaaaagtaataaaccttgattcacctaggggggtagggcaccatttcccccctggggggtggggggctttttttttttttagttaaaaaagtgggcttttcc

SEQ ID NO: 154749 - DNA, 561 bp, Zea mays
  Clone ID: MRT4577_72713C.1
atcactcctatcccgaatcctatccgacctcggatcggctgccatggcaacgccgcggctgcgatagacgacaacgctcgcctaccacccgaagagaaccgggcgctggacctgcggaatcggccgcttccatctcgagcgaagagaccacgacgtcttcggaaagcacggggcgtagtccaccgatcgcatctgcttcacaccaaagactcccgcgtactcgcctacggctgctatgaggacactatacatacgccaacgaacgccagtctcaacatcgctctcgcggcttccacttcagccgactcgtgtatctacgcggtgctctactacacagcccgccaagacgtccaagacaacggacgtcaaaaagaaggaggacaagatcactacgttccagtacacgtaaagaatatggtgccagacgaccgcatcggcgtccaccgactgatcgtctcacaggattgcctacagaaacatctttgtatgatgaagagcactcagaggtcaacgactggtatcactgcgctgtgtttccaagaaaaaaaaaaaaaatatggg

SEQ ID NO: 154750 - DNA, 287 bp, Zea mays
  Clone ID: MRT4577_72714C.1
acttactgcttgctctagctagctagctgctcctggccctatccactaggagacacaagtaggctagcagcaatggcctcggtgacgaggttcccggtcgtggccctcgtcctgctgctcgccgccagcgccttcctggccagcgaggaggcggcgtgcggcgactgcccgaaaccaactcctcctccatcgccaccgccgccgtcgcctaacagaacgccgcgtcctccgccgccgtctagctccggagacaatcgccgcacgaacacgctgcaatctgcctgtgt

SEQ ID NO: 154751 - DNA, 373 bp, Zea mays
  unsure (1)..(373): unsure at all n locations
  Clone ID: MRT4577_72715C.1
ggcgattgggttcctcgaggccggccgggacgaataaagtatcgatcacgacaagatggcgtgcacaaacaatgcgatgagagccttgttcctcctggtcctcttctgcatcgtgcatggtgagaaggaagagtcaaagggnatcgatgcgaaagagtccgggnctggtgggnccttcgacatcaccaagttgggcgcctccggnaatggnaagacagacagcacgaaggctgtgaaggnggaatgggcatgagaatgccgacggcactggaaagtagaaagtcttcatacttaagggtgccgatcttgtccttcaatgccactaaaaggacattggcagggcgacgtgccagcnaggtggatggcaatctgc

SEQ ID NO: 154752 - DNA, 398 bp, Zea mays
  Clone ID: MRT4577_72716C.1
gcctacgtaagctcggaattcggctcgagcgaacactcatggactctttttcttagaaggagccagccctcaactcggcggtatccctcacgggaagcatgctgacccctgtcaatcacttgactgagaggctactcaacattctggtggagaccgaatccaccctcgacaacgccaagggccagaacctctatgtgttccacaaacctacagaccaactaagtctcatgttcacccgaatgctccagaaggatgtaaggaccgttgccaagcacaaggaccaggaggagaccataaatgccttagtgctacaggcttcctgtatcatgaaccactgcgaataaaccaatactaagaataacatcaacctggaggtggagttgtccaataccaatcac

SEQ ID NO: 154753 - DNA, 306 bp, Zea mays
  Clone ID: MRT4577_72717C.1
tttctcttttttttttttttttttttttttttttggttgtgttttttttttttttttttggggggcccaaccgaatgcctttaaagagctcgtcaaataggagggaaacatggctgttaaaaaaaaaacaacaaacctttgcccctggcgatcgatggttcaaaaggggaagtcctaaacggcgtttttttccttccaaagctaattatgagctgttcctaaaacaaaattggggagggctcaaatttcatttttggtgaagaaggcaactaaaggggctttgttggcgggggggaaaaatacatt

SEQ ID NO: 154754 - DNA, 110 bp, Zea mays
  Clone ID: MRT4577_72718C.1
ctgctctctcctctgtcctcatcatgttccagctctcgacagggccacatactcttctggcatatctctcctgtctcttccactgctcactatgttataagcagagagca

SEQ ID NO: 154755 - DNA, 209 bp, Zea mays
  unsure (1)..(209): unsure at all n locations
  Clone ID: MRT4577_72719C.1
cgggccccccctcgagcgtgtacttgccgaagcacgctcaaccttcttgttgaagtgctcgttccggtcattgatggagttttttttttgcagatgccaaggtagtggaactctgactcattgccaatcacatacaggcattcggtggagctagcatcatcgacagaaaaacgccacantatgagcacttaacagtggagcgggtttaa

SEQ ID NO: 154756 - DNA, 860 bp, Zea mays
  Clone ID: MRT4577_7271C.1
cccacgcgtccggagtttccgtctccccgactcccgactccgactgccggccctgacctgccctgcgccgcgcggagccgcggaccgcccgcccaccaccgaaaccctagagcaagcagggatgcacagtccggtcccgctcctcctcctcctgctcctctgcacggccgcggcggcctccgacggctcccagccccaggcgcaggcgcaggcaccgggggcggcacggcgggggatggtgccggtggcccccgcggaggcggagctcggcgccatgaaggcgctcgccctcaacggcacgcggcgccggctcgggggcagcttccagctctgcgcgccctgcacctgctgcggcggggccagcggcgcctgcatcctcgcgccctgctgctactccatcaactgcaacatccccaaccgccccttcgggtactgctccttcacgcccaagtcctgccagtgcgtcggatgcaacctctgagctccgtggccgcgggattcattggattggattggtcagagtgtgtttgtgtgtgtgtgtgtgtgagagagagagagagtggggtggtaacgaatctgtataaaaaattccccacatccttagttaagtggcgattgctattacttctacctagtagtattttgctgtgatcactgctacattcgacttagttgaggaaaaaaaagagaaaggggtctgggttgatctagaggtcactactctggggttttgcttttctgtcgccacacattggatgtctgattaggatgctactacttgttcatagtggtttgttgttgatagctggaataaatatacctgtttaggtgcaaaaaaaaaaaaaaaaaaaaaaaaaaga

SEQ ID NO: 154757 - DNA, 759 bp, Zea mays
  unsure (1)..(759): unsure at all n locations
  Clone ID: MRT4577_72720C.1
cactggagttatactcgttccacagtccactccacttcccatttatccagctagccttcccacctcctccattccaagaagcagagcagagcagagtaaaaatggcgatgccgcgggccgtgtccttatcggtcgccgtgctcctggcgctcctggcgtcggcggagtcgtggctgtacgaggagttcaccacggacggcaacgtgcgcgccgactacaacgcgcaggggcagcaggtggcgtcgctcgtcctcacccagcagtccggcggcggcgccttcggctcccggcaaaagtacctctacggccagttcagcatccagatgaagctcgtccccggcaactccgccggcaccgtcacctccttctacctgtcgtcgggcgacggccccgggcacgacgagatcgacatggagttcatgggcaacgccacggggcagccggtggtgctcaacaccaacgtgtgggccaacggcgacggcaagaaggagcaccagttcgacctctggttcgacccggcggccgacttccacacctacaccatcatctggaacgacaagaacgtcctcttcaaggtggacgacctcttcatccgcagcttcaggcgctacgccgacctgccctacccgggcgccaagcccatgtccgtgcacgccacgctctgggacggcagctactggnccacgcagaagggcaggtcccgtccgactggtcggggccgcccttcgtcgtctcctacgcggctataccgccgacgct

SEQ ID NO: 154758 - DNA, 495 bp, Zea mays
  Clone ID: MRT4577_72721C.1
gcagatgttggtgctggcaccactgctgttgctcccattcaagaagaatcagaggaggaggaagttgatgacactggggttgaagagaaagatgttgaccttgtaatgctgcaagccaatgtcagcagagccaaagccattaaagccctccgcaacaatggttacgacttagtaaatgcaatcatggctcttacaatgtaaactacctcatccaatgaagttccttcagcattatatttgcctctcataccatagttgtgacaccattgtcatgcaattgaagacattatcatctagtccatctgcatactctgccattttatgagccagtgtgtggaatgacatggatttaaatgttttaaagaaccactcaatcaacttgcagactcctgatatggtcaacattgaaattcactcaaactaaactgttttcatatttgttactgtacataattttgatttaaaacaataacaatggtttaaatcagacacctg

SEQ ID NO: 154759 - DNA, 1826 bp, Zea mays
  Clone ID: MRT4577_72722C.1
cctcgaggccggccggttacgtatggatatattggacttttctttcaacctgcattttgaatttgattacagggaactataacactaattcagaactctatcatgtttaacatttttcttgcattgttctatgtttgtcaacttgacgcacttcttagataatataacatcatcttccacagtcaccattagttaggaccttggaccttcatggttccgaaatttagctaagaatggtatacatggtcatgtgatttcaaatagatgttcctatatgccagaaccaactcataagtcataagttttaccttgtgtttttgcaggctatgtgagggcggtgaactattagatcggattttggcaaaaaagaatagccgctatagtgagaaagatgctgcagtggtagtccgccaaatgctcaaagtagctgctgaatgctatctgcgtgggttagttcaccgagatatgaagcctgaggtcatgtaagactgtacctattttccttcccagaacttccttttcaaatcgaacaaggaggattcaccactaaaggcgacagattttggtttgtcagatttcattaagccagggaagaagttccatgacattgttggaagtgcttactatgtcgcaccagaagtactaaaacgacggtctggtcctgagtcagatgtttggagcataggagtcataacctacattttgctctgtgggaggcgccctttttgggataagaccgaagacggtatatttaattaggttctaaggaacaagcctgattttcgtaagaggccttggtcaagcatcagcccaggtgctaaagattttgttaaaaggttactagtgaagaatccaagggccaggctaacagctgctcaagctctctcacatccgtgggtaagagaaggaggagaagcatccgatatccccgtcgacatatctgtgttatcaaacatgcgtcagtttgtcaagtacagccgtttcaagcaattcgcgcttcgggctctggcgagcacccttaacgaggaagagctatcagatctgaaggatcagtttgatgcaattgatatcgataaaagtggatcgattagtatcgaggaaatgcgtcatgcccttgcaaaggatcttccctggagattgaagggtccccgtgtgctggagattattcaagcaattgacagcaacactgatgggctcgtggacttcaaggagtttgttgcggcaactctccatatccaccagatggcggagctcgactcagaaaggtggggcatacgctgccaagctgctttcagtaagtttgatcttgacggtgatggatatatcacgccggaggaactcagaatgcacactgggttgaagggatctatcgagccgctgctggaggaggccgacatcgacaaagacggcaagataagcctgtccgagttccgcaagctcctacggacagcgagcatgagcaacgttcccagcccaaggggccccccaaaccctcaggctctgtgaattccggctcggccactagggaggagcaagcttaggaagttgccatacaatagccatgtgttctttgggttcttcagagtgccatgtgatgtttctggtttttagcatccaggttatgtgtgcagtgcagccccgagtgagtttcgaagtaaatattcagtgctttctttttctttccggaagagtgagaggtggaggtcaaaatggtaggcaagactcgccttcttctttcctttacactgtacagtgatactgaaatatgtacgatttttattataactgttcgtcgcaataaagttatttggagaagtgaggatttt

SEQ ID NO: 154760 - DNA, 2115 bp, Zea mays
  Clone ID: MRT4577_72723C.1
gtggcttcctctcttcccctcctcccttggccccgtctcgtctgctccgcctcaccttcctctccaccttcctccctcccacccctccgcgcctcgccccaccgcgccaaccaaccaacacggcgtcccagcctgcctatataccgctccccccgcgcccccccacgcgcaaatccatatgctcagctcccgcctcctcccatccccggaccccggaccccggccatgggcgcctgcttctcctccgcctccgccgcccccgccggcgccgccgtcgacgagcgccgcccttccaaggagggcgacggcaagaagaggcgccgcgcggccggggcatcgccggatggccgcggcgcccgtgcgcgtggagttcggctacgagagggacttcgaggcgcgctacgaggtcggccgcctgctcggccacggccagttcggctacaccttcgccgccaccgaccgcggctctggggaccgcgtcgccgtcaagcgcatcgacaaggccaagatgacccgccctgttgctgtggaggatgtgaaaagagaagtgaagattcttaaagcacttaaaggacatcagaatattgttcacttctacaatgcatttgaggatgattcatacgtgtacattgtgatggagctatgtgagggcggtgaactattagatcggattttggcaaaaaagaatagccgctatagtgagaaagatgctgcagtggtagtccgccaaatgctcaaagtagctgctgaatgccatctgcgtgggttagttcaccgagatatgaagcctgagaacttccttttcaaatcgaacaaggaggattcaccactaaaggcgacagattttggtttgtcagatttcattaagccagggaagaagttccatgacattgttggaagtgcttactatgtcgcaccagaagtactaaaacgacggtctggtcctgagtcagatgtttggagcataggagtcataacctacattttgctctgtgggaggcgccctttttgtaacagctgctcaagctctctcacatccgtgggtaagagaaggaggcgaagcatccgatatccccgtcgacatatctgtgttatcaaacatgcgtcagtttgtcaagtacagccgtttcaggcaattcgcgcttcgggctctggcgagcacccttaacgaggaagagctatcagatctgaaggatcagtttgatgcaattgatatcgataaaagtggatcgattagtatcgagggaatgcgtcatgcccttgcaaaggatcttccctggagattgctatggtccccgtgtgctggagataatagaagcaagtgacagcagcactgattgatgcaattgatatcgataaaagtggatcgattagtatcgaggaaatgcgtcatgcccttgcaaaggatcttccctggagattgaagggtccccgtgtgctggagattatgcaagcgattgacagcaacactgatgggctcgtggacttcaaggagtttgttgcggcaactctccatatccaccagatggcggagctcgactcagaaaggtggggcatacgctgccaagctgctttcagtaagtttgatcttgacggtgatggatatatcacgccggaggaactcagaatggtgcagcacactgggttgaagggatctatcgagccgctgctggaggaggccgacatcgacaaagattgccatacaatagccatgtgttctttgggttcttcagagtgccatgtgatgtttctggtttttagcatccaggttatgtgtgcagtgcagccccgagtgagtttcgaagtaaatattcagtgctttctttttctttccggaagagtgaaaggtggaggtcaaaatggtaggcaagactcgccttcttctttcctttacactgtacagtgatactgaaatatgagtgcagccccgagtgagtttcgaagtaaatattcagtgctttctttttctttccggaagagtgagaggtggaggtcaaaatggtaggcaagactcgccttcttctttcctttacactgtacagtgatactgaaatatgtacgatttttattataactgttcgtcgcaataaagttatttggagaagtgaggattcc

SEQ ID NO: 154761 - DNA, 343 bp, Zea mays
  Clone ID: MRT4577_72724C.1
aaaaaaaaattggggtaaataaatgattcaaaaaccaatccaaacgaccctggaaaatttccaaaacagacaaaattggggggggggaaactttctgaaaaaaactaactttcccacttcctaaaatcattttaacaatgccaaagggttaacatttaggttttaaaccttttttgttttggaaaaggggaaatacccagatggtccccaataaatagataaaagggcccttgctaacagatttcaacggttcccccgataaccgcaacgttcacaaacaaaatttgggatgatgaaaactaggttttgctaaagccggcccaggatcccttttttttttttt

SEQ ID NO: 154762 - DNA, 574 bp, Zea mays
  Clone ID: MRT4577_72725C.1
ccggccggggatagctagacaatggccgtcgtggccacgatccgccagcggcgttgcttcgtcctggtgctcggaacggccattgtcgtcgccttctccgccttattcggcacgacgtccggcgccgcgctagtgggtgactcgtgcagagcgtcatcgtccacctcggacggaggcggctgcggcaaggggcttcgttgcaccacctgcgtgcctccaccggggacgggtccggccgcgtgcgcgcggaccacgcccgtggacccaaagacacacggcacgggtctccccttcaacaggaggactcggtgaccgaccagctgaagaacggcgtgcggggcctgatgctggatgcctacgacttcaacgacgctgtgtggttctgccactccttccatggtcgttgcctgaccttcacagcctacgtgccggcgctgagcgtgcttacggaggtccgggtgttcctggacgccaacccgtccgaggtggtcaccgtcttcctcgaggactacgcggcgccagggtcactcagcaacaccttcaatgccgccggactgtccaagtactggttccc

SEQ ID NO: 154763 - DNA, 420 bp, Zea mays
  Clone ID: MRT4577_72726C.1
gggcccccccggggagccacctctcaaaaaaaagaaaccggggaagcccccacaaaatggaataaaaaatttccaccggtgtcaaaaaaaaaaccgccccctttatttaaggaaagaaaaaatcgaaccccccacgccaggccaggggaggagaacccgcccaccttttcaagggccccagcagtcttttagaccaaccccccggatgaacttttttaaaacaaaaaaggggacctaaaacccccccaacaagggcacaacccctggttcttctcccccgggggggcacataaatgggggaacccacccccccccccccctgggggattgggggcccccccctaaaaacttggccccacaggggaaaatcaccggccttaagggggggggctaccctctccctaaaatgggccctttttt

SEQ ID NO: 154764 - DNA, 416 bp, Zea mays
  unsure (1)..(416): unsure at all n locations
  Clone ID: MRT4577_72727C.1
aaccacagaacaaacacccgggcagggagaaccaaccccaccccaccccaaagggaaggcaaacaccccccccacccgaagccgccccaaaaaaaacaaaaaaacaaaagaacaaagcgaccacacagcaacccaccccaccccacaggggaggacgcacaaaaaaaagccggggccaccccacaccaacggcgcccccccggaccaacccaagcaagcagccacaaccgcacccgggccaagcaagcacaaaagccangccaccccgccgccccaaagagggcaaacaagggggggaaggaacaaacacaagcccaaaccacccccagcccaggggacggacaacaacaaccccaaagcaaaaaaagggcccccacaagcgagcacaaaaccggccgccgagagcggggaccccg

SEQ ID NO: 154765 - DNA, 1597 bp, Zea mays
  Clone ID: MRT4577_72728C.1
ccggccggggaggagcgagctaccccggccggggtgggtcgtgggcgtccctccggtccaacgcacgccgtacctgccacaacaggaaagcttgtccacgaccttccttccctcgatcatatcgggcgtaggcatagggcggaacgggacgcgatagctagacaatggccgtcgtggccacgatccgccagcggcgttgcttcgtcctggtgctcggaacggccattgtcgtcgccttctccgccttattcggcacgacgtccggcgccgcgctagtgggtgactcgtgcagagcgtcatcgtccacctcggacggaggcggctgcggcaaggggcttcgttgcaccacctgcgtgcctccaccggggacgggtccggccgcgtgcgcgcggaccacgcccgtggacccaaagacacacggcacgggtctccccttcaacaggtactcatggctgacgacgcacaactcgtttgcggtggtaggcaccaagtcgccgctggggtctgccatcatctctccgcccaaccaggaggactcggtgaccgaccagctgaagaacggcgtgcggggcctgatgctggatgcctacgacttcaacgacgctgtgtggttctgccactccttccatggtcgttgcctgaccttcacagcctacgtgccggcgctgagcgtgcttacggaggtccgggtgttcctggacgccaacccgtccgaggtggtcaccgtcttcctcgaggactacgcggcgccagggtcactcagcaacaccttcaatgccgccggactgtccaagtactggttccccgaggctcaaatgcctagccctagtaagggcggcggtgactggccgctgctcagggacatgatcgccgataaccaccggctcatcgtgttcacatccaagaaagggaagcaggggacggaggggctcgcgtaccagtgggactacgtcgtggaaacccaatacgggagcgagggcatggcggatggcagttgcccaaagcggaccgagtcgaagcccatggactctaaggcccagtcactagtgctgctgaacttcttcaccagcaacccgagccaaagctgggcctgcagcaacaactccgcgccgctcatcagcaggcttaacgcctgctaccacgcctccgccaaacgatggccaaactacatcgccgtcgatttctacatgaggagcaacggcggcggagctcccctggccaccgacatcgccaatggccgcctccagtgtggccacgacaacatcgcacactgcaagatttcttctgcatcggcaccggcacccgcttcggcttcttcaccggcacccgcttcagcctcttcaccgtctcctgccccggcaccggattttgccgccacttctcccgccatctcatcgtctcctgggccggcgcctgggcctcttaatagctactactagtagttaaaaggcggacgcgacaaatatatgtatgtatggaaaatattttaagaggactggtccttgatgaaagatcgactagagcacaagaaactcaatgacactcttcgaggatgtctctctcaaggcactattctctagttgatcattttcttaat

SEQ ID NO: 154766 - DNA, 315 bp, Zea mays
  Clone ID: MRT4577_72729C.1
ggcacacatcaaaaaggactgtcccattgtttttaacaccaaacaatggttttataccaaccccccttaaaaaaaaggaccccggcacaccgttaatcaaaaccttttagcgttaaaaaaccatggttggattactagcaacatggatgccttgaacaaatggaaatgggggaggggcagctcgtgcatgagggagtgggacattacaggaagggcctcacgcaccaggactaagtatctggtcgcctcctcgaggattttcggggagcgccctggcttgaccatggccctaactgtgtcagggtgcttttccag

SEQ ID NO: 154767 - DNA, 435 bp, Zea mays
  Clone ID: MRT4577_7272C.1
cgactcccgactgccggccctgccctgcgccgcgcggagccgcggaccgcccgcccaccaccgaaaccctagagcaagcagggatgcacggtccggtcccgctcctcctcctcctcctgctcctctgcacggccgcggcggcctccgacggctcccagccccaggtacgtcacgccagccgccagcgtcttctcttcccctatcctcgcttggctgcctcgaccccccctgccgcaatcgatcccagctcacgttgcgcctccgcgcaggcgcaggcaccggcggcggcgcggcgggggatggtgccggtggcccccgcggaggcggagctcggcgccatggtggcgctcgctctcaacggcacgcggcgccggctcggtggcagcttccagctctgcgcgccctgcacctgctgcggcggggccagcggcgcct

SEQ ID NO: 154768 - DNA, 474 bp, Zea mays
  Clone ID: MRT4577_72730C.1
atggcttcgctagctcatcccgaccgcttccagactgaggcggcgctcaacctggtgcgcggcctgcttgggtggagcgcgctagggctcgccggaaggatctgcgccggcgctgctcctctcggcgaccttgccgtcggggagttcgtgctattcgtctcctacatctcctgtgggttggcgctgccgatctcgcctttcttcctgctgctgttggaggagtttgggctccagcttcagcaccttacaccccactccatcctccaagtggccatcttcgtccacctctgcgagatgttcataggggtggcccctgtacttccctctttcgccacttcttcgtgctggtcaagtctgggaaggacaaggaccatctcggtgcctactacttccagacgaggccggattcggccgaagcctacatctccaccttcggcggcgcaaggtgggaaaactggcgcggtgactgagtga

SEQ ID NO: 154769 - DNA, 175 bp, Zea mays
  Clone ID: MRT4577_72731C.1
tcgtacggctactcaatttgtgcacatgcttgtacaggatgtgaacacctgaaccatcgacgctctgggacagctaatgagttgttcacgctacgacgggctgattgggcaagacacagtgacctgcatgaatatggtaatacgtctacgaatgtatgcagccacttgcacaatg

SEQ ID NO: 154770 - DNA, 182 bp, Zea mays
  Clone ID: MRT4577_72732C.1
gtcactcttaagccgccagtcaagattagttcctcgtatgtggagatatcttgcgggtatggtagaaccagaagaaagcctggaatttattttttcactagaaacatgggattaaactagtatttatttagtacaagacatttattatatttctcaactatggttctgttaaccaaatacta

SEQ ID NO: 154771 - DNA, 304 bp, Zea mays
  Clone ID: MRT4577_72733C.1
agcttggaggcggagggccaggcttgagagacctaatacggagattgccccgggggggggggaggtccctgttgtatgtcagagcagccagcacccctggatctacgagaagtaaacatggaaagtttcacatcaaaccttgagagccagaggaagcatgtcaccatttgtgctgaagcaatgttatacaaatgatcatgatctgaatcttggaaccttatttcaatggaccaaatttctttctttgccgaatataaagaacactcaaattatttacaaatttaaaaaacgtaacagtaataag

SEQ ID NO: 154772 - DNA, 310 bp, Zea mays
  unsure (1)..(310): unsure at all n locations
  Clone ID: MRT4577_72734C.1
aacccacccctcccgcttttgctaacccanacaacccaccacctattatttttctcattcacttctcactcaagcgtcttatattcgcccaactacaacaatctctcaaccataaaatacctcttatacatcctctaaaccaaccttccccttacattaccaaacactaaaactacattcttttatacaaacaattactttaaccccttttacttcctctcactcgctcctccattaataaaccataatactaaaatccctacctataaaactcctgttcaaccatattataaatcctcataaccctaac

SEQ ID NO: 154773 - DNA, 403 bp, Zea mays
  unsure (1)..(403): unsure at all n locations
  Clone ID: MRT4577_72735C.1
tctcttatttctgagacttcccaggcttcacacagaaacgtttattattgacctatgccgtctagcatgtctatcggacggcctcaccaatgagtggggtgctgtggaaacgctgctgagttggcgaacgcggctggttgcttggcagcgggtgttgtgggaggaagagggtgccggccgtacgcgcacctggctgctacaacggcggcgtctgcggttgtgtcaggaaggtagcgcggctcacaccggctggctggctgagtgctaggctttgtcgctgctgtagatcggcaggagatttcaatgctgccagttgcctcgctggaggaaattgctggcggtctgcagcaggtacctggctgattggtgcttgctgctgttgcnggtgtnacgctgagctcac

SEQ ID NO: 154774 - DNA, 254 bp, Zea mays
  Clone ID: MRT4577_72736C.1
catttccgcacggaaaccggttacaaccgctctaaggtgtgggtctcttccggctcagtatcgcggcggcggctgcgcttgcagatgccgatccgacgctattgggcgagatctcgcattgcctgatcatctacctgaatcacgtccgctagaagagcaggtaagacgcacagttgagaaggcattaggcctcgtgctgacaggatgtgcggtactgcatgtgcagcgactgacgacgcgctagctgagaggct

SEQ ID NO: 154775 - DNA, 520 bp, Zea mays
  Clone ID: MRT4577_72737C.1
aaaatcgaatgtgatacgtcctctaagaagaaaaaacaacaggctataagtttacagatgtggtgcccgtgtgccaccaagcacgattaccaggtgtttagggtctatatcatgtgctatcattcccatgtgggcgactatctctcctttagcaacttaagtgactgaaaaccaatagccaactcagaggatacatctacctcctgtgtaataggtgtagtaagtggcataaaaacaaaagctagtcagcatccttagcatctgatatttcgatgtccgatgctttgctttcaggaaaacattcttgatcgtccacctcagtggcacaatcaagcagctcgtctgatccagcaatctcctcgctgggtttctctttatcccctttggggattttcagcccaaaacgcaatgaaatcctctcaagcagttctttcccatctagtggagaaaccatgacacacaagttggtctttcctttccagcaaacgatggcaatagctgagggatctgtagctatgga

SEQ ID NO: 154776 - DNA, 372 bp, Zea mays
  Clone ID: MRT4577_72738C.1
gtaataaaagcaccttttttctttttccattttattttttttatttttttggaaacgaacaaacccgggtcctccgattccatggcattacccaaacgggtttggattacaaaacaaagtccggccctgtttcttatggggaagcagcccttggtaactgggtacacgttccaaccccctgactggaaaaaggggggaacaaacacaagctttcagacgaaacatacaattcagaaggcgaggggggggggctccaaaacgaacaaaaaagtcccggggctgccccttttttttatttcagctgcctattttaacagggggggggggcatttgttttatgatatttggagcattgtttatttttttaaagac

SEQ ID NO: 154777 - DNA, 263 bp, Zea mays
  Clone ID: MRT4577_72739C.1
caatcagaggccccttttcttttacctttttcttttttggaccccccaaccggggccaaaagggtgggccgggggaattttatttacccaaatgaaaaactttttcggttccatggggccctgggggaattggccgaaaaaacattaattgcccgcccaatttgggaggcttcgattattgaccttacttatgaaccggagcccaaacccaaaaaatatggagggattcaaggagggggaaaagaaaataaaggcccgacccc

SEQ ID NO: 154778 - DNA, 230 bp, Zea mays
  Clone ID: MRT4577_7273C.1
gggactgacgaaaatgccatagattgattgatggatccaccgttcatccatacatttagggggggttccatacaggatatcctatgtcgggcaaaggtgcacattaattcgatagtaccgctatacttcagggggctgacaatcatgctcttctcctgatcctatttgccttacctaaacataacaactggggctaataatataatctgcaaagatagatcttagtacaa

SEQ ID NO: 154779 - DNA, 263 bp, Zea mays
  Clone ID: MRT4577_72740C.1
tatatttttttttttttttttttttttggtttgttatgaggatcataatagtaaaaaaaaactctcttgtctgggttaacaatcagaagccttgctatgacgagttgaagttgtttggcttgggaaatattatgacattgtcaggtaatggtacatctcattttaatagtaacgaggtgttctggactcccgggactaggctgtttaagtgaacttattttacgatttccttaagagattttgcttttaaaaacctcaagcat

SEQ ID NO: 154780 - DNA, 384 bp, Zea mays
  Clone ID: MRT4577_72743C.1
ttaataatttttttcttataaaagctcaccacggggggtgttgtgaataagaccggggaaccacatacaatgcaaactactacataacccaaaagaaatctacctgagcccgtggatgtccaatacaatgaagagggccacttttaatcataccatggtagaaaaccccccccacatatcttttcccaacctcctaccagcgcgtatttaaacaagctctaaggtcttacaaggtgaacaccactaccttacagatttaaagcagccctagttttaataagagccaaaaactgggattaaccatggtaacaaaaggtcccaacacagaagcgaacttcaaaggataaatacttaaccttaggtttttagaacattttggggggg

SEQ ID NO: 154781 - DNA, 813 bp, Zea mays
  Clone ID: MRT4577_72744C.1
tcggccgtaccccctagtactgcccgggtctcgctttcctttcccgttcaccccaagcccccaacctgcgagctgcgacaagttcgtctctctcgtggccacgactggccgccgcccccgcctccgtcccctcgcagattcccaggttaaatccgccagggggaaatctccatcaagtggctcgtgctaattatgcgatcttcatgggctgactcagttgcgaacgccgaggaatcggcgcccgcgactgctgctgctaatggctctgttgcaactcatagcacctcgcgccctacgcgcagctcctacgtgcctccacatcttcgtggccgctcagctggtgctgctgttgaagctcaagcaggcttagtagcaccagcacaaggtggaccactgccattggctgctgcacaaccttctggtcagggtgctgctgttggtggccctcgctgggctggcattgtgaatggtggtggtggtggtggcagcattggtgctcctcgccagggccatggtggcggaggcgggggccgtggtgcttggaactcccgtcctggtggttgggaccgcagagaccgggagccagatccgtttgcgaaagccgaggctgaagaaattgatttcgacggccaggagaatactggcatcaattttgatgcctatgaagacatccctgttgagaccagtggccatgatgtgcctgcaccagtcaacacatttgcagagattgatttgggtgatgcattgaatgacatattccggaggtgcaagtatgtgaaaccaacaccagtgcagcgttacgccatcccaatc

SEQ ID NO: 154782 - DNA, 1794 bp, Zea mays
  Clone ID: MRT4577_72745C.1
agaaggaatgaaacttgaaataaagttgaacatatcaactgccaaaatttgtacaggacaagtgaagtttgaacatctagagtagacaccagttttaattcagttctacatatcaacagatacagatgagaaatcccccttgcacaaggcaggagaacgaacgaatggaatagactaacttaactaggtacagaaatgaacacgtggaataaattacaagtgaacattagaatggtacagtgcaagaactaacaaacttcaggcctcagaactggcatatatcaactggacgtcctctggtatatgtgctttgttcttgggtctacaattaggcccctcccaccattcacctccagatcgtgctgaaaaacaaagtcaggaattgtaagttgctcgcgtggtacatatctgaacagctgcacaagcctatccacatatacaactttcttccagacctctccatctacaaacatttgcattgccaaaacagctgttctcaaacccaacgttgggtggagtacataaattgcatgaaggttgcgctgatgtttccgtcctagtatttgttgtaaccgcttcataaatcctaaatctggttgcggttgtaatgatgctgcggagtggaaatatacaattgtatatggcttctgaatcaaaggttcaaactccttcactacatgaagaacaaaccgttcaaggtcaaggcatcgaagaagaaagtgtgcaccaacaaccaccataaccgggcgtccttcaatatcaactccaccacgataaattattttcatttcagcaatctctgaaagattaagagaatttgctttagtgaggtatcgtgaatgaagtgagtattcctctgctgcagataatgaagggcaacctagatccccatatccaaataacctagcataattaaatcccttttgagcttgagcggatttttcccactgctcccttgcgccgcagatctggatctttaattattgacataaatgaaggatccaagtatgaatccaacttgaaagaacgcgtccgcaatgccgatccagaatgtgaggccgccgtagttctgccctgagaggttgaacgccaggtagagcggccacgcgagggtgagctgcagcgcgatgtacaccagccggccgaccgggttgccgaacacgagcggcgtgtaccaccgcagcgcgtcccgggtcttggccacgtacacctcgtcgttctccatggagccggtgttggcgtggtggcgccggtggctgtacttccaggcgaagaagggcgtgagcagcgcggagtggagcacgaagccgacggcgttgtccaggagcgggtagtcggagaaggcgtggtggccgcactcgtgcccgatgacccagacgcccgtcagcacgctgccctgcgccgcccagtagagcggccacgccacgaagcggcggagcgcggcgctcgggagcgccgggatgccggcaacgccaaggtacaggagaccggccgcgatggcgaggtcgtggaggaggtacgagaaggacctgagcgccgagcgctggaagcagtgcggcgggatggccctcttgatgtcccccagcgtgaacggtggcctgtccaccggcgaccgccgcacaccgcccgagtggctcttcttcctgatctcctccgccgttgcgacgccgacagccatgctgctgactgggactgagaaacacacgatgggcttccctccctgctctacttgtctctgcgctggtcaatgcacagcgagaggcttggcagcttcccggccggacatgttactaa

SEQ ID NO: 154783 - DNA, 728 bp, Zea mays
  Clone ID: MRT4577_72746C.1
atgttgcccatgtgattaattttgccctcccctaatgatatagatgattatgttcatcggattgaaaggaccggacgtgctgggaaatctggtcttgcgactgcattcttcaacgagagcaacactacgcttgcaaggccattgagtgatctcatgaaagaggcaaaccaggaggttcctaagtggcttgacgggtacgctgcccgctcagcctacggaggtggaggtggtagaaaccgcagacaaggtagtggtgccagatttggtggccgtgatttccggcgagataggggcagtggtggttcctacggagaaggtggtggtggtggtggaggatatgggggatcatcaggatacggtggtgcttatggcggcggcggcagcagcggctatggtggtggtcagagtacgagttcttgggactgaactgaattctggttagaagtgaaaaatgggtcaacctgttgggtgtgaaaaatgggtcaaccgttatcgattagtccctgttggatggagcgaatgcctgaaatttgttgcttgacttgcgagtacggtgtcaggaggtttcccagtgccttaatcttgcattttgtgttgtactagggattgcttatgttattatctgaattggtggtttcttttctacccccaaaaaaaaaaaaaaaaaaaaaaaaaaaaaaaaaaaaaaaaaaaaaaaaacaaagaaaaaaaaaaaaaaaaaagcggcc

SEQ ID NO: 154784 - DNA, 436 bp, Zea mays
  unsure (1)..(436): unsure at all n locations
  Clone ID: MRT4577_72747C.1
agaaccagaagcacggcgagacagacagcggggaaggcaacgcccaaggccccaggcacagaanccacccgcggccgaagacagcgaccaggcgcgcaaagcacccaagggaggagcacgaacgaggcgcgcaccagcaccacccccggacagcgggacgccgcgcaacgccggaccagccgacgagccaacgccgagggcaaccgagaggcagcgccccggaccaccacggacgaaaccgccggcgaanccgagagggccgcgaaccgagggacagcagacccagcggagcgcgacgcggcgccggccaacgaggcaacccgaaaggggaagcccagaaaccgagggcgagacgacgagggcagcacgcgcacaacccgcgcagagcggccacaccagaaagggaaaagacgagccggcaaacgcgcgggcccga

SEQ ID NO: 154785 - DNA, 870 bp, Zea mays
  Clone ID: MRT4577_72748C.1
ttgggtacctcgagcccggccggacctcggctctttctcgctttctttctcccgttcacgccggctctacctgcgataggttcgtctctctcgtggcaacgactggccgccgccctcgccctcgcccccgcccccgcgcaggttcccaggtcttcgccggtcccttcgccgccaaagagcacccactaggttaaatctgccagcaggacatctccatcaagtgactggtgctaattatgcgatcttcatgggctgactcagttgcgaacgccgaggaatcggcgcccgcgactgctgctgctaacggctctgttgcaactcatagcaactcgcgccctacgcgcagctcctacgtgcctcctcatctccgtggccgctcagctggtgctgctgttggagctcaagcaggctcagtagcaccagcacaaggtggaccactgccattggctgctgcacaaccttctggccagggcgctgttgttggtggccctcgctgggctggcattgtgaatggtggtggtggtggcagcgttggtgctcctcgccagggttatggtggtggtggtgggggcggaggcccgtggtgcttggaactcccgtcctgggtggttgggaccgcagagaccgggagccagatccgtttgccaaagccgaggctgaagaagttgacttcgacggccaggagaatactggcatcaattttgatgcctatgaagacatccctgttgagaccagtggccatgatgtgcctgcaccagtcaatacatttgcagagattgatttgggtgatgcattgaatgaaaatatccggaggtgcaagtatgtgaaaaccacaccagtgcagcgttacgctatcccaatctccatcgc

SEQ ID NO: 154786 - DNA, 530 bp, Zea mays
  Clone ID: MRT4577_72749C.1
attcggctcgaggatgtgttatggtccaacaggaagcgtccagggcacctgtactttgagttctttgaagtaggttcaccttatggaagggttcctctcattgacaaggtttatgaactatcccagggctttcctggattgacatcactgaagagtgctgagctttcgcctgttagctggatgtcagttgcctggtatgatcaaatttatgtctgctgtttgtgttcttctgaaagaacaaaaaatagctgatgaaatagttctgtaactaagaccattcttgtttagctttccttctgcaaatagttttatagatatattgaatgaagcagttgcatacggcactaaacatgtgccttatagcagtctgatgacagatttgagtgctttgattatcttttttttctaaatagtaacccttatttctaggttcaaatcgattcttggttgattttcttctcggtgatgatagcaattagcattatcattcatgtttgtctgctactttgactaggtaccctatataccac

SEQ ID NO: 154787 - DNA, 424 bp, Zea mays
  unsure (1)..(424): unsure at all n locations
  Clone ID: MRT4577_7274C.1
gggcccttggtcactttgctttncccggtgatggtcgtcgtaatcagtacgggttcacatgcgctaggaggtggattntggcttggtgaactatgtatgccggtttgggaatttngaaggataaactggtgtttggagtatgctctggaaaacggcggctgccgtggaggaggcgaatgagaacttgtaaaagacttctgtgtatcctgnggcgcacaatgaatccattgaacaaacctgatgtgttgaagcttaccggagggcgcgggcctgctttgggttgcgcggtgctatattttgctctngacgttcggtttgggctgacctttctggtttggatggtgagacttgttgtggatgtcgtttttgaagttgggtgcggtggatgattggtgctgatgatctgcttcgatggttacgatga

SEQ ID NO: 154788 - DNA, 248 bp, Zea mays
  Clone ID: MRT4577_72750C.1
gagtactcaagtcggcggccgccctgggaggtttggtggttgatcgaagagagaagctcctataacagaaccagcacggtcggaaacgacatcacctaggatgcaagctacacactgttgttgctgtcgttgccgttagcacacggttgttgatcaggccaccatctaggtgcgcacgtaacaggcacggctacgctgataacgcagacgtagaagacgcggctaaggctaacatcttcttgtgcgaa

SEQ ID NO: 154789 - DNA, 3474 bp, Zea mays
  unsure (1)..(3474): unsure at all n locations
  Clone ID: MRT4577_72751C.1
gattaaggcactgggaaacctcctgacaccgtactcgcaagtcaagcaacaaatttgagggagtgcgtccagcccgctgggtggtgcctctccggcgggctcggtctcgctttcctttcccgttcaccccaagcccccaacctgcgagctgcgacaagttcgtctctctcgtggccacgactggccgccgcccccgcctccgtcccctcgcagattcccaggtcttcgccgctcccttcgccgccaaagagcacccactaggttaaatccgccagggggaaatctccatcaagtggctcgtgctaattatgcgatcttcatgggctgactcagttgcgaacgccgaggaatcggcgcccgcgactgctgctgctaatggctctgttgcaactcatagcacctcgcgccctacgcgcagctcctacgtgcctccacatcttcgtggccgctcagctggtgctgctgttgaagctcaagcaggcttagtagcaccagcacaaggtggaccactgccattggctgctgcacaaccttctggtcagggtgctgctgttggtggccctcgctgggctggcattgtgaatggtggtggtggtggtggcagcattggtgctcctcgccagggccatggtggcggaggcgggggccgtggtgcttggaactcccgtcctggtggttgggaccgcagagaccgggagccagatccgtttgcgaaagccgaggctgaagaaattgatttcgacggccaggagaatactggcatcaattttgatgcctatgaagacatccctgttgagaccagtggccatgatgtgcctgcaccagtcaacacatttgcagagattgatttgggtgatgcattgaatgacaatatccggaggtgcaagtatgtgaaaccaacaccagtgcagcgttacgccatcccaatctccattgctgggcgggatctcatggcctgcgcacagactggatccggaaaaaccgccgcattctgttttccaatcatcagtgggatcttgaagtcaccaaagccacaccagaggtcacggagtacaaggaccgcttgccctctagctctgatcttatcacccactcgtgagctttcagtccaaatccatgaagaagcaaggaagtttgcataccagactggtgtcagagttgtggttgcatatggtggcgcaccaataactaaccagctgagggagttagagagaggtgtggaaatcctggtggcaactcctggtcgcttgatggatctgttggagagggctagagtctcacttcaaatgataaagtatttagctcttgatgaagctgatcggatgcttgatatgggttttgagccacagatacgtaaaattgttgagggcatggacatgcctcaacgtggtgagaggcagacaatgttgttcagtgcaacattcccaaaagagatacagaggatggccgcagatttccttgctgattacatctttcttgctgttgggagagttggttcaagcaccgatttgattgttcagagggtggagtttgtcctcgcttcagacaaacgaagctacctcatggatcttctgcatgcacaaaaggctaatggcacacatggaaagcacgctcttacattggtctttgtggagacaaagaggggggctgatgccttggaagacgggttttttagaaatggacatccatggactagcattcatggagacaggacacaacaggaaagggagcatgcccttaggtccttcaagagcggagcaactcccatccttgtggcgactgatgttgctgctcgtggtcttgacataccacatgttgcccatgtgattaattttgacctccctaatgatatagatgactatgttcatcggattggaaggactggacgtgctgggaaatctggtcttgcgactgcattcttcaacgagagcaacactacgcttgcaaggccgttgagtgatctcatgaaagaggccaaccaggaggttcctaagtggcttgagggatacgctgcccgatcagcctacggaggtggaggtggtagaaaccgcagacaaggtagcagtgccagatttggtggccgtgatttccggcgagataggggcagtggtggaggatatggtggtggttcctacggaggaggtggtggtggtggatatgggggatcatcaggatacggtggtgcctatggcggcggtggcagcagcggcggcggctatggtggtggtcagagtacgagttcttgggactgaactgaactctgattagaagtgaaaaatgggccaaccttttgggcgtgaaaaatgggtcaaccgttatcgattagtccctgttggatggagcgaatgcttgaaatttgttgcttgacatacgattaatcttgcgttgtgttgtgctaagggattggcttatgttattatctggattggtggtttttctacgcctcatgcttgtgctgtaacgtttcacaaaaaaaaaaaaaaaaaaaaaaaaaaaaaaaaaaaaaaaaaaaaaaaaaaaaaaaaaaaaaaaaaaaaaaaaaaaaaggagaaaaaaaaaaaaaaaaaaaaaataaaaaaaagaaggggggcggccgnttaaaagatccaaagttaccccaaaattcaattcaaatgtccaactttttaaaatgggggaactaaaaaaaatctgccggcccccaattaaaaaggctggaaggaaaaaaacctttcgctaaccaaattaaaacctttgaggccaaaaccccttttcctaaccaagagtaaaaaaaaaaaaagaggcacggccgggaaaactaaaaaaaaaaaaaaaaaaaaaaaaaaatgccaaccctctggtccggtgctgctgttggtggccctcgctgggctggcattgtgaatggtggtggtggtggtggcagctttggtgctcctcgccagggccatggtggcggaggcgggggccgtggtgcttggaactcccgtcctggtggttgggaccgcagagaccgggagccagatccgtttgcgaaagccgaggctgaagaaattgatttcgacggccaggagaatactggcatcaattttgatgcctatgaagacatccctgttgagaccagtggccatgatgtgcctgcaccagtcaacacatttgcagagattgatttgggtgatgcattgaatgacaatatccggaggtgcaagtatgtgaaaccaacaccagtgcagcgttacgccatcccaatctccattgctgggcgggatctcatggcctgcgcacagactggatccggaaaaaccgccgcattctgttttccaatcatcagtgggatcttgaagtcaccaaagccacaccagaggtcacggagtacaaggaccgcttgccctctagctctgatcttatcacccactcgtgagctttcagtccaaatccatgaagaagcaaggaagtttgcataccagactggtgtcagagttgtggttgcatatg

SEQ ID NO: 154790 - DNA, 247 bp, Zea mays
  Clone ID: MRT4577_72752C.1
attccatgtcgcatcctttccgttgatccgattcttacctgttgatgggatgcgatttggatttggggcgccgcgcttttcgtgagactggtgactcagatactcagatgtcgatcttgctccgcacctagttgatagcacctccttgaatgggatataatgtggtttttcagttaccaacttgcagttctactactccgcggtttggtaaatttggtatagaaactacattaagcctaaggttgtg

SEQ ID NO: 154791 - DNA, 538 bp, Zea mays
  Clone ID: MRT4577_72753C.1
cacacgtgaacgacttaccatagccttcgcggagtttggtgaagttctgcctgctacagttgcgaccgaacctgtcaatgggtttctctaagggcattcatggcttgtcgtctagggctgcctaccgacacgcaggaggcagaacaagggtaataaaaagaaaggaggaaagatacttgatggcagggccatttttgtagaatcgctaaacccacaccaccgaccgaggaaacacggatgaattcaaacacccagcagatatggggagctgcattaagctactggggtgctcagtaggatgacaggatgttgttagagcccctttccttccccagacctggggcttgtagccgaaacggagggatgaatttccagtgtgagtgtgtcacaggtgtgaacgccttatggtgtaccaaattcctaccgagcctggaggggaacgtatgataacagccacggctttcacatgaattgtgtactggggtaattgaagatctggattccggaccaaaactacagcatagatgtctacaatttg

SEQ ID NO: 154792 - DNA, 621 bp, Zea mays
  Clone ID: MRT4577_72754C.1
atagaatttaggttgcgcaagtaaggaaacttgagtttggaagaccgacggccgctgtttttttttttttaaaattgtttgccttttttttttttttttttttttttttttttttttttttttttttttttttttttgcagcggaaatcttattaccaaattttacaggttacaaaaattttacattattttatcggagtgattacaaaagtataagtttgaaatatatatgctaactcaagggatcatcctcaataagaaatatagaagggttacttagactaataagaaggccgagcccaccggcacttaacaccattatcagcagcacaaagctatgaccttcgttgcaaagacggagttctagatccctctattaaaccccagttagatggctcccatcacttgatgagcagtcactgaagcagactcctcttcagaaaccacttcttgaatttcatcttcttcttcttctgggaattctagccacggtgagaagagcactcgggttgcgtggtcaccatggtcacatgatgcactcgctggctgaagcaaactaggtagctgtggggaaggttaacatcagcaaaaccccaggatccccacgcccacatagtggac

SEQ ID NO: 154793 - DNA, 520 bp, Zea mays
  unsure (1)..(520): unsure at all n locations
  Clone ID: MRT4577_72755C.1
gcagcaccaagaagcaccattttgtgccttaggatttaacttacaattaagcctgtcgggggtgacagcacccatggatccgtagtccatgctggatgatgcatgggggtgctggagccgaagatgaacacatcactaacaactgtcacagagcgtcctttaattaaaaacacagatgggcgacaacaaacaccagacgaacgaagatcaacactctggactagggtaaacaacacggttgcgaacaggataacttggccgtgcgggccctaccgatcaggttctccagttcccgtaggagttgccatagccgccgccactgttggcaccagaagagccgccaccaccaccaccgtagccgccgccgtcactaccgttggctccggcaccagcgcaaccgccgacgccatcacggacccctgcatcgacgtagccgactcctacacggacactacacgacccgcacgtgncgtctactgcactggcgtagagggactgggcctcattgacagagatgttg

SEQ ID NO: 154794 - DNA, 263 bp, Zea mays
  Clone ID: MRT4577_72756C.1
actactgcaagacatactcgtgggatatgctgagtgatagtggctcaggcgactatcagcttaggtcagggggggatacatcggaatcagtccatcaagcacctaactacagaaaattctgcgcgtatgggcgcaaataccaaaagagtctgtggcatatctatagatcgctcgcatgatatgttgtatcgaatgcaatattgctcctaaagataggccaggccgactccaacatgctctggcgccaaaacggatgaccacta

SEQ ID NO: 154795 - DNA, 402 bp, Zea mays
  Clone ID: MRT4577_72757C.1
cttaaattataactgaaatgtaacagtgagacatcatcactaaaaaattatgacttgcgtaataatggctttaatttatatatatcttttgcttaaaaaaaaaaaaaaaaaaaaaaaaaaaaaaaaaaaaaaaaaaaaaaaaaaagatagtggcgttctaacgcatggaaatttcataggttcattctttgccagcgacctctctccttgtgcttattgagctatcgcagttgctgtggcctgatgggtgttaactgttaaatcacagcaattacttgctgtattgtgggaactctacccatggtaaggcgtgcataatcgctgtgcaaagaacctttttacactatccactatattatttatatcgtacaaaataaaaagaaaagcgggctgttttatctt

SEQ ID NO: 154796 - DNA, 441 bp, Zea mays
  unsure (1)..(441): unsure at all n locations
  Clone ID: MRT4577_72758C.1
gggctgatttatgtgcttgactgtcttagtgtttctgttgctggtagcccggtccctgcatctttgtcattgagtcaggaggtacgattcctgttggcttaatacgggcaagatatgcggcacgggagtcgggtgtaagtctaagatttatagaaggaattagaggcgggtcgataaagttcataagaagagttactctggtaatgagcggaagaaatttcccgtcgggctactctatgtaaagggaactgcttccgagaagactggtaccgaggtcaagtagttcaatctcgtcacttgcaagcgtgtctgcgcatagtcggcgaagaatgggaagaagaccgtcgttcccgcgttaaatgacggccgtccgaatcatactgaggagaatgacgacgcgtcgaccgtcggacctngctgcaagggttacgtcgcgggaga

SEQ ID NO: 154797 - DNA, 321 bp, Zea mays
  Clone ID: MRT4577_72759C.1
cagaccattaactatatgctactccagagcgcaattgaacccgatcgacaccatgagggtggggcgcgttgccctcgctctgctggctctcgcatggagcgccaccttcaaacatacaagcggcggctgtagctgccagccatcgccggcggttcatataccggcggcggtgcatatgccaactccggatcacctgacaccttcggagcatatacgaccgccggtccacctgccgacgccggtccacctggcaccgtcagtacatgtgccgccgactattaatctgacgccggcaccatgccactaccctactcaaccggg

SEQ ID NO: 154798 - DNA, 4556 bp, Zea mays
  unsure (1)..(4556): unsure at all n locations
  Clone ID: MRT4577_7275C.1
cccgggccactatcacgnactcatccacccagcacgttccgcggtcccccccgcgccgatcacggcacggcgaagcccgcccgctccctccctccctccagatcaggcgccgcctctccgcccccactgcccgcgccgccgctcgccccgttagccggggcgtggattgattcgcacctccttctcctcctctcgatcgggtttggaggttagagtaatgaaataaaatgctactcaaaagcaagtttaagttggccacagccattggcatcgtgctatcgatgctatcgctgctcgtgcacctttttcttgctaattattcagctgggggcattacaaagtacagcatgcacatggacgatgtccttccatttggaccgaggcctcgaccacggagactgtggggtccgttggtcccacttgatcacttgcatccttttgtgaaacctagcaaatcatatgctgttcccagtaagcataatggttttatttatgcaaagatatatggtggttttgagaagatacagtcttcaatctgtgatcttgttgccgttgccaggctattaaatgccactctggttattcctgagatacaagcaacaactcgtacaaaaggcatcagttcaaagttcaaaagcttttcttatctatacgatgaagatcatttcatacattcactgtccagtgatgtggttattgtgcatggcttgccaaaggatctcagagaggctaggaaaaagataaaatttcccacagtatctcctaggaattctgctactccagaatactacatcaaagaagtattacccagacttgtaaaatcaaaagttcttgggataattgttaatggaggtaattgtcttcagtcaattctccctgcaagtctggaggaatttcagcagcttagatgcagggtagccttccatgcactgaggttgcgccctcaaattcgggctcttgggagcctagcttgaaggttgcgagcatctggccgtccttatgtggcctatcacccaggactgcttagagatactctagcttttcatggttgtgctgaactgttccaggatattcatacagaacttattcagtatagaaggaatcagatgattaaacgaggaacagtaaaggagcagctaacagttgattcagtgtccaggaagatggctgggttgtgtccactcatgccagaagaggttggacttctacttcaagcattaggttacccaccaactacaataatattcttggctggttccgagacttttggtggacaaagaatgcttattcctctacgagctatgtttgctaacctagtcgatcgaacttcattatgtagtcagagggagctgtttgatttagttgggtcagaagatcctctaacctcagatttgccacagcctccacctcccaaaagtgaaaaacaactcattgaagaatggaagagagcagggcctcgtccaagaccgctgcctccacctcctgcaaggccattctatgcacatgagaaggaaggctggtatggttggattggtgagaatgacacagaaccggaggcttcactgattgagttcaggaggcaagcacatcggttgctctgggatgcacttgattattttgtttctgttgaagctgatgccttcttccctgggtttcacaacgacgggagtggttggccagactactcaagtttggtcatgggacaccggttataccaaacaccttccggtataacctacaggcctgacaggaaaattattgctgcactgtttgaagaagttaacgatcataggtatcatccaccacggaattggacaattgctgcacgtgagcacctcaacaggagtgcaagtgtggaaggcatcgtgtcatcggctatgttgtcaaaacctgtatcgtttcttgcccacccattgccagagtgctcttgcagaacaccaaagtcacctgctgttcaaccggtaaaagatagcaatggcagattcctatttggaggtgaggaagagtgtgctggttggatggcacgcagccctgcgatggcgtctgccaggaataatgaacctcaaattgaggactatgaggataagttgcctgaagaaggctctagtccagacacgcaggaatctgacagaagtgactcgaataaatcttcggagcaagatgaggagatggatctggatgattagagatatgtggagcatggatgtatggcacacctttcaaccgctaccagctccaggtccaggctactcgaggaagacaagcatacatacgctcagaatctcctggacaggtgggaatcatcttgcatcgcgcagcgacacatcagcatctggattagtcccaggatcacaattcacaaggtcatccagcgtgggagcttgcctggaccgtactcggtatagaacaaggctttaatacgaaactaacactttgttcccttcttcattcacgtgtcattttttgtgggtacagccctaagaaactgtttatgtacaaatgtcttaactgggaatacatcattttttttgggtgagtttgatatctaatggcgactatgagctaatgagattggcttatggtggacagatgtgcacctgtatacaggacaacattgcaattgtttgtgagttttattgatccccgaagagtgtgcttacacggatggagttggttgttctgcctgacctgtgctatggatcagaaaatcatataaatctactttggctacacgaaaagtttgtgtttcacatgagaagtttttgagtgaaaaaccttctctgaattccgctggctgttgtagtcggatcaaactgttgcatcttacttgttcttgttcatacagggagtgaacagaatgcatcgctgttcagtatatcgaacgcaggattccaaagtttggacatttcaatgcttgtaataaccagtggcagatcttaaaaaggaggccatgtctcctccccagttttaaaacacacatctttgtcaagctccgccactgcctataactgttaaatacatctcaataatcaacattggccatgagacttgacaaattgagattcttctgtctgccaggtgtaacttccaaaactgtaggtcatcatgctattcatttcaatctcttctcatcccaagagcatcaagtgtatgttgctgctttgtgtgaggaccgaattgaaaatggtgtgccacttatacaaatctggatggctgctacaacacaatggcactataggaaaactgaatataggaacacgctactcgtcggacacaaagttaggatcctcaacaacaaatacaaaggtactcaacaagtcctactcttccttatggagatgcagttacattatatatgcatgatcaattcataataattgcctcgtccaagacagctgcctccacctcctgcaagaccattctatgcacatgagaaggaaggctggtatggttggattggtgagaatgacacagaaccggtcttagttaggtctaaatatgtcacggttgccatatggatatcggtgtgttccgaggtcctgggatgctggatatgtgggcttccatggtgggcgatgtttttgttttgtatcatcttctctttctgttctgtgtcaaacgccatatgaggggtagtagtcttggtgctctggcttgtggcttccgccatgagggctggttacctgcctcgacaggtggttgggttaggttaggctctctagcgtcttgccaccactggtatccacagctgagtgtgcgtgtgtttttggttgtatttgaactctatacgctttcctaaaagcagagaaagtttctagttaaaaaaaagaatggcctcgcccacccatcatcagagtgctcttgcagaacaccaaagtcacctgctgttcaaccggtaaaagacagcaatggcagatccctatttggaggtgaggtagagtgtcctgattggatggcacgcagcctggcaatggcatctgctaggaatagcgaacctcaaaatgaggactatgaggatgagttgcgtgaagatggctctagccaagacacgcaggaatctaatacaagtgactcgaataaatcttcggagcaagatgaagagatggatccggatgattagagatatgcggagcacctttttaactgctaccaggtccaggctactcaagcaagaaaagcaggaatcatcttgcatcgcagcagcgcatcaccatctggagtagccccagcatgacaagctggtcatccatcgtgggggcttgcctggatcgtactctggtatacaaccaggctgaatacgaaactaacactttgttctcttcttccttcacgtcttactcatttttttgtttacgcgaaattgtttctgtacaaatgtcttaactgaaaatacattaatttttgagtgggtttgatatgtagccatttgttaggtaatgagattggcttacggtgggcagatgtgcacccgtaaaataccggacagtacaggcattgccattttgtcccacgttaattgttgagttttgttggtggccgaagagcctgcttagacc

SEQ ID NO: 154799 - DNA, 2118 bp, Zea mays
  Clone ID: MRT4577_72760C.1
atccctcccctctgccgttccttttctcgatttgattcttccaccccggcccttgtgttggctctgtccctctcccagtcccacccacctttgtgctcgtgcgatgtaggagcagggcatcggaaccgagcaagcaagcaagcagaagcagaattccggcagagggaggaggaaggaggaaggaaggcggtcgatcaatcggaagcgccgccgccgcaaaggatcgggcagacgagacgagacgaggttatctgaggcgcagagctcagggtgaaagaagaatctagtgaaagtggaaggatccgcgcacgggctccgtccgaagatgctgccctactttgatccggagtacgagaacttcaaccagcgcatcaaccccccaagggtttgcatcgacaacaccacatgcagcgactgcaccttggtgaaggttgacagcatgaacaagaatggcattctgctggaggtgctgcaggtcctgagcgatctggaccttcacatcttcaaagcctacatcacctctgatggtgggtggttcatggatgtgttccatgtcgttgataagcaagggcagaagatcactgatgacaagaccatcaagtacattgagaaggctttaggtccggagagcaatttgctgggcgcaaagggcagcaactcagcggggaggtcggtggggctgcactccatcggcgaccacaccgccatcgagctcaaggggcccgacaggaggggcctcctctcggagatcttcgcggtcctcgccgacctccagtgcaacgtgctggccgccgaggtgtggacgcaccgcatgcgcgtggcctgcgtcgtgtacgtgaacgacgtggccacggggcaggccatcgacgacccggaccgcgtggcccgggtcgaggaccggctgcgccacgtgctccgcgggtacggcggcggcggcggcgcgggggacgacgacgacggcagcggcgcgcacgccaacttcgcggccgcctcttcgacgccgcaccacgtggaccggcggctgcaccagctcatgcacgccgacgtggacgccgtccacggcgacggcgcgcacgcggcggccggcggcgagggcgaccggccggccgtgacggtggagcactgcgaggagaagtcctactccgtggtgaacgtcaagtgcaaggaccggtccaagctgctgttcgacatcgtgtgcacgctcacggacatggagtacgtcgtgttccatgccgccgtgtcgtccgaagccaactacggcatccaggagctgtacatccgccgcaaggacggcaaaacgcttctgaaagacgaagcagagaaggtgatcaggtgcctggaagcagccatctccagaagagtatccgagggattcacgctggaggtgtgcggccgggaccgggtgggcttgctgtcggacgtgacgagggtgctccgggagcacgggctcacggtgagccgcgccgacgtgacgacggcgggcgggcaggccacaaacgtcttctacgtccggaacccctcgggccagccagtggacatgaagaccgtcgaggggctcaggggccagtttggccagaccgccatgctcaacgtcaagagcgtgggcgtgcctgctgcggtggccaaagcggcggagccaagctccggcagcatggtcaggagcagcttcttctccttcggcagcctcttcgcgaagctccgggcctgacaactggtcaggcgattcgaactccagctgtgtgtagaagaaatgaactcagaactagggtagtggactagcgggggtgggcgggggagagaaacagggagcaactgtatctctatgtggcagctgtggttgttgtacagttcataaggagcctctaccagaagaatggtagttctgtggaatgcaggctgcggactgcttgttaaggtaagggtttatcccatctgcgcagaatttaaaaaaaaaacatcgatcctgtcatctgtcgaaactgtccggccttgtgcatctccaaccaacattccagcatttgcctatgcgtcactgcatgacttgtaacttcatccaaccattctctaatgctataaagtcttagtaatgagagcaagcaactattctccgtcacaaaa

SEQ ID NO: 154800 - DNA, 753 bp, Zea mays
  Clone ID: MRT4577_72761C.1
tgacggtgtagactgcgaggagaagcctactccgtggtgaacgtcaagtgcaaggaccggtccaagctgctgttcgacatcgtgtgcacgctcacggacatggagtacgtcgtgttccatgccgccgtgtcgtccgaagccaactacggcatccagagattcagagttcagacaatgcaatgcaaatgcaaatgcaagcagcatgcagggtcgtgaagcttccttccattgttcttgttccaggagctgtacatccgccgcaaggacggcaaaacgcttctgaaagacgaagcagagaaggtgatcaggtgcctggaagcagccatctccagaagagtatccgagggattcacgctggaggtgtgcggccgggaccgggtgggcttgctgtcggacgtgacgagggtgctccgggagcacgggctcacggtgagccgcgccgacgtgacgacggcgggcgggcaggccacaaacgtcttctacgtccggaacccctcgggccagccagtggacatgaagaccgtcgaggggctcaggggccagtttggccagaccgccatgctcaacgtcaagagcgtgggcgtgcctgctgcggtggccaaagcggcggagccaagctccggcagcatggtcaggagcagcttcttctccttcggcagcctcttcgcgaagctccgggcctgacaactggtcaggcgattcgaactccagctgtgtgtagaagaaatgaactcagaactagggtagtggact

SEQ ID NO: 154801 - DNA, 539 bp, Zea mays
  Clone ID: MRT4577_72762C.1
aagaccaaccggcagccaagctatccatgctctcatcatcatgacggtcgatggcaacgaacagccctgtgcacgggaacgagacaagcacgaggtcccgcggctgcctggtcaagtcagacaaacgggagcgtcaaatcagccggatgatctcgccaccatctcgccgctccacccttgcggcggcggcggcgctctccgccccagcgacgacgacctggcgctggagtccttcctgtccttgaagaagccgaacacggggcgcgggcacacggagacgttcagcaccacgggcgccacgcggacgcaggcggacgagtaggaccggtccacggcgcggaaccgcggcttgggcgccgccgcgtggaagctgcaaggggagatggagctgcgttccagttctagcccctggaacacgatcttgcccgacgagttcatgcgcggggagtccacggacaggcagcagcgcgggagcgccggcggagacggccggcgccgcgcgcgggcggaggaggtggagtggcggtggtgggagtggg

SEQ ID NO: 154802 - DNA, 1093 bp, Zea mays
  Clone ID: MRT4577_72763C.1
caatccgtgccaaacacggggggaggaggtcagatcggcggtggcggtgacggtggcggtggtggcggcggcggatatgtaaatgcgggcgtggaggtggaggacaaggcgtgcccctgcggtgtcgggagctgcctcgtgctcacgtccaacacgccgaagaaccccggtcgcaagttctacaagtgccccatgcgggatgggggttgcaacttctttgagtggtgcgatgctccatctcccgcccctgccaatgcacgaaataacatggttgtacactcagagacatcagcaacagatatgctttgcccatgcagtgctggaacttgcttaattctcaccacaaagacagggaaaaattctatttctggtgcacgacggggacaaatcacccagggtggtggtggtggctcttgtggctttttcaagtggtgtgacgagctacagcctagggttggtgcaccactgcaagcttcagcgcaataccaagcggattccatgccaagcatccaaaaccccagccagaggagctcgtcttcctgcttcaagtgcgggcaggagaaccactgggctcgagactgtccgaatcaaccgtcggatccttatcctgacaagggtgggagaccagtagctccagcgggctcacctggtgcgtgctacaactgtggtcggtccggccactggtcccgcgactgcccaacctcgaatagtggtggtggtggtggtaccggcaccagccgtgccaggtcgtcctcagccttgagctcgtggaatagtcagagatactgataggaggctcctgtgaactcaattgaactgacatggacatgctgtacgaaacttggacaattgcccccctccacgtgttgcttaggtatgtgctcacgtcgatgccttttgctgctctacgctatctctatatgtaagagagaactgttgctgttctctgtcttcaccctcaccctgttttatgctcctatctctgtcgaacttgggtatactgtttttttatctactctaggatttttttcatataaaatattgtatgtgtgggtctaaggagaaccatatcgtccaagcatttctttccatg

SEQ ID NO: 154803 - DNA, 436 bp, Zea mays
  Clone ID: MRT4577_72764C.1
ccggccgggaccgcgctcctatatctcccctacttgtaagcgagacaggcgacagcatgttacgcatggacagcctatatccctaacccctggaatcggatccggccaccgcatcagcgtaaccccaccccggccgccatggagatggcaggaataagcgacgctctgcggctgttcttcttagagatggcctgcacgaactcgggggcctcgtacaagcagaaccccaccgactccgacaacttgacgcggggtgcgggcgcactgctgataactgtcctaggcccgaaccgatcttgatagacttaagcttcttgacgacgcacatgccaatactggaatatgcacttgacactgattcctatcggttgccctgtacatctggggcttgcctaccgcctacacctcaactggttcttgcactctagatagtgcg

SEQ ID NO: 154804 - DNA, 830 bp, Zea mays
  Clone ID: MRT4577_72765C.1
caatccgtgccaaaaaggggagatgaagtcagaacggcggtagcggtgacggtagcagtagtggcagcggcggatatgtaatagcgggcgtggaggtagagagcaaggcgtgcccctgcggtgtcgggagctgcctcgtgctcacgtccaacacgccgaagaaccccggtcgcaagttctacaagtgccccatgcgggatgggggttgcaacttctttgagtggtgcgatgctccatctcccgcccctgccaatgcacgaaataacatggttatacgctcagagacatcagcaacagatatgctttgcccatgcagtgctggaacttgcttaattctcaccacaaagacagggaaaaatgttgggaggcagttcttttgctgcccattaaatcagggtggtggtggtggctcttgtggctttttcaagtggtgtgacgagctacagcctagggttggtgcaccactgcaagcttcagcgcaataccaagcggattccatgccaagcatccaaaaccccagccagaggagctcgtcttcctgcttcaagtgcgggcaggagaaccactgggctcgagactgtccgaatcaaccgtcggatccttatcctgacaagggtgggagaccagtagctccagcgggctcacctggtgcgtgctacaactgtggtcggtccggccactggtcccgcgactgcccaacctcgaatagtggtggtggtggtaccggcaccagccgtgccaggtcgtcctcagccttgagctccgtggaatagtcagagatactgataggagggccctgttgaatcaattgaactgacatggacatgctg

SEQ ID NO: 154805 - DNA, 378 bp, Zea mays
  Clone ID: MRT4577_72766C.1
gcggccagttcgtgagaatgctgctgtgtccgctaacatcgctgctgaggagctgagtctcgtcctacttgaccgacaaaaggcgagtgatacatccaaggattctaagtccgtgatacctcacgtggaaatctagactgtaatgctgccaggctccacatcatgtcgcaacgaactggttgacccacggcatacacagatctctcctcgcgcttaaccaactaagctggatgtctggccagacctccggaattcatcacgagatgtgatctcattatctgcatgctgtggtcactgtgaagagtgcatactaatgttactactttaggcggagcaagctgaacgccctgggcaatctttgaagacaactacatccct

SEQ ID NO: 154806 - DNA, 258 bp, Zea mays
  Clone ID: MRT4577_72767C.1
ggactggtggtccatcgatcgtcccagcccaatcatgcatgccgccatcttgtctcgctctaggatggatcgatgccgggcaacaagcgcatgcagcggcgatcgatcgaggcagcacgtgcagccactgcccggcgcgccgcttgtcgcccggatcttgcctccccctcccaccaacaatcacctctcgtcgacctgccgcgcgccgctgtgcctgtgctcattcatactcatagctcccatcatccccttcgccct

SEQ ID NO: 154807 - DNA, 624 bp, Zea mays
  Clone ID: MRT4577_72768C.1
atggaggcacggcagcacacggtgctcgacggcctagccgctgagacggagccggagctcgaccagttcatggaggcgtaccacgaggtgctggtgaagctcagggaggagctgacgaggctgctgcaggaggcaatgaagttcatgcagaagatggagctgcagctcagtctgctttccatctctggaaggtcgctgcacaacaccctttcgtccgaacgctggaggaagaagcgtcgcccccacgaacatctcgcagaggtgggagaagatggccgcctgaaggatggagtggagcgtaaggtgctgatgttggaggccgagctcctccagcagcagcaggacgaaaggccagaccggcagcaccaacccacaggagaggcaggagacgaagagcacgaactccccggcggcgagaccgccgaggagagaggcgccgacgcggatccttccggcgaacaccggcgcgccccatccgagcaggttgcgcaccaagttgagtgccacctcggactggaagcgcccgggatggactggcaaagccatggcaactacggcggcggaaagcagaggagcgcaaatgcaatggggtgcggagaactcgaaggcgaaagggcgcattag

SEQ ID NO: 154808 - DNA, 345 bp, Zea mays
  Clone ID: MRT4577_72769C.1
gcggagcgcctgcagccaaacgaacttcaacgctatcaatcatgtctggaataggggtcggaggtcaatgcatggggacacagattaggagaatgccgatctatgcccaaacggcactgtctgacagggctttagatgtcactagacgcctaacttacctggtagcgctcaactttattgggcattcatctatatgatcctcgtctattgtaacactatacaacatgtaggtcaacaccaacatcactctaacagccgttcatggagccagcgacatcactgaggctgagcgacactttgctatccgaggattcattaccagtcagcttcagcactatcttatac

SEQ ID NO: 154809 - DNA, 360 bp, Zea mays
  Clone ID: MRT4577_7276C.1
gtctttttcttcttgtgacaccagccacaggcccactgaatctgactctattcagtcggtaaagaacatcctacgacggaaggggacaatgggattcacaacacggtttagtgaggaaatgggatagagcaagactaaccctgacctagggtgcttggactaaacggagaaaaagcacagatgaagtgatatactaacatggggggcttgcatgctcacagagacgaaatgaaaaaagcacatgatctttcgttaacacacgctgagctatctggagacacatgcctaccgctctcaaagagcaggtatactgtactgaagaacccaaaacagcaaaaactctacgcggacaggctggtg

SEQ ID NO: 154810 - DNA, 643 bp, Zea mays
  Clone ID: MRT4577_72770C.1
tcgggtcatccagctctccggcggcgcgctgcgggcgcactgcaagggcgcgtcggagatcgtcctggcgtcctgcaccaggtacctggacgagcgcggcagcgccgtcgccctggacggcgcgaccgcggaccgcctcagggccaccatcgacagcttcgccaacgaggcgctccgcacgctgtgcctcgcctacgtggacgtcggcgacgggttctccccgagcgagcagatcccgacggacgggtacacgtgcatctgcgtcgtggggatcaaggaccccgtccgtcccggcgtgaaggagtcggtggcgatctgcaggtccgcaggcatcaccgtcaggatggtcacgggcgacaacatcaacacggccaaggcgatcgcgcgggaatgcggcatcctgactgacggcggcgtcgccattgaaggccccgacttcagagtgaagactgaagaagagctgcaagaactgataccaaagatacaggtgatggcaagatcttcgccgcttgacaagcacaccctggtgaagcatctacgaactacgtttgacgaagttgtcgcggtgaccggcgatggcacgaacgatgcacccgcgctacacgaagccgacattgggcttgcgatgggcattgctggcact

SEQ ID NO: 154811 - DNA, 195 bp, Zea mays
  Clone ID: MRT4577_72771C.1
gagaatgctcttcctggaggacatgatggtgttcaaacggcagccctcaagtcagcatacaccactgcagcagcagcagctacatctatctcatcgtcagttgcagctgctggaacaacacatgcattatggagccgtaagtgttgtcagttcagcgatctcagatggaattctagggactgtagcctgagatgc

SEQ ID NO: 154812 - DNA, 606 bp, Zea mays
  unsure (1)..(606): unsure at all n locations
  Clone ID: MRT4577_72772C.1
gcacgagtttttttttttttttttgagaatttagttacangattcacttcatcgaacctggcagctactacggctttggacttttgactcacnaaaataatcaaatagctactgagctagnnctaagcttgtgcatctcgntcgttgttgctgtttttattttgtatattaataangncgtaacanncgacgacggatgtacancatggtactgactggacggngccgggtcctgggccgggtagacaccgtanngtacgtacctttcacgnntctcgncgnccgccngnccgnnacgnncgnagnnagnaccaanagttcgtgcccgggtattcgnnatgtgctttcnnagcagatgtgcgtcanccgagtttgaggttcttccttcacatgctttcatgctctgcgccccacgtagnntagntancgtgncnnggggngcccggncgnngggngnctgngcgncccgnncgttanncgggttgtgataccgcccnnacgggccggctggcaggctggggtggcccggtggctggtacctggtcttctatgtagtcgtctggtgatcatgtgcatngtactttgcggcggcatgctggctgcann

SEQ ID NO: 154813 - DNA, 333 bp, Zea mays
  Clone ID: MRT4577_72773C.1
ctaaacatgtcgcttcttatagctggtacgtcatttacgtggaacacaaacattcaggatcggtttatcccggagttgcataagaaatgagggcaacgtctatgacgggagggtgcgatgaacacatctagcacagggcatagcaaccctgctggttcgttggagccgactatgctagcagaagaagacaggtcctgggataacgcccaggtagaacccaactagctggtggtccccaataaggcagcagtgctgacaagagcctaccccatgaaactcgaaggcgactgctatggccctgaaggagaagagcttcctgcggggaactaccct

SEQ ID NO: 154814 - DNA, 522 bp, Zea mays
  Clone ID: MRT4577_72774C.1
gggccctatacaatttttttagggaaggtggccccgccggcaggctcggttccgtaataccggggccagccgacctttcttggtttcttttgttcttctttttttgttggaccaacctagaagaaaatcctgaaactcccctgttaagcctggaccttcagttcggggccagacctttaagtgagcggcctattaccgttcttaatttaaacggttctgccggggaaggaaccgtgtttaatcaagggtttttgcatttactcgttaaccggcatctagacccttccttgggttaaggcaagcaccacatgaatcgggggggcctcagccctccatgaagaatccctgtccgtgatccctttgcaggcggaaagtgaggtgaacactatgggctgcgtgggagaagaccccacgtggaaggccctttttattgttcccgtcctacccatgttttgtattcggctggaaaatgacccatacgacgggtcctttaggggcaaacggcccacccctgcctgatgc

SEQ ID NO: 154815 - DNA, 4045 bp, Zea mays
  Clone ID: MRT4577_72775C.1
cggtccggacgacccggtcaattcggcatccggcgctagacctcaaagactcgatcgcaccgcatcttctctctctgctcctcgttcgcttcgtcgccggcgaccccgccgccagcttccccttccgctggccgccctttgcctcgcccctgaggcgtcggtttccactgcataggagtggggcggcgatccgactggacctagggttgcgacaccccatagggtgaccctcggaccatccgccaccacgtgggtgaggcggatgcgggaggatgtcgtcggaaggacggggactgctctacctaagtctgcggttcctagatgaggagatattctaagagaccgtccacaagcttgagtaggggtccggattcgatttcaatatgaagtactttgaggaagaggtcgccaatgggaattgggatgaggtggaggtctacgtttgtggattcttaagtgacgaaccttaacgcttctgcatcaagatattcttatgagatccgcaaacagaagtatctcgaggctcttgagaagcatgatcggtctaaggctgtttaaatcttggtcaatgaccttaaggtatttgcatcctttattgatggagttgtttagggggatcacacagcttctgaccttggagaactttagggaaaatgagcagctttctaagtatggcgatacaaaatctgcaagagcaataatgtttgttgagctgaagaagctgattgaagctaaccccttgttccgtgataagctacaatttcctagcctgaagaattctaggttgcggacacttattaaccagagcttaaactggcagcaccagctttgcaaaaatcccaggcctaatcctgacatcaagactctatttgttgatcattcatgtggacaaccaaatggtgcacgtgctccatcaccagcaaacaatccattactcggatctatgcccaaacctggaggtttccctccattgggtgcccatggaccttttcaaccttcaccaacacctgttccacctctggctgggtggatgtcaaaccctccagcagtaacacatcctgctgtgtctggtggtgccattggatttggcactcctacaaatcctgccgctttgttgaagcatcctagaacacccacaactgctaatcctggtatggattatccatcaggagattctgatcacatctccaagagaactagaccagttggcatgtctgaggaggtgaatcttccggtgaatatgctgcctgtgacttatccgcagagccataattaccaacaagatgatttccataaaactgttgcacggaccttgagccaaggatcaacaccgatgagcatggatttccatccacttcaacaaactcttcttcttgttggtaccaatgttggcgacattggattgtgggatgttggtaccaaagacagactcgttgtaaggaacttcaaagtctgggacctcagtaaatgtacgatgattctccaagcatcaccggtttttcatcatgctgtgtcagttaatcgcataatatggagtcctgatggaaccttgtttggtgttgcttattcaaggcatattgtacaaatttattcctataatggtggcgacgatattagacaacacttggagattgatgcacatattggtggtgtaaatgacattgcatttgctcatccaaataagcagttatgtataattacatgtggagatgataagacaattaaggtatgggaggccaccagtggagctaagcaatttacatttgaaggacatgaagctcctgtttattcagtttgtccacattacaaggaaaatattcagttcatcttctcgactgctttagatgggaagatcaaggcatggctatatgataatatgggatctagagttgactatgatgcaccaggtcattggtgcactacaatggcatatagcgcagatggttcaaggttattttcatgtgggaccagcaaggatggtgaatcacatctagtagaatggaatgaaagtgaaggagcagtgaagagaacatatcagggatttcgtaagcgatccatgggtgtcgtgcaattcgataccacacggaacaggtttttggccgctggggatgaattcatgattaagatatgggacatggacagcacgggtcttctaactaccattgatgcagatggtggcttaattgcaagtccacggatacgcttcaacaaggaaggaactcttttggctgtctctaccgttgacaatggcatcaagatcttagcaaatgctgatggacttcggttgctgcgcacgctggaaaatcgttcttttgatgcttctcgtaatgcatctgaggctgtaacaaagcctctaataaatcccttgactgctgcggcaaatgcagctgcagcaagcagttcaggagctggtgctccgtcagctgtaactgcaatgaatggggataccagaagtttggttgatgtaaaacctagaatagctgatgagtcactggacaagtcaaaggcgtggaagcttatggagataactgagtcaactcagtgcagatcaattaaactggcagacaacatgagaacgagcatgatctcgagggagatttacgctttttctggtcttgctatcttggctttaacttcaagtgctgaacatctactctggaaatggctgggcgatgggttccaagggagccagggcaagcgcgagtgtgtaataagcactacagaagtttgtccgtggcttgtataaatatttgtattggactgcgagtgaggagtcctagtatttcatttttgctttgtttgcggtgctgtaaacatatgtcatgtccgcttctggaggaaaaatctctctgttcaacatgatgactttcaagacaatgacaacatttatgcctgcaccgccggcagcaacttttcttgcatttcacccccaagataacaacataattgcaattggaatggatgactcaaccatccaaatctataatgtccgaattgatgaggtcaaaagcaagctcaggggtcactctaagagaatcacgggtcttgccttttcaaatgtgctaaatgtcttagtctcttccggagctgatgctcagttatgtgtttggaacacggatggatgggaaaagcaaaagaacagatttttgcagataccgtcaggtcgccaatctaatatcttggacactcgtgttcagttccaccaagatcaaatgcactttcttgttgtgcatgaaacccagattgccatctatgaaactacaaaactagaaccagtgaagcagtggcctgttcgagagaattcacctccaatcacacatgctgcattctcgtgtgacagtcaactgatctatgcaagctttatggatgccactgttggcatatttaatgcatcgagtttgagacttcaatgtcggattcttccagcttcgtatctccccccaaatatcagtccgagtgttcatcctgttgtggttgcggcacacccttcggaagcgagtcagtttgctctagggctgactgatggtggtgtttttgtgttggaacctttggaatcagatagaaaatggggaaatcctccaccggtagaaaatgggtctgctagcaacttgtccgcaccgcctcctaatggagcttcaagttctgatcaacctgaaagatgattgagaagatggaactggtagatttttcgtggcatgagtctaaccaagatgggcttcaaaaggtggtgcaactaaccttggcagatcggttccaagggactcggacaatgggctcaataaaaacaagctcaacagcagtttatccgttgcttatatatatttctattgactgtatcgagtgaagaggatagttctagtatttcattttgctttgtttactgtgctgtgaaaaggagttcttatcagtagataagctgtagacaactatcagtttggctcctacattttatgacttagtgaaagtatcttgtttcatttgcctattggccccgatcgaaagggagaaaaaaaaaaagagagcccgctcacgacctggggcgggg

SEQ ID NO: 154816 - DNA, 261 bp, Zea mays
  Clone ID: MRT4577_72776C.1
gcgctctcgtttcggcttccgaccacgctcctttctaaattaccccaaaacctgacgagctggacgaccgggccgtttctccaggccgacggatccgatgcagactactaggcacagacgggtatccaagcgcgatgctgtacttgtgctcagagatcggacaccctacctatggatcctccgtcattgtttgtgtactaagtcagaatgtgtatgatttagcaatggctaatgcaagctcccctgataatatgtcttaca

SEQ ID NO: 154817 - DNA, 599 bp, Zea mays
  unsure (1)..(599): unsure at all n locations
  Clone ID: MRT4577_72777C.1
cacgcgttccgtatcttaccattagtnnagtgatgtacaatggatggagaggggagatgtaatataaaaaaagatataattgggcgaatacatttagnnattattgggagtgtttagaagggtccataaatataaatattacttaanntaaacaaaagnagttataattagnagtgcccaaaatatagnatattacaagggtataannnataaacagcgactttggatggggggggtgagaagtactttgtgactttccattagggtgnnggttacttatgatacatgagtactttgcgtnncacgcagtttgaattaaaccaaaaacataaaacccaaaaaatatctagnatgaagataaatnnaaatcggtgcanncaaaaacccaaaaaaactagnatnngaaaannataaatctggnacnnggagcaaatcagcgacnnataaacgaaaaatattagacaacanaaaaaacaaattagtngagtaaaaaaatacgnntccacgatgggagccttnngaacccacaacctcaaagtgtaaaaaagtcttgcacctctttaccgactanagnctnnaaacataccttttgctgttac

SEQ ID NO: 154818 - DNA, 257 bp, Zea mays
  unsure (1)..(257): unsure at all n locations
  Clone ID: MRT4577_72778C.1
atccaannnacaaacacatacactcaancaataagcagaacaccgaacaaacgantnaagtcgnattcngtaccgattccaacaaacgtctcgtctccctctccacctcnccttccactcctncctacaagatcncatccatcatcgacnactctncagnantaattnangatatntntacaatntanananaaatttcccnctcaaaancccagagtacggnantcatntgcncntccgtggctgatgagatgtgc

SEQ ID NO: 154819 - DNA, 523 bp, Zea mays
  Clone ID: MRT4577_72779C.1
gaatctttcatcttctctcactacgagaacttcaatactcacctatatccgcgaaaattagtactacatatattacaaatatatcctcatttgctcacatcgtggccgatacgatctatatatctactgatgaattttcgtctcgccataaactgcgcccgttaccattacctgtttttgaattggagctgtgaggaggaatggatctatgatgggattcaggatgatggcgacatggctggtgaagaaagcatagggctacgagaagatgcttctgacgccgtgttaggtgacagtgtacatgataacgacgtgcaccacgagtgtttgtgtacgagtgtgagccagcggctgtagatgaagagatatgtgcagctagcctcagcgtgttgatctgggtcgactgatgagagatccggatcaaggacccgaccacttcggacgtgttcactacatgattggtgatgacattgcagagctgtagcttgatcgagtcaggaatctagtacataagtgtactggt

SEQ ID NO: 154820 - DNA, 366 bp, Zea mays
  Clone ID: MRT4577_7277C.1
ccatggcctgatcagcgccggggctgccgccgcagcactacgccgccgcgggcgccggccgccgctcctcctcctcacccgcggcgtcttgcatcttggcggtcctcttcctcctcctagctgcctgcgtcgcggcggtgctgctgttcgtgttcttccgcccgcgcgcgccggccatcgccgtgacggccgtgcagctccccgccttcgccgtggccaacggcaccgtcgccttcaccttccagcagctggcttccgtgcgcaaccccaaccggtccccgctcgcgcactacgacagctccctccacgtcgcctacgccggcggcgaggtcggctccatgtacatcccggcaggccagatcgacg

SEQ ID NO: 154821 - DNA, 250 bp, Zea mays
  Clone ID: MRT4577_72780C.1
tcgtgcggccgcccgggcaggtgctgctttttttttttttttttttttttttcgagtcaaaacaggagaacgcttctgctgcccccactttctttcttttttttttagtcccagcggaatgggggaggattgcaaacaaagaatcatcacccatttaatttaacctaggacgggcaggcaaaagtctgaaaaaataggcaggctgttcagtagttgttattgttgttgtagccgatgaaagggttgcggg

SEQ ID NO: 154822 - DNA, 365 bp, Zea mays
  Clone ID: MRT4577_72781C.1
gggggccgcccacccttccaattagaataaaccctccattggtgtttactgttaatttggttaaccatgaggggggtggtttcttacttggttctgggaccaatgcctaaaaaaaccaccttgttgccaaattcttttggaagaaataaaggacccaaggccttccttaatggaaaaaagttgttggccaatatttttgtttcaaaccggaagttttaaatcgatgatttttttaatccaaaggcaccacatactgagcttaaaccacccttaatacttagttcctggttgttaaagcaaccttttaaagcaaccttaaaacttagctcctggttgcatcccttaaagttaatgcattcattttt

SEQ ID NO: 154823 - DNA, 729 bp, Zea mays
  Clone ID: MRT4577_72782C.1
gtttgcccacgcgcgccccgccgccgccgcagccatgaagcagtcgccgtctcagaatcagagcccaaagaccccatcgcgctcggccccggagccgtggctggtggccgcggcggcggcgagcgccagcgacgactcgtgcgtgaacgacgtggacagcttcgcgcgcaccgtggccgccgtcaagtccaaggccgcgtcgtgcgcgcggccggacatgctggcgtccgtgctgtcgcactacgccgccaagtggctcccggacgtggcgcctcccacggcgtcgtccgcgtcggggcgcttcctgccgccggagagccccacggccacgtggctgaagaagcggctcctcctggagtccctcgtggccgcgctccctccggacccgccggcgggcggcggcggcggctgctgcgccgccgcggccgtggccgcggccgtcgccgacgacggaatcacgtgcgacttcctgctgaagctgctccgcgcggggagcatggtgggcgcggacgcggcgctgctgcgggacctggaggcgcgcgcggcgagacggctggaccaggcgacgctgggcgccgtgatgataccggcgttcggccacggcggcgagcacgcgccggcgctgctcctggacgtgcccctcgtgctgcgcctcgtgcgcgggttcctcaaggagggaggcggcagcaaggccggcggcggcgccgccctcgtcggcggcggcggcgc

SEQ ID NO: 154824 - DNA, 262 bp, Zea mays
  Clone ID: MRT4577_72783C.1
tgtggttttgtaggaccgccgatcattagtgacttagaaacagacagtgggtcggggggcgaaataaaatctaggagaacacatacgcacgctcttgctggcatcgtacctcatttaacggagaatattgtttaagacgcaagggacagcaaaagtattgatagagacttcgaccaacaccatgctaccactccctccaataatccatattcaacagttcatgaggtatttaaagttttacaagcacaacataacgcttgat

SEQ ID NO: 154825 - DNA, 2564 bp, Zea mays
  Clone ID: MRT4577_72784C.1
ggtgtgcactgttatgtctgggtgctttgggtttgcttcttgagacagctagacgcgcattttctgcggacgcaatggaacctgctgaaggtattctactaattgtagaaagtcttactatggaagctaatgagagtgacataagcattgcccaaagtgtttttacaactagtactgaagcgattggcgctggtgaggaggccaggaaaattgttctcatgtttttggagagaatatgtcatccttcaggtgccaaaaaaatcaaacaagcaacaaaggaatgaggagatggtggcaaggatcctgccgtacttgacctatggggaaccaacagctatggaagctcttattcaacattttgagccctaccttagggactggtctgaatttgatcaattgcagaagcaacatgaagataatccaaaagatgataatataagccaaaagctgtcaacacagcgatctgctatcgacaactttgttcgtgtatcagagtcactcaagactagttcatgtggtgagaggctaaaggatattattctggagaagggcatcacaaaagctgctgttgagcatgtaaaggaaagctttgcttctgctggacagactggcttcagaacaagtgaagaatggacaacaggcttaaaactgccatctattccacccattctgtcaatgttgaaggggctggctaagggccatctgcctacacagaaatgcattgatgaagaaggcatattaccactgctccatgctctggaaggggtgcctggtgaaaatgaaattggtgcaagagcagaaaatcttttggatacactagccaataatgaaaataatggtgatggcttccttggagagaagattcaagagctgcggcacgctacaagggatgagatgcgtcgccgtgctcttgagaaaagagtgatgctacttcagggaatgggaatgcgccaagaatttgcttctgatggaggtagacgtattgttgtatctcagcctacaattgaaggtttggatgatgtggaagaagaggaggatggtgtagcctgtatggtttgtagagaagggtacaccttaagaccaacagacatgttgggagtctatgcattcagtaaacgagtgaacttaggtgcaacaagttctggtagtggccgtggggactgtgtttacaccactgttagccacttcaacatcatacactaccaatgccatcaggaagctaaacgagctgatgctgcactgaagaatcccaaaaaggaatgggacggtgctaccttgcgaaacaatgagacattgtgcaattgtatctttccattgagggggccatctgttcctcttgggcagtacactaggtgtgttgatcagtactgggaccaattgaattctcttggacgagctgatgggagtcgcctccggttgttgacatatgacattgtgctgatgctagcaaggtttgcaacaggcgcttcgtttagcacagactgcaaaggtggggggagggagagcaactcccggtttcttccattcatggtccagatggcttcttatctttctgatggaagtgccaaccagcagcgtcatgtgatggccaaagctgtcaccacctacttgtccggctccccaacactggaatctcctattcgagtttcagcatctctctctgggtcccgtggtggttcaggttcctctgaggagactgtacagttcatgatggtttattcacttctgtcggagtcatacgagagttggctccaacaccgccctgtgtttctacagaggggcatctaccatgcctacatgcaacataggcacgggcggtcgaccctcaagctgtcatcggactcgtcatcatcagcagttcgggcagacgaaagttcatcctctgatacaagtgacaacaagaagctcttcgccatagtccagccgatgctggtgtacaccggcttgattgagcagctacaacagttcttcaagaagggcaaatcgtccagcttgatcaagacggatgagaaagatgaatcctctgccagcctccagcaatgggagatccagatgaaagagaagctgggcaacatgaaggagatggtggggctgtccaaggacctgctctcatggcttgaagacatgacctcgtcaggtgatctgcaggaggcctttgatgtgatgggggcattgacggatgtattctcgagtggttatgcgacatgcgaaggttttgtccgggcggccatgaatgccagcaggagctggtcgtgagaacggaatggaggtttatatgccttgtgcctgtctgttttgtttctatgggtatgcagctgtaaacattattgcctttttcgtggccctggagagagacaaaatgaggcccttgtatcttgacaaatgaacgttgtatctgccgtgtttgttaagtgacagtgcatgtcaatgctggttgcattggattggtggatgataagtgagtaatgacgattactgagttagaagaaaaaaaaaaaaaaaaaaaaaaaaaaaaaaaaaaaaaaaaaaaaaaaaaaaaaaaaaaaaaaaaaaaaaaataaaag

SEQ ID NO: 154826 - DNA, 178 bp, Zea mays
  Clone ID: MRT4577_72785C.1
aaagaaaagcacgggtaagagaagctccaatttcagtagagaggatctcagcttcatgtctcatcctgcctcgagccgatttttttttttgatggccgaatggtctcattaaaaacatattgtacagaactactggatacaccctaacgaaaaaaaagtgcaagaaccattttacact

SEQ ID NO: 154827 - DNA, 686 bp, Zea mays
  Clone ID: MRT4577_72786C.1
agcagtggtaacaacgcagagtacgcggaagcagtggtaacaacccagagtacgcggggatgtaaagcccaaaaatttgtataagggaaaaatcataaaataaataaatatatatattataagtggatgttttgggattatggaacttttggagattatttgtttttttatattcaattaatagtatcaaattagtcaagtgaccaataaataaataaaaaaatatgcatctcatgctgatgtttttttatgatacatttcatttgactaaaggaaccataacttaaatttgacctcaaattataccaaaaactgagtaaaaaagaaagaaaatgatttctcacataattgaataatacgaaggaaaataaataaaaatattgtaaatagtagtattgatattcactttaagatatatgttagagcattttctttatggagaccatacaatataaaactattgttcttgaaataaatatgtgagaattccccatttaaaaaacaatggtacctacaataataaataaaacatctaaaaaaaatatgttttgattctcgtaccggtatccttttgattgtgcattttaattaagtttgaaattcaaaacctgatttaaaattaaactctaaaaaaaaaaaaaaaaaaaaaaaaaaaaaaaggtactgtgcgttgttaccactgcttt

SEQ ID NO: 154828 - DNA, 267 bp, Zea mays
  Clone ID: MRT4577_72787C.1
acggatagagggaatcgtcgggcgcaatacatcaagggcaggggaaagggaacggtcccttgaacgtagtgccaagggccaagtcctcaagggagcttgcgggcttggcccttgcccttgcccttgcttcctttgcccccgcctggtcggcccccgaaggggccgaccgcttgtttgcccttcccctgggggtgcttggggttcaagtccttgcccattgggagcaactgtgcgaagggcgatccggattacacaggccaaaaccct

SEQ ID NO: 154829 - DNA, 373 bp, Zea mays
  Clone ID: MRT4577_72788C.1
ggccgctttttcttctttcttctattcacaaagagatgttatgcatgacatttttcatctgattccttgggcaaagcagtggtcatatttctgcaacaaggcgtctaagcccaagttattcaggtgtctcgcctgcaaaatcatacctacttcaaatttcactcaccagtacatttagtaaagcgcctcataaactaccccacacaaaacgcctgccattgtaatggcaccatttaccatcccattatcacccccaacaactcgatgcaccccttgctcacctttgcactgccaataaccacgcccctcccacgggatcgagagaaccctgccgccacacctggcccatcaccccctatgacgcaacccaacc

SEQ ID NO: 154830 - DNA, 1507 bp, Zea mays
  Clone ID: MRT4577_72789C.1
cgggttgatgccttctaccgctccattccagaggccatatactggccagccttcatcatagcaactcttgcggcagtagttgcaagtcaagcaaccatatctgctacctactcgataattaagcaagcccttgcactgggctgtttcccccgtgtcaatgttgtgcatacctcgaagaaatttctggggcagatttacatccctgacatcaattgggtacttatgattctttgcattgctgtaactgctggattcaagaatcaaagccagataggaaatgcatatggcactgcagtggtgattgttatgctagttacaacatttctcatggtcccagtgatgctgctggtatggaaaagccactggatacttgttgtcatcttcctcgtgctctccttgacggttgagctcccatacttcacggcgtgcataaataaagtggatcaaggtggctgggttccactagtcatcgcaataaccttcttcgtcatcatgcacgtgtggcatttctgcactgtgaagcgctacgaatttgagatgcacagcaaggtctccatggcgtggattctggggctagggccgagccttggccttgtcagggtccctgggataggcttcgtgtacacagagctggcgagtggcgtcccgcacatcttctcccatttcgtcaccaacctccctgccatccactcggtggttgtctttgtctgcgtcaagtaccttccggtctacacggtgccagccgaggaacgattcatcatgaagaggatcgggccaaagaactaccacatgttccgctgtgtcgcaaggtatggatacaaggacatccacaagaaagacgacaacttcgagaagatgctcctggacaggctcttgatcttcgtcaggctggagagcatgatggacggctactccgactccgaggacctcaccgtgatggagcacaaggccgagaggtccaccagatcacttcagctgatcgagaaggctgggggtaataacacgatgagctccaccggtgacctgagctactcatcgtcgcaggactccattgttttggccaagtcacccctgacagggaacagcctgacgagatactcaagccagacacccggcgacgagctggagttcctgaaccgaagcaaggatgccggcgtcgtgcccttcctcgggaacaccgtcgtgcaggcgcgcagggactcggggatcttgaaaaaggtcaccgtgaattatgtgtatgccttccttcggaagatgtgcagggagaacagtgtgatcttcaacgttccacatgaaagcctcctgaatgtagggcagatatactatatatgaatatttttgttttagattcttctgttcggactcaaagtgaacattgtacatggtgatcagtcctagagtaaagcttttagtcaggttctccggcttttagtcaaaaaaaaaaaaaaaaaaaaaaaaaaaaaaaaaaaaaaaaagggcggccgccaccgcggtggagctgccagtc

SEQ ID NO: 154831 - DNA, 574 bp, Zea mays
  Clone ID: MRT4577_7278C.1
ataacttttccgtagagacggatgcatttcacatgtttccgcgcgtacgaagcatgagcactaaggatgcctggtgtccacgggctgcgcttgcggatgctcgtcctgctctcgcgtctcttccgcaagaagggttacttgcccgctcaccacctacctcctcatctacaagatcggctactacgtcaacgttaaagcgcacggagctcggaaataacgtgctgccgccaaattttaccacggtcgccgcggtcgcttttgaaacggcatcaaacgctatattcggcgaagagataaacaagtacgtgaatgctctcatcatagcggaaacgtatccttgaccgcgtggagcatgtgcatccgtcccgctgccaacaatagctccgcctgatgaaggagattcatgaccacctgagagagatatgaaaaggaatgagactatgctctcagcacccagaggtagccgaagctgcccatccctggctccatgcatgaggggactaccatcgatagcgtcactaccatcccgtacgatgaggtccaagatctttagggagggtactaggttgattgt

SEQ ID NO: 154832 - DNA, 832 bp, Zea mays
  Clone ID: MRT4577_72790C.1
cggccgctcgaggcggcgggccgggaaaaaataatctgtcgtaggctcgttcgtctgcaccggcgccggcagggtctcgtcggacgacagggcctcaaaaaggctcggagagctacgccgtcgccgtcgcccccgcctcgggtattcggcgatgcaagatccgccgccgacgggggaaaccccagacagtggaccgattgctccaatgtgcaatccaaagggctcaccctcccagcaagatgatgattctcgaggtggcgaagtgatacgatcattggacgaccttccagaggatatctgccgacgtattcatacccgaatgtcactgcaaaatgctgcccgcttggcttgtgcatcacacacatttcggagatcatggagatgctatcccaaccttgacttacgtcagagaacactaggtttgaatggagatcacatcagcaaagttgaccatattctgcaaaatcactccggcgttggcatgaagaaactaaggattgaactttttgactgcgacaaggttgattcctgttatatcagtagctggcttcgtattgctgttacagcaggaattgaagaactcaccctttatctgcccgctacccctgaggacgaagcatactacagtttcccatactcgcttttatttaatgggagtgaaaactcgattcggtatcttgacataggcatctgtgcctttcgtcccacggctgggcttggtcgctggagaagcttggcaattttatctctgagtaatgtgctgattgctgacgatgagctagagggccttctttacattgtgctgcattggagcatttggcactcctgaatt

SEQ ID NO: 154833 - DNA, 458 bp, Zea mays
  Clone ID: MRT4577_72791C.1
ggctcctgtatagtttggccgacgtcttccgttattctgatctccgtgtttaaattagttcgacaagagctagcgtcagatttcttcttcgtcatcaggaagagctaccaaatggacagtcaagtttgtaaattagctagttgcccactggttcagtccatgcattaaccatcttgggtatccacgctcaaataaagccggaggcggtggtggcgtcgaaggtcagcagcatgatccatcaacggccgccaatgccagtggcagcagtgcccggaagatgaagacgcccgagttcaacttcaccggtgcgcagcagggccagcagctgggcgcggccgcgggccacctctcgcggatctccgaggacggcgccttcccgggcggcatgatgggcgactgcgcgggccgcggctctgctggcgagagcagcggtgccgtcgagtcggggagatcgtact

SEQ ID NO: 154834 - DNA, 553 bp, Zea mays
  Clone ID: MRT4577_72792C.1
cttgtgtctgttgcctaggagcaagatgctatctgctaatcagatcctaccaccatttaccaactcgactgactaggcccgcttgcgccgcatcccaatacgacatggacatgccttgcctgctggcaacaggatggcaaaaggcataactaacagtccaaggcggcactccctcgtaggcgcttccataggccctcctgcccttgttgggcggcaaggcacaagcgccggctaccgtgtgacgaagctgacgctgagcgcgctgcagcatcctggccctgaggtcgtgctcctcctgccaccctggctggatctgccactgcacctccatgcgccgcctctgcagccggatgacaccctgcgcgcgatccctcagcacagccgacagctgttcgacgagccggccacaggacccgcggtgggcggccatctccatggcctgctcttcatcgcccttggccttcaccgccgcggctggggctttcgcctggaacgcctcataggccaccctcttgcgcgcgggcgcgatggacggcgtcatgtaaggcggccg

SEQ ID NO: 154835 - DNA, 480 bp, Zea mays
  Clone ID: MRT4577_72793C.1
ccaatcctgagtgtaaaactgcataatactgagttgatgttccaatcatgaatttctggaggagattagtgtatatgtcgctatagcaaaacttttatgtacataagcacatgtaccactcccatccagcattgacaacaaacgcatatcaagcagattcaagtcttcagaaaggaaaacacaccgaacgatgcacgataatatgatatcacacgtccccgcaactaaaatttcatcaatcacacatatctggatatatcttacacgtgctgctagctagtagtgcatgtctgcaaagcttctagcactggttgtgcccttgcacgtagtcatggaacactgaatccactccaggagtggagcaacaggaggcccaagaaccaacgctgccgttcgccgtctagtggtggtccgttgccctgaagcagtggtctatgccatcgtcgccgatgtggctgccgttctccccgaagcactgga

SEQ ID NO: 154836 - DNA, 402 bp, Zea mays
  Clone ID: MRT4577_72794C.1
cacagctgaaacacgtaaattccattcgctcgttcaaacatcgcaaattataagtagcaagcagcaagaggaatggcaaagcctgcagatcagcaaaggcgacattcttcctgagccaccacatccagtatgttgtatcatcagtgtcatgttcttgcaggcaggtagaattcagataaccaaacgaggatgatattacagaaccggacgggtaaaatcgattccagtacctaaattagcaacacaagcaaagagatcgaggagcgaatcaccagtcaggcaccaagaagcatcgcgctacccggcgagcgggttggcgtggacggtgacgcggttgaggcggatctcggcgagggggcggtcggctgggccggtgggggtcttctccatgaggtccagcac

SEQ ID NO: 154837 - DNA, 275 bp, Zea mays
  unsure (1)..(275): unsure at all n locations
  Clone ID: MRT4577_72795C.1
acaagaagaggagaaccgaaccngaccangncgcnganccgccgcagcaacgngnncgaacccnncncccncgaccncnggggaccccgngagggcnnccccnncggcnccggcagcagcagcagncggggggccgcgnncccgcggaccagcncggagaccgcggccnncgcnggcgcgcggancgacgggaaggagacnccagaggcgcacgngcgcaaggccgacgnaccggggcngacgaaggaggaggccaaggcggaggcggaggacgg

SEQ ID NO: 154838 - DNA, 337 bp, Zea mays
  Clone ID: MRT4577_72796C.1
tgatggagcaaacacaaacacggcagggtcaaaatattcccatggagctcccagcggtggggacaaaaatgtgcggcccaaatgccctaaccgtcttacttgtgaacacgtggctggccaaattaaggacaaagcgttgacgatcaccgatgcacgttcacgcatttcaacacatcctggtaacggttaggctatgactgaaccaacatgtgtcagcaaatgtccatcttcggtcattggaaataatggtctcacagaaacaaaccgtcgaaattagtcaaaaggtgctgcaatatgtcatgctgaatgccgccccttcgaatttatggcgaccaac

SEQ ID NO: 154839 - DNA, 491 bp, Zea mays
  Clone ID: MRT4577_72797C.1
gcacgaggcaggacaggatctacgccgtagagatgttcaggatcttcggtaaagtgcttgatttcgttactgcctgccgggtttcggacgccgaacagatgtggagccgggttggccgggaaaacgcggcgacggaggccgactccatgtcatgcaggctcaaatctatggcggtgctgcacttgtaactgctgcttacttttgattttttttctttctttattcctttcttcctccttgtgtgttgtagcttgtagcgtatagtctggttgcacagatttgtcgtcatcacggcttttccattattcatttatttgtaggcgaatcatactcgtggttcccgagattgttttgtattctgtgacagtgatcagactcgtattctcaacatctgtatccggtactaccaactattccagttactgtaacaaacattccaaggtctcaaaaaaaaaaaaaaaaaaaagggcgccgctcgcgcggacgcgtgg

SEQ ID NO: 154840 - DNA, 1245 bp, Zea mays
  Clone ID: MRT4577_72798C.1
ggccgggctgaaggggaggttcttgttctccgtcgccggcgtcggggacgacctctacgtcgtcggtggccggtccggtggctcggatgccagcaaggtgaagacgcacaagggagtgctggtgttcagccctcccaccggctcgtggcggaaggcggcgcccatgcggagcccgcggtctcgcccggtgctgggggtgtttgagatgtccgccagctgcagcattctccacactcgcgtagagaagaacgtccggcgcggcaagtctcggttgggtggcgcatccgctgtgtacgaggacccgcaccggctctccctcaggcgcctccgaatcagggacatgctggacgaggacactgattccactgagcgcgcttcgtatcatcacggcagatccgccggacacgaggagggcaaggaaggccaaccgaggctcgccattgtcgccgtcggcggacgcggtcgctgggacgaaccactggtgtcgggggagatatacgatcccgtggtcgacaagtgggttgagattgccgggtttcccaccgacgtcgggctggcctgctccggcgtcgtctgtggccggacgttctacgtgtactgcgagtccgacacgctcgtcgcctaccatctggacaagggctcctgggccgtcatccagacgctccgcccgcctccgcggctccgcgactacgccccgacgctggtgtgctgcgcgtcgcggctgttcatgctctgcgtgtcgtggtgcgaccgccacgagccggtgagccgtagggagaaggtggtgcggaagctgttcgagcttgacctcggctcgctccagtggactgacgcgtcggcgcacccggacgcgccgatggatccccacgcggcgttcgccgtcgggcaggacaggatctacgccgtagagatgttcaggatcttcggcaaagtgctcgatttcgttactgcctgccgggtttcggacgccgaacagaagtggagccgggttggccgggaaaacgcggcgacggaggccgactccatgtcatgcaggctcaaatccatggcggtgctgcacttgtaactgctgcttacttttgattttctttctttctttattcctttcttcctccttgtgtgttgtagcttgtagcgtatagtctggttgcacagatttgttgtttccatgaacagacatcacatcacgtcatcacggcttttccattattcatttatttgtaggcgaatcatactcgtggttcc

SEQ ID NO: 154841 - DNA, 384 bp, Zea mays
  Clone ID: MRT4577_72799C.1
gggaaaacacaacccattggaacatttgattactaaaaaaggccaactttgggaccagaccatgaagctcgttaaaaaaaacgggcaggcccccaaaacacatttttggggggaagccataaccccattggcgcaattaaaggttggggaccccccggagctcctcggggggccccacatccacggggcaagcagtcgggggggtgactgggagcaacagggacctaggcattggtcccctgctggggggggggaccccgagtaaaggggggcccccgttttcggcccttcttcaggccaggccccggggcccccttttttggatgggtcaagggccaccgccttttggggggtggggcttcttggcgcccggacctggggggg

SEQ ID NO: 154842 - DNA, 594 bp, Zea mays
  unsure (1)..(594): unsure at all n locations
  Clone ID: MRT4577_7279C.1
tccaccgcggtggcggccgccctttttttttttttactgctggacaatccagtaactttgatgaacttacaattaggatagctattgtgtttgttcctaccactaatgtcagttacattttttccctctgcaatttagcaaatattaaatacatttttaatggttgaagataggaaaaaactgtttcaagctgcacaaaaaagtatgtagccacaaaaatataatagcctgtacctgtcaggcctgtaggttataccggaaggtgtttggtataaccggtgtcccatggccaaacttgagtagtctggccaaccactcccgtcgttgtgaaacccagggaagaaggcatcagcttcaacagaaacaaaataatcaagtgcatcccagagcaaccgatgtgcttgcctcccgaactcaatcagtgaagcctccggttctgtgtcattctcaccaatccaaccataccagccttccttctcatgtgcatagaatggccttgcaggaggtggaggcagcggtcttggacgaggccctgctctcttccattcttcaatgagttgtttttcacttttgngaggtggaggctgtggcaaa

SEQ ID NO: 154843 - DNA, 432 bp, Zea mays
  Clone ID: MRT4577_727C.1
gaaccaaaaccatccgttacaaaaagaaaggtacaagccataacaatgaagattaatccaattgggacaatccgtccgtgctgtgcttaaataacattacccggttactagaaggcattctttgacatttattgatgagcacacatctataatgaacatctcgccggctgaagcatcaactatacgcctacaatctgaataagtacagaacacataagaccacactgttcactcgacagacagtccatagaatggatggatataatggtaacacacatgtacggcattgctcatttaattagttatcgggaaccaaacttgtggcccatgcccatgctttgcatgcaatggagaaatagatttcttcgaagaagttctgtatggggcccttacaaaggacaatggtcttgaccaacaagcctaacatggtga

SEQ ID NO: 154844 - DNA, 1173 bp, Zea mays
  Clone ID: MRT4577_72800C.1
caagctgaattaccaagccaatcaaggagtgccgagaacacctctgccgttgctatggcaggctgtgaatttgtataccccaacaatatttgaattgtttagaaaggaatgtgaacaaagtatggactgcatggcttatggttgtggggaatttggctctttttctgaatatatgattactatcaagaacaaatctaaggatcagcttgtgcggtttgactcgtcagacgcttcagttgcatgtacatgcaaaaagtttgaaaattctgggctgttatgctgccatatattaaaagtatatgagctgaggaacattaaagagattcccccacagtactttctgaagaggtggaggaaagacgcgaagttggtgatggatgaaactgatgggtttaactttgacacaaaatcttccattccaggacgttatgcagctctctgccgtctgttctacagaattgctgctaaggctgcagagaatgaagagacatttgcgctgatggcgagccagtcagataaccttcttgtaggagttgaacgaactctgttatctacgctgtctgacaagtcatctggccactcccttacggaccaattaactcgcatggctgagaatgactatctacttagcggtggccttgaaggtattggttctactggaaagagtgtgaagtcgctcgccgaagaaatggtttagataccaacaagcgaaagaaagcaaaaaaagggcaacctgatgcaacagatggtgggccaacaggaagagagctgaatatcggtcaagcaagtttccattcagaaccgagcaacgcttcaaaccagttcatcccagaccaattgatgcagggacattatgtgcttggccacaatttcgggccaggtagctcacataaccttcacgacaatctgaaccagttcgatcaggcttcctcggctcctaccttgcaacaacagccgtttaccgggaatggtcaactgacccagggatatcctggtgatatgcatgcgttgcagtttgtggagccaaccccccagatagaccaccaggatggggatgagggtcagtcgtcaataccagtgtgggattttctttgagctaggttgatctggcaccttcctactggaggggaggagcgagatgcgccacatgtagctcgcttacaggaaagcccg

SEQ ID NO: 154845 - DNA, 248 bp, Zea mays
  unsure (1)..(248): unsure at all n locations
  Clone ID: MRT4577_72801C.1
cactagaactcaatccctaacaaacaaaatttatagcaccaaaccaacaaacgcaacccgcctatttctaatataatatcacctaaccccaaaaaactnnccaatnttcaacaacatacaaaataataaaaacccaaaacctatcccaatgctcctccccttccaacacatcccccttcccccatctcccacataattaataaccaataaaccattaccccttcccaacaattacacatcctaaatct

SEQ ID NO: 154846 - DNA, 198 bp, Zea mays
  Clone ID: MRT4577_72802C.1
gggtttggtcaaatttgacaagccctagtgtaaattcaaagcacatgaggagggttcatttcgaccggggcacgatactgatcggaatcaacggcatcagaaggatcggcaggctcgatgccagagccatcgtccatagcgaggatgttctgctcctgttcggcactaccaatcacataacgacggtcatcatttact

SEQ ID NO: 154847 - DNA, 444 bp, Zea mays
  Clone ID: MRT4577_72803C.1
cttggaatcaaccgtcactttttttactttttaaagcgagcttttatgcaaacatggcaactagagcacactatgaggaaacaagccatcaaaccaaaccggtccggggaaccacggccacaaaccagcaacgaactcttcacaaacatactaccatgcgcgcgatcctgaggaccgtgataccgaccgtaactggaccccaaggacaacctcaatggttatcttgatggggcccgggacgttggtaagagaccaccacacggtgcaagcacgcctgccctcacatctctgacggctagaacccgaccttcttcagcgttcccccaagactgtacacaagaggactgggcaccgacttgaacgtctgaccgaacgtgctctgggaggccccctctacttcctagcggtcacgaaagccctgagaccgactacattcgacgcctg

SEQ ID NO: 154848 - DNA, 621 bp, Zea mays
  Clone ID: MRT4577_72804C.1
cgagtacaagctattttttttttttctttttcttttttgcttatttatatgttagtctcttttctattctaaaccatacctagtccactctttagcgccgatcagtaacagagggtcacccatgaccatgggtcgcccgggcccccaaggacctgggtgaaccatcgaaacggaaaggataatatatagggacaaaaggattgtgttgagcaaagaaaaacaaggctcctattacaattgtttaacaaacaagaacctcgcccaggggcggccgttggaaaagggggaattctcccaatatccataaaactgggggcccttcgggcctgcatttggggggcccaattcccccccaaggggggcgaataaaaagtcacaggccgcccttttacaaaattgtgaccgggaaaaccccggcacaacccaaattattggcctttaaaaatatccccctttggcccgttgggggaatacaaaaaacccaaaccgatggcccttcccaacatttcccaaccggaaaagcgaatggcccccccctttaaggaacattaaccccccggggagggggggttaccccctaagggacccttacactttccagggccctagagcccggtcctt

SEQ ID NO: 154849 - DNA, 1669 bp, Zea mays
  Clone ID: MRT4577_72805C.1
cgggtcgagagacggtcatgtccttttggctgtttggtttattcatatcacaacttttgagtgtaaaaaaaaaaaaaaaaaaaaaaaaaaaaaaaaaaaaaaaaaaaaaaaaaaaaaaaaaaaaatgatgacttgggcactatgttcttgcataaaagatgttcctgtcatgttattaattaaattgttaaagctggtcttaaacatttgaaagcttatattgatgactttaaaactgctataacctttttaaatgcttcaaatcaacgaatagctgcatataaaagctattgtatgagtatggctattcgtcctcgtaagtttggtgttgacatggatgttagatggaattctacatacttaatgcttaaacacctagtaccatacaagtccagcttttctgtttttatcaaaactcagtatcctttgcattctgatggtactcctttactcactgatgatcattggacaattgctgaaaaagttctttctttcctagaattattttatgaatccacagttgcattgtctggtgtgtactaccctactgctactttgatgctacaccatattctaaggatagccagacatctaaatgcatttgaaaatgatagacttcttagggctgctgttgttcctatgaaagataaatttttgaaatattggagggatattcctattctatatgctgttgcatttattttagacccaagggctaagatgaggggttttaacaaactccttgtcaggttagctagcttaactggtacaaattactctaatgttccaattgaagttagatctaaactatccaagatatttcagttgtatgaagctaaatttggtgacacacgcctgcgtgctaatcaacacccaacatctcttggttctggtaagaaaaaaatggcatgggatgaaatctatggtgatgatgactatgatggtgagctttctgtgggaaggagaccaggttctagttctatctctactgctgcatccacttctgagctggcatcttacttagatagtgatactattactgagtttgatgaggacttcaatgtcctatcttggtggcatcagcataagctcacttatcctattcttgctctacttgctaaagatgtattgacagtcccagcttctactatatcttcagagtctacctttagtcttgctggcagggtgattgaagagcgtcgacgtcgcctggctccagatatggtcgaggttttgtcttgcataaaagactgggagcttgctgatgctcacctgcagcatactgtggaggaagagacaagggaacttgaagctgaacatgagaacttgtaccttgatgatccagaagaacacaaccagtagttggtggtggactggtggagtggtggttggctagcttagttgtttgcctgatgcctgatggcttattcttgtaatgaactcatggactgtactgtatctgtatgaacttatgccttagggcttaggagctgtggctgtactcttttttccttcttaggcttttttctcacgaggtgtgagtttttgcctaagaaggtttttaatgaggcagccattgcacacagctccataattatttgtttcccatattttaaaaaaaaaaaaaaattagtatttagaattttagaattttagtgcttgtgtttcc

SEQ ID NO: 154850 - DNA, 312 bp, Zea mays
  Clone ID: MRT4577_72806C.1
gtgttggggtttttttggggggtggttttttttttttttttatccatttcacatcgaacataccatttccaagtcacaaattaaacccgacatttttgccaacccttattacttttaattccgcaaacaaaacaagttggcacccccgattttcaggttgaaattacaggctttaacaggtaaacaagcaaccttatggtccatccatccccctttattaaaacttggaaaaaaaatcctaaatttgctggctgacctcggtcgccttcttcttcttaaccaaatggcccccccccgggattacaaccaccc

SEQ ID NO: 154851 - DNA, 251 bp, Zea mays
  Clone ID: MRT4577_72807C.1
attcggctcgaggaggtcatcaggtggcttcttctgggcatacacagcaagccgctacgcccgattaacgtgggcgggcactacgatctatcagcaggcgtgcacagacgggggggatgtgcgacggtatatcatgccctgggagctccacattttgacacagtgcccgccacgcctgggaactcgatcagaagctggaggagtactatgactggcatgacgaggacccggctactcccaagcttgagcgg

SEQ ID NO: 154852 - DNA, 243 bp, Zea mays
  Clone ID: MRT4577_72808C.1
cctcggggaagtcttattccacattctcaagacatacggagggaaatatgttcatatatgaaaacgaatttttcggtgcattataaggcctatcttgaagccataggcaatgagatcggaaccactcggggaagccaaattccacatattcaagaaacaaggtggcaaaactgctcacatatctactggaatggtttggttgatcattaggcctatccccccccaaatataatgccatcggga

SEQ ID NO: 154853 - DNA, 1630 bp, Zea mays
  unsure (1)..(1630): unsure at all n locations
  Clone ID: MRT4577_72809C.1
ttgggaccctcgaggccggccgggagcttctcgctctgaagcttcaaactaccccagttatccggcgcggttccttgcttgtgtcgagcagacatcacaaaaccaagaaacagctgaggcgccgcgcgcggaggtagctgcctgaactaatcggtgtcgcaatggccgcaacgagtatgatcagggcgccgattgggccgaacccgaggctggcgtgccacgccccggcgaggggcggcggcgtggtcaggtgctcgttgcagggcgcggtcgtcggcggccgggcggagtggcagagcagctgcgccatgctgtccagcaaggtggccgcgctcgggacgcactccatcaacggccacgtcgcgccggcgccagcggtgctggatttggtccccgtgagtagtatgaatggcgccgtggctaagaacctgccgcagccgcttcgcatcgcgcacctgtcccctgcgccgatgcacgggtcggagctgcgcgtggcttaccagggcgtgcccggcgcgtacagcgagaaggcggccgggaaggcgtatccgggctgcgacgccatcccctgcgaccagttcgaggtggcgttccaggccgtggagctgtggatcgccgaccgcgccgtgctccccgtggagaactcgctcggcggcagcatccaccgcaactacgacctgctgctccggcaccgcctccacatcgtcggggaggtccagctccccgtccaccactgcctgctcgcgctccccggggtgcgccgggagctgctcacccgggtcatctcccacccgcaggcgctggcgcagtgcgagctgacgctcaacgccatgggcctcaacgtggcccgcgggggggctccgggacaccgccgccatcgcgtccgcgcgcgctgccgagctctacggcctccaggtcctcgcagccggcatccaggacgacgccggcaacgtcacccgcttcgtcatgctggcgcgggagcccatcatcccgcgcaccgaccggccgttcaagaccagcatcgtgttcgcgcacgacaccgacggcacctccgtcctcttcaaggtgctctccgccttcgccttccgcgacatctccctcaccatcctcgagagccggccgcaccgccgcaggcccatccgcctcgtcgacgacggcaacatcggcaccgccaagcacttcgagtacatgttctacgtcgacttccaggcgtccctcgccgagccccgcgcgcagaacgcgctggccgaggtccaggagtacacgtccttcctccgggtgctcgggagctaccccatggacatgacgcccatgaccgccggctcttcctccaccgtttcctcgtccgatccctcgtcgtcgtgaattgccctcctggatgctggagctccgaggagaagtcgccgagtagagacgttgggtttctgcttatgtcgtcctactcgcccgcccctcgctgcggctggagtaattagttttgagtttactttaatctttcgtggtaatacgtgtaattgttccgcggtgaatataatgtgagatatatagtaccagtatggcattcatgttcgtctgaaaaaaaaaaaaaaaaaaaaaannnnnnnnnnnnnnnnnnnnnnnnnnnnnnnnn

SEQ ID NO: 154854 - DNA, 524 bp, Zea mays
  Clone ID: MRT4577_7280C.1
ctttggctacacgaaaagtttgtgtttcacatgagaagtttttgagtgaaaaaccttctctgaattcggctggctgctgtagtcggatcaaactgttgcatcttacttgttcttgttcatacagggagtgaacagaatgcatcgctgttcagtatatcgaacgcaggattccaaagtttggacatttcaatgcttgtaataaccagtggcagatcttaaaaaggaggccatgtctcctccccagttttaaaacacacatctttgtcaagctccgccactgcctataactgttaaatacatctcaataatcaacattggccatgagacttgacaaattgagattcttctgtctgccaggtatgtgccataagacagatgatacagagagactgattgttatattagtaaactgtgtaatttcgagggacaacactatattttgttgcaactcaactcttaaatttgacacatgtatgtgacaaattagaaaatgtgatggatggttgatcaagaaacattatttt

SEQ ID NO: 154855 - DNA, 1851 bp, Zea mays
  Clone ID: MRT4577_72810C.1
ggccggggagtcctactccatgaacctgcgccccgatcctaccgcgccaccaaccccttgcactccaaacgccggcgccccctatatatcggtcgccacctgcccttgtcctcctcgaggccggccgggcagcttctcgctctgaagcttcaaacttaccccagttacaattacccggcgcggttccttccttctgccgagcagagagcacaaaaccaagaaacagctgaggcggagaggtagctacctgaaccaatcggtgttgcaatgtctgcagcgggtatcaccagggcgccgatcgggcagaatccgaggctcgggtgctacgccccggggaggggcggaggcgtggtgaggtgctcgttgcagggcgcggtcgtcggcggccgggcggagtggcagagcagctgcgccgtgctgtccagcaaggtggccgcgctcggtacgcactccgtcaacggccacgtcgcgccggccccggccccggcgccgactcagaacggggcggtgctggatttggtccccgtgagtagtagtagtatcaatggcgccatcaccaagaacctgccgcagccgcttcgcatcgcggacctgtccccggcgccgatgcacgggtcgcagctgcgcgtggcctaccagggcgtgcccggcgcgtacagcgagaaggcggccgggaaggcgtacccgggctgcgacgccatcccctgcgaccagttcgaggtggcgttccaggccgtggagctgtggatcgcggaccgcgccgtgctccccgtggagaactcgctgggcggcagcatccaccgcaactacgacctgctgctccggcaccggctccacatcgtcggggaggtgcagctccccgtgcaccactgcctgctggcgctgcccggggtgcgcaaggagtgcctgacccgcgtgatcagccacccgcaggcgctggcgcagtgcgagcacacgctcacggccatgggcctcaacgtcgtccgcgaggccttcgacgacacggccggcgccgccgagtacgtggccgccaacggcctccgcgacacggccgccatcgcgtcctcccgcgccgccgagctgtacgggatggaggtgctggcggacggcatccaggacgactccggcaacgtcacccgcttcgtcatgctggcccgggagcccatcatcccgcgcaccgaccgccccttcaagaccagcatcgtgttcgcgcacgacagcgacggcacctccgtcctcttcaaggtgctctccgccttcgccttccgcgacatctccctcaccaagatcgagagcaggccgcaccgacaccgccccatccgcctcgtcgacgacgccaacgtcggcaccgccaagcacttcgagtacatgttctacgtcgacttccaggcgtccctcgccgagccccgcgcgcagaacgcgctggccgaggtccaggagtacacgtccttcctccgggtgctcgggagctaccccatggacatgacccccatgaccgccggctcctcctccaccgttgtttcctcgtccgatgatccctcgtcgtcttgattgccgctggaggctggagctagctccgaggagaagtcgtcgagtagggacgttggttttctgctcatgtcgtcctactcgatcgcccctcgctgcagccggagtaattaattttgagtttcctttaatctttcgtggtaatagtattatgtacgtgtaattgttcaaaatcatccgcggtgaatatatctgtgaaacagtactagatgacattcatattcatcggttgtcggaaactctgaacactttccagtactactagcagttgctatgaacaagaagaagaacactttccactac

SEQ ID NO: 154856 - DNA, 375 bp, Zea mays
  Clone ID: MRT4577_72811C.1
tcctcttcactcagctcattctcgtccatccttttctgtataattttctttgatctgtgggggttgcatccatgggacgccctcatcttcctgcactacagctggcctcctgtgcttactacgtcaatcattccctccatgagaaactccttctctcctacatcgccttagctatctacttcacaccagaagccattccgttccactaaccaatccatgactcttagtgcccaaactcggcgtcctatgtccccatatggatgagtcatgttcttggatccctgacatcacacatattaacacaaaccggccatccaaaatctggacatgcaagcttgcatagacatgtcttgaacagtcagatctgcaaacaac

SEQ ID NO: 154857 - DNA, 388 bp, Zea mays
  Clone ID: MRT4577_72812C.1
aacgggggggcccaacaaccgggaaaagggttaaaaaaaaaaaaaattttgggcaggatccaaatggccaactcccccaaaaacacccctttcgggagggggggggaaaaatttatttttctacctcggggcaaatgcccggacccgcggggtaaaacaaggggaccgtcctttaaatttcgaaaggggggggtacccaaaaaggggaccggggaaacgaaacaccccgccattgagggccccaggggaccaaagggggaaagggcaaaaaaacaattggcccccgcttataccaaaagggggggaaaaaaaaaggggtttttaggggccttttaagtaccaggggctcccccttttgacccccaaaactttttaaccccgggggggg

SEQ ID NO: 154858 - DNA, 969 bp, Zea mays
  unsure (1)..(969): unsure at all n locations
  Clone ID: MRT4577_72814C.1
gttgcagcggaaatcttactaccaaattttacaggttacaaaaattttacattattttatcggagtgattacaaaattataagtttgaaatgtatgctagctcaagtgaccatcctcattaagaagtatagaagaagtacttagacttataagaaggccgagcccaccggcacttaaacaccatcatcagcagcacaaaactaaacctgggtaacactaggttagtgtttgttagacgtcgatcacttgatgatcagtctttgttccaatacttgcttcgtccatccatcttcaggttaattcatcaatatcatcttgcggattagcacgcgcttggggttgacttgactcttttccgcatcacgcgattatttatcgtacctcatgagatgcacgatgcacatgtatgagcacgagtatacgagtataatttagataatctacactaaaaaggatgaaacacttaaaatcaagcattaagcaccatggatatcacagcagggcatcgactatattcattaaccaaattgacatgttacactagaaaatctattttttattcctagttttttgattaactctttaaactatgtatcttaattacttgatttacctatttatctaaatcgaacatcacaatatatgtatgctaaattaataaaaattgtcgcaacctacatatctatcaattcatttattaaaacaaaataaaaggagtagcgaatcaacttacctaaaaccagcttggaattcgctgaaacgacgatgggacaaagacctccaggatcgagcgtgacaggtagcttccgagttcaacgcaactagcgcacaattggaagataaatcgttggggtcgacgagcaggtcacggacgcaacgtaaattgacgacgaagaataaggagattgctggcttcgacttcagcaccaaatctccttccaaaattataatcggctcgaaatcnacaag

SEQ ID NO: 154859 - DNA, 565 bp, Zea mays
  Clone ID: MRT4577_72815C.1
tcatttcatagagagtagcgatctttgtctctatccctccccgtctctctcacagtcatccggctcgctaggtcttctcttccgctgccgtcgctgctgccgttatgactagatggacttcatgaagcggagctccaggtctatctacccgcgtggctgcagaggaggaacccgtcacattcagtacgctactctcctccgacgaatgctgaccaatatgtcggcgtgtcaatggtggctatggatagctgccacctgtgctgacagtatggatactgtgaacaagggtggcgtgatagagaagaatgatgttgctctatcagaccacactgcaatttgtgatgaaactgaagtctctgaacttgctgctgatgcccttgacactgcagagattgatgttgacctttgcgaatctattatattgatgtgcaggattgtcatcgcgactatgattgccacagttgaagacgccagtgaccatctatgacaagctgagatactgtcaacgcatatggcgcatctgcctaatcagtgtctgacgacactaggggactatggttcgaag

SEQ ID NO: 154860 - DNA, 406 bp, Zea mays
  Clone ID: MRT4577_72816C.1
ctcgacggcggccgggagacttacctggacggggtcgatgggcgatcatgaaggcccatgacctggatcagtggtccacattgcacttggtggacacgctggtctaccatctccccaagtgggagagtggacgtcataatttgtgctagagggggtacgcgttcgcgcggcccctaccagttttaaacatttacttttgggaccttggcgggtttattatgttatgtgggacttactcatctagtgcaaaaaaataaaattaaggtctcgttaaataaaatctagtctgggcgactattaaaccataaatttaaatattgattgttcagttgtaagattaattaatataaaaatagaaaaaacaaaaaaaaaagaaaaaaagaaaaaaaaaaaaaaaaaagcggcc

SEQ ID NO: 154861 - DNA, 321 bp, Zea mays
  unsure (1)..(321): unsure at all n locations
  Clone ID: MRT4577_72817C.1
cggccgggaccggcccccccgccccacggnacaacgaaagccggcaggnnccaccccccaggcaagacaacagcagcaccgaagagcacagcggcggaaaaggagcggcgccgaagcgccaccggaaaccccagcggggaacggagaaggggcagcagccgccaccgccgccgcaccgggagccgggccgaagccgaaaaagaagacaggcagcgcgagcccagacacaaagaggccgagggaagagggcgacgacgagcacggggagcccgcccgcaccaagagcaccgaagcccacaagcgaagccgccgcgcagaggg

SEQ ID NO: 154862 - DNA, 430 bp, Zea mays
  Clone ID: MRT4577_72818C.1
ggggccaaaccttttttatccctccttcaattaaaaatgtccaaaaacaaccaagccgttttgtttttgacaaaaaaactcggggggcccccccccgggggtttggggaaaaggggggattttaaaaaaacaggggggggggggggcacattggtccaaaaaaaaaaacccccaaacaaaatgtcccttggggctaatatacaaaccggaaaaagggaatacccggggcaccggaatgggcatcactggttaacttaaaaacttttaattttcttaaaaaaaagtaggaggcaccttttttctgtttcaatggacaaaacaaaaatgccggggacatgggggttttattttcaaggaagagttccccaaccaccacaccaaaaaataggcgtaatttgcccgtgacagaactcttggggacagggggccc

SEQ ID NO: 154863 - DNA, 533 bp, Zea mays
  Clone ID: MRT4577_72819C.1
cggacacaccatcatgaccacaacagactgcagcaagctcatgctacctctgatcaaccaataagatctggccaacctttctccctactctcagcatcaacaacttgacttacatctcaaccagactggtctacacatgaaccactgctcgctctatattgcatcaacaactattaccattgtaaccagctgaggtacttcctacctctttgcaacagacaactctcttccatttaaccaattgaacgcactgaaccccgctgcttatttgcaacagcatatactactaccatttatccagctagctgcagcaaaccgtgctcccttcttgacacagaaacaggtgctgcctttctaccacactttgcggctaaccccgcaaccctcttacaactacaacaatagttgacctctgcacaactcgctttgacagacccagcggacttctaccaacaacacatcatgtggtggtgccactcttttagattgcttattagctcgaattcaataataaagatttttggatgatgtat

SEQ ID NO: 154864 - DNA, 643 bp, Zea mays
  unsure (1)..(643): unsure at all n locations
  Clone ID: MRT4577_7281C.1
ggcacggcgaagcccgcccgctccctctctccctccagatcaggcgccgcctctccgcccccactgcccgcgccgccgcgctactctagggctaggggcggggaaccgctcgccccgttagccggggcgtggattgattcgcacctccttctcctcctctcgatcgggtttggaggttagagtaatgaaataaaatgctactcaaaagcaagtttaagttggccacagccattggcatcgtgctatcgatgctatcgctgctcgtgcacctttttcttgctaattattcagctgggggcattacaaagtacagcatgcacatggacgatgtccttccatttgaaccgaggcctcgaccacggagactgtggggtccgttggtcccacttgatcacttgcatccttttgtgaaacctagcaaatcatatgctgttcccagtaagcataatggttttatttatgcaaagatatatggtggttttgagaagatacagtcttcaatctgtgatcttgttgccgttgccaggctattaaatgccactctggttattcctgagatacaagcaacaactcgtgcaaaaggcataagtccgaagttcaaaagcntttcatatatatacgatgaggaccatttcatacatgc

SEQ ID NO: 154865 - DNA, 366 bp, Zea mays
  Clone ID: MRT4577_72820C.1
tctctcgtggttctcccgtactctatgtccttaccgccgacaactggtctatcgccgcccggcttaatccagatgctcaagtctgccacttgtcacttcacctgctactagcacctaacagagagatgtctgctaatcttcgagtctgcatcttgctaggccatttctagctttcttgccataattacacagtgctctttggaaaataccattcagatagcatgtactctacaccatcatctgtctccatatttttctgttatactaccatatatcactctatcacatacattctactactgtctcttaccctttctactgcatacatgccaccatcgcatcaaacccactcactaatatacatct

SEQ ID NO: 154866 - DNA, 252 bp, Zea mays
  Clone ID: MRT4577_72821C.1
cgtcaggtacctgtggtgcccttaggggatgcacacattgcggtacaacaactacaacaccaggtgctagcagaccttgctgcctcatgtcaggcacgaccgtagggctgctgcgccgcattacagttcactagaacaattgtattagtatggtgcaataccgtacatctacgatgtgagtcaactacaagcttgtgagctacgtggatctcatcaagttactcaaggtgcggtggtgaacttgcctgctga

SEQ ID NO: 154867 - DNA, 572 bp, Zea mays
  Clone ID: MRT4577_72822C.1
ataatctagggtttggggcttcagcctgaaaaagggaactttcctgggtaagaaacaggaactttctcctatatagaaacaggaacagaggatacggtctggaaaacccttcttctgattatcctatttttttttaccatattttcatattttactgaaagtacgctaaacgatcggtaaatacgataaacggtgttgatcggtatgggcttcccttccctgtcctgtttttatcctcggctccaactgctagggaatgtattagttttatcggaacatggactgcagtaactccatcaccttcttttgtttgatgtaatctctatatgctgattcaggatcatgtctgttgcacaggttgctcggatatgatgaaccaatctctcttcttagttggagaaatcgggggcaatgactacaacggacctcttctttctggagttcccttcgaggaaattcgcgccatcactccgagtgttgttgcgaaaatttcttctacaatcagcgtgagcattagttttattgtaggtgctgtagctgttaacaacatatatagatagtaatttacaatg

SEQ ID NO: 154868 - DNA, 449 bp, Zea mays
  Clone ID: MRT4577_72823C.1
aagctcggaattcggctcgagcaccattgtagacccatgttccaccactctccatagcgactagtaagggggggtttctaagacggtctcgggggcctaagacctcaccagcgaggctgacggccaaggctccccggccttgtacacgatgaccccgtgcgagtaggtgacatcctacgccagctgcaggacggagggctatatgggggactgcagccagaggagcacggaggcctatgtctacgctagcaccaccaccctggagcctccggcatacgagagggcatgtgccgccgagcccgtcaaggacaagctgtgagcatccatctttagtacatctgtgactgcgcttgcatggacacaaaacctggcgctgacttgcctccaaccactaggttttgcgggaccagaggtagtctgaagggctgactttgagtgagaggggatct

SEQ ID NO: 154869 - DNA, 452 bp, Zea mays
  Clone ID: MRT4577_72824C.1
cgggatcgcacatattatttagaccaacctagcacatagaaagcacactagcgttccaacaatggctagccacaatatttcgcctcctcatgctccttggtattcctccaagtgctgctacggcgatcatctttcgcgcacagctcacaagcaccgatagcttgcctccatcccccgtacctctcacccccggcgctcttatcgatgcgaaacgcacactggttcaaccctccgcgatccaacaggcaatcgcagctgacctgttacctctcgtacccttgctccaccaccaacagctagcccaactacagcagttccctcctggcgcctcatcttgtcacaaaccatacggcacacacacctctacaactttctgctccaaaaactcgcggcctactcctcactacaacctgctcgctcccctccaccaaatagcgtgcattgagctctgc

SEQ ID NO: 154870 - DNA, 529 bp, Zea mays
  Clone ID: MRT4577_72825C.1
atttctaaaaaaaaaaaaaaaaaaaaaaaaaaaaaaaaaaaaaaaaaaaaaaaaaaataaaacctaacccggactggccaataaaaaagggcgaaaaaaagaaaaaaaacataaacactggagaacagagggaacaaacataaaaaagggcccgagttggccctatagccaaaaaaaaaaacaaaaaaactgaaaaaaaatgtttttccctgcccgggggggcccctcaagggggggatttctgaaatttccttccccccggggggcctttgggccttggtttaaggggccccaatcccccttttggggggccttttcaaaattcccgggccctgttttgccaatgggcgcgcggggaaaccccgggtttaccccacttaatgcgggtgggaaccccccccctttcccccgccggggtaaaagccaaagggcccccccccttccccttttcccattatttgccccccttaagggggaagggccccccccctgctctgaatattaagccccgtgggggtgggggtttccc

SEQ ID NO: 154871 - DNA, 830 bp, Zea mays
  Clone ID: MRT4577_72826C.1
aatacatcaaaaataaatatattacaacatagtatgattatccttaccacggacaagataaatgggtaggtgagagaacaaacttgcttaagcaagccgaggatttatgagcacaacatgccacaacatcaagctgcctaccgtatcatcggtttatccatcatggtgctacacttgacatcgctgagcacggcgctcagacgtattaaacaaacaggcccagtcagggcttcgaacttatggtcttgaaaattaaattaaaatacacaaagctctcaatataaatacttctcaataaaaactaaatcttaacaaattcggacaggcggacagtcaccgtgaccagaaatcctttgccatcgggcatcacgatgacgagcccttcatccccggcagtcacgatgctgcaggacacgtgcacgggcttgctctccctgagcgcaaactcctccagcccgaggtcctgccactgcgcaacctcaggcttgtcgccagtggagccgccggggaccgacaggctatccgcggcgcacgtctcaacggtcatcgctctcgggttgtccccgacaccgtctctagcgacgacgaggagcgtgaaccgcggcacctcggccgcgccgagcctgtctctggcctcgccaacgcaggccccggcgagcgcgcggtggtcgggcgccccggaggctctgaagagcacggtgtcggtgtcggtgccgacgccgtcggcggcgaaggcgtcgagcgggacggacttgatgcggcgggtcatggtgttggggcgctggaagtagcccgcgtaccgcatctcgggatggtggcggccttgttcc

SEQ ID NO: 154872 - DNA, 532 bp, Zea mays
  Clone ID: MRT4577_72827C.1
gtggggaaacgcgctctggggtttcctgcgtaacgtcagttctcctccacatcgccctgtggtgggtctgtcggcgggtacgtcaccgtgctgggttctcactgcggtgggctggccttcgtcctcggcttcggccccggggggggggggcgcggtatatatgctgcatctcggcccgcctttgtctttatgcgggcgccgggcggcaggggtagccctgagctggtgcgtgcccgacacgggctgtcccaagcgtgggcttcgtgctcagctcctccggcgccgtgccgccggggtgcctccacacttccccgcgcggcaggtggggttgcacgtgctggcccttcctggcccccgggccgagggcggcgcccctcccgcggccggcgcctaacagctgcggctgcgggtcccggccccttacgcccaccttgctacccctgctcccgtgcgggaaccgctcctgccgggaactcccccccgcgcgccccccaccccgtggggatcaccgggccagggcctagggcccccc

SEQ ID NO: 154873 - DNA, 471 bp, Zea mays
  Clone ID: MRT4577_72828C.1
ctcctatagggggattgggcgtcaccacggcggcggggatttccatttcccctccagatccctgtaattatctttatggctcccaagatcctagccgtgcttgggttcctcggcggggcctcagcggcgggtctggcctgcttccatgggatagagatggtggccaacaagcccacgtactccacggtcctgaaaatactacaagacaccaagggcgcgggcgaggcgaatcagccccgggccgggacaatagtggtcgcccccgacaaaattaccaagactctggcgtcgctgcccgccaataacgtgcggacggcggcggagaaccacggccttctcagttacctctaccccatccagctggaccagatgaagacacacaccggcatactccccacaatgctctacgataccgacaagaaacttcgcgtactcaactacaccagggtcgactacggggagatggacttc

SEQ ID NO: 154874 - DNA, 235 bp, Zea mays
  Clone ID: MRT4577_72829C.1
cttcagcactccagctgcactccatgctcggccaaaaattctgcggcgagctccgatccggtccgactactaacctacgccgcagaggcggctctacctgatcgcgcgggggtggaggagaggggaagcgcggtttcgcggctgcatgccagcgtacctccgcaggcgaaggaagaggagccctaatccctcctgccctgtgcccgccggaccgatggactccgagctctggatc

SEQ ID NO: 154875 - DNA, 624 bp, Zea mays
  Clone ID: MRT4577_7282C.1
cggccgctcggccgaaccatcgaaccaactaaacaagcacagctgacacccacccctccgccaccgcagtcgccggtgaccaggacgcgcgcccgaattcgccggtggcgaggagaagggcgccgagtatggggtgctccctctcggggctcaacgccctctacgacgcagcgactggcggcggcgacgtgtggatcaacgagcgccgcttccgcgtcctccgccagatcggcgagggcggcttcgccttcgtctacctcgtcaaggagcacgacgcctcctcctacgccgcgcgcgacaggcacccctcccacgtctcagacgacgggacatatgctatgaagaaggtgctgatacagagcagggagcagctggatctggtgaaggaggagatccgcgtttcgtccttgttcaaccaccccaatctgctaccgcttcttgaccatgccataatagcagttaagagtacacagggagattggagccatgaagcatacttactcttcccagtccatttggatggtactctgttcgacaatgctgcagtcatgcagcctaggaaagagttctattcggtggtcgatgtttttgcaatattccaacatatttgcgaagcgatgaagc

SEQ ID NO: 154876 - DNA, 329 bp, Zea mays
  Clone ID: MRT4577_72830C.1
aaaccacaaatttggcaattcaaatagacgggacatacaggtttttaaaaaaaacatcaacacggtggatgggggttaacccattctgaaaaatttggagctaaatttaccgctggggaagcttgatcaggggcaatgggccaatggggccccccgccttaacttcccgatggggggtgcttttgggaatcccccgggctgggggggttgaacggggcctgtttggcccaataacgggtggggccagagggctcacggccgccccccaaaagggcaagggaatactgggggggggagattataacgttaatgggggggacgtatccctt

SEQ ID NO: 154877 - DNA, 290 bp, Zea mays
  Clone ID: MRT4577_72831C.1
atgacttgtaggtctcacaaggactgacgtggctttatgacaagggcgcacatgcattcaccatcgtggaaacagggaggcttatgcaggagaaacagaaaaactgtgtctcagtcgccgattatgacgattggatggaggcaccagtcacacttggtgacctctctcgtgaaggattcgagccaagagaaaactctgagagtaccgaatcaaatatattcacgcgtgatgcaaagggtcctattgtggaatgacgaccctactcgaggttttgagttgcatggcaatga

SEQ ID NO: 154878 - DNA, 575 bp, Zea mays
  unsure (1)..(575): unsure at all n locations
  Clone ID: MRT4577_72832C.1
gggcgattgggttcctctaggccggccgggaacatctctcgcgcttctgagctacatcaagttgactcatcaccgtctttcatcagtatctatctattaagattctgcgactgacgagatacacttatgatctgaaactgtatcatgttgtgtgatcacgcctcagctacgtgttcggtcccttctccctcgacgtctgggacgcctttgagggctatccccttcggctgccgcagccccagccgtctcttcccctcgtttcctcggaccagctcgtagacggcggccgtcgctggcgctgcggatcgaccggtgcgagactccagaggcgcacgtgtacttggtcgacttgtcgtgttcgaagaacgaggaggtgcaaggtggaagtcgaggaccgtaacgttcttctgatcagcggcgaacgcaacaaggagcaggaggagtagacggacacctgttgtcgcgtgtagcgaagcatagttgggctcctgcgcaagtcccgactgcccgagaacgctgagacggattagattacggtcgccatgccnaacggcgtgcttaccgtcactgtgccg

SEQ ID NO: 154879 - DNA, 231 bp, Zea mays
  Clone ID: MRT4577_72833C.1
acccacccctcaacacggcgcacccttcaggcgagacagcagtccgactcgcccccaacgaccacgatgagcacagcggtgagcccgatcaacaggaagagcgaggcaataccttatgtggatcacgtgggacacatgcccgacaggacaagttccggctcagacgagatacttctgagctgtggtagcatgggaacatgcgtcaagatcacatccggcacgtgcgacagc

SEQ ID NO: 154880 - DNA, 328 bp, Zea mays
  Clone ID: MRT4577_72834C.1
ggttcgactcggacattatgcgcgccacctaagagtacgacgagccgagggccaagctcgtaaacagacacgccagctacgaccgcgagatgcgcccgtcgccgctcgcggggaacttgcagaacacgcgggccaattcctactaggcacacgctcgttccggggacccgctgccgcagccgttctccatggaggcgcctgacgctgtggatgcagcgcgtggctgctttggaggagcgaggggagaacaaggactgcacggacattctgaactagcccatgtcgggcgccgtgagggggctgcgactgccagggggttaggttggac

SEQ ID NO: 154881 - DNA, 298 bp, Zea mays
  Clone ID: MRT4577_72835C.1
gaggacaggcactaagttcaaacatcagacttattaatgatatgcaaaaggcctggctcgagcgcacacactacacagccggcccatggtggaacccacactaacacggctgatggcaggaggaccatgtgcttggaaaaccaggatggggagaggggccccctgacgacgcatgcacaacggcagctgaaacggcccaagactgattgaccaccaccgagacagagcgcatggtgaagggagctctccttccggatgatgatggctggcgaactagggggacaacttgctaatgcca

SEQ ID NO: 154882 - DNA, 524 bp, Zea mays
  Clone ID: MRT4577_72836C.1
aattcggcacgaggcttcgtggcgctatcaatgctggtggatttgagcaggggcggtgggtgcgcggatagacgcctgagaaatccgggtgcccggggcagtgctgctccggaaatctgacctgccggcggagaagaattacactaacggccatgctgatggcccggtgaagcgcaaggtagccgcgatgccagcagcggcacctactactccaaggaggcacccgtcaccgaatgccggggtcgggcgtcgtccccgacgccagctgggtcacaggcgaagaggtcccagtccaccgaacggcggccggtgactccgtcaaggccgtcttccggcggctcgcggccgagtactccgtccaggatctctgccccggcatcgccatcgtctgcgacttccagcccgtcctcattctctagctcgtcgacgccagtggctgatgccgttccagaaacgcaaatcgctctgaggaggttgcctggtggccgggctcctgatgggctggggccttcaatgcggagtct

SEQ ID NO: 154883 - DNA, 260 bp, Zea mays
  unsure (1)..(260): unsure at all n locations
  Clone ID: MRT4577_72837C.1
cccacgcgnccgagcagncacaatacggcacacggaaacagcgcgccagaggcgggacaggcaaacgcgaagacgaaaagagagaagcaacggaaacccacggacaagggcgaagaacgaacgcggcacgggcagcaanagggcaaaacaaaccnggcgcacgacggnccaaacacaacgcacgaaccgaacacgggggcgaacagaccaacacagggggaagaccgcagcacaacgacaggaacagccgacagccaagg

SEQ ID NO: 154884 - DNA, 712 bp, Zea mays
  Clone ID: MRT4577_72838C.1
cctcgaggccggccggggccgcgctcgctctatttcgtcgtgcgcactctcgcctccgccctcttccgcactcgccctgctctcctctgctcgctcgcacgctctcttccaccctcgtcgcggcacactcgccatggacggcgcgggctaagctccatggttgcgcccccttagccctcctccagccaaaccaagcctcgcactgtcttcctcttcgcgtgatgaatcttagtcgccattttcccaagcccaacggacgccgaagcctcaccgtcaacgtcgccgtgcttcggttcacgccggcgtgcgaggaccgagcgcctccgtccgcctcccgcggagctaaggacgtcgtcgaactcaccatcaaccgacgcgtctccctgacccatcgccctgctcgtctcgtcactggcatttgcggagctgggacacatgaaacacattatggatatctgacatggattctggtaattcaaggcggtatgctgcgggtcccactctgccaatgatgggataggggccgacgaatcgcggtgctagctttcctttcacttggaaccttttgacaccgcacatcggggagaccttgaggggtgataggcggtgctgaagtctagcttggtgcctatagcttgctgaaggctcatccaatatttggaggtgaactgggttcccctgtctgacactatcttccttggaatgccatgga

SEQ ID NO: 154885 - DNA, 169 bp, Zea mays
  Clone ID: MRT4577_72839C.1
ctgactagcgatcgctagcagcatatgctcgtgcgaagcaacccgactgttcgcctacgtcctgtcccattagaatgtaggaagcagacggcgccgaaggccactcgcgagaaggcgcaatagtcgcatctgggcaacaagccgcagcgaatgtttctaacggtccccg

SEQ ID NO: 154886 - DNA, 369 bp, Zea mays
  Clone ID: MRT4577_7283C.1
gcgggtcgatacacgcgtctaaagtcactcgtgttatctccccctgccccacgatgcacgcagcatccatcatcgcccagcgctagcgctccgcgcggcctgcgctcaccacgccgcagctaggtgtcccgggcaacgccacctcccaactgcaagccggtgtacctccgcagcgtgcaaccattgctgacagcccgcagatgccgcggttcgttaccctgcacgaccaggcctagcccatgctcgcggtctgcctgccagcgcagcggcacgaccagctaacagtatcgtcgtcatgctcgtgtcctagtcgctcgttcagtgcgtcgtgcacgcagcatgtcatcgtatctcgcctcatctcgccgt

SEQ ID NO: 154887 - DNA, 162 bp, Zea mays
  Clone ID: MRT4577_72840C.1
atactaagctgtttccttaacctctgcggagctttcgcaaaatcttactccgactccattttctaacagtgctacctaggttctatttcttcctatatcttcttcttccttttactcacgtttttcatagaaaaatatcacctattacgccaaccctacatc

SEQ ID NO: 154888 - DNA, 586 bp, Zea mays
  Clone ID: MRT4577_72841C.1
ttttttttttttttttgatggaatcaaacgtgcttagcgcaaacggtgatacccgtagagaatgaacctacacgcaaacacacacacaaaggaaacaaacatagcgctaagtaacgtagattaccattaaaattaattatcacgaagctacgtaaacctgtgaagatctcccgctatacacagatcatcagcagcgcgtcatgatgaactccaaaaacaacgacggcgacgacgcagagcgcggaaacacgctacacggaccggggacaaaggtgatgtgcgtacggagggagtgaaccagagggcggcgttgggcgctcacggatttgaagctgctggccatggcgaagttaaagccagacaaggagcagatggcgcagacccagttgtgagccggaggagctggagactggcagctcggcggaggtggactcacggccatggatggagcagcggcacggtccgtcgtcgaggtgagcggaggttggtggctggggctggggcgcgatggccagaacgacggtgaagagctcggctattgaggaagcgatcgcgaaggagataagctctgggaggtgctgggtcg

SEQ ID NO: 154889 - DNA, 322 bp, Zea mays
  Clone ID: MRT4577_72842C.1
ccgactcttcggctgactcttgcaataaactcacgcgagatcgccgccccgtgtgggggcgagatcccgatggccgtagcgccgtcgtaccctgctcaaggacatcataactcgcgatagcgaggtagagaagacttacttgatgaaccaatatgtgaacaagaagttcagcattcaagacatggctacaatcgacacgtatttcctcaccaacgaagtgcaattcgaggacaggctcttcactctgcaaatatgggacactgctggccagtaaaggttccagagtctcggctcagcattctaccgacgagtacattgttga

SEQ ID NO: 154890 - DNA, 331 bp, Zea mays
  Clone ID: MRT4577_72843C.1
aacgcgggggtggacccaccaataaatgaccgcaacctacatggaaaccacctttccttttcaagggtgcgtttaaatatagcgggaatcatggccaaacatagctactgcgtgaaatagtttttagttcacaattaatccaaaaaaacaaaccggcagcataaattgtaagacctgggggggataatgaatgagcgaactaacataaattaatttcctttaactgactggtttctagccagaaaacatgccggcccagccaccttaattaatcagtccacccccggccgaaggacgttcgtttgttttttgccagctaggtttttttttt

SEQ ID NO: 154891 - DNA, 1995 bp, Zea mays
  Clone ID: MRT4577_72844C.1
gacgactcaggggatatctatccatatcccccacatgtgttgattaaagagctcattgcatacaaggcatggcatcaaatagaaaacataaggaaaatgacttggctacgaagactagttgctagtgtgaatgacaagactagagtgtgatggcccgtatagcagtgaagctagagtaagtactcgacaccaaaacagggttataatcaatgaaccgataaggccacgtgatgatatggagtagaccatatcctgtttttggatgatgaaataaactttatgccaaggacaatgatcaaatgtagcgtggtgttagtgctcggaataggccatgcctctggatgttgccaagatgccttccaatgatctcaataaaaaattgtggggcactacaaatttcgcctgcgtgcttctatgtcccagatttattgagacatgtagccactcgatttgccaatgcttttcacttctgcttttctcacgaatacaagcataaggatgctttgagccaactttttttaagtggtgattggtccaagtccaaattggcttccatagaggcgaagatgaaaatctgtgagattttgctttctatacgattctgacatgttgtggaggatcgcattaggacatctgagcctttgttaatcacatggagcactgttgatggggatgagaagccatgatgaggagaggagggtccagcgatctccatcccaggacctcaataacataaaagcaaaaccattcaattgatacttcaaatgttggcgcttaagcatataaagtgtacacacagcagaggccctggcagaatcaagcaacagaacatatccaaatgataagtgcatgcaacaaggtctgcagatagccatctcttcgatagttccgtgcttcatccatgtatttgttctcagagctcccaggacacaagacagaaacgtcgatgattagacaagagaaacccaaattgtattttacagtgtagatgctaagttcaatatcaagaggaatcagcatcttatgtcacttgccagtgataaatggatggctaagtgcttgtgatacggttatcctcttttctggatctaatataaacattttatcaagaagatctttaaaactggatagcatttttggatcctcgccaggagagttcaaaatcaaaaaaccgacatcctttggtttaatgttcaaaattaaccttctcacagccgtttttgtcacaggatcctcctcggtagcatgaaaattgagatcttgatcaaagtgttgcatagtaaaggcaccctttcgaagcatcttcttagggaatggacccttcaattccatatgaagccgaagcatggcattgtttgatggaccaggaaataagactttaccggtataaagctcatatagacagcagccaactgaccacatgtctaaaggatgatcataggctaacccaagaatgatctcaggtgcccgatagaaacggctaacaagataaggcgtaacttcattcataccagcaagcatagcattcccaaaatcacatagcttgagcacattcttagcctcattcaccagcatattgtcaggtttaatatcacagtgcaaaactttgcagttcttcaggtgcttcagggcgatgaaaagctgctttgaatatgccctcaccgcagtcagtttaagcccaatattacgaccaaatttctttaaaacctcacgaagattcatattgagagattcaaaaactaagcaaagatggttccggtacatgaaactagaaataaaccgcacgcagtggcgtttgtcctcacggtccacacttgcaagtttttccagtattgaaacctcttgcttaccagccttgtacattgtctccttgttgcgaataattttgatagcaacttcttcaggatcatctttactcgctttaagatcttttgcccgcacgacttttgagaacacacccttcccatgtgctgctatgatttcgtaatggccatc

SEQ ID NO: 154892 - DNA, 478 bp, Zea mays
  Clone ID: MRT4577_72845C.1
acatcggattgcacccggaatcattccggctaatcaaagtttatataaattaaagaagcaatccggctcggattcgttccgactcatcaatccgacacaaacgaacaaggcctaaggatgctttgagccaactttttttaagtggtgattggtcaagtccaaattggcttccatagaggcgaagatgaaaatctgtgagattttgctttctatacgattctgacatgttgtggaggatcgcattaggacatctgagcctttgttaatcacatggagcactgttgatggggatgagaagccatgatgaggagaggagggtccagcgatctccatcccaggaccttcaaatgttggcgcttaagcatataaagtgtacacacagcagaggcctggcagaatcaagcaacagaacatatccaaatgataagtgcatgcaacaaggtctgcagatagccatctcttcgatcccacgcgtccg

SEQ ID NO: 154893 - DNA, 273 bp, Zea mays
  Clone ID: MRT4577_72846C.1
cggacacgtgggcactcaggctgaccccagattctcctgtacctcagtttcaagggcgatggtcaccattgacctgtccgaggacgacgtcatcaccctccgctaagaggttgacacgtacatgatcgatgcagaccttcaaccttgcacccatgtggcgattgagaggctctatgatattatgtgctacatgggcattcagctctagcttggactcccagctcggggcccgaggacaatgctcaactgcctgacactttaaggaacgagggc

SEQ ID NO: 154894 - DNA, 3303 bp, Zea mays
  Clone ID: MRT4577_72847C.1
cttttgaagctggtcccctgaggaccgcccggataatttcgtggtcgacagctattagtcggcggccgcccttctttttttttttttttttttacatgcggagagagagacaaatgacagttctatctttattgcagcaggggttatgtttatatacatatgaaggggtgagttcacaaggggtgtgtcccttgggaattatctgtcgcaccccttggattgatcacaaatacaataatttgtaacagccaagatgccttccaatgatctcaataaaaaattgtggggcactacaaatttcgcctgcgtgcttctatgtcccagatttattgagacatgtagccactcgatttgccaatgcttttcacttctgcttttctcacgaatacaagcataaggccttgttcgtttacatcggattgcacccggaatcattccggctaatcaaagtttatataaattaaagaagcaatccggctcggattcgttccgacccatcaatccgacacaaacgaacaaggcctaaggatgctttgagccaactttttttaagtggtgattggtcaagtccaaattggcttccatagaggcgaagatgaaaatctgtgagattttgctttctatacgattctgacatgttgtggaggatcgcattaggacatctgagcctttgttaatcacatggagcactgttgatggggatgagaagccatgatgaggagaggagggtccagcgatctccatcccaggacctcaataacataaaagcaaaaccattcaattgatacttcaaatgttggcgcttaagcatataaagtgtacacacagcagaggccctggcagaatcaagcaacagaacatatccaaatgataagtgcatgcaacaaggtctgcagatagccatctcttcgatagttccgtgcttcatccatgtatttgttctcagagctcccaggacacaagacagaaacgttgatgattagacaagaggaacccaaaatgtattttacagtgaagatgctaagttcaaggtcaagaggaatcgtcatcttgtgtcacttgccagtgataaatggatggctaagtgcttgcgatacagttatcctcttttctggatctaatgtaaatattttatcaagaagatccttaaaactggatagcatttttggatcctcgccaggaaagttcggaaacaaagaaccaacatcctttggtttaatgttcaaaattaaccttctcacagccgtttttgtcacaggatcctcctcggtagcatgaaaattgagatcttgatcgaagtgttgcatagtaaaggcaccctttcgaagcatcttcttagggaatggacccttcaattccatatgaagccgaagcatggcattgtttgatggaccaggaaataagactttcccggtataaagctcatatagacagcaaccaactgaccacatgtctaaagggtgatcataggctaacccaagaacgatctcaggtgcccgatagaaacggctgacaagataaggcgtaacttcattcataccagcaagcatagcgttgccaaaatcacataccttgagcacattcttagcctcattcaccagcatattatctggttttatatcacagtgcaaaactttgcagttcttcaggtgcttcagggcgatgaaaagctgctttgaatatgccctcaccgcagtcagtttaagcccaatattacgaccaaatttctttaaaacctcacgaagattcatattgagagattcaaaaactaagcaaagatggttccggtacatgaaactagaaataaaccgcacgcagtggcgtttgtcctcacggtccgcacttgcaagtttttccaatattgaaacctcttgcttaccagccttgtacattgtctcattgttgcgaataattttgatggcaacttcttcaggatcatccttactcgctttaagatcttttgcccgcacaactgttgagaacacacccttcccatgtgctgctatgatttcataacggccatccagcaattctccgaaccgataagtgtagtacccatctgcatcatcccagttgtcatgaagagcatttctctcaatatgcaaaccatcatcctttcccaattttctaattccggtgggtgattctccgaaaatgtcatcacaaaacatgtctgctgatctctcactcttgggagaaccctctccaagacctgaaacacctattgtcctctcatcagtgaatgctcccgtgctagttgaagcataattgtgagcaggagaccttcccacattaaagcctgtcttgccatcaaatacctctgaagaatcatgcttattttcagcttcgacattgcccataaagctgctatcgatatcatctttctgatgtatagcttcgtttccatccattgctcttacttcttcatcattgccacttggtttagattccatatcctctttctgcgattgctgctgcctgtactttgccatgatagcttctttcctcctccttgcttcctctttgattttttcagggtcgtcttcctcctgcattgctaactgctgttctattttctcttggtactcctcttcatcttcctccttgagagaattttccttcatttcttcaaacttccggtttttatggtcagcatctctacctttctccccagatcttgtcctctctttgtaaccatcagacacgctatattttgagcgtgttgaatccctgtgcctatcattatcgctaactttgtcccgtccttccttagctctatgagtttcacttcccttgaccctatgccattccctgtccctagcctctctccctctatccctttcatgtgcactgttaaccctgtcagattctctatgccgatctttacttgtatccctcttgctgtcatgatccctatgccttgaactaccactccgtctttccctctccctgctttgatcacgaagacgtgtattttcccttggatccgatctactatgactcctgcttctttctctgtgcctaggagcagcttctaatgaatcgattttgtctctatatatcctatcgtctctatgcctttcctggctggcacgtctgtcactgtacctgtcaccatgtctatcatgaataccatggctgctgctcctttctctttcactcccgtgggtcctagtcgtatgtctgccagacttcccattccgatcattgctctcatgatcagaaccatccctaagatttgcacgagaaccattagtgtaatcacctttctctctatatctaaagtacagcccggccggcctg

SEQ ID NO: 154895 - DNA, 1463 bp, Zea mays
  Clone ID: MRT4577_72848C.1
aatatcctgcagacggccttgggacccttgctaaatggattggggaaaaaaatcaagctgcaagatacccagagggtttcgtgcaagtacacctcatgatgcgcgcatccccgctataagagggccctttgctcaatcactgagcaggcccgccggcactcgctcaagagccacgcacgcgcactgacagacacagtcagagggagatcagggaagagaggggaggggaggagaggaggaagaagaagaagcagcagcagctgcagctgcagggcagcaggcatggagcctcatcacgcaaacaagccaaggccaaagctcagcgcgacgaagcactccaagttcatctcctgcaagctctacatttccgaatcccgcaacgctacggccgtggacgcagtggagcgtgcgagcaagagtgacccccaggtggtcgtcgtcagccagttcggggaccatcactacaaccgtttccgctacacgcttgtctcctacatcgtcgtcgacgacgacggcgtcgacggcggcggatcgtcggcggctggagaggcgacagtagtacatagcccgatcaggaaggtgttgctggcaatgatcgaggccgcgttctcaagcatagacctggaatcacagtcgggagcgcatccgaggatcggcgtagtcgacgacctgtccttccaccccgtgggccaagcgacgatcgaggacgccgcttctctggctaggcaggtagcgtctgacattgcctgcatcgcagcagtcccagtgttcctgtacgcagcagcccacccggcggggaagtcggtgggcgcggtccggcgtgagctcggctactaccgcccaaactacaggggcaaccagtggtcaggcagcgtgctccccaacgtcctgccggtgaagcctgacgtcggtccggcccacgtcgtctcgcacaagagaggcgctacgacggtgggtgtcacgccttggatcgagaactacaatgtccccgtgctgtgtaaggacgtcgccaccgtcaggaggatcacccgtggtgtcactggacggagcggaggccttcccacggtgcaggctctcgcgctcttccatggagatgactgcaccgagattgcgtgcttgctggatccagatcatgccagcgcctatcaagttcagaccgtcgtggaacagattgcaggagaccagggacttgaggttgagcagggatactacactgacataaccaaggacgaagcgctcgataagtatctcaagattgcttgcgctgacgactgatgagcttgtagaaataaatacatggggtaaatgtaaactcatgtttgtagcactgatgctgctgctggagcattattttttttgcccgtgtaaattcaaatttgcatctgaaaacttgagtttggatctgagctcttttcagagaagaaaacaaatgcatcatcagttattcagtttcaaaaaaaaaa

SEQ ID NO: 154896 - DNA, 302 bp, Zea mays
  unsure (1)..(302): unsure at all n locations
  Clone ID: MRT4577_72849C.1
cttccccngatcccaggggtgcggcggatcggcaattcgcaacttcctcccacgcggncgaacacggcgagtagatgatgaagctcccggngccggatcccatcctcctccgccactttcttttttttgtcnntcttcaccgcancngctgattctttgcgggcggcggnncctcnagnngccattgnnctcgccggcttgctaatgggtgnnttccggcaggtcatgcctaccggcnttgatgtccaccttctnnnccccgccgcttcccacggggggccgaagggacgaggggcagccaa

SEQ ID NO: 154897 - DNA, 166 bp, Zea mays
  Clone ID: MRT4577_7284C.1
ggttggttaaaataacaaatatgatggggttcaataataagtcatatcattatacatagattcaagactcgttaagacaatttcattattaaaatattatgaacataagactcatacaatgttatattaggaattcatactaaatgaacgattttataaaaacata

SEQ ID NO: 154898 - DNA, 247 bp, Zea mays
  Clone ID: MRT4577_72850C.1
gactacgtggagcgtccgtaaaagacgaccttgccaagagcgcctatggctacgattacgcggtggtagccgtgggcgaacccccatgcgccgagacggccggagacaacaagaacctgaccatgccggtggctgagccctaggtgatcaaggacctgtgcgggctcctgaggtgcgtcttgctactacggtgcggccggccgcttctgctgcaggcagacgtggacttcatggacgctgtcggcgt

SEQ ID NO: 154899 - DNA, 719 bp, Zea mays
  unsure (1)..(719): unsure at all n locations
  Clone ID: MRT4577_72851C.1
ctcgaggccggccgggccgggttgtgctataatgatcctgattttatggactacactctgtatgggatgatggcagttgcactgacacctactgctgagatagctactggtctgtccctcaccatctttgtagtgtggaatttcttctcaggattcattgtcacagtaaaggcaatgccggtgtggtggaggtggatgtactgggcctgtcctacagcatggaccctatatggccttgtgtcctcgcaacttggtgaccataaggaactaatccgcgtgctgggccagccagaccagccagtgatcacattcttgcaggagtaccttggcctggaaaatggctatcttcccctggtcacagctctgcactttgttctgagcgcactcttctgttttgtcttctgcgtgggtatcaagtatctcaggttccagaaaagatagatatgttagtgcggaaggatgaacgaagtaaggtctcaagaaacttttgttaataagatcagtgcttaaaaacgatcagtcgcacggtctgtgtgaactcagacattcactagtccctccatacaaagatgtaaggtattttagttttgttctaagtcaatttttatcanagttattgttggtcacttgntttcaaatgttgtgaatcaagaacgcaatacnattattaattatttagagaccttcgtcttcggaaaaaaaaaaaaaaaaaggcccct

SEQ ID NO: 154900 - DNA, 560 bp, Zea mays
  unsure (1)..(560): unsure at all n locations
  Clone ID: MRT4577_72852C.1
ccaacagcagcccctgggcctttgtgcaactccttggagttgcgtagaggcttttcaatgtgcaactccactttcggtgtgcgcgcaagcgcatccattatatgcagcccccgagcccccagtaatttgtgtggattgctcaggggtgtataaagtataaggggcagaccctttcctgtgatggttcgtcacgcaccgggcatgaacccatatttgtggctccgtgcacgtgagcgtatgtgctagatgtagtccttcagccccgagtgatctgcgtgaattgcttggaggttggtgcaatgtaaggggcagaccctttcctgcggtggcatgtcatgcaccatgagcgagtccatggtggttggagcctagcgtgtcctctagcattcgtttctccaattggcgactcgattccttttgtgcacgcatctcccctcgagaggatttcttcagaatccttatgaagggagggtgcccctncttcgggctagtcggcgcgtggtgggggcgccatcgagttgtgaacaggttattcaagtgagatctaaccgcccttgggc

SEQ ID NO: 154901 - DNA, 209 bp, Zea mays
  Clone ID: MRT4577_72853C.1
gagcgagaagttcaatgagaatcagttattgttcgtgacctctacattagtgtcttctgataagagcaccgacctgacgtgtgactactcctaccacaagcataggagtagcacgccggcgtctaactaactgctagaggaagagtactacaaccttacatttgactgggacctggatgatgatatcactactgttgagggctccgctg

SEQ ID NO: 154902 - DNA, 604 bp, Zea mays
  Clone ID: MRT4577_72854C.1
ctcgaggccggccgggaagaaccggatcacaacaggagttgaggagaggaagaatatccgaagaccaagcccacgaacaatgtgcatgcactcctcggatggcggaaccgttcccgcgtgcccagggggacggcatccatgccctgggaatgcacatcagtgagtaggcaccggaggctctctcatgatcgggagcagaaaaaattcatcgctcccgacaaactgtccgaaagaggaatatccagcggtggacctaatgctgctgcctgacgagaatgatgacaacctcctcacaactggtgaagccagcggatactcttacgtgcacgtttgtgatgtgagcccagatgaggtgcctgtattagctaggttataagctcagaatttctaatgaagaactctcgcctacagatgaagatatacgagattggcttgacggcagcggttactgtgtcgagagggaccaagatgatcagcgtatccgtgtactgctaaggaaaggatgaatgatcgttatgcccgcaagaatgcatcaccgctttacgctggagcgtgaggactacacagaggcaacgcgtctatccgcgggcgagactgtctggaa

SEQ ID NO: 154903 - DNA, 972 bp, Zea mays
  Clone ID: MRT4577_72855C.1
ccggccgggaactttacacctctacatgcctcatatctctctgtctgtccaacgatccctctcctttgtcatctccgtctccatctcccaagcaccggagaggagagctagcatgcctggatgtccacggagagggagagactcgatgagatcgggaagatcaagcgagagccggatacagccgccctcgctgtcgctgccgcatccgcctccaccgtgccggccgacaaccacatcccacgccgcctcggccacggcggtgccctcaacaccttgacgccgtgcgccgcgtgcaagctcctccgccgccgctgcgcgcaggaatgccccttcgccccttacttctcgccgcatgagccccacaaattcgccgccgtccacaaggtcttcggcgctagcaacgtctccaagatgctcttggaggtggtggagggggagagggcggacacagcgagcagcctggtgtacgaagcgaacctccggttgcgggatccggtgtacggatgcatgggcgccatctccattctccagcaacaggtgaacgcgctggaggccgagctggaggcagtgagggccgagatcctcaagcacaggtaccggcaggccaccggcaaccgtctcatggacgacgtgcgtgccacggccagcttcgtcttggctcctgcgtccgctccgatgcacgttaatgacgttgtatcagtggtggaggcaggccaagaggtcaccgccaccggcggcgcgtcgggggtgtacattgcggaagccgagcagccgtcaagtactaataactatagctcccttaacccaagtgagcatcctgcatactttggttgacaataagcatggatttatttaacattttggtgggatcacagtagtagaaagtttggatgaataaactgtgtgcaagtttaattatatatgcaagttttctagaaataggttatagatgtggatatgtatattgggtga

SEQ ID NO: 154904 - DNA, 242 bp, Zea mays
  Clone ID: MRT4577_72856C.1
attcggctcgagctccagcccggccggccctttctgctacgttgcaaactcactcagtccctaccggtcaatgggcacaagcgggtgtgctttcacgcacatgggtcatcccacgcggcactcctgtggaccagaaccaatgcaggcaaagctacttgcttgctagtgcattcacctggtgagttccacgagttctatcacttcaaactgtgtcttccaacagaaagaaccaaacactgact

SEQ ID NO: 154905 - DNA, 525 bp, Zea mays
  Clone ID: MRT4577_72857C.1
caaaccacacacagccaaaactattacctgcctgaagggatccatatattccaccaggacatgacaccagaacataacatacttggactactggcaagccaaactcccgagctagcgagaccacccctaagtagagctgcacaacatactcaacaagcaaattattctaaaactgaccaaatgcagaggcaagaattctccaggcgggcctacacaagtgtgcaccgcgcactgaaatgcccaacaacaagattgacacactaaacatgctagataaaggcgcggggggcaaggcactagttccacatgacaagttaccggggcttacaatcttactgatacccaaccgtagggaaccccccataaatattgttagcttggctgccttcaccaccaaattacccttggcaatggaggccctggcactagaactgtttgacaacttgcattactacctttttgagtagcagtggactgcgcatgtcaagttaccacaccggaccttgaaaaccgaaagtacaaccc

SEQ ID NO: 154906 - DNA, 332 bp, Zea mays
  Clone ID: MRT4577_72858C.1
cggaatcccgcggccgcccacacccttccgcccacccttccgattaatttcaattacaatattgggggggggggccttcctcccttgcgcgagtttgttcaaaatgggcggcgccaaaaccgccttttccgttcccgttacctcgaccccggccaacggcccttcccctgcctttttccccggcgtcgtggccttcctctttcggttccctgtttcgccccattgccttcctccatccatccttgtttgttaatttttttttccaattttttttctttttctccattattttttctctacatttttcttttttttatatttttattttattt

SEQ ID NO: 154907 - DNA, 331 bp, Zea mays
  Clone ID: MRT4577_72859C.1
attcggctcgagcacaacccaacttttttttcatacgagccaaggtgcgccataggcgggcatggaaggaccgatactccgcctacggctcataacgcaaacggagcacacgcaaacaagccagaaacagccaacctgcactcaccacgccaaagtctcaaatgacctaatcttctgacaagaggctgcagagaattctggagcactaaaaaaagacgactgccgaccagatggctaacattaaggagaccatgacctcaaacctgacacaacacaatgcccctcgaggctaccacgctcacgaatgctggatgaacgatgaagacctgaa

SEQ ID NO: 154908 - DNA, 241 bp, Zea mays
  Clone ID: MRT4577_7285C.1
cgacgactcggctcgctgacggaaccagtctcgggtctgcatcgacttccccttctttggcgctttcaggggtttctctggtactgaaacagttgttccaaggaaccaagatcctggcctagctgaccttccagcaactggggctgctgggaaaaatcctaaccctaagggggttaatgatgggtccaaccttgaaagtattcctccggggaatcccaccagggtggccttggataacttg

SEQ ID NO: 154909 - DNA, 365 bp, Zea mays
  Clone ID: MRT4577_72860C.1
ttcctcccgtctttcctcaagaagtcgattccgtggcgcatgtatcccaagcccccaccatgacaagctcctcctctccttcccgaaaggcgctgagcatgatcgcttgcaatcggctgcagaaggaactcgccgagtggcaactcaacccttctgtttgattcaagtacatggtttcctgatacctacaaaggtgggtaatttgaggatactggtgctgattctcttctattttctccttcatgtccttttctttacattcccactcttcccttctctctttccttttcgtatcttattttcctttttatttcattcttaatttcatttcatttttattccctctttttctcttttttcctcat

SEQ ID NO: 154910 - DNA, 277 bp, Zea mays
  Clone ID: MRT4577_72861C.1
attcggctcgaggttgttagtgtactaaatacgatagctgtattcattttctttcgcgggggtttttttaagactatgttgggcatctatccttactgataacatcatatgtgtcttacatacttatactagcatcttttgcaactggcgtttacattgttcaatacttatccgggcctgatgtgtctcataccaacctaatagcccccgagaatgtaatccaggactcaatatacattataccccagatgctctaatatgttaactcacaaacttt

SEQ ID NO: 154911 - DNA, 574 bp, Zea mays
  Clone ID: MRT4577_72862C.1
ccggccgggggtatcatcacatactatctagccatcccatctctctcacgtggcgagctctgtactctgcttagctactgatttcagagcctttattgtttgctccacacaccacaaaaaaacactcttacgtatctgtactggaccaaggggctctccgaacgttcacgtcacgactgcctctccagcttagtatactgctcatctgggcgctgtttccgtggccaagaacccgaaggacgacaccgttgctcctccccagcgacaggaggtcgtgcgacataaggagccgtagccgtcgcaatccaagactgagactagaacaaagagatgcacacgccgttgcttgaatcgcaccgatgcactagcccaaggaatcagcagctgaggcctcacccacctggagcacacacgctctccaactcaacaaatacaatatgcagcagtgacccacagcaaatacgagaggatgctgttggcacgtgcgatgctgctgaagcagaaatagcccacgagaccacataggtggatggctggctactttactaggataacagaggtcgcagcgcctgct

SEQ ID NO: 154912 - DNA, 343 bp, Zea mays
  Clone ID: MRT4577_72863C.1
tttctgtcttcagtagtgcaaacaaaattgcttatggtgattctcgcacatatttacgcgacgtcatggctgactgtcagcacgttacaacctatccaaactccaaccataaatgtaatttaatacataccaatactatcatctcatatgctctatcgactacaaccacatcacatattctatcatacaccatcaccaatgtgccacatactataatatcatccattatcacagaattaaaacccaagctcatatattccatcatgactcaactcaacaaaccgatcacacctacacctacctctcttatcctgagtactcacaaaatacataatcatccaac

SEQ ID NO: 154913 - DNA, 592 bp, Zea mays
  Clone ID: MRT4577_72864C.1
cgggttcttaccgtccgtccgtccgcttctctctctctctccggttctccctctctcccccaccccgcgagaccgccggcgaatttgttgcagtgcactgaagccaacagctgcaggacaggactcaggaggaggaggagctgtttcaacaattatcccccgcgcgcccaggtcagccccgcccccgcccactctcccgaggtgagcaacgcctttcccccagcggctgtctgtttaatttgggtctacagctcttcccccctcgtggtctcgtctagggaattcccgattcaatttggacttgggctcctcccttttttactgtaaccgtgtgcttgctactgtatcgaagaaatcccagcgtcaatcatgctgctgcgcgaggtctctcgatgatggatgccagataatgatggttgttgtatgatgatgatgatgatggcacatggcggctggcggctgccaacgcctgtttttccccactgcagtacctttgcttcactgatattagcaacctctatccaggattccaggttctcaacacaacagacaacaccgctcaccgcatatatatagatggggttccgagggg

SEQ ID NO: 154914 - DNA, 432 bp, Zea mays
  Clone ID: MRT4577_72865C.1
ccgccctcttgttgttgttttttttctttttttgtgtgtacaggaggaaaaaccaaggacattggagtacacattaattccattccacttgggaaacatcgcgctaatgggtgtgtacctgtgtaccaattccaagcgtgctatttaattaaccaccatcacgtataaatttctctgtaaatgataacacgtgttgtgacgccactaaaccagtaagccttactattatatctctcaatcatggttgtgagcacgaagatataacataggccttatcaaatatttcaactatactcgagaccctgccaagtgattgataatttacaaataactctgatccaccaaacgtaaattggaaaccatgttcaatggcgataacctattacttgtaggccctaacaatcatactccatttggaaacacgttttcccc

SEQ ID NO: 154915 - DNA, 121 bp, Zea mays
  Clone ID: MRT4577_72866C.1
gtgaggttctttggcatgaatgcgagtatatagatccatcactagtgacggtgagaatgtgccatgagttgagtatgaagtgtaagtaacctgatcacttgaaaacttcctacactgttac

SEQ ID NO: 154916 - DNA, 314 bp, Zea mays
  Clone ID: MRT4577_72867C.1
gggggggcccacgcgtccgcctacacgttcgtggacacttcgacggacgctcccctttttccgtttccacttgggggggcttatactcggcggtgggacagcacttctttaccatatcaccaaccccatggcccaatactatgccacaatacctgcctcctcttcctcactactccgaccatcaacatatgactacaactgcaaagggggatagtatcccaacctgagctggcctagttggctgtctgctacatacatagtattgctcacctcgtatcttcggggtaaacgacctgcaaatgctgtacatgcaa

SEQ ID NO: 154917 - DNA, 500 bp, Zea mays
  Clone ID: MRT4577_72868C.1
aagggagggggccccgggccccctccttttttttgaaaaaaaaggggggggcccgggcccccacaaaaaagggggggcccccccaaaaaaaaaacaagtttttccccccaaacttaaacccctcggggatttttttaaaaaaaaaaaccccccaaaaaataaattggcccaagcggccccccaaaggggggccccgaaccttccttttgcaaaaaccccttaaatggggccccccaaagggcctattggggggggccccaaccccaatggatggggggggaataaaagaatttaaacccccaccaagaaaaaccccctatttgtccaaaaaccccccaaacaccgggtttgggagaaccgcgccccggggccaaaatataaacgcccgtgcccccccccgctgggttggcggaaaaaccttatcaggccgcgaccccccctgcccagggggaacaaaaatgggcttgcttacccgaaaccggctaacacccccccccaaa

SEQ ID NO: 154918 - DNA, 293 bp, Zea mays
  Clone ID: MRT4577_72869C.1
cacaatacattgactatttgatgacttgggttcaagatcagcttgatgatgatactctttttccttctaagattggtgtcccatttcccaaaaactttatgtctgtggcaaagactattctaaagcgtctgttcagggtttatgcccatatttatcaccagcactttgattctgtgatgctgctgcaagaggaggcccacctcaacacctcctttaagcacttaattttctttgttcaggagtttaatctgattgataggcgtgagctggcacctcttcaagaattaatagag

SEQ ID NO: 154919 - DNA, 460 bp, Zea mays
  Clone ID: MRT4577_7286C.1
ctggaatcgcggcccagtccatattgcctcacccatactcccgagagggatataaatctagaacccttgagctcctcgccatcaatccgagtcatcggaggcgtctgaaactcagccatcgttgtgaacgcgcaaagtgattagagatcggctgatgtcatggattcacgttgctatcaccgtcggggcctcataggtaggccatggagcggcgacgggagctagggattttttcttgggcaattcatcgggcgcgagggaccgtagaacggtggcaattgctcgccggactccacaatctgccatcgttcgtggacagcgcgctaccacctcaaacaccgattgctacacatagaagtgaggtgacgaggaatctgaagcccaattattgggaagcaccagaggacctggaatcgcaagtgtaaagcaaggtgtggtcttgatgactttcgtttgacct

SEQ ID NO: 154920 - DNA, 221 bp, Zea mays
  Clone ID: MRT4577_72870C.1
taaacacatctaatgtcatcctttactttctcacacatgcattgaactttacggtgaacgggcacttcttgtgcatgtgtaactttaataaggacattgattcttactcgaattcgtttcccttatatctcctttctcattgaactgatggcgctagctctctattctttgtctattcttcttactacccccttactcttttttccatattattccaattc

SEQ ID NO: 154921 - DNA, 294 bp, Zea mays
  Clone ID: MRT4577_72871C.1
agtggacgcactctttctgtttttcctgggtcagttctggtaccgttgatatgatgatagcccattgacacggaagtccatcatagcaactcgagatccgtaatctagggtgctgctctttgaagagtcaaggtagtagactgtactgggataacctagcctagaagtagaagggaaactatatatgaaccattgacttcctattacctgctttcaatcgactatagtgtgacatcctatatattactaaatttttgcgtggtattctaggaaaaagaaaaatggtgaggccgc

SEQ ID NO: 154922 - DNA, 104 bp, Zea mays
  Clone ID: MRT4577_72872C.1
ctgaccgtggtgcggtccggccgtctcgtgcgtgcaggtccacgcccgtggttcagggtttgcgcatgttgtgtttgtgcgtcgactcccaacacggcgttccc

SEQ ID NO: 154923 - DNA, 565 bp, Zea mays
  unsure (1)..(565): unsure at all n locations
  Clone ID: MRT4577_72873C.1
gggcacgacttcaagccgcagaaagcgggggctactgatgctttctaccttcagacgattgaactctagaggtgccttaatagctactactagcggatcacctggtcttgttggcattccaacgcgtctgatatacgactgatcctctgctgatccattttgtggcagcaaactattaccatttaaaacagctagctcctggctcctgtccacaccaacggcttcttccgtttatccacttggcacgtgctgaaccccgctgcttatttgcagagggccatactactaccatttagccagcttgctgctgcaaagcgcgcttccttcttgacacaggaccgggtgctgcctttctaccaccagtttgcgggtatccccgcacccctcttacttctacaacagttgttgccctttgagcaccttgctttgacagatccagagggctcctaccacctgcacgtcgttggtggtgcccttttttcgattgcttattagctgtggttgagtagtatacgcgtcttggtgacgtctgtgtcccnccngaccttagaagcgcattttcagg

SEQ ID NO: 154924 - DNA, 520 bp, Zea mays
  unsure (1)..(520): unsure at all n locations
  Clone ID: MRT4577_72874C.1
tttttttttttttttttttttttttttttttttttttttttttttttaaaaaaaggaaaacccgcacaaatgccgggctggcataacaagcggggcaggggaaacaaagcctttggggagcaaacagcatgctacgcacgaaggcctactacataccgcaaaacttgggcgaatacaacaagcaaaccataggcaacccccggaaggaaaggaaacaagggtacaaaggggggggcccaaaccacccttactcgtctgggagggcccccccgccctcaaatcccgcctcctcatcaacaggggcatccggggactgggggtactcggacaccaaaacggtcagggggctctcagcttgggggaaccccatctaaaccatgccctcaccagggccccaacgcaagaaagccttcccccggaacaaancagngaanggggcgctcacacgggggaacanccccgggaagggacgggagcccccaaagaagggggaggccccggaaagggccccgcggggggg

SEQ ID NO: 154925 - DNA, 510 bp, Zea mays
  Clone ID: MRT4577_72875C.1
tttacagttttttttttttttttttttttttttttttttttttttttttttttttttttttttggggtttggtgggggggacccaacggaggattttagtaaaaaaaaccccagatgggcaacaagacaaaaaaacaccccttcagacccaatgggggaatcttttttaaccaaaccgaggggaaaattaagttcacaactaaaaccctaacaaaacaagggatcgttggggccccacatttttatgcataatcccacccctttgactaaacccaaaaactttttttattgcccttccttccgcccctaaaggtcccaaaaaactgggggcccctccccttgggggagggctggggggggcccttgggctttttaaggccgtttttgggccccttaaacaacggggtatgcccccgggggtttttaaacttggccattccaaaccccttttgctcctggtccaaaacaccgggtgggggggcccggagcaactccccctcgggccgaatt

SEQ ID NO: 154926 - DNA, 784 bp, Zea mays
  Clone ID: MRT4577_72876C.1
gttccttcccgtccatcagttcccccaccaaaagcgtagggttagggtttgggtggcggcggccgctttttccctccgatcccgatcgccatgccgaccgaaggcgagccgcagccggaggaggggaccggcgtcctccccaatcccgattgggtgatgctgggtcgcatcggccgcacgcgctgccacaacagcctaggcgctgctcgtgtggctctcaacaagaacaagaccgccgctctgctccacatggccggcggccccttctgctacgtgtccttcaccctcgcggctcctcgaaaaggggtctcctacctcaacctccactggccggagggacaagacgcagccatcccgccagcctatccctccgtccgggcagccgacaaggaactcatcctcttcgacatctccaccccggcccagactgacagctacctcgtcccgccagatctgttcgtctacacggccgccggctcttccccctcggtgcagcggctccctccgtgcactgagcgcgggaaaaagccgttcctgatggataaccttgccacaggcatcctgcggctcaaagcggaggaccgctacatcgtcgccgacctcaatgtctactctgaagaagcgggcttgcgtgctgaactctgcgtcttcgactcctacctcaataagtgggaaatcacccccaagatcgctttcgacgaccacatcaatggcggccagttcaccaacctctggtcacccaccatgtgtttgcttttgctggtcgtttcctttgctggatgga

SEQ ID NO: 154927 - DNA, 316 bp, Zea mays
  unsure (1)..(316): unsure at all n locations
  Clone ID: MRT4577_72877C.1
gatgggaacaaaaccttgctcattcttctctcgtctcgtttcatagcgggggcaacccaagcgaacaaaggggttccaacccctaatccaaggtggaacgggctcttacccggtgtcggggggggggggggccccgttnctttngattggttaagattctcggccggagcctggatggggccacactttatttcctccagccgccgccgccgccgtcgttgccgtctcctcctccctcgcgccgtccgccgntgccgcctccgcctccgttgccggcggctcctccctcgcgccgtccgccgttgtcgctcccgtc

SEQ ID NO: 154928 - DNA, 263 bp, Zea mays
  Clone ID: MRT4577_72878C.1
cacggccgcccgacccgacgggcactacctgaatccatcaatccgggatgatggttgcggagttgtcacaactctcgatcatcacccgacaaagggaggaggtgttagagtacgggaagaggccaccgacccggcgacctgatcccttctagatgacttggttagcaccaccagctcctcttccacttccaccacccccgtggaaaggagagaaacagacaactaagggcgaggaccgtcggggcactaactcaaagaatttg

SEQ ID NO: 154929 - DNA, 221 bp, Zea mays
  Clone ID: MRT4577_72879C.1
tgcgtgcatgctcacgcgcaagatctattactaatacgatggcactgcggacgcggcgcttgacgcatccttgttatgttaccatgcaggctagctttatctgcgccctttgggcaggccgtaggcccagcacattatctcatcctccgaaggggactgattgtgacccacactcttatggcaacatatgatgtgcacaattacatgatgccctccctgca

SEQ ID NO: 154930 - DNA, 296 bp, Zea mays
  Clone ID: MRT4577_7287C.1
cccacctgcaatccactaattaggtgtggattacattcaatcactgtgagctctcacacttttccaactaacaatgactcttctcacgaacaaatagattatcactgaccgatgaatacaccatacctccctgctctgctcttcccccctactatcatcaacaaaaagcctcatccaaatccaatggacacaatttcaaagatgcattgaaagaaagaaataaacacggtgcgggcccgatgaatagttgtagctactccaactccaacaacaggttcttccccttgacttgtgct

SEQ ID NO: 154931 - DNA, 558 bp, Zea mays
  Clone ID: MRT4577_72880C.1
ggccgcgggttttttttttttttttttcgtgaaagatactcaagaggtccaagtgtttttttttttttttttagaataataaagatcattgattgcgagttaaacatagtctcactgccagctgtcgacagtcaactgctcttctacatggtccctgccatgacgcttggccttttctgcatcgataaagtccagtccccgcgtctcaacttcacggtcaacaaaggcaccgacaaaaccggccagaatctccttcgccttggcgtggctgtcaggctgtccatttcgagcgacgtgatcctcgtaggccttggcggcctcataggctgcggcgccacctattaactcgtgggaccattctgcctcatgaggacgctgagttacttgctcgtacgcttgagcggggtttgagtcgtcactgaaccagcccatgatgaatattgtcgaagttgtgtttgagttatagaggttgtagagaagctttatgcttaatgttggctttgattgagagactgagatgtgtgttcccggccggcggcctcgagaaacccaatcgcc

SEQ ID NO: 154932 - DNA, 1052 bp, Zea mays
  Clone ID: MRT4577_72881C.1
ggaccctcgaggccggccgggccgggatttattatattatcttcctgatctgatcatgtggccataaatagcaagggccttggattgtttggccagggatagcacgccgaggaaggtcgacatgtcgtctccgccgccgccggtgaagctgatcggcttcttcggcagcccgtacgcgttccgcgcggaggcggcgctgtgcctgaaaggcgtgccgtacgagctgatcctggaggacctgttcggcagcaagagcgagctcctgctccaccacaaccccgtgcacaagaaggtgcccgtgctcctccacggcgacggcagggccatctccgagtccctcgtcatcgccgagtacgtcgacgaggccttcgacgggccgccgctgctccccgccgacccctacgcgcgcgccgcggcccgcttctgggccgacttcatcgagaccaggctcaccaagcccttcttcatggcgatctgggtggaggagcgcgacgcgcgcctgcggttcgaggaggaggccaaggagctcgtggcgctgctggaggcgcagctcgagggaaagaggttcttcgccggcgacaggccggggtacctcgacgtggccgcgtccgcgctcgggccctggcgcagcgtcatcgaggagctcaacggtgtggcgctgctcagcgaggacgaccaccccaacctgtgccggtggaccagggactactgcgcctttgaggctctcaagccgtgcatgccggatcgggagaagctcctcgcctacttcactaagaacttcgacaggtacaaggcggccgtcaatgcgacgctatcgcagtcgcagcagtaataactggccaactgggtacgcctctgcccggccgtatggcgggcgtttctttttttttttcttcagaataacgtagctgtgcccagtactcatgttttcaattctgcaaagtgcaaaccaacaagtcgttgtgtggtttactctttttacatatacagatatactcctacgagactaaaacttcttattaaactaaaaaaaaaaaaaaaaaaggccccta

SEQ ID NO: 154933 - DNA, 598 bp, Zea mays
  unsure (1)..(598): unsure at all n locations
  Clone ID: MRT4577_72882C.1
gcggtgnngcggccgcncnnctttttttttctnntttttagaactgctggtagtacggctcccgtgcttttaccccgtaccacatctctaccatgcttgacgagcaggacaagtaaaaagccctgcccgcccagtacaaatcctaggtaactaaaatctgaaacagctactgagcctcctcacatcggatgatccgggcccctccccctcccgctcttgctgctgaagcaggaccgcccagcaggaggcaaccgcttcgtgtccgtgccgtcctgcagcgagcgccggctgctgctgcgtccccccttgctgttcccgccatggcaccaccgtctcgacgtgccggcgccgccgtccctggccgccatcagctcgtcctccatgctggcatgcaggacgtcggcgatggacatgcggacgtcgtggctcgggtctgcctccgacgacgaagacccccacagcttcatcggcggcggcggcggcggcggcgggcgctcttctctgatctcctaggccttgctgtcggcctcgtccgtcccctccgggtccgggccaccattcgcctcccgctcatcacccgtccgtgctgcccgccatg

SEQ ID NO: 154934 - DNA, 359 bp, Zea mays
  Clone ID: MRT4577_72883C.1
gagctcatatttcggcggccgcccttcctttttttttttttttttttttttttttttttttttttttttttttttttttttttttttttttttgggggggggggccctccaaactaacaagaaacgggccagttgcccaaacatcaatcgggaaaacacctttagggccctcaaaagcccgtctaactaaaaaccttttttccaaattgcaacacaaacaaatgttttttgaagaaaaattcgatcaactgatttcactacacaatcccatttgccccgctgggaatcctagggcacaaatcaggacactcctttcccatgggtccagggaaggcaaagccttttaattcttcctttgg

SEQ ID NO: 154935 - DNA, 399 bp, Zea mays
  Clone ID: MRT4577_72884C.1
accagggagaactcgcaacacaagggggattgccacacccaggggagtccattttatgggtcgacgcttggacacccttcaccagaacacactggggccaaccctgtgtgctgcagactgggtcaccctttaaatacctacctaataaaaaaggaaaggacgggggaaaacctcactgggacacttttttttaggacatattatagggaccggaaacagggtttccaggagactagggggggtggtggactcccaacagggagggccttttacgactaacgtcgccagggggggggttctttggtttctccgggggctcaccgacattttcgtccagaccgaacagccgggtgtttgaaccacgaacccgtggggcgtttatttgcatggggggttttt

SEQ ID NO: 154936 - DNA, 297 bp, Zea mays
  Clone ID: MRT4577_72885C.1
gtaccggtcctaatttcctttcgaggcccgcgtctctttgtccgtgttcgcggcgttggtatccgtggtcccattcatgtacattctgatctgggggggggcggtgagcttcggcgggaacactagggtcgcgagggccgtgatgaacccgcagggcggcctgcggtggatggagtggtgggagttcataccccccgttcctgttcggacggtgcacaggtgacaaaatttatattttcctctactacgtgaattgatcgtggtaagaaccctttatacaatcctgtttgttcatgg

SEQ ID NO: 154937 - DNA, 127 bp, Zea mays
  Clone ID: MRT4577_72886C.1
attaaatagagattgattgattattggccacaaagaacgaaagatttgttacataagcttaggggaacctggggccttcaactgttaaaaacaggcgcgttcaaagggtgggatagggagctaatgg

SEQ ID NO: 154938 - DNA, 136 bp, Zea mays
  Clone ID: MRT4577_72887C.1
agcgaagcgcgcgtaacgagatctagctgagctactagctatagcagcagctgctgcaggtatcctgatatggcagagtagcctagatcagcctcccacaacagagctcccccgcgaacgacagcaagctccatga

SEQ ID NO: 154939 - DNA, 509 bp, Zea mays
  Clone ID: MRT4577_72888C.1
ctgtcattcaaaaaaaaaaaaaaaaaaaaaaaaaaaaaaaaaaaaaaaaaaaaaaaaaaaaaaaaaaaaaaaaaaaaccaaaaaaaaaaaaaaaagggcggcccccctttttttttttttttttatggcaaaaccaccaagagggggggggccataaaaaccagtttaggcaaacaacattccaacgagggcaaaccccccctcgtcaaaatttaaagagattgaaaaaaagggtttttttttgttttgggggcccccacaaaaaaatcacctgagtagctttcgagcaaacccaaccatccattttttgcaaccgcccaaacattgtaacaaaaggcagcagcgacctattttagctccacaaaaaaacaccctaacccttttcctttttaaaaagggctccactgggcccctaaactttgctccggggaaaaccggggaataaccaaccttttcctcaatcctaacaaattggttgtttttggccaggccctcaaaccggaaagggg

SEQ ID NO: 154940 - DNA, 278 bp, Zea mays
  Clone ID: MRT4577_72889C.1
gatccttaacggcccctttttttttttttttttacgtaacaccattcgtgggtatgcaagaactttcaccacacctcacatctcttgacacatcctatttcaggttacacaccgcacacaagtattacgctttgaccatacaaagatgcaacataattaccaataaccacgggcaagcaccctacccagcccacctcttccactcaaccctagccctaaaccgcaagctggatcaacccccctaacatctagaacccataatcactttaaggattgcc

SEQ ID NO: 154941 - DNA, 350 bp, Zea mays
  unsure (1)..(350): unsure at all n locations
  Clone ID: MRT4577_7288C.1
tcgattgctgaattcagggtggttgctcgagctttattttgattttggggggtgggtttcagtggcaattcatgacggtgcggccggggtgggtcgtgtgggtggcgcatggctcggcggaattnaagaaaaggctggcttgcaagacagactccctggccagtatacgggtgattaaccaaaacaaatgcacgtccaacacacccaaatacagatttgttgtgcgatttaccaacaaggacatcactggccaaatcatatctgctattatagtgggcgatatgggttttgcttctgcctactcccatgagctggcaccatatggtcttgaagattgtctgaccaactat

SEQ ID NO: 154942 - DNA, 353 bp, Zea mays
  Clone ID: MRT4577_72890C.1
aaaaaaaccgaacaaataacagcaggatgtatccccaaatccccccccccaagggccattcaacaagtaacaaacatttgctgctacaacattctcccccacaacattgggggccccaaaagagcaaaaaaaaaaaaaaaatgccttggaagacacttttattgccccgatgatccccaacaaactgatctggaaatcacccatgtaacccggggctgatcattgtcgaatgtcgaaacacacagctgcatggcgcacgttcactttataaaactggtccactagggagaaaagcatccttgatcactgggacaattccccctttgaaaaagaacctcggccgccacccccct

SEQ ID NO: 154943 - DNA, 461 bp, Zea mays
  Clone ID: MRT4577_72891C.1
ggccccaatcgctcgtcccaagcgttcgcacccgccgccgccgccgccgccgcctcataatctccggggacctaaacctcgacagtaccctaccctccaagctccctccgcctcccgtttttcgttcctccgccgcgccgccaccgcaaggctctcccgcctcgcgccgtgcccggaacgatacgatggtggggctctcggagggggagaagcacttcatccgcggcggcatcgcgcaggacctccgggccgacggccgcaggcggctgcagttccgggccctcaccgtcgagacaggaatcatccctcaggccaacggctcggcgcgtgttaggatgggtgcgaccgaggtcatcgccagcgtcaaggctgagttggggaaaccaaccattcttcatcccgacaaaggaaaagtttccatttatgttgattgtagtccaactgctgcgcctatgtttgag

SEQ ID NO: 154944 - DNA, 415 bp, Zea mays
  Clone ID: MRT4577_72892C.1
gcgttcactttactggttgcctgaagttgcgcttgctgctgcgcggaggtaggtgatgcgatcgtaggggaatcaagaacgagaggatgaaataagggccgggccaattacttcaaagcccttatttacaaaaaaatagagtttactaaaactttttttagatcagtggtcacaattttttttttgaaacagaaatagtagaagttgcctttctttaaagaaagaaaggagttatagaacaagaatcacagatcatagatcacacaagcacatatcctgcttgaaaagactcaccagaaaactaatagcatgtttggttagagaaatgagattagtcatcatttctctcatttctcactttcttattttggttttggggattattaatgatatggacaaataattaatatgacga

SEQ ID NO: 154945 - DNA, 518 bp, Zea mays
  Clone ID: MRT4577_72893C.1
ggatcctgaatagcgggcgccctctattctttctttggctgcgataaacttcactaggaagaatggtcacgaagcccatccttgccagattacctcgggatgcccctttatctactcagccgtgataacaaaataacgcgatttaaacaaatcacactccataaggtaaaaactatgtataggtgctcaaagtcatgctatgtaaaccgacaatccttaatataaatccttataacgggattgactcatataagagggccaatcccaccggctctgatcaccattcacaacggagcagactgatatcctgtgataacactaggggacggtggccagatgactaccactggtggagcatgttcctgcctaacactggatcaaagcacacgccccggtggcctaggtaccagcttgatcaagagatcaactatgtctgttggcctcctgtatgactgtgaccaaccataactaagccaggctagacctatctacatcaaccacaatttttggttgaaacc

SEQ ID NO: 154946 - DNA, 473 bp, Zea mays
  Clone ID: MRT4577_72894C.1
gggtacctcgaggccggccggggtacgactacactgcccaacggaagccttgactaccacttgcatactacccctcctcggcacaagaataaccggatcgatctgcagtgggctcaaaggagatgcacatcgtcagaggcatcgcgtccggccttttatttctacctgcacgaggactgggagcaggtcgtcatccaccgagacatcaagacgagcaatgtcctgcttgatagcgagatgaacgcgaggataggcgactttggccttgcattgcgaggtcacatgatcatggagctgccgcgacgcccacaccacacgtgtggcggggacatggggttacattgctcccgagatagcaagaggtttggcaaggcaaccaaagcaaccgatgtgtttgcgttcggtgtgctcatgatggaggctgtctgtggcaggcgaccaatctgggcggacgacgccagccgagagccccc

SEQ ID NO: 154947 - DNA, 387 bp, Zea mays
  Clone ID: MRT4577_72895C.1
aaaaaaaaaacaaaaaaaaaaaacaaaaacaaaactaaaatatatatattttttttaaaacaaaacaattaaaacgttttaaaaggttttaatttggtgagttctttcatatttctaaaagagtgtttttcccattgcgtgctttcttttaaaagggcctaattttgtgctttttttttgccctttctctggaccggtccattttttctttttgcctcctgcctcccctttttggggccctttttttaatttgcccctggtcccctttacccgttctgttggaatatttatggccttccccctccatcacccttccccacaatccccctttctgcagggggttatggaccctttggtgcgcccccccttttcccctttttcccgttg

SEQ ID NO: 154948 - DNA, 249 bp, Zea mays
  Clone ID: MRT4577_72896C.1
ttcttcttcttcactctctctctctctctctctggtccactggcgagggccgccatggacggcaagggcggagacgacggagggcacgagagcggcgggagcgaccacgacgacatggacatgcggaagccgctgctggtgaacacggggagctggtggtacgccatgcgcaagtcccacgtctccgcattcctctgcacgctcatcgtggcgctcggccccatccagttcggcttcaccggcggcttc

SEQ ID NO: 154949 - DNA, 1618 bp, Zea mays
  Clone ID: MRT4577_72897C.1
ccgggggtgcgcttatcctcttcctctccctcctctgtcggcgcttcctctgcccttcccatggccgcctgctccatatatagatggttgtgggccatgatgtgcctggtttgcatctggactggtaggtactacaagaggagaagactacccacgaactgagggggagaaaacagacatcatcatcttccttctttctagttatatcgtcctcctccgtagcttcctcatcgctagctagtctagggttagagttcccttaatcttctacttccttctacttagattgctactgatcttccccattcgagatcgtgtgtatcagcttgtactcccggttatcgtcaaaccagttgtgttccacgcgttcaacttcatccatagagtggggtgctaacaattggtatcagaggccactgatctttgcgtccatggagcctaacctgcagtccgcgatggaggaacagttgaagatccttcgcgagatcagtgaccgcctcgctgcccaggaagcgcggtggcgcagtcgggagtcgacagtggtgcaacattcgaggtcgatccacgacctggaggtagcgatggcctctgcgccttccgcgacgttgagggcggagctcgacgctccggtcgctgtgacctacgagcggctcgacgcgacggaagcggcctcggcagcacgcgttagcgccctggagtccaccacggcaaccttcgacatgctgttcgacaactccgacgttgttgagaagttcgatgctgaggtggttgccgacgattggggtgggctgttcggacagcatgctcaccctctggactctggaggagcacgtcttctacttccctccgccgctcttcccttcgcgtccgcgaccgatactaccttctccagcatctacggcatcgagtgtggcacgatccacacctacacggctgctctcgcacgtcctgctgcacttcacgatcccttggtggtggcgcacgccaagtgttcgacgccaggccacaacagagtgtgcgctgaaacccaacgccagggacctcggcaggctcgacgccaatgtcgactacgcgtgcatgttcgccgactgcacttcactgggctacaactccacgtgcgtcagcatggtcgtcgtcggcaacacgtcgtacacgttcaacgcgtcctaccaggcgccgaaccagacggacgaggcctgcgacttccatggcctcgggttgcccacggagaccgacccttccgcgcccacctgcaacttcaccacatagatccagacgggggcgggggtggcggacatggcatcactccgccggagcgctggcttagccgagcaggtgcttacaacgctgcaactcctaacgaggccgacgtcctgcactgggcgttgaagggcgtgctctggcctagggtcacgtactgcattgctgggtggatcgacctcggggacggcgtcgccgaaggggccgaccatgcggtgcgcgttcgcttccgcgtggacgacggatgcgtcgttgagggaggcaccgtctgcgccgagtctggcagctggacagagatcaagggcgtgttccggctcaagaggaatgcgcgtgttatggaggtgtacgtgcagggcgc

SEQ ID NO: 154950 - DNA, 251 bp, Zea mays
  unsure (1)..(251): unsure at all n locations
  Clone ID: MRT4577_72898C.1
gtggtgttggggttnggaaccaaccataaacggggggtgcttgcgctcattctttgtctcacgaaagtccacggtctcattgttctccgtgtgttgccctgccataaacacttgttccttcactatgcctggttccagtcccaatgccgtgggggggggggggtgcctccccccgggtctctgctccgtgtcacatgtccccggaatgccaattttttgcttacacgttccgctctggctcgggtgtcggg

SEQ ID NO: 154951 - DNA, 755 bp, Zea mays
  Clone ID: MRT4577_72899C.1
actggttttatttctatcgtcggtgccgtctctcctgctggtggtgactttgctgagcctgtaacatctgccactcttggtatcgtccaagttttctggcgtttggaaaagagacttgcccaacgtaaacatttccctgctattaactggttgtacagctacagcagatacttgaagtctttggacccttggtatgaggacttcgaccctgaattcgtcggcttgcgaaccaagtgcaaggaaattcttcagatggaagaagatcttactgaaatcgtgcagctcgtcggtaaagactctttggccgaatccgacaaggttacccttgaagttgcccgtttggtccgtgacgactacttgcaacaaaacggtttcgcctcttacgacagatactgccccttctacaagtcagtttggatgatgagaaacttcctcacttactacaacttggcccaacaagctttggagagctcatcggctgacaacaaggtcccttggaacgtgatccgacaacacactcaagatgtccgcacaaagttgtcctccatgaagttccaagaccctgctgacggtcaagagaaggttgttgcttactacaaggccttccaagaggagatccaaaactgtttcagaactttgaacgagcagtaagcgaactctgatcggtctgtcatttaaatgatctgagccctatttaaacctcgaaatattattttggatttgagctcttgtacaaacaaaaacaccccatttat

SEQ ID NO: 154952 - DNA, 430 bp, Zea mays
  unsure (1)..(430): unsure at all n locations
  Clone ID: MRT4577_7289C.1
ccgaccggaangaagaccggtcgcgcgaccgtaccacacttttgttattcaacaatgggtgtctctcacatcaactttgctgtctaccaacggtggacagcttaagaatctcttgaagcgagatcctaaatcgtatgaagctgagttcgagcaacaataccgccattatgaagcaagtctatccatcttcaagctgaagccagacgacgaggcaaaagatcttggcgacctgatcaacttcatatcccaagtctcgcaatgctttcctcatagaactgctgaattcccaggtcaaatgattgaattgcttgaggagcactatcaagtgctgaatcctgatctgcgcaaaaatatagtacaggcactgattttgcttcgaaacaagaacgtcgtcgataacactcctctgcttcctttgttttttacattg

SEQ ID NO: 154953 - DNA, 302 bp, Zea mays
  Clone ID: MRT4577_728C.1
cgttcaacatccacatcttcccgagcgaggtcttggcttgcctgttcctcttcaaacggggtgcaatgctcttggtggagcttgccactctcaccaatcaaggtttcatgtttcatctctacattcagatcccaactgccttggatcccttcggtgagggcaatgctcgggactctcgtgcaggcacaaggtcaaaggactaccttcacactcacatccatcatcgtgatgggcgcaagagcctaaccaccggccaaggattgaagaacgaggtcaactacaacaagatcctcatagatctc

SEQ ID NO: 154954 - DNA, 306 bp, Zea mays
  Clone ID: MRT4577_72900C.1
ttttttttttttttttttctttttttttttttttttaataaggaacatgcatgcatggtacaaatttaaagggggtatacaaggaaccagcgtggcatgcgtaggccaaggctcccaatgcgtgtaaaccttggttgcaaaaaattgtaacctgtttcaggctaccgtgcaatttccccccgcttctttgatggttgccgttgactgttggcaatcgtattatagtcaccatttcccgcgagcatattctgatccaagcacatgtgatgttggacaggattcaagcgtcaaggggaggaaaaaaaa

SEQ ID NO: 154955 - DNA, 542 bp, Zea mays
  Clone ID: MRT4577_72901C.1
gcacgagtgggatgctggattatatggtgtaggagggagtgggcaggagggagtggtatgggagggagtggtgcaggagattggaggtccactggaggaagtcggttcacccattccacacaagattcttaccatgatgcacctcattcacagcgggagacaataagtggtcgacgtcgttcggtttcatttcctgtccaagatggaatccgtagctcaagtagctctggttcttctaactatccgactggacaagacccagtctataacccttatgcatggcaatggcaaccgagtcaaggaacctatggacctcctccaccatcaggcgaagcaccaccatcgatcatgtatgggtatggaaactatggacctcctccaccaccatattcaaatttatcaaatatgtatccaccaggaccacaatatgggtatggacaagttcccgctgcaccggcctatcactatcagtatgacggattggatcaatatcacgacccttccaacatgcctgagtactatcactatgactcgagctgaac

SEQ ID NO: 154956 - DNA, 534 bp, Zea mays
  Clone ID: MRT4577_72902C.1
cagccaaaggacgcaaatcagtcggaagatgcattctctcattttcatccacctgaactgaagcaaaactacaattcagtcagaagatgcattctcccatttccgtccacctgaactgaagcaaaacccagcggccaaagaacacaaatgcagctttagactggcaaaaaaaaaaaaaatgcaatcctaagtacaagacaaacccctacatggttacatcgacgcatattattatcctgttcattagcatcatcaggacgatgaggtgttcccttgcatattattatcgggttcatgcatcatcaggacgacgaggagttcccgctggatctttgcgagaacagccccccgaagggccacgagaaccaatgcctcctcccgccgccgtttcccccgtcgccgccgcgcgcgttgccactggactcaacaccggcgcctttgtcactgccaattgcctccgccggctcctccgtgggcagctggtgcctgcacacggggcaggagctgtgcatctccagccagggcaggatgcac

SEQ ID NO: 154957 - DNA, 277 bp, Zea mays
  Clone ID: MRT4577_72903C.1
gagctactagtcggcggccgcccttgggctcgtttatccggtatttgttccgcctagtgtcccagatccacaggcaaggataccgaaggcggctacgtaagggcgggctcaatgctgctctacactagggcactcccaagcctcttcgcggagtccgggatgacgacgagccgcgccgcatccacgccctagctgctgtccaaggcccagacgggcctggcgcatgtgatttgggcagatgaggccgacaagcaggggcatttgttgaggaacgggc

SEQ ID NO: 154958 - DNA, 757 bp, Zea mays
  Clone ID: MRT4577_72904C.1
cttcgcgcagcgcattggatggttcaacgtgaaaacggaaatacgctccatcaagaatacgctaattctgcaccatattgtgttccttttgattttgttcacaagaattccaggatgttctacaatccgttcaacggaaatatttcatcgcaaccagagccttctccaccttacatctctgggggcattttggctgatgaaatgggcttggggaaaactgtcgagcttttagcgtgcatttttgctcatcgtagaccaatttcattagacttttctgtcttccagaacaaaaccgaaatggatcaaattaagaggcagaaagtagaaagggttgagtgcatctgtggtgctgcgagtgaaagttctgcatacacgggtctatgggtccaatgtgacatttgtgatgcttggcaacatgctgattgtgttggttactcacccaagaggaatatactttttgctgataccactgaagatgtagtatcaacaaacaaaaaaagcaccatgaagtctggatttagaaggaaaaagaaacccaggtgttctattgttgagacagaagacaaatacatttgtgcactgtgcttggagcttattgaagcaactcaaactaatatactcagccatgctacattgatagtatgtcccgcaccaatattggcacaatggcactctgaaattacccgacacacaaggccaggatctctgaaagtttgcatttatgaaggtgcaaggaacttggatccttctaccatcc

SEQ ID NO: 154959 - DNA, 875 bp, Zea mays
  unsure (1)..(875): unsure at all n locations
  Clone ID: MRT4577_72905C.1
ggcgctcagcggcgggcgggaacctccttgaatcgacccaagccgctctccctgtcaggtgagccgcgccgccagtctccggcgaccccgagccccaacaatcccatctccggccacaggagctccagggttcctctctccatctggtcctccgctacgccccgaatcgatggagattagggccccgccgacgagcctcaggctcgcgacgccgccttcaaccgccagcttccgcccggtcgccctccggacctccttcctcagcggcagcgtttctcttcgagctgtgcaagtacgtcaatcaaatgtcaacagatttaagtgcaacgccatacggagtaacctcttcgatagactaactagggttgtcaggtcctatgcaaatgcaattctgagttcatttgaagaccctgagaagatcctagatcaagcggtcttggagatgaatgatgatttaataaagatgcggcaagccactgcacaggtcttggcatctcaaaagaggcttgagaacaagtacaaagctgccgaacaagctgatgctgattggtatcggagggctcaacttgctcttcaaaagggtgaagaggatcttgctcgtgaagcccttaaacggcgtaaatcatatgctgaaaatgcaagctcgttaaaggcccagcttgatcagcagaagagtgtcgtcgaanatcttgtttcanataccaggcttcttgagagcaagatagcagaggccaagcagaaaaaggataccctaaaagcctgtgctncaatcagcaagaccgcaacaaaagtgagtgaaatgctggngaatggtgatacaagtggtgccttgtcagcgtttgagaagatggaggagcaagttatgactatggaat

SEQ ID NO: 154960 - DNA, 441 bp, Zea mays
  Clone ID: MRT4577_72906C.1
cgccgtgcgcggtggcgtccccgctgacgcccggcgccgtggacggactcggcccctggagcacgcagctcgctgcctgctcacggctcgtcgtcacggcctatttatggatccgccggccgcgggcagaactcccccgcgactatcaggatcggccggccatacaccgtcgttaactgcggcactagactaggaagaaaatggggtggaagggcgtcctggggttcgactacggcgtcgtgcaggcaccgctcggccccgacatctccgggccggagctcgccgccgccgtcgccaacgctggcgccataggcctcctccgccttcctgattggccggcgccggaccacgtgagggagctgatacggaggactaggagcctgaccgagaagccattcggtgcggccatcgtgctggccttcccgcacgaggagaatctga

SEQ ID NO: 154961 - DNA, 313 bp, Zea mays
  Clone ID: MRT4577_72907C.1
ggggagcaagagtatacagggcattttaaaattaattccgggagcccgtttgtaggggccaatcattccctagaaagaggagaggaaaacaacggggggccccccccaccgatgggcgaccacacacaaatatgaagcacgcacccccgccgggcgtgcacgtacgggggggggaatttatcgatcatttggaggggaacattatgggaaccgggcataaacccgggggtgaggctgacagaaaagggaacgcgccggggccccgggggtggcaaccaaaaaaaaaagggcgaggcgctttttggccctgggg

SEQ ID NO: 154962 - DNA, 257 bp, Zea mays
  Clone ID: MRT4577_72908C.1
cccgccacctgatacgcgttacacggacgaggagaggtgagcgttctggtgctacaggcctacatggtataccattatccccatcgtgcatgtgatcagctccttgtgggagtgccatcaaactctgtccactgcaaatatacttcaattacaccggagagaacgacacaccaagtgggggatctggtgcatacatcaccaaaagcccacgagctacagctccaacaatggggttgcctgaatggaaaccacaaaag

SEQ ID NO: 154963 - DNA, 290 bp, Zea mays
  Clone ID: MRT4577_72909C.1
gttattagcgaaaaagtttacatttgggccttgggttaataaccctttccataacacaaagtttagtgtgtacaaataattactcaactaaacaacctctttatatcatcataacattataattatctctatttagctcccaagaaaaatgtatctactctatcttctaatacttctatatgcattccttaccactatttctattcacttcataaagtattagtatacactcaactaattaataaataatatatacataacatgaaatctcttaatattttcaacaaata

SEQ ID NO: 154964 - DNA, 278 bp, Zea mays
  Clone ID: MRT4577_7290C.1
cccgggcaaaaggaaggccccttgttttcacaattcccaaaaccggctccggaaaacccacatgggccttttttttatttctccggtgccgggaattttttttgaattcggggggccccctctttaaaacggtggggccattggccgaattcccccttttggtgaacattaaaaaaaatccttggcttaaaaaaaggatttttttttttttggcattatccggtggtttgctgggcctgaaaaccttttcaccccatttttctttgggggaaaacctt

SEQ ID NO: 154965 - DNA, 252 bp, Zea mays
  Clone ID: MRT4577_72910C.1
gttctagatcgcgagcggcccccttttttttttttttggcaccccttggaaacaactgcaacatgtttcccatttggtgtaaccgttttagtgataacaggtacatatgcctagaagtattgtatatatgccaccaggggctgaaatgggttggggacttgaagccttgtaaatcccccgaaagttgaccaagacaacgatttgtccaccctagtaacaatggggggttgattccccagggcacttggttat

SEQ ID NO: 154966 - DNA, 189 bp, Zea mays
  unsure (1)..(189): unsure at all n locations
  Clone ID: MRT4577_72911C.1
atcagggtcatgcccagcatgacatcgagccggtggcctgancctgaatnctatggtgannactcacgccgccgcgatntngccggtggtcaacccagctttttncgggtaatcgggcagatggcgttaatggccttcgcgctgtgccgtccgcattccctgcagnggcttcaggcctgtcgacacatt

SEQ ID NO: 154967 - DNA, 397 bp, Zea mays
  Clone ID: MRT4577_72912C.1
ccataaattcaatgggtgtttttacactctagtctaaatctcagacttaaagtaaaatattcagacatccaatcaaagttgtgtttcctttttaggggggaattttacttatccacaccaataaaatcttgggggggagaattataacaacattccaacattaccataattcatgcagtcactcccaaaaaagagggattttaacaaaaaaaaaaaattttctgggaccttcaacacttcgaaatcacaaatttctataaaatgtaattttcaaaaacactatcaaacacacaacacatacatttctcttacttatatccaataggggcaaaatgacaaacctcaaaaattgtcatcaggaacaaaccctctatagataatatcatcataaaaatta

SEQ ID NO: 154968 - DNA, 799 bp, Zea mays
  Clone ID: MRT4577_72913C.1
tttccttccttccttcctttctttcttgaggccgccgctccgcatctcgctcgccgcggaagccgctgtcgccgatgtccgccgcctccccgctcatgggcggcccctcctccgccgacgcgcccaccgacggcgagcaccggatgggcaccaccatcgtcggggtctgctacgccggcggcgtcgtcctcgccgccgactccaggaccagcaccggaatgtatgtggcaaaccgtgcttcggacaagattagtcagctcactgataatgtttatgtctgccgctctggatctgctgcggatacacaaattatctcagattatgtacgctattttctccaccaacacacaattcagcttgggcaaccagctaccgtgaaagttgcatctaacttggttaggttgctggcctatcagaacaagagcatgttacaagctgggatgatagttggtggatgggataagtatgagggaggccaaatttactcagtccctcttggtggaacgattctgaggcaaccattcgcaattggaggatctggttccagctatctgtatggattgatggaccatgaatggaaagaggggatgacccaggaagaagctgagaagtttgtggtgaaggtggtttcccttgctattgcacgtgatggtgctagtgggaggggttgttcgcaccgttactataaatgaggagggcgttaagaggagcttccatcctggtgacaagctgccactgtggcatgaggagatggagccccagaactcgctcctcgacattctcgcggccgggagctctg

SEQ ID NO: 154969 - DNA, 923 bp, Zea mays
  unsure (1)..(923): unsure at all n locations
  Clone ID: MRT4577_72914C.1
caggccggccgggccgggattcggcactgcacgcggtcggcctcaggctgcttgaaatatgcatctcagcggtccctggtgtcctctctcccgctcaagggcagcagagacagcagctgagctgactggatctcgatctaccgctttgcttccgttttgagccgccagctgtgtggcctcctgtctgtctgcctatcttgaacctccatggattccacactcttcatcatcggcgtcataggcaacatcatctcagttctagtcttcatttctcccatcaagacgttctggaggatcgtgtggagcgggtcgacggaggagttcgagccggcgccgtacgtgttcacgctgctcaacgcgctgctgtggctctactacggcgccaccaagcctgacgggctcctcgttgccaccgtcaatggctttggggctgccatggaggccatctacgtcgtcctcttcatcgtttacgccgccaatcatgccacaagggttaagacggtgaagctggcagcagcgttggacatctgtggctttggagttgtgtttgtggccaccacgttcgccattaacgaattaaacttgagaatcatggtgatagggatgatatgtgcctgcctcaacgtgctcatgtacgggtcaccccttgctgccatgaaaacggtgatcaccaccaagagcgtggagttcatgccgttcttcctgtccttcttcctcttcctcaacggaggcatctgggcaacgtacgcggtgcttgaccgagacatcttccttgggatccccaatgggataggcttcgtcctcggcaccatccagctgatcatctacgcgatctacatgaacagcaaggtctcccaaagcagcaaagaaatagcgtcgcctcttctggnctctatccagggagaaagcagctagcatgtctg

SEQ ID NO: 154970 - DNA, 532 bp, Zea mays
  unsure (1)..(532): unsure at all n locations
  Clone ID: MRT4577_72915C.1
ggccgcttttttttttttttttttgagagaaagaatgcattcgatgcgatgcgtaactatggacttcgaaagaagtacggtacagaagaatgcccaagagagcgagcgttgcgatgtccaccacaagacctcgtaacaacaaaaggcatgctgggactcgagcccagacatgaacgaaaataaacatcagaaaaatatctagaaagaagaatgtgaaaagaagtgaacccggctgcccgtcaaatattcacaggttccgacccgatgcagccaacccaaaaccagctccaagcaatgcattcgtaagtggcatcacgccagagctttacaaaatgctggcacgcttgtggagcgctgtgtgacggttgtggagagtnaccgcgggggaagcggatgctgcggncggcgatctggccgttggagcaggacatacccgcagcgagcttctgagccacagcaacgccgaagttgcagaggccgaaagaatcggtgccaatgcagacaacagcgccgtcagtggtgcaaggcgtac

SEQ ID NO: 154971 - DNA, 627 bp, Zea mays
  Clone ID: MRT4577_72916C.1
ggttaaaaacttccgactcctggtagagagctattaagcagggaatggttaaatacatctgactgctgatagatgactattagagcagggaatggttaatacatctgactgctgatacatagctaaagcttagggccgcaatgacctgacaccatcaattagtcctaataatcctcgctatttgcagtaaggttgcatcttctactatcaagcagtaagcttcgctatctgttcaagcaggtacttggattcagctgcgtgctcgaccggcgcttcactcctcacagtgattctctgccttttctcgttattgtattcatgctgtgtgacgctgacgcggaacaggtgaggaacccaggtggcttccttgagcttcagaacataactgtcgtccccctcctctttcctgatccgatcaagctcgtcggcgctgcagccaatgatcttctctgcatgctcgttgaacacagagaaccatgcctcgccagtaggatcggagaccttgatgaccatgatgtatctcagtgagcattccgagtcattcttttggcatccctcacaccagtatccagatccaaaagtttcagtcaccttcttgttgcaggtcttgcaagcacggtaccacat

SEQ ID NO: 154972 - DNA, 554 bp, Zea mays
  Clone ID: MRT4577_72917C.1
cacattttaatttgtttttgtcaagaactaattgccattttctacttgtatccacggagttcgtcccttccccccgagttgtggatgggcttgccgtcgtagactcggcggtcaccggtcatcgtggcgacggcggacctcgtcaagctggcgctcgatactcgatagttccggtttcttgccttcgtggtaagttcatcctagatgcgcccgttgaaggtaaacccaacatattttagcaaagactcgggaaggcaaaacttttctgtttgtttggctcgcttttcattggcctaacatcttcgggagtcctaacaaatctgatgtctaattcaggacactcattgattctggtggaatagaagctttcttaccttgtcttttttccattgttctagtttcaatactgtggtctatagtccatatagtcgtcctgcctttttccttactggaccagcagattcttctgctaccaccgttttatggattcagtcaaactctggttgtgattgcactttcctcggtaccgcctgcggaatcctgtattatcctgt

SEQ ID NO: 154973 - DNA, 820 bp, Zea mays
  unsure (1)..(820): unsure at all n locations
  Clone ID: MRT4577_72918C.1
cctcgtcaacagctagccagctacagcagctcagaaccgagcacagatcgaagcggagccaaacgaaagaagggacctaacctagccagccggcgatcgaccgagagatggcgcggtggtgccagctggcggcggtgctgctcgccgtgtcgatggcggcgtcgacgtcggtggcgcaggacgcgctgcagaccaagtgccaggaggacctgcagaagctgtcggactgcatggactacgcgacggggcacgaggacacgccgtcggccaagtgctgcgaggacacggcggacacgcagaagtcgcggcccgagtgcctctgctccatcatccagcaggtgcacagcggcagccacggcgtgcagcagctcggcctccgcttcgagcgcctcctggcccagcccgccgcctgcaagctccccaacgccaacgtttccctctgcatcaacctgctgcacctgaccccgagctcgccagactacgctctcttcgcaaatgcttccaagattactccgtccactaccgcaccggcgagagacaccgccgacggcttcaaggttccgacggggctcggttacggcgtcgtggcggcggccgtcgtctctgctctcatctcatccatcttctgattttcggacaagcacacgcccttctatcctctccctttcttctatcccttcatgtttgtttccataactctgcaagttcccacacaacgacngatgctttagatggtctatatctactcacgtgggtaaaggattcgttcggatggacgtactgttgttttaccccagataggtagatggagagttgagac

SEQ ID NO: 154974 - DNA, 965 bp, Zea mays
  Clone ID: MRT4577_72919C.1
ccaggaaaagcctgttttctttagtttgtattgccccataagccactcaagcctgaccagaacatgtggtaccgtgcttgcaagacctgcaacaagaaggtgactgaaacttttggatctggatactggtgcgagggatgccaaaagaatgactcggaatgctcactgagatacatcatggtcgtcaaggtctccgatcctactggcgaggcatgggtctctgtgttcaacgagcatgcagagaagatcattggctgcagcgccgacgagcttgatcggatcaggaaagaggagggggacgacagttatgctctgaagctcaaggaagccacctgggttcctcacctgttccgcgtcagcgtcacacagcatgaatacaataacgagaaaaggcagagaatcactgtgaggagtgaagcgccggtcgagcacgcagctgaatccaagtacctgcttgaacagatagcgaagcttactgcttgctagtagaagatgcaacctttctggtggttcgttaagggctgccctccgaggtgttccctctgggttttagcacttctgtaagatatatgtagaggtttggttaccttgatgtcaagcaacagatgctaggacagttcaagcatgatgcatgaagcgtttgccgaattgcagtttcagttcaaaaaaaaaaaaaaaaggcccctaggcccctttgttgagcaaatagtgaggattattaggactaattgatggtgtcaggtcgcggccctaagctttagctctgtatcagcagtcagatgtattaaccattccctgctctaatagtcatctatcagcagtcagatgtatttaaccattccctgcttaatagctctctaccaggagtcggaagtttttaaccattccctgctttaagacaagataaattgctcgatctacatcgttgtgccacgtattcagtcttttccccgacatgtatcccg

SEQ ID NO: 154975 - DNA, 718 bp, Zea mays
  unsure (1)..(718): unsure at all n locations
  Clone ID: MRT4577_7291C.1
gccggccgggccgggacaccaaataaccatggcggcatctaacatgtattgcagcggcacatgtcgtcttcgtcctcgccttgctccttgtggcctatcgtgcggaggcaactgtctgcatgaggcataacaatttctatcacggtccatgcatgagcaacaaggactgtgccaactcgtgcgttcaacataacctcggtgtcggcgggtattgcaggggcaagatcccattcaacaaagaatgcatgtgtacatttgaatgcccatgagtcaaaagccactatatctgacgggcgcaacttgttatatatctagggatcggatgggatgtcgtttggcatgtcctccattttgaaagtgtccaagtgagactttatacatatatgcagttgagagatggaattaataataagagcaaacaattatgttgttgtgcaaaaaaaaaaaaaaaaaaaaaaaaaaaaaaaaaaaaaaaaaaaaaaaaaaaaaaaaaaaaaaaaaaaaaaaaaaaaaaaaaaaaaaaaaaaaaaaaaaaaaaaaaaaaaaaaaaaaaaaaaaaaaaaaaaaaaaaaaaaaaaaaaaaaaaaaaatttttttttnnttttttttaaannnntttngggaaaaaaaaaaaaaaaaaaacccccccccctttttctttctcctttttcccccccccaaaaaaaaaaaaaaaatttttttttttttttttttttcc

SEQ ID NO: 154976 - DNA, 243 bp, Zea mays
  Clone ID: MRT4577_72920C.1
aacaccccgtctgtaacattcgccagagtatatacgaaatccatgttaatataccctccaaagaaaaaaaacaaaaaaggaaaaaaaaacaaaaaaaaataaacaataccaaaaatacacatcaaaaaaaactaaaacaaaaccctattattacccatctcaatactctttcaacacatcctacttatcccagccttcatcatacctaatacttcctcacccatcccccttcccaacattttc

SEQ ID NO: 154977 - DNA, 411 bp, Zea mays
  Clone ID: MRT4577_72921C.1
tacacacgcgtctggcagcaagatggacatggacgcatcctccacgggcaccaacatgcagggcagcctgctgtcacgacgcgcctcagactggctcgcgctgctcgtcatcaagtccggctagctcctggtgcacctcctgctcacgatcctctacgtcgtcgtctccgtgttctcagtagcctcagtctactctgctaagcgcaactcgctgaccttcacgcgcgtggtctccgtagtacctcgcgtctggcggacgctcgccgcgacgttcatcgcggcgttcacgatcttcttcacctagcaggctgtcgccgtgctcgtcttcatcggcctcactttttcagcagacaactgttctgggtcgcgtacctgctcgccttcctcgtcgacgttgcgtatcagctcgga

SEQ ID NO: 154978 - DNA, 344 bp, Zea mays
  Clone ID: MRT4577_72922C.1
tgatatcacctaactgggatgaagccgggacggtggcactgctcatttttttgaagaggatgggcactatcccatactttgatcatgcaagttttcttggaacaaaggctgaagaaaccaacttgctgccgaattttgttggaagcaatgaaggaacgagctctacgaagggcggggaggggggggggaagctgatggacagtattgataattcacaccgctgggttcctatcacaaaaatcgagggcctaatgaacaacccccctcatcattagtgtgaccgcatgcatgccctaaagatcataaatgcatgtcgttccacgcatgtatatgaaggacagcct

SEQ ID NO: 154979 - DNA, 2494 bp, Zea mays
  Clone ID: MRT4577_72923C.1
ttgggtacctcgaggccggccgggcaagaagagcacgcccactcctccggctcttcttctccaccggcaccagtccaccacctcccacctcctgccaccgcgcggccccaaccaaccacaccgcagcgcagcaatggcgggcaacggcgccatcgtggagagcgacccgctgaactggggcgcggcggcggcggagctggccgccgtcgcctccgccaaggacgcgtccggcgtcgccgtcgagctcgacgaggaggcccgcccccgcgtcaaggccagcagcgagtggatcctcgactgcatcgcccacggcggcgacatctacggcgtcaccaccggcttcggcggcacctcccaccgccgcaccaaggacgggcccgcgctccaggtcgagctgctcaggcatctcaacgccggaatcttcggcaccggcagcgacgggcacacgctgccgtcggaggtcacccgcgcggcgatgctggtgcgcatcaacaccctcctccagggctactccggcatccgcttcgagatcctcgaggctatcacgaagctgctcaacaccggtgtcagcccctgcctgccgctccggggcaccatcaccgcgtcgggcgacctggtcccgctctcctacatcgccggcctcatcacgggccgccccaacgcgcaggccgtcaccgtcgacggaaggaaggtggacgccgccgaggcgttcaagatcgccggcatcgagggcggcttcttcaagctcaaccccaaggagggcctcgccatcgtcaacggcacgtctgtgggctccgcgctcgcggccaccgtgatgtacgacgccaacgtcctggccgtcctgtcggaggtcctgtccgccgtcttctgtgaggtcatgaacggcaagcccgagtacacggaccacctgacccacaagctgaagcaccacccggggtccatcgaggccgcggctatcatggagcacatcctggagggcagctccttcatgaagcaggctaagaaggtgaacgagctggacccgctgctgaagcccaagcaggacagatacgcgctccgcacgtcgccgcagtggctgggcccccagatcgaggtcatccgcgccgccaccaagtccatcgagcgcgaggtcaactccgtcaacgacaacccggtcatcgacgtccaccgcggcaaggcgctgcacggcggcaacttccagggcacccccatcggcgtgtccatggacaacgcccgcctcgccatcgctaacatcggcaagctcatgttcgcgcagttctccgagctcgtcaacgagttctacaacaacgggctcacctccaacctggccggcagccgcaaccccagcctggactacggcttcaagggcaccgagatcgccatggcctcctactgctccgagctccagtacctgggcaaccccatcaccaaccacgtgcagagcgcggagcagcacaaccaggacgtgaactccctgggcctcgtctcggccaggaagaccgccgaggcgatcgacatcctgaagctcatgtcgtccacctacatcgtggcgctgtgccaggccgtggacctgcgccacctcgaggagaacatcaaggcgtcggtgaagaacaccgtgacccaggtggccaagaaggtgctgaccatgaacccctcgggcgagctctccagcgcccgcttcagcgagaaggagctgatcagcgccatcgaccgcgaggccgtgttcacgtacgcggaggacgcggccagcggcagcctgccgctgatgcagaagctgcgcgccgtgctggtggaccacgccctcagcagcggcgacgcggagcgggagccctccgtgttctccaagatcaccaggttcgaggaggagctccgcgcggtgctgccccaggaggtggaggccgcccgcgtggcggtcgccgagggcaccgcccccgtggcgaaccggatcgcggacagccggtcgttcccgctgtaccgcttcgtgcgcgaggagctcggctgcgtgttcctgaccggcgagaggctcaagtcccccggcgaggagtgcaacaaggtgttcgtcggcatcagccagggcaagctcgtggaccccatgctcgagtgcctcaaggagtgggacggcaagccgctgcccatcaacgtcaagtaaagaacgccaaggagaagaggagggaggggaggaaatacgtgaaaaaaaataaaacctgtacacgtgtatgtccagatcgtgtgtcgtcgatcgttcttcgttgttgatttttggttgtattgatcgatccgtatgtgtgcgtgcgtgtgtggcgttgctctttcttcttttgtgtagctgtgccctgccaccggccgacgtgcgtgcatgccatggtggcgggcagcgttttctaaggtcatatactgttgttgtgtttaagtacatcttgcgtactcaattccttctaagtaagtatcctaatactagaatgttccccaaaaaaaaaaaaaaaaaaggccccta

SEQ ID NO: 154980 - DNA, 364 bp, Zea mays
  Clone ID: MRT4577_72924C.1
gctttctccagcagcggcagcggctcttgccgccgcgccatgtgctcgcatccacctccgactcctcctgcgcactgacccgcccagccacaggaaccaagacactgccgtcatgcgcgcgccgcccaggcggccgtcccctgctcctgcgcctgctccgtgcgccgccagctcgccgccttctccctacgcggcgttcgcgtcgccgggtcctggcccggtgttcgcgggcggtggcggcgccggaccgagcctgagcccgccgctgatcgcgatgctagcggtggtgggcgcggcgctgctggtggtgctgtacgcacggttggtgagccgcgtgttccgcgcggcgcgggcggcggtggag

SEQ ID NO: 154981 - DNA, 632 bp, Zea mays
  unsure (1)..(632): unsure at all n locations
  Clone ID: MRT4577_72925C.1
atgggtacccttgtggtccggccgggnagtaatacacgcccactcctccggctcttcttctccaccggcaccagtccaccacctcctgccaccgcgcggccccaaccaaccacaccgcagcgcagcaatggcgcgcaggccgtcaccgtcgacgggaggaaggtggacgccgccgaggcgttcaagatcgccggcatcgagggcggcttcttcaagctcaaccccaaggagggcctcgccatcgtcaacggcacgtccgtgggctccgcgctcgcggccaccgtgatgtacgacgccaacgtcctggccgtcctgtcggaggtcctgtccgccgtcttctgcgaggtcatgaacggcaagcccgagtacacggaccacctgacccacaagctgaagcaccacccggggtccatcgaggccgcggccatcatggagcacatcctggatggcagctccttcatgaagcaggccaagaagttgaacgagctggacccgctgctgaagcccaagcaggacaggtacgcgctccgcacgtcgccgcagtggctgggcccccagatcgaggtcatccgcgccgccaccaagtccatcgagcgcgaggtcaactccgtgaacgacaacccggtcatcga

SEQ ID NO: 154982 - DNA, 758 bp, Zea mays
  Clone ID: MRT4577_72926C.1
cattgggtacctcgagggccggccgggctaagtacatcggggtttcaagctcaaccccaaggagggcctcgccatcgtcaacggcacgtccgtgggctccgcgctcgcggccaccgtgatgtacgacgccaacgtcctggccgtcctgtcggaggtcctgtccgccgtcttctgcgaggtcatgaacggcagtcgtccacctacatcgtggcgctgtgccaggccgtggacctgcgccacctcgaggagaacatcaaggcgtcggtgaagaacaccgtgacccaggtggccaagaaggtgctgaccatgaacccctcgggcgagctctccagcgcccgcttcagcgagaaggagctgatcagcgccatcgaccgcgaggccgtgttcacgtacgcggaggacgcggccagcggcagcctgccgctgatgcagaagctgcgcgccgtgctggtggaccacgccctcagcagcggcgacgcggagcgggagccctccgtgttctccaagatcaccaggttcgaggaggagctccgcgcggtgctgccccaggaggtggaggccgccccccgtggcggtcgccgagggcaccgcccccgtggcgacccggatcgcggacagccggtcgttcccgctgtaccgcttcgtgcgcgaggagcttcggctgcgtgttcctgaccggcgagaggctcagtcccccggcgagagtgcaaacaggtgttcgtcggcatcagccaggggcagctcgtggacccatgctc

SEQ ID NO: 154983 - DNA, 334 bp, Zea mays
  Clone ID: MRT4577_72927C.1
ttgtgcagcatccacaaccacaagccatggcggggtggactaacatccggactaacaactgcgccctcaacgaaatcatagtggacaaggacaccgtcactggcttcttgatgggcgacgttgtcaacgttgatctgcgcaagaaaaccagttacctcctggttgacaacatgacgacagttaaacaaaccaaggacacgatcaaagaatatactgggaggtaggattttgctagtgagctcatgagtcagaatattgccgacatgataagatttctggaggaaagatacaacaagccaaggcctgctattatggacacaccaatcaaggacca

SEQ ID NO: 154984 - DNA, 831 bp, Zea mays
  Clone ID: MRT4577_72928C.1
aattcggcacgagggcccactcctctccggctcctcttcttctccaccacaccacaggcaccggcaccggcaccgcctcctccctccctcctgccaccgcgcggcaccccagccacagcacagcaatggcgggcaacggcgccatcgttgagagcgacccgctgaactggggcgcggcggcggcggagctggcggggagccacctggacgaggtgaagcgcatggtggcgcaggcccggcagccggtggtgaagatcgagggctccacgctccgcgtcggccaggtggccgccgtcgcgtccgccagggacgcgtccggcgtcgccgtcgagctcgacgaggaggcccgcccccgcgtcaaggccagcagcgagtggatcctcgactgcatcgcccacggcggcgacatctacggcgtcaccaccggcttcggcggcacctcccaccgccgcaccaaggacgggcccgcgctgcaggtcgagctgctcaggcatctcaacgccggaatcttcggcaccggcagcgatggccacacgctgccgtcggaggtcacccgggcggcgatgctggtgcgcatcaacacgctcctgcagggctactccggcatccgcttcgagatcctcgaggccatcaccaagctgctcaacaccggggtcagcccgtgcctgccgctccggggcaccatcaccgcgtcgggcgacctggtcctgctctcctacatcgccggcctcatcacgggccgccccaacgcgcaggccgtcaccgtcgacggcaggaaggtggacgccgccgaggcgttcaggtcgccggcatcgagggcggcttcttcag

SEQ ID NO: 154985 - DNA, 437 bp, Zea mays
  Clone ID: MRT4577_72929C.1
aaaaaactctgtaacccaaaatcaaaccccccggccgaacccctggatccagagggacccacaccgtctagaacggccggcaccgggggggatcaccaagttttaatccctttagtggggggaaagggggcacagggggtaaccgtgggaaaaggggatccctgggcgaaatcgcaaatccgcccacaactccacacaaaatagaaaacccaggcatacctagtaaggccagggacgcacaaaaagtgagctaacctaaatgacctgggtggcgccaaaaaaccggtttccccaggggaaacctggaatcccacaaccctcaaagaaagggccaaagcgcggggagaggcctttcgcttattgggccacttaccccttgcactcgcactgactggttgggcgagggcgatcagctgccgcaaaggggttaataccgc

SEQ ID NO: 154986 - DNA, 259 bp, Zea mays
  Clone ID: MRT4577_7292C.1
ctaaactcaatttgtattacaaggattcaactctttgggctattattaattcactgatcaagcagtgtccaaacaagttcaaatttcactcaagggctagaataaacataccaagtctacccaaaagttttcataatttttgaaactactaaactatgtctaaaattataataggatctgtgtaatacccaatgtgtaaaataatgaaaagagatttgactttccttttatatttgatctcaatctattgtaacatggg

SEQ ID NO: 154987 - DNA, 630 bp, Zea mays
  Clone ID: MRT4577_72930C.1
ccggccgggacgcccactcctctccggctcctcttcttctccaccacaccacaggcaccggcaccggcaccggcaccggcaccacctcctccctccctccgtcctgccaccgcgcggcaccccagccacagcacagcaatggcgggcaacggcgccatcgtggagagcgacccgctgaactggggcgcggcggcggcggagctggcggggagccacctggacgaggtgaagcgcatggtggcgcaggcccggcagccggtggtgaagatcgagggctccacgctccgcgtcggccaggtggccgccgtcgcgtccgccagggacgcgtccggcgtcgccgtcgagctcgacgaggaggcccgcccccgcgtcaaggccagcagcgagtggatcctcgactgcatcgcccacggcggcgacatctacggcgtcaccaccggcttcggcggcacctcccaccgccgcaccaaggacgggcccgcgctgcaggtcgagctgctcaggcatctcaacgccggaatcttcggcaccggcagcgatggccacacgctgccgtcggaggtcacccgggcggcgatgctggtgcgcatcaacacgctcctgcagggctactccggcatccggttcgag

SEQ ID NO: 154988 - DNA, 2577 bp, Zea mays
  Clone ID: MRT4577_72931C.1
cattgggtacctcgaggccggccgggaagaaatgacgcccactcctctccggctcctcttcttctccaccacagggaccgcctcctccctccctcctgccaccgcgcggcaccccagccacagcacagcacagcaatggcgggcaacggcgccatcgtggagagcgacccgctgaactggggcgcggcggcggcggagctggcggggagccacctggacgaggtgaagcgcatggtggcgcaggcccggcagccggtggtgaagatcgagggctccacgctccgcgtcggccaggtggccgccgtcgcgtccgccagggacgcgtccggcgtcgccgtcgagctcgacgaggaggcccgcccccgcgtcaaggccagcagcgagtggatcctcgactgcatcgcccacggcggcgacatctacggcgtcaccaccggcttcggcggcacctcccaccgccgcaccaaggacgggcccgcgctgcaggtcgagctgctcaggcatctcaacgccggaatcttcggcaccggcagcgatggccacacgctgccgtcggaggtcacccgggcggcgatgctggtgcgcatcaacacgctcctgcagggctactccggcatccgcttcgagatcctcgaggccatcaccaagctgctcaacaccggggtcagcccgtgcctgccgctccggggcaccatcaccgcgtcgggcgacctggtcccgctctcctacatcgccggcctcatcacgggccgccccaacgcgcaggccgtcaccgtcgacggcaggaaggtggacgccgccgaggcgttcaagatcgccggcatcgagggcggcttcttcaagctcaaccccaaggagggcctcgccatcgtcaacggcacctccgtgggctccgcgctcgcggccaccgtcatgtacgacgccaacgtcctggccgtcctctccgaggtcctgtccgccgtcttctgtgaggtcatgaacggcaagcccgagtacaccgaccacctcacccacaagctcaagcaccacccggggtccatcgaggccgcggccatcatggagcacatccttgagggcagctccttcatgaagcacgccaagaaggtgaacgagctggacccgctgctcaagcccaagcaggacaggtacgcgctccgcacgtcgccgcagtggctcggcccccagatcgaggtcatccgcgccgccaccaagtccatcgagcgcgaggtcaactccgtcaacgacaacccggtcattgacgtccaccgcggcaaggcgctgcacggcggcaacttccagggcacccccatcggcgtgtccatggacaacgcccgcctcgccatcgccaacatcggcaagctcatgttcgcgcagttctccgagctcgtcaacgagttctacaacaacggcctcacctccaacctggccggcagccgcaaccccagcctggactacggattcaagggcaccgagatcgccatggcctcctactgctccgagctccagtacctgggcaaccccatcaccaaccacgtgcagagcgcggagcagcacaaccaggacgtcaactccctgggcctcgtctcggccaggaagaccgccgaggccgtcgacatcctcaagctcatgtcgtccacctacatcgtcgcgctgtgccaggccgtcgacctgcgccacctggaggagaacatcaagacctccgtcaagaacacggtgacccaggtggccaagaaggtgctgaccatgaacccctcgggggacctctccagcgcgcgcttcagcgagaaggagctcatctccgccatcgaccgcgaggccgtgttcacgtacgcggaggacgcggccagcgccagcctgccgctgatgcagaagctgcgcgccgtgctggtggaccacgccctcagcagcggcgacgcggagcgcgagccctccgtcttctccaggatcaccaagttcgaggaggagctccgcgcggtgctgccccaggaggtggaggccgcccgcgtcgccgtcgccgagggcaccgcccccgtagccaaccggatcgcggacagccgctcgttcccgctgtaccgcttcgtgcgcgaggagctcggctgcgtgttcctcaccggcgagaagctcaagtcccccggcgaggagtgcaacaaggtgttcctcggcatcagccagggcaagctcgtcgaccccatgctcgagtgcctcaaggagtgggacggcaagccgctgcccatcaacatcaactaaaacacgccaggcgccgccatccatgctgccgcccgcgcatggccggaggaggagaagaggaggaggaaaatacatgaaaaaataagacttgtacacgtgtatgtctccagattgtgccgccgtcgttctcgtcgttgacttttggttgtattggtcgatccatatgtgtgtgcgtgtgtggcgttgttctttcttctttgtgtagctgccctgccaccgcctgcgatgcgcatgccatggcaggtagcgttgtctaagatcctatactgttgtattttgaggtgaactacatcttacgtgatcaatttcttcttctaagtatcctaatag

SEQ ID NO: 154989 - DNA, 414 bp, Zea mays
  Clone ID: MRT4577_72932C.1
aaatgcccacttgtctttttattagggagcctttgtttatattttttaaaaaaaggggcgggacctgtaagcgaaccatctatgccctataaaaccccgtgttacagcttggggtataaaaaaaaataactgggtcctgggtgaattttttatccggtcacttttaaaaaaacataggggcaaaaatcaaaaagtttttgttctggacaaacctactgagtgaaaaaacccaccttatttggggccaactcactttccaataacaaggaggcaaacctgcagtgccattttaaaaaaaaaatgggttcagggttcattgagaggaccaaattcttattttgcgcccgggaatttctgccctgcaccagtgagacggccaacatttcattgacctagaccgattaaacctgggag

SEQ ID NO: 154990 - DNA, 3163 bp, Zea mays
  Clone ID: MRT4577_72933C.1
cattgggtacctcgaggccggccgggaagaagagcacgcccactcctccggctcttcttctccaccggcaccagtccaccacctcccacctcctgccaccgcgcggccccaaccaaccacaccgcagcgcagcaatggcgggcaacggcgccatcgtggagagcgacccgctgaactggggcgcggcggcggcggagctggccgggagccacctggacgaggtgaagcgcatggtggcgcaggcccggcagcccgtggtcaagatcgagggttccaccctccgcgtcggccaggtggccgccgtcgcctccgccaaggacgcgtccgggcgtcgccgtcgagctcgacgaggaggcccgcccccgcgtcaaggccagcagcgagtggatcctcgactgcatcgcccacggcggcgacatctacggcgtcaccaccggcttcggcggcacctcccaccgccgcaccaaggacgggcccgcgctccaggtcgagctgctcaggcatctcaacgccggaatcttcggcaccggcagcgacgggcacacgctgccgtcggaggtcacccgcgcgggcgatgctggtgcgcatcaacaccctcctccagggctactccggcatccgcttcgagatcctcgaggccatcacgaagctgctcaacaccggtgtcagcccctgcctgccgctccggggcaccatcaccgcgtcgggcgacctggtcccgctctcctacatcgccggcctcatcacgggccgccccaacgcgcaggccgtcaccgtcgacgggaggaaggtggacgccgccgaggcgttcaagatcgccggcatcgagggcggcttcttcaagctcaaccccaaggagggcctcgccatcgtcaacggcacgtccgtgggctccgcgctcgcggccaccgtgatgtacgacgccaacgtcctggccgtcctgtcggaggtcctgtccgccgtcttctgcgaggtcatgaacggcaagcccgagtacacggaccacctgacccacaagctgaagcaccacccggggtccatcgaggccgcggccatcatggagcacatcctggatggcagctccttcatgaagcaggccaagaagttgaacgagctggacccgctgctgaagcccaagcaggacaggtacgcgctccgcacgtcgccgcagtggctgggcccccagatcgaggtcatccgcgccgccaccaagtccatcgagcgcgaggtcaactccgtgaacgacaacccggtcatcgacgtccaccgcggcaaggcgctgcacggcggcaacttccagggcacccccatcggcgtgtccatggacaacgcccgcctcgccatcgccaacatcggcaagctcatgttcgcgcagttctccgagctcgtcaacgagttctacaacaacgggctcacctccaacctggccggcagccgcaaccccagcctggactacggcttcaagggcaccgagatcgccatggcctcctactgctccgagctccagtacctgggcaaccccatcaccaaccacgtgcagagcgcggagcagcacaaccaggacgtgaactccctgggcctcgtctcggccaggaagaccgccgaggcgatcgacatcctgaagctcatgtcgtccacctacatcgtggcgctgtgccaggccgtggacctgcgccacctcgaggagaacatcaaggcgtcggtgaagaacaccgtgacccaggtggccaagaaggtgctgaccatgaacccctcgggcgagctctccagcgcccgcttcagcgagaaggagctgatcagcgccatcgaccgcgaggccgtgttcacgtacgcggaggacgcggccagcggcagcctgccgctgatgcagaagctgcgcgccgtgctggtggaccacgccctcagcagcggcgagcgcggagcgggagccctccgtgttctccaagatcaccaggttcgaggaggagctccgcgcggtgctgccccaggaggtggaggccgcccgcgtggcggtcgccgagggcaccgcccccgtggcgaaccggatcgcggacagccggtcgttcccgctgtaccgcttcgtgcgcgaggagctcggctgcgtgttcctgaccggcgagaggctcaagtcccccggcgaggagtgcaacaaggtgttcgtcggcatcagccagggcaagctcgtggaccccatgctcgagtgcctcaaggagtgggacggcaagccgctgcccatcaacatcaagtaaaagaacgccaaggagaagaggagggaggggaggaaatacgtgaaaaaaaataaaacctgtacacgtgtctgtccagatcgtgccgtcgatcgctcttcgttgttgatttttggttgtattgatcgatccgtatgtgtgcgtgcgtgtgtggcgttgctctttcttcttttgtgtagctgtgccctgccaccggccgacgtgcgtgcatgccatggtggcgggcagcgttttctaaggtcatatactgttgttgtgtttaagtacatcttgcgtactcaattccttctaagtaagtatcctaatactagaatgttcctctaaaaaaaaaaaaaaaaaaaaaaaaattgatcgatccgtatgtgtgcgtgcgtgtgtggcgttgctctttcttcttttgtgtagctgtgccctgccaccggccgacgtgcgtgcatgccatggtggcgggcagcgttttctaaggtcatatactgttgttgtgtttaagtacatcttgcgtactcaattccttctaagtaagtatcctaatactagaatgttcctctaaaaaaaaaaaaaaaaaaaaaaaaattggtcgatccgtatgtgtgcgtgcgtgtggggcgatgctctttcttcttttgtgtagctgtgccctgccaccggccgacgtgcgtgcatgccatggtggcgggcagcgttttctaagggcatatactggtggtgggtttaagtacatcttgcgtactcaattccttctaagtaagtatcctaatactagaaaggtcctctaaaaaaaaaaaaaaaaaaaaaaaaattggtccatccccatttgtgccctcccgtggggagaagctctttctttttttggggaaatgggccccgccacccgcccacaagcgggcatgccctgggggggggcaacggtttttaaa

SEQ ID NO: 154991 - DNA, 503 bp, Zea mays
  Clone ID: MRT4577_72934C.1
actaaagttgaatggatcaaacatgactaattaaaactcatggtgggcacatatgacaggttcgctcaggcattgatcaagtgagcgcaaacggaaatgctcatcccaatactgcaacgagctgactgcaggcatctcaacgctatcatctactgcttgcactgtgaagatgcagtaccatagtcgagaagtgtggcacaccacaactcatgattcgctcgatcctgtggcagctaaactcagatcatatggtagaaatcatcctgagattagtgtaatctatagcagaagccggtgccctgaatgctaaaccaccactaaatcagtcgatcaaatattgccatgacaggcctcaaactccagatccaggtccgccaaggaatgacagaagcccttgtgccgctctgctgccgaacgatcgccttgggctatacgagataatagatcttcgtgaccacaaacgcaccgagcttcgagactagggcccagacaaccagcatccc

SEQ ID NO: 154992 - DNA, 880 bp, Zea mays
  Clone ID: MRT4577_72935C.1
cattgggtacctcgaggccggccgggaagaagagcacgcccactcctccggctcttcttctccaccggcaccagtccaccacctcctgccaccgcgcggccccaaccaaccacaccgcagcgcagcaatggcgggcaacggcgccatcgtggagagcgacccgctgaactggggcgcggcggcggcggagctggccgggagccacctggacgaggtgaagcgcatggtggcgcaggcccggcagcccgtggtcaagatcgagggctccaccctccgcgtcggccaggtggccgccgtcgcctccgccaaggacgcgtccggcgtcgccgtcgagctcgacgaggaggcccgcccccgcgtcaaggccagcagcgagtggatcctcgactgcatcgcccacggcggcgacatctacggcgtcaccaccggcttcggcggcacctcccaccgccgcaccaaggacgggcccgcgctccaggtcgagctgctcaggcatctcaacgccggaatcttcggcaccggcagcgacgggcacacgctgccgtcggaggtcacccgcgcgggcgatgctggtgcgcatcaacaccctcctccagggctactccggcatcccgcttcgagatcctcgaggccatcacgaagctgctcaacaccggtgtcagcccctgcctgccgctccggggcaccatcaccgcgtcggggcgacctggtcccgctctcctacatcgccgggcctcatcacgggccgccccaacgcgcaggccgtcaccgtcgacggggaggaaggtggacgccgccgaggcgttcaagatcgccggcatcgagggcggcttcttcagctcaacccccaaggagggcctcgccatcgtcaacggcacga

SEQ ID NO: 154993 - DNA, 379 bp, Zea mays
  Clone ID: MRT4577_72936C.1
aaacaggggcattttgataaagaagcaaaagaccagggccaaagactgggggaggccgggcaccagcatatgctattacaaaaaaccaaacccaataaaaattgaaatcggggaaaaagaaaaatcgggttagggaaaaacaaaggggggggccaccaacaaccattgttttggtgctagcgggacatgaacatcattagatttccatatccactttgggattgaaaggaaggggatcaggcgttgctgacaaagccaagttccccttccacagagttatagtcctatcacagttaaagagcacaggcccggttccgctcaaggtaaaggccagggcctatatccaaccctcaatttatacaggtccaactttaacttt

SEQ ID NO: 154994 - DNA, 561 bp, Zea mays
  Clone ID: MRT4577_72937C.1
accaacctcaaggcaagaagaaaaggaggagagcaccatggagacagtggaactgtagacctgccttttggaaaggccacatgagtcacattcccaggggtatttcgtttggcaataatttcttcgcattcaagcaggttcgtgagcctcctgattgaagaagcccaacagcacaccatcggatcatttcagcttcgcgacgttcacaacgagcaaataagaagggatagaagttcgcaaggcgttattcaggtcacatttgtttctttaacgatatgcctgagctgtgtgtctgactgcccgaagaatactccttcccttgctcaacgtacgtagtcgcattgggaatagatctacttacgctcttctttatccattggttagggaggccagtcagcatcttgaaccacctgcgtatcacacctcgccggacttgatgctgactcccgatcgacgacaccgtcggaatcgccttgaggattccagtgctcccccatctccctcccattcctcctgcttaagagaagggtcacgcctctgacaatcatattcacaatcact

SEQ ID NO: 154995 - DNA, 564 bp, Zea mays
  Clone ID: MRT4577_72938C.1
gaccaaccaccctcccctcgtacgtaggaacagggacagagatgtatgcggaccagatctccaccggccgcaagcgctccatccatgaccgccttgacgccgacctcgcccccgaccgcggcggcgcggacgccgccggccgggctcgtaacgcgctgtccaagaggcaacgacaaactgatgataaatggaagcatgatctttaccgggatgatgaatcagcttcaagatcagttgatccacgggatttgcgattcaagcttcagaggaaaagctctcagcaagggtttgctggccaaaagggttccgaggtacgtgatctacgtgagatgttatctggaacaatgcacgcacaaccatcaaatgttgatcctcaaaagaggaaaccggtgtcagaggttgtgaaagtcacaaggcgtgaaaatgttgatggaaggcctgtacgcctaagtaagaaagtatcaaaaccatcaacatccaagaagacttctcagccaaaggctgaaagtccactcgacagttttctgaaatcactaggacttgagaagtattctattaccttcc

SEQ ID NO: 154996 - DNA, 325 bp, Zea mays
  Clone ID: MRT4577_72939C.1
cccacgcgtccgaaaaaaaaaaaaaaaaaaaaaaatggggatcccatgcacaattaccaagcgtacaccacttggcatgcgaaagcgtaagtgaatggatgggagagaccaagtgtgtggtcacgcttttacgggagaaaactaccgagcgggtggagcaaacggtaacgcttctcaaagggggacgctaagggagacagccggggctgcagtttacgccatatgcattggaaaacccttggttcccccatttataagatgttggagccagtcatccttctatcaatctatctatatctacaggtgtacatcctcgtgcatcttt

SEQ ID NO: 154997 - DNA, 781 bp, Zea mays
  Clone ID: MRT4577_7293C.1
ctcccggaaggtttgctcgtcaggtccaaggaggtgggtctgctggtccggtcgtgggcgccgcagacgcaggtgctggcccacagcgccaccggcgggttcctcacgcactgcgggtggaactccacgctggagagcctggtgcacggcgtgcccatggtggcgtggcccttgttcgccgagcagcggctcaacgcggtgatgctgtcggagggggcaggggcttcgatacggctgagcgaaaacaaggataaggagaccatcgcgccggtcgtgagggagcttgtgatgacgacacctccaacattggcgaccgcgttaggttggatcgagcaggcccttaaaaaaacacaagccctgggttgttgctgaaattttccgcagagttaaggtgtacgttccaccagctgcaaaagggtccagtgaaagtggtagcaaatctcaacaagctggtggtgcccccaaatgatccatttgaagttactcaaaacaagatgcagtcccggcttgtttttctttcgctgtaagtttgtttccttgtggaaagtggttgccatgtttagcatgggagaaaaaaaagcaagcagccagcatttttggttaattactgttgttcttccccccccccccccgtttaaggggactagccattaaggaagtagttaccagattcaacaagaccaatggattcaaattgtattggttcacttccgaaaaaaaaaaaaaaaaaaaaaaaaaaaaaaaaaaaaaaaaaaaaaaaaaaaaacccccccacaccccc

SEQ ID NO: 154998 - DNA, 258 bp, Zea mays
  Clone ID: MRT4577_72940C.1
cgcgaggtgagtgattctactataggctcctcgctacgggagacacattccagatttctttggatgtcattgattttcctgttcatcagcagaagacctataggggcttggagctacatattgaagacaatgtctggatgcttctactttgtaattgttggccaccatgataatccagtttttgaaatggaatttttgccacctgggaaatcagaatccaaagatgatcaccgtcatctgagaccatttatagctcat

SEQ ID NO: 154999 - DNA, 270 bp, Zea mays
  Clone ID: MRT4577_72941C.1
attgggggggtttaatacccttaaatcaaattaacatgatcatttcaccggagcccggaagcattttgttcggagaaattaaaatatcgaatcccttttatctacacaaattggtcagcttgatttctaggatctgtttggaagactgcttgagctgtctgcctggaccttgaaggcccttaatcgattgaaatttggccatttaaccctggttaccaatttagggggccaattattaagggttgggggggttcccaataatcaaggggt

SEQ ID NO: 155000 - DNA, 430 bp, Zea mays
  Clone ID: MRT4577_72942C.1
gaaacaacctgctttttaaagggccacccctgttttttttttttttacagtttaaggcccccttattttgatttaaccaccaatttccaggtaaaaaaaggctgcccccccataaggggggataaatttaagctaattcctgtttttaacggccagaaaactaataaactttttctcccgggggtacaaaaatggaccgcccaaaactaaacgggtttagccccccccataatttaaaggaggggtttggggggggtttttttgggtgggggctcaaaaaaaatttttttttcttgagggcaaatttcattaacaattgggcctgggagaaaaaaccaaacggacttcccttggggtccataacggtggccaaaaaaaagggcaaataaacctttttccttggggggttccaaaggccccaatgggtttt

SEQ ID NO: 155001 - DNA, 404 bp, Zea mays
  Clone ID: MRT4577_72943C.1
taggggcgatgggtcacatcgaggccggccgcccacatccctcatccccggcgcctgtaatcatgatcatgtagctgcggccatgtcaaggaactgactagatcagacaagctggagctcatcaacccccacgaggttgagaggatctagggagtgtccgagccccttctcggatcggagcggagaggagatgctcgtggctcggaccaacgctgctccgaacgcccgcgaacctcctggtgctgcaatccatcagggcaccctactaccatccgacaaagtcgatgctctgtcaatccgccgtatcgcctctgattcgcctctcgccaggttctgaactgattatctgctatacagatgcgccagaaccctacatgaaaaccgtgtccctcgtgagctagtag

SEQ ID NO: 155002 - DNA, 957 bp, Zea mays
  Clone ID: MRT4577_72944C.1
gagccctgcacctacatcaactccctcgccatcggcccgctcgccgcgctcgccgtccgaggcgtgcagctcgtcgccacgcagtgatttatctccatggaccatgacccatggccatgcgtgtcgacgtctgcgggcgcgtgcgggggatccatccaaatctctcactatgctattgtttctgaaaggggtatgcaagttctataatggaaagtctggatctcttgcaaagcttcaaggtgccgtagtaccttctccgctgaaaaagcttccgaagcaagaaagaccatcccctaggaagcgcaaaggtcttcttccattcagtctcaaatggggcaaaccacagaataaagaggtattccccgaagatgatgcgattggcagccccacaaactgcgtaaggatggctatatcgcctgctgccacaagcagctcaggaagcaacagtggtagcgacgatgaacataaccgctgccagaagccatcttcccgtcgtccgcacagaaggcccagcagtgtcatgggtgtttttgcttctccgcctgcacctcgtccaccccagcagttctcagctgtcatgagatctcaatcaatgcttgatctgcaggatgcgacagattcaactgacctggtcactcccagggacaagcgcataaagaattagcaaaagttgaatagtatcaggaacaagggcatgaagaactaggtagatctgatgtaacctgaaccttggtgtcagcccaaacaccggtgtccattttagacagcgaaacccaatggctgatgtctgcatgcttagcgacaccgaatgaactcgagttcatatagctgggattctccttatacccgatgtaccgagaattgagaaagatacagatgaattaggcaaattggtgtaaggagtcagtggctattgcattggttactatttgacttgtaaatgctggattctgcttc

SEQ ID NO: 155003 - DNA, 385 bp, Zea mays
  Clone ID: MRT4577_72945C.1
ggggggggttccaccaaaattggggggatgaacttatgatgcctcacctcatgaaacataaagggactccacaagccgaacacaccatttgtgttttacagattggttaagccctcacaccctgggtagggcgcccactggatctatgctttaacggggtttgttgggctggcagcccacacccttttcaggtaccttttaacgacattcaggccggaaagcttcttgaccacaggcattgttgccggcacctccatttggaacgtgatgggggagttcgctggaccagtgcaaacccaaaattcctttctgggggccctgatggcctcccttattgcgcaatgcacaaaggaagctaggaaaaacggaggctccccccatgctt

SEQ ID NO: 155004 - DNA, 431 bp, Zea mays
  Clone ID: MRT4577_72946C.1
ggctgctgaaacaaggggcatattatcatacaataagattatcaacacacgcgtaaatcctggggaaacaacacgacagtaaaacagtccacatattgtgagactgtaatcctagtgtgcactatacatactgtgtaagataatacaatcggaaaaaccgatgcatccagaaactttagaacacctttgatatttgaagaaaaaatgctgagccgccgcaccataacaccacatagaatgtctgttggatcaatcttagaacctctcctagcgacacatctttttgccgttgagttagactggttcattctatggtcacatggaaacagcatcgtaggaaaagctaatgctatccctgcaaattccacccaagttgcttgaatcgttgttgcatcccatgcagtgcgtctgttattgcactgaacacacaa

SEQ ID NO: 155005 - DNA, 321 bp, Zea mays
  Clone ID: MRT4577_72947C.1
acacatacaaaagttctcatgagtatggccgttgatgtacatatgccctgtcaaagacattatctgggaaaatagaccgtcctgtggactctgtgcatacggggattgcggtgccaatgtaagttgaaagagacaatgtcaagagacttcacgtggtccggtgcccataactataacccagaacatcggcagggtgatgactaatgcgagcactccttcttgttggagactaatataggaatccaccttgcgagaagagcaagagagcatgtacgtatcttgcgctttaataaatgacgtcatcgacttgggagctttaat

SEQ ID NO: 155006 - DNA, 380 bp, Zea mays
  Clone ID: MRT4577_72948C.1
ggggagagcccccaagctttttttttcccagcggccggggggggttttatggcaaaacaaaaaaacaaaaaaagcaaggcgcttggtttacatcctaggggggaaaccccaaaaagggcccttcttgggggacaataaacggggcagggggctaaccaaacagggccttcctgaataaagaaagggaaaaaaaaaaagggctttttaaaaaaaccttttggaagcttaaaagagtcccccaggccccccccactggccccttcccctataaaaaattaccccgaccccgaaggccaacaaaaaaggggccggaatcctatgagggtatcccaggctaagggatccaaagggaggggttgttttgagccctttaatttttt

SEQ ID NO: 155007 - DNA, 260 bp, Zea mays
  Clone ID: MRT4577_7294C.1
aaacgtcaagcctggggcacattaactaaaactggatcacgtttgggttcatttccctaacatgttacatgttggatttttttggttaaattttcttagggccctccaaggggtaaatttgcaggtcgcagtaaacagttttacaggacttgtgcaaacattaaaacacttgcattccccccctttagttgggctccacaagtgcacggaatttggcacctgcgttgacagcaatagcgccaagcttttttttaattcta

SEQ ID NO: 155008 - DNA, 585 bp, Zea mays
  Clone ID: MRT4577_72950C.1
aacgagggccccccccttttttttttttttttgtttttcaaggggtcccaaaaaaattaaaattttaaaatccggggggggggaaatcgggttttcgggggcaaaaaaccccaaacaaaaaacaaccggcccagggggaccccccaccccccaggctttggatcgttttttgggggccccggttttattccaacatttttacccggacccaggctggaaacctaccgggccggaaagttttcgtctactttgctttccccggggccccccttaacgctggggggaaacccccagcggccttttgctaaaatggctctggcgtaaccacccaggggcgggactttttggaaaaccatctaaatattttcggggcaagggcagggatctgcattttcttttatagccaagggctcacaggggcccttgcggggggcctaattaaaaacagccaccccccttttttgaagggccaaaatttttccgggtgcttttttcccaccctaaaccccaggtgggggaagggctttgttttttcccaaaaaagcataaacccccccagcccgttataaaagggcccccagggcc

SEQ ID NO: 155009 - DNA, 363 bp, Zea mays
  Clone ID: MRT4577_72951C.1
gggaagacaattaaaaccatgcctttttattggttcatcacaattccatttttttttattcgttctgacagcagcgggagaccccacgaggggcccccacgtgacaaaacacacgggtgggggggggcatggggctacccgaacccgacccacttacgggacagattaaagcttaccgatcgggggggatttatttgtccaacagcaacaaagtccccgattaaaagaagaaaccccggggtggggccggcccaaaaaaaaccctttttgtatgctggcgcggggatgctcttttaggggtccaccaccttgttgtccttggacgcaaaaaagaaattctcgggcaggggcggggaaaccttt

SEQ ID NO: 155010 - DNA, 314 bp, Zea mays
  Clone ID: MRT4577_72952C.1
cacaaatgtgcgaccggcggcgcccttcaccaggtcttcgtcgggcccttcaccggcaacaagcatctaccagaaacgtggatctcatagcattggtgcctctttcctctttcaccgaagattccggtgccttatgtcacaggacgacatgaatcacatgggtcttgattcttgtatgaactcaggatttatagtggatcttggatctgttcgatgcaagacctggtctagccactaaatgatgaactcttctgctgatataatatcatttctagaagaattcctttgctggacagtatattacttatgtgcag

SEQ ID NO: 155011 - DNA, 593 bp, Zea mays
  Clone ID: MRT4577_72953C.1
aaccagttaaaacacagtcctgcatttaaaagccccctgcaggaggttaaaggaagcattttttaccctaaaattcaacccgaaaatccggttaaggctaacaacaaatagttccggcaaaaaaaaaaatactaaacttggaaatggcagttgcgggacagccttccagaaaaaaagcccaaaacccaaggccttatttgggcaaatggagcccaccgaaccaccgtcggggctacaaaatgggggatgttccaaaaccttctttacggggggctccaaattggaggaaaatagggtttatctcaaatcgaaccagcaaaaaaattcctttggtagggatggggaaccgacctccaaataccctcaaagctggccacctttttcatgggccaggggaaagcatgaaatctggggagagaacttggggacctcacccctccgaatggcctccaccccccctgctttatatgacataaatcccattttataaccatccactttcctcacaggctgacctggtgtgggggaatcagtatagccaaatatctccaccagttggaatccacatttttaaaaacccggcgcagcccatc

SEQ ID NO: 155012 - DNA, 589 bp, Zea mays
  Clone ID: MRT4577_72954C.1
cagccactcccgaggcctggatgtgatggcgtcacagaaaagaccctcccagagcacggatccaagtacctggcctcagcaagcgccatggatcacgccaggcatggcttcctcccgaggcacagagacacgggcatccttgactccctcgggcgcttctttggcggtgacaggggtgtgcccaagcggggctcaggcaaggatggacatcacgcagcgagaactgcccactatggctccctgccccagaagtcccagcatggccggccccaagacgaaaaccccgtagtgcatttcttcaagaacattgtgacaccacgcacacctcctccatcgcaaggaaagggagccgagggccagaagccgggatttggctacggaggccgcgctccagctcacaaggggctcaagggcaccgacgcccagggcacgctttccaaaatcttcaaactgggaggaagagatagtcgttccgggtcacccatggctagacgctgaagcccgcctcgtggccgcagaaccctgtcctcagcttcttaatatcaccgccttcgacgttaacaccgccccgtacctccccacccgtagc

SEQ ID NO: 155013 - DNA, 400 bp, Zea mays
  Clone ID: MRT4577_72955C.1
ggattatccccccaatcgaatcaatcaaccaataatcgcttttgggggtacaacacattcttctcccgatgcataccacctaactaggaaaaagaacagggaaagaatttccccccacccccctgtagtctgcccaacggatgaaaaaaatattttcgaagccaaaaacaaaaaaagaaattttactcgtcctacctaagctacgtatgtttgctcaccgggtttttgataagcggggcccacatgacagcgatgatgaccggtcacaggcaaattgagccccaaagccccagccccacggtttttgggacggggacggtgacggcaaaaaaaaagttggcataaaaggcggcggcccttcttgtctgtgtgttgccgccaaaaaaaaccatgggggggc

SEQ ID NO: 155014 - DNA, 611 bp, Zea mays
  unsure (1)..(611): unsure at all n locations
  Clone ID: MRT4577_72956C.1
nganaggacagcgcagccactcccgaacgcctgtccgcgatggcgtcacacaaagaccctccaagaagacagtgcagccacctcctggcctcagcaagcgccagcgtcaacgccaggcatggcttcctcccacggaaccaagtaccgggcatcctcaagtccctcgggcgcttctttggcggtgacaggggtgtgcccaagcggggctcaggcaattgacgacatcacgcagcgatttgtgcccactatggctccctgcccgcggggtcccagcatggccggccccaagacgaaaaccccgtagtgcatttcttcaagaacattgtgacaccacgcacacctcctccatcgcaaggaaaggggcgaggactgtccctcagcagatttagctggggagccgagggccagaagccgggatttggctacggaggccgcgctccagctcacaaggggctcaagggcaccgacgcccagggcacgctttccaaaatcttcaaactgggaggaagagatagtcgttccgggtcacccatggctagacgctgaagcccgcctcgtggccgcagaaccctgtcctcagcttcttaatatcaccgccttcgacgttaaca

SEQ ID NO: 155015 - DNA, 437 bp, Zea mays
  Clone ID: MRT4577_72957C.1
ctccgtaagctcggaattcggctcgagaagagtcatgccgcccttcttcctcaacaagcacaatgttccttaaagggggcgcttgttctttgtaagcggcggaagaatagaaaaggtcactagctcgggttgagaggctcggcgagttaccccctgcagatgctctggaacgcggtgctcatgaagaactctctgctagaatgtccatgaacatccaaatgaccccttatgaaaggcgcccaaaagcggctatagctcacaagagatcaataccctactcaaccggtgaagtaccggaagccgtgcacaaaagaggagggcggcactttgacacacctacgccagatacaatatgggaccgacggtgctattgcaggataagaagaacaaatcaagggaacccctccaaccggacctttatacatgaagaagaaact

SEQ ID NO: 155016 - DNA, 340 bp, Zea mays
  Clone ID: MRT4577_72958C.1
ggtttttttttttagtgtgccatcctgctggcgttttacagtagtcggcgggaggcaattccgggagattagtcaccccaaagaaggggatttgttgccgtgcgactgatctccccgagtctgtgtgtgtgctctgaccctaaaagtcttagtgtcagtctgaggcacatttatcaaaggttgaatttcgaattaatgtgattttttaaaaactcccctaaattcccataaattcaaaattcgaccaatctaaatttatttaaaaaaaaaatcgaatttttaaaactcggatgagttaaattgatctgaatactcaaatcgaatttgatttctcagaaaa

SEQ ID NO: 155017 - DNA, 649 bp, Zea mays
  unsure (1)..(649): unsure at all n locations
  Clone ID: MRT4577_72959C.1
gntgttttcaaatcaaaagctaaggtgggttcagtttgaacaaccctgacccatacctattgcaaggatgcatatagcctgcttcagaacttgcacataaggtgacttctgctcatggatatcctgttagatacaagcaacctttccaagtagtgttcagagcaggtgaagggaagcaaccttacatccagtaggcctagctcaacaagaaatgttatgattcctcagcgcttactggcgtgcttctgatcggcgcatctgctaaaaaaatccatggaagattgcgattatatactatagtacacattgcatttgcgtaaaagctatctcaagtactcctgcagtagccgtaaacctgctgacatgtacccacaaagatcgccaggatccgggcaacgagatggaagcaggacgtgcagtttttcagaaattttcagtcagagcaaggcagcagagaagctacaacgaattaattccatctgagctactaccatcatcgcgagaactactgggtgcaatgctaggcatgcatggatctgagccctgctgaagccactgcaaacatgccgctgcagtaaggcgagaagtaaatgcccgagccaatgctatgaatgatctctaattcaatataatatacagatttcatgaa

SEQ ID NO: 155018 - DNA, 541 bp, Zea mays
  Clone ID: MRT4577_7295C.1
gggggggggttttttttttttttttttttttttttttttttttttttttttttttttttttttttttttttttttttttttttcccacccggggtgggacatttcccaaaagagaggggggaaagtttcacatgaacataagccggctccggggggaaatagcaaaaacccgcccttcattttttgggaatcacaaactacacattgggtaacaaactttggggaatttatccaggaccgcccaatacaatggccaaaaaactttccgcctttaatttggcccccggaaaatggggccttgctttgtaatcgggaacgggggaaccgctttaatgggggttcaagaactaggccccccctggggacggggaaggtaaaccagttcgtggggggggggcggctgaaatatttcgccccaccttacgatttttaggggctaaaaccctggggggtggaaccccaggggtgggaaggaatgctccggcccccggggcccccccgggaatttcgggccggggccgggggggggcccagtttttcc

SEQ ID NO: 155019 - DNA, 483 bp, Zea mays
  Clone ID: MRT4577_72960C.1
cattgggtacctcgaggccggcctaacctagatccagcgcagccgtagtcgaacaccgccgcccaatcgtcccaccgccgccgcagtcgaaccacaccgacagtgcctcattaacagtaagaacccacgctggtggttcgccgacatgtctggaacccgttcgtggcaatcgtcgtgagtgtggagttcgtgctgacgacgaatcgctcgacgtgattcctcctccaccgcagtgccgccatcctgtggaccgagcctgcgctgccatactccggtgaagagcaggtggtcgaagaggagccgcacaacgaggagtttgacttgatctaggtggcgtctcccagtcagctttatagcgccagggaaataatatttagttcgttttatatttatcatttattttgtaagactttcgctatgtaataagtacatttatgatatttatgatatttatctcgtaaaaaaaaaaaaaaaaaagcggcc

SEQ ID NO: 155020 - DNA, 141 bp, Zea mays
  unsure (1)..(141): unsure at all n locations
  Clone ID: MRT4577_72961C.1
gggcngttcgngttcttgcccgggccgccgtngtngtggttggtgccccngtcccctttgttcccgttctgcncgtcgtngcngttggtctgctcggtgnnggtgccttcgcccttgggggcgctgngctggttgctgctg

SEQ ID NO: 155021 - DNA, 1074 bp, Zea mays
  Clone ID: MRT4577_72962C.1
ggaactcccacactctctctccgttactcgagtcctcgacatgccgagtgccccgaagagatcattgctgcaatcgaggccggccgggctccctccccgaatcccaggaccgcggctccccgtcgactgcgtcgctgctccggctcccaggagcgacccgagagagaagcgtcgccggcattgcatctcacctgcctccttcccaacgatagcgccgctccttcggttccccgtcgaggctccgggatttgtcggccccgttgctccgcggccttctctctagcaccggccggtggatctagcctcgggaggctggcaggagctagcggccacgacgcgtcgtggccccgtgctctcccaacgacggcgccgctgctccagctccccatcgacgcttcgggatttgtccgccctgctgttccgcggccttcggcgcacccctgctaccccgattgtccctgccctgttctcgctctctatggcgtgagcatcggccgacagatctagcctcgggaggcctcgcaagacctagcacccacgacgcactgtggccccatgctccgtagcccccctgctctgccagtttgagtgaatgtctggcggcgacaccacccctgctctcgtcgtccatcctgcctccatccaacccccgttcagaaaaaaatgcaaatttttcatgtggatggatgattacattaagatggtcgaagggacagggtttactagcggccttgggagatgatggcgtctaattttggggacgaacgagtgacgacaattaaggcagatgttagtgcgaactgggacatgtttactgcagaactgaagaagatgaataacaacttgagcgacttgaagaagatgtttggagttttgtatgcttccatgatttttattgcctgcttttctttgttacgaactatggttgcaagtgttaaatatgtatatgtatgatggacctccttgtgatgccattctagatgaccgggaagttgtgtattccttttaatgtgtatcatgaacaaaattgtcttggttacatcttccagaatgaatggcaacatgtgtattggc

SEQ ID NO: 155022 - DNA, 296 bp, Zea mays
  unsure (1)..(296): unsure at all n locations
  Clone ID: MRT4577_72963C.1
ggggttcagggaaccagggccaaacactttaaccccactccaaaatgcacaaaattcaggggggaaacaaagggggaggggggcattgcacaacgaaactaggggggcgttcgttcaggagcccaccgataaaaaaactttccccgggggggaccaggcaaaaaaaaacgggggaaaacccatcctgcgggcccccaaaggggtccaggaggaagttccccaccaccccgcgccccgggaagctctgggggggcgcaccccccancggggagccccgccccaagctttcccttttc

SEQ ID NO: 155023 - DNA, 514 bp, Zea mays
  unsure (1)..(514): unsure at all n locations
  Clone ID: MRT4577_72964C.1
gtccgtgaaaaccaatatatactggtaacaacagtagtctgggatcgattacattttattagaaaacattacacgtgaaaaggaataacagatattcaaggaaataatacttagcagtagtgagcgggatagatgaatacacaccccatattatacatatatatatatgtagcttcccctacatgctctgatctttggctccatccattagctagcatgcttccatggcagttaattaattacttataactagtatatttaatnattctccatnatttntnatnaactngttcaaatattaaaagcgtacgtgtggggggcgcaaacatgcatgggccatgcacgcgatcgatcgagaatttacaccacatggacggncgggctgtgggggtttangaagacgttgaccacgttttttgttgggnagtattgtcgggggggcggttgttttagtagggtagtttctgttgggaaccggtgncatttgggcgatgactgggtgcaccccggagct

SEQ ID NO: 155024 - DNA, 1276 bp, Zea mays
  Clone ID: MRT4577_72965C.1
cctgcccctgcattcccattcctctccaggaccgagcccgactgccgaggccccgagagaggagcgctgcaacaacatcccattctcctccctccccgaatcccaggaccgcggctccccgtcgactgcgtcgctgctccggctcccaggagcgacccgagagagaagcgtcgccggcattgcatctcacctgcctccttcccaacgatagcgccgctccttcggttccccgtcgaggctccgggatttgtcggccccgttgctccgcggccttctctctagcaccggccggtggatctagcctcgggaggctggcaggagctagcggccacgacgcgtcgtggccccgtgctctcccaacgacggcgccgctgctccagctccccatcgacgcttcgggatttgtccgccctgctgttccgcggccttcggcgcacccctgctaccccgattgtccctgccctgttctcgctctctatggcgtgagcatcggccgacagatctagcctcgggaggcctcgcaagacctagcacccacgacgcactgtggccccatgctccgtagcccccctgctctgccagtttgagtgaatgtctggcggcgacaccacccctgctctcgtcgtccatcctgcctccatccaaccccctagcatgtcgtgtgcgagcagccccttcaatgcaggacatggatggcccaggtacgggtctgtgctgctcacccgctgcctcgagtgcgaatgtccagagccactagtgagcctcatatcgaaaaggtcaaagaatgacaactttggtagggaattcattaagtgtgaaagcaagccgcgtctagggaaggttcagaaaaaaatgcaaatttttcatgtggatggatgattacattaagatggtcgaagggacagggtttactagcggccttgggagatgatggcgtctaattttggggacgaacgagtgacgacaattaaggcagatgttagtgcgaactgggacatgtttactgcagaactgaagaagatgaataacaacttgagcgacttgaagaagatgtttggagttttgtatgcttccatgatttttattgccttgcttttctttgttacgaactatggttgcaagtgttaaatatgtatatgtatgatggacctccttgtgatgccattctagatgaccgggaagttgtgtattccttttaatgtgtatcatgaacaaaattgtcttggttacagtcttccagatgaatggcaacatgtgtattggcagagttttgttt

SEQ ID NO: 155025 - DNA, 608 bp, Zea mays
  unsure (1)..(608): unsure at all n locations
  Clone ID: MRT4577_72966C.1
ccttgntgaggctgatcgcttgctagaattgggtttcagtgctgaaattcaagaactgattcgtatgtgtcctaaaaggaggcagactatgcttttctctgctacaatgacagaagaaattgatgaacttataaaactttcactaaacaaacctgtacgtcttgaagctgatccttctctgaagcggcctgcaacgttgactgaagaggttgttaggatacgacgagcacgtgagtcaaatcaagaagcggttcttcttgcgctctgtttgaagactttcaagcgaagtgttatcatttttagtggcacaaagcaatccgcacacaggttaaaaataatatttggtctctctggcatgaaagcagctgaacttcatggcaaccttacacaggcccagcggcttgaggctctggaacttttcaggaaacaagaagtagattttctgattgcaactgatgtcgctgctcgtttatcttcatcgtgttggccgcacagcacgggcaggaagagaaggctatgccgtaacatttgtaaccgatgatgatagatccctcttgaaagcaattgcaaagaaggctggttcacaactgaaaagccgcattgttgca

SEQ ID NO: 155026 - DNA, 461 bp, Zea mays
  Clone ID: MRT4577_72967C.1
gccggccgggccgggccccacaccttgtcctccctctcctcacccacagccgggccctgctccatggttcccaggtcacctgcgtccttctctgagctcagccccttcaccaacgcacgccaggcgcgaccaagctagaggataagggcgatatccgccagcggcgctcgcccctcttgccgtcctcctcccctcgtcgatgctcgctcccagcggccaacctcgcctctagctcgcccactgctgcactacagagctgactgtcccttggtgccagcacctcgatgctgagctcgcctccaggtcgcgcacgacccttgccttccatctctattgcagtatctaactccgccgggtcccagcgcgtgtcgcttccgtctctcctcccctgcgtgtgtctggcctgttcccgtccgaggcatgtggtctttatcacgtcgagcgcccagctcctcctgctg

SEQ ID NO: 155027 - DNA, 769 bp, Zea mays
  unsure (1)..(769): unsure at all n locations
  Clone ID: MRT4577_72968C.1
aattcggcacgaggcaattaaggcccagcccattgttacctgtctcggctgctctcctccacgacaggaaaccctgtaccaaaaccctcgtccctccatcctcgtccctcccggcgccggaaaaaccagttcgcgtccatcctcctcccctcccacttcgccatggaccccagcttccggttcgacccggacagctccgacgacgaggcggcgggtgctccaccgcggggcggcccggtgcagtcgccgtgggagttctcgtcgtacgcggagtccgtggcggcggagcacgcgcgccgccgcaccacctccatcgacgagaaaatctcgctcctgcgccaggaacgcgggaatcccgtcgttcccgatgactcggggagcgacgtgagcggcagcggggaggatgatagcgacgacgaggagatagagggggagagcggtgacgaggaggacgagctggaggagagcgaggatgagggcggggtcgaagggggcactgatgacgaggagattgaggggagtggcgatgaggaggcgatcggcgatagggagggcgatgaggacggnggtgacgagaagggaggaggcgagctgggagaagaggatgatgcccatgaggaagaagatcggtcgatcagaatgacacgagtggaccagttgatccttctaattttttctcttcttcggatcgggcatcatttcatgcaaattcattccttgagcttaactngtctcgtccgctagtgcgagcctgtgaagcacttggcta

SEQ ID NO: 155028 - DNA, 277 bp, Zea mays
  Clone ID: MRT4577_72969C.1
ggagcccaaaaaccattcattcattccgggggaaaaaggggaagaaacccccaacctagggggttcaggggccccccctaaaaaacttttaaaaaatcaaaatggcacagcctttgaccaggccctttttttggggaaagaccccccacttctttgggcaaggggggtgaaaaaggggggaacccctgccccccagggggtgggggttttacccaaaaccccctccagaacgccccgaagccctcaccccggcccccttttatttgggaaccccccc

SEQ ID NO: 155029 - DNA, 612 bp, Zea mays
  unsure (1)..(612): unsure at all n locations
  Clone ID: MRT4577_7296C.1
ggctctatcggaggtttcgaggaactcccgggctcgaggagatcgggacgatgatgggagggcgcgccctgctgctgctcctggtctcggcgctgctcgttcagatccgcgcctctgacccgctgctgtacgagccgtttgatgaggacttcgagggtagatggatcgtctccaagaaggatgaataccaaggtgtatggaagcatgccaagagtgatgggcatgaggactatggcctccttgttagtgacaaggcaaggaaatacgccataatcaaggagcttgatgagccagttaccttaaatgatgggacagtggtcctgcagtttgaagtgagacttcagaatggccttgaatgtggaggtgcctacattaagtacatccgccctcaggatgctggatgggatgccaaggagtttgataatgagactccatacactattatgtttggtccagataaatgtacgacaagctctctcatgtctacacaactatcttgaagccagacaatgaggtcagaattttgatcgatggngaagaaaagaagaaggcgaacttcctttctgctgatgactntgagccagcacttatcccatccaagaccattcctga

SEQ ID NO: 155030 - DNA, 2391 bp, Zea mays
  Clone ID: MRT4577_72970C.1
cgaggagattgaagggagtggcgatgaggaggcgatcggcgatagggagggcgatgaggacgggggtgacgagaagggaggagaattcggcacgagggagaacgatcgggatgaggaagaagatacggtcgatcagaatgacacgagtggaccagttgatccttctaattttttctcttcttcggatcgggcatcatttcatgcaaattcattccttgagcttaacttgtctcgtccgctagtgcgagcttgtgaagcacttggctaccagaaaccaactccgattcaggctgcttgcattcctctggcattaactggaagggacatctgtggtagtgctattacaggatctggaaagacagctgctttctctttgcctgtgttggaacgtctactttttcgtccaaagcgtgtacctgcaattagggtgcttattcttactccaaccagagagttggctgctcagattcatagtatggttgagaagttagcccaattcactgatatcagatgttgtctcatcgttggaggtctttcaactaagattcaagaagttgctctaaggtcaatgcctgacatagttgtagcaacccctgggcgcataatagatcatctgcgcaattctctttctgttgggcttgaagatctagctgttgtgatccttgatgaggctgatcgcttgcttgaattgggcttcagtgctgaaattcaagaactgattcgtatgtgtcctaaaaggaggcaaactatgcttttctctgctacaatgacagaagaaattgatgaacttgtaaagctttcactaaacaagcctgtacgccttgaagctgatccttctctgaaacggcctgcaacattgactgaagaggttgttaggatacgacgagcacgtgagtcaaatcaagaagctgttcttcttgcactctgtttgaagactttcaagcgaagtgttatcatttttagtgggacaaagcaatctgcacacaggttaaaaataatatttggtctctctggcatgaaagcagctgaacttcatggcaaccttacacaggcccagcggcttgaggctctggaacttttcaagaaaaaagaagtagattttttgattgcaactgatgtcgctgctcgtgggattgatattgttggtgttcagactgtaataaatttcgcatgcccaagagatgtgaaaacttatcttcatcgtgttggccgcactgcgcgggcaggaagagaaggctatgccgtgacatttgtaaccgatgatgatagatgcctcttgaaagcaattgcaaagaaggctggttcacagctgaaaagtcgcattgttgcagagaaacctgtggctgagtgtgcacgactgattgagcaactagaaggccaaatttctatcatcattcgagaagaaagggtggaaagagaagcaagaaaagctgaaatggaaatcgcaaaggcagaaaatatgatagctcataaggatgagatatactcacggccaaagagaacctggtttgctactgaaagggagaagaaacttttggcagcagcggctaaagaatctttggatcacggtaagagtacctctggagttattagtgctaagaaggccgaagaccttcgtctaaaggagaaaaggagacgagaacatgagaagaatctaccaaggaagaagcgccgaagattggaggcccagcgtgagatgttggaagatgaggatgacgaggaagcaaaggaaaatgatagagggaagcaactaatgaaaggccagtctctagtggatgctgcttaccgaaaggcaaagtcattgaaggcggccagcaaacggggccctggtgcaaggaaaggaaagaaagagaagaatgaaaggcaatattctgagaaggctcctaacaggcatgaggagatgcgtgagctgttccagaatgatatgagtgaatggaaacagggacgctcctcaaagaaaaacaacaaattcgcgcacaaaaaatcaaaagcttttaatagcaaagcaaggtacaagcgcgcaaatagaagactcggccatccccggatttatttacattctcgtctcaattttgactgactgatcctgaagaaatatctgggatccagatgtttccagttaccatgcaagtttgcttgttaaacatattctcatatcatgtattgaaacttaccgttttctgatgtctcattgatcttgggagagctatcctcagtttcgacatgtgccgttgctggtttcgtaggtcgtacttatctcaaaacttacttgccagacgttgttgtgtggaaacgtcgaccagcttgttatgttcctacgcctcgaatgcaatgacaagcttgcacccagtattccagattaaaaaaaaaaaaaaaaaaaaaaaactcgag

SEQ ID NO: 155031 - DNA, 354 bp, Zea mays
  Clone ID: MRT4577_72971C.1
gtttgtaaaacattcaagaatacctttttgatagatcaattaaaaattcaacaacgtgaacatggggaaagctattttttggtaaaaaaaatagctttccccatgttcacgttgtttatatttgatgaaccatcttggcactgaattgtcataggaacttttgtggccatgacgctacttgttgtttgtaaaacattcaagaatacctttttgatagatcaattaaaaattcaacaacgtgaacatggggaaagctattttttggtaaaaaaaaaaaaaataaaaaaaaaaaaaaaaaaaaaaaacaaaaaaaaaaaaaaaaaaaaaaaaaaaaaaaataaaaaaaagaaggaa

SEQ ID NO: 155032 - DNA, 618 bp, Zea mays
  Clone ID: MRT4577_72972C.1
tccaccgacgtattccgattgcttgattgtgcagatattcacagttgaccggcgcctctccacactatgaagcttgttgctgcctacttgcttgctgtcctcgctgggaacgccaacccctccgctgaggatttgactgccattctggagacatctggctgtgaatgtgacaatgaaaggatgcaactcctgctgtcccaactgaccgcgaaggacatcaccgagatccttgccgctcacagggagaagtctgcttcattcacatgtggcggctttgtcgccactgttgccatctgttcacctgctgctggctcaactgctcctacagctgaggcaaagaacgaatagaaagcgaaagagaaggaatacagcgatgatgatatgtatttcagcctcttcgactacgatgaccactcattacagtattgcttcaagcactgaaaacacacgatcaccagagtcatgcttagattttaaccttgttttatgctataaagtactgctacttgactttatatttgggaattcatccgaaggttgctatgctgtacgcgatttactctcgaaccagagtgtttctatcttatatcctgaagttgctatcacactgattctaaa

SEQ ID NO: 155033 - DNA, 336 bp, Zea mays
  Clone ID: MRT4577_72973C.1
ctggccgggctcttctccctgatcgaaccggagaaggcataacaaacaagaaaagcaagcggccttgtaagttggaattcatgtcgaccatctagtgcttactacaccatatccacctacccgagtaggcgcgtggggagcgcgcctccacggaccaccgggcagagagcagctggtgccggtgcaaggcccagaagcagaaggctcgacgcgccggacagcgacgcggcgcgccgagccgcgctcgctctcctcgccggcgttgcgcccgacggcgacaaggtgagccccgccgacgctgcctacagtgaagcagacaaagtgtacagcattacc

SEQ ID NO: 155034 - DNA, 1083 bp, Zea mays
  Clone ID: MRT4577_72975C.1
atgggtgctctcctgagatcggtgccaaaggagatgtggagactactcggtgaaaagagtacagtcaaggaggcttgggaggcggtgaaaagcatgcgagtcggcgcagatcgcgtgaaggatgccaatgcccagcgcctgttgatggacttcgagaacatcatcttcaacgatggcgagaccgtcgacgacttcgcgatgcgtatcagcggcatggcgtcggatctgcgctcgatgggggaaatagtcgaggacgccaaggtagtgaagaagatgctgcgagttctccccaagagatatgctcagattgcgatttcaatcgagacgttactcgatctgaaatcgctgacattggaggagctcgtcggccgtctaaggatggccgaggaccgcatggagatggagtctgtcaccgagaagactggaaaactcatgttgacggaggaagaatgggtgtccaagaatcgccaccgtctcctgccagagccatcttcgacaggtggaggcgagaagaggaacgggtttaacccggccaagcacaagggtgtcgcgcgtgatggcggtgggcgtggtgaccgaaaggagcccgtcatcaaattcacatccgaaggaactccgaggcgcaagggtcgctgcagaaactgtggcatttatggccactggaaggtggactgcaaaaggcctaaaaagggagagcgcggggaggaagcacatcatgtgcaagcggagaaggagccagcgttgctgctggccactgtgaatgccgtgcgtgttcagggagcaacgcgacgggttcagagtcacgtagtgaacctgaatgagaagaaagtggtgccagcagatcgcgatgaagacagtgatgtctgggtcctggacaccggggccagcaatcatatgaccgggcggcgggatgtactgacatcgctcgacacgtcgatcggcggtacagtgcgcttcggcgacggatcactcgtcccgattgagggcatggggtccgtcatgctccaaaccaagaaagatgggcataagaacgcacattgctcgcacacgcacctcgtgttgggaatcgtctatatttactga

SEQ ID NO: 155035 - DNA, 221 bp, Zea mays
  Clone ID: MRT4577_72976C.1
ggaaaaggcaggaggtctgccaagatatattgataagaagaataacaagaggtttaagtcaatacagggaccgaagtactaggcaaagatccaacctggagagaagttaacaaaaataaaaaacagaccccactaaatagttggtaaggggtaactaggggcttggcccctggcaaaatccaagctggtggctcactcttgattttggcaatgatttggtg

SEQ ID NO: 155036 - DNA, 579 bp, Zea mays
  Clone ID: MRT4577_72977C.1
ctataatcagacaaaaaaagattgtactctatgacacatcctggacggatacaagaatgtccaatcttataaatgcatgcctgtttgattttctggggaatgtactcatgcgataaaaaggaaatggaatttgcggatagtgcctcaatctcaaacttgacacccttttgcagcattgcttccaactctgacctccattctggggcttccctgtgtaaatagcacctagcaagaatgccttcagctttcctcctatcttcaggtgacaaacgaagtaggcagcagtctggaaggcaatattcttcaaaatcagatgtgaaaactccaagccaccgtatatcagggacacgcaacaagtttgcatcatgtgccaattgcaaggaaccaaatttataggtagccagaatgtcgaaaccataaggatctgagtccactaagcaataagcaggcagatgcagcagttcaacaaggtaccgcaggaatcttcttgttggaatatctggatagcctcttcctgtaataacaatgcagcgatttctttcacagaacttgtcattggccaaacgctggaacactgtc

SEQ ID NO: 155037 - DNA, 361 bp, Zea mays
  Clone ID: MRT4577_72978C.1
tcgatcttagacaaaacccctcatgagcgtatagacccatgtagaagctccaagtgcatgcctaattggcgatggtcaagtaaggtcacgcactttcatcatgcctggttccgtattaagaggagatgcaaacataattcaattagattcttcgaccaatgtacatgacagtggtattatacatgtagatcaatataatctaagaacaaaggccttttcaacaacccttgactataacacaacaaatggtcatagcgctagagaacaagcatgcacaggatgatgttgaggctgtatttggcgtcgtgagctctctatgagatcgtgcagctactccaatgcacgaattatactgcatgct

SEQ ID NO: 155038 - DNA, 295 bp, Zea mays
  Clone ID: MRT4577_72979C.1
tatcgtcattgcactggtcggaaacaagttggatttgaccgactctggggcaggaggtcaagataatggaaatggttctacggatgctgagaacaatggcgcaccgggccccgatgctgacggcgacgaggagattgagaacaatgatatctccacacgacggatgcgcgaaatctctactcgggaacaacacttatgctgagagaagtctcctttcgaacatgcaaacggcaaatgcgaaattttatgctacgcacgctaccgagagactgcagtgcagctgactgagcgcaac

SEQ ID NO: 155039 - DNA, 234 bp, Zea mays
  Clone ID: MRT4577_7297C.1
cccacgcgtacgcagtcgcgtgggttgaaattggaggagatgactaatactattttgagagagcttatctggaccatgtgccatcttgctaatatttaatctttttctttggttatattgaggcaccacatgagccatcaaaaaagttatgttacatgtaactttctcctaccttattgcgttaggattttatgcatgattacactaatttaaaatacacttttatttaatatt

SEQ ID NO: 155040 - DNA, 196 bp, Zea mays
  unsure (1)..(196): unsure at all n locations
  Clone ID: MRT4577_72980C.1
tactctcattgtaatctaaaaaaggcacctccaagatcggttgctgccttgncaaggcagggttcatcaaagagattggttgtatggcagaaatgttgctgttgcaggaaggcggtgaccaatgggttagtcgccgcaagtggattaagtagttgctgccgctgttgtaggtacctgcccgggcggccgctcgaaa

SEQ ID NO: 155041 - DNA, 650 bp, Zea mays
  Clone ID: MRT4577_72981C.1
ccggccgggatctggttcggtggcaccatgtcgggcatctataaagtgaaccctaggccgctaggcttcattttttgatgccccatccagacgcacgagcgatgatggcggtccgggatgagcgagcggcgacggcgcgacctcggaggcgcgagcgacggtgcccccttcgcacgacagcggtggttccccgacgagggggcggtgacgatgaccccggaggcgcgagcggccagaggctcgtgcggcggtgtcgaccaaaggtgtgcgcgatggtggaggttcctcgagtgcgcacggcagcgacgaccccatccagaggtcgcgcgaggcgggactgtctccagcggcggcggccacacgaggcacgcgtggctccggcagtgtcggtggtcgcgcaaggcgcgtgctgcaagggtctgtggtccgcacgacggttcaggcgtccttcgatcaccaattcctccgatctagtggtctcggttgcgtcctcagacgatgacctcccccaatcctttgtttcatacatgcggttgttgggtgaccacatactaggatttttttcattaattatgatgtacgatgtaagtatttatgcaactttctataatgatttatatcggaaaaaaaaaaaaaaaaaatttgcggcc

SEQ ID NO: 155042 - DNA, 361 bp, Zea mays
  Clone ID: MRT4577_72982C.1
cgagaagaactcagactggatcctactggataagctcctgttccttacgagtccgattcgctctcaagctcactgcactcgagaaattgttgacatgccatgctaggagggatgcaactcgagatgcaatgtacctggcagatccgtttcaagcacctcagttagatacagcaattaagactatcaacgttgacatgaaggaattcgctactctatcaagattacacgagacatataatgaaatggcagcatctcggtaggcttcgtcagagaactagccagatgcagtacattagttgaacctataatttcggactggatgtgactgatactaggtcgactattgtagcaggacgactgg

SEQ ID NO: 155043 - DNA, 395 bp, Zea mays
  Clone ID: MRT4577_72983C.1
gaaatacaggcccgacccacgcgtacggctatatatcgctagcgttcggtctattttaaccacgcatacttacgcagacatgcttgggaattactatcccatatatacacctaactaaaattaactgaccgaccgtctacaaccacaaaactgtcaaaacactccccttacccaacttaattaacttgcatcacatacatctttctttagctggcttaataactaaaaagaacgcacttaccgaccttcccaacaaataaatagccagaatgactaacgatacgcaccctctataaacgcattaattacggccggtgcgcgcagtacgaacactaaaactgatacattcataagccacctaccttacgctcgcttcccttactttctttcctttc

SEQ ID NO: 155044 - DNA, 377 bp, Zea mays
  Clone ID: MRT4577_72984C.1
agcaagtgtgactgaggctctcgctgctcctgcggcatctcatgcaactgcatgtcccctgacgtcgtgaccgccgccgctagcaccatcgataccatggtcctcgctgctccgaccaccaatgccatcacctgcaggttcgaagcagccacccacggcggaggctgctactgcaacacctgcaactgcagcacgagctgcggctgctcctgctggagctgcaactgacccggcacgcccggcacggctatagcgcacgtagactctagaggacgacgacgacgaggcgtataattataatatcagcgtctaaataatatcctgtcaactgcacccgccattagcgatccatggtccctcctggggttcatgttcat

SEQ ID NO: 155045 - DNA, 397 bp, Zea mays
  Clone ID: MRT4577_72985C.1
taatttttgaaaatcacgcaaagtcatgtgctgttcaatgttcaaggctaagcagcattcatgtggtcaccctcacccgtctagtactgttcatggagcctaaccgtaagcgacaggttattcatcataactaacaggccatatgggaacaggatgggaagcggttccttgtatgtggtctagcgggcctgtttccattacacttgtctagctggctgctcagatttgtagcttaccttttttctgttcagaaacagatgcctggaagcctttactgtgttcgtgttgccaatttcagatattcgctgacatggaggaagtaggtgtgcgtccggacgaggatacagcgagacggatcggaaaggcattcgtggctttcggcccaagagaaaaagag

SEQ ID NO: 155046 - DNA, 251 bp, Zea mays
  unsure (1)..(251): unsure at all n locations
  Clone ID: MRT4577_72986C.1
cncccaaaagaaagggaaaaagtgtgtaaagtggaatctaagtgttattatattattacacaccatttatatctaccaaaccacaagtactgactgaccttagcaattgcatacttcatctgttttatttgttcaacttacaactgcctttgatgctttgtgttcaaatcatatttatgattgaacctgaacatggtctaagatcccaacttctcaggtactccatttttattagtaatttttcccaacct

SEQ ID NO: 155047 - DNA, 136 bp, Zea mays
  Clone ID: MRT4577_72987C.1
aatcaagctgagagagcccatttgcggatgtataaaaaacacagcgctggacatcaacgccaatgactgcctggctggccgcccggccccgcgcttgaagagttcttatttgcccgacctgagacagacacacaat

SEQ ID NO: 155048 - DNA, 1309 bp, Zea mays
  Clone ID: MRT4577_72988C.1
cctgccggcacagatagaggagggtttgcccctgcacaccgctgcgctactgggaggagcacaagtgtatcgctgtggctgcggcgcccggcagtccgccacaagcacacgcgcacacaggggccaagcgcctacacctacagaggagagacaaggtctgccgtccgcgcgtgcgcggaagaggggacggaggaagaaggctgccagcaatcagagatggaggtggggttcttgggtctgggcatcatgggcaaggcaatggcgaccaacctcctccgccacggcttccgcgtcaccgtctggaacaggaccctcgccaagtgccaagagctcgccgcgctcggcgccaccgtcggggagacgcctgcctccgtcgtctccaagtgcagatacaccatcgccatgctctccgaccccagcgccgccctatcagtcgtcttcgacaaggatggcgtgctcgagcagatcggtagcgggaagggctatgtggacatgtccactgttgacgctgcaacttcgaccaagattagcgaggcagttaaacaaaaagggggagctttccttgaagctccagtttcagggagcaagaagccagctgaagatggccaattggtcattcttgctgcaggggacaagccattgtatgatggtatgattcctgcatttgatgtactggggaagaagtcattctttctgggagagattggaaatggggcaaagatgaagcttgtggtcaacatggtcatgggaagtatgatgaattctttgtccgagggactctgtttggccgacaaaagtgggctgagcccccaaacacttcttgatgtactggaccttggtgccatcgcaaacccaatgttcaagctgaaggggcctacaatgctgcaaggcagctacagccctgcgtttcccctgaagcatcagcagaaggacatgaggttagcgcttgctctgggagatgagaacgccgtcgccatgcccgtctcagcagctgccaatgaggcgttcaagaaggcgaggagcctggggctgggagaccaggatttttcggcggtctatgaggttgtgaagggcgcgggtggttctggatctggccagccgtgatagaaggaccatttgtgactgtgttagcccatttccatgccgatttgcaacatagcgacgtacgagtacgtgtgtattcgagatttggaaccagaccatacgttgcaaaagaaataataaatcaaagagatggtgctagcttgcacgataaaaaaaaaaaaaaaaaaaaaaaaaaaaaaagtactctgcgttgttaccactgctt

SEQ ID NO: 155049 - DNA, 518 bp, Zea mays
  Clone ID: MRT4577_72989C.1
tttttttttttttttttttaggggaacaactttggtacagtcggcttagtggtttgttgcatgaaatcgaagaacaagtgccctgaagttggtatgtcaggcacactgaagaagatcgtcatggtacagtatctgaaaagatcccaggtgcagtgcatcggccgctggttgactactctagttggttgctggggcaggaagacgaggtgactgattattctgcctctagaactgatttcctcccgattgactgttctaactatactgctgctgatgctggggttactgcctctggaattgctactgatgcagacgctagttctgctgttgatatccctgacagtgattttgttttaactgctgaggtggattacctgagaaacggggacgattgttgctctcgggctgaggtccaccaatcttacgtttttgatctttcatctctttgcgcttgttctcaattatgatagctctgtcgatcaggtgctgaaagatggagaaggtatgattcatcaatt

SEQ ID NO: 155050 - DNA, 281 bp, Zea mays
  Clone ID: MRT4577_7298C.1
aatcacattctaattatctctaccaacatcaacactatcactaccaaacttctcttacctctcatactcaaaacaaactcctataaatctcaccaaacatcatcaaaaacatttcctcctccctaaataacttaaaacttccatatccttcaaaaaactaaaataacatattacattccaattttaactaatatccattaaactattcatcattaatcacaccaaataaaacctcatattattcatactccatcattcttatctcaacatactaatcttct

SEQ ID NO: 155051 - DNA, 870 bp, Zea mays
  Clone ID: MRT4577_72990C.1
cattgggtacctcgagcgcgaccgggacacacaccacacacgtacgcccacaccagagaatacacagcacagcaccgacaacacctctcaagtaacccagcaggcaccatggccgccgccgtgcccctcgtcctcctgctactgccaacgaccctgatggccgcgtcggcggcgtccggcggcgagaagagcacgcacatcaagctgtactggcacgacgtggtgagcgggccgagcccgacggcggtgccggtggcgcaggcggcggtgaccaacacctccaagaccgccttcggcatggtggtggtgatcgacgacccgctgaccgagggccccgacctcaagtcctccaagccgctcggccgcgcgcagggcacctacgtcggcgccggcaaggacgagctctccctgatgatgaacatgaacttcgtgttccaggccggcgagtacaacggcagcaccgtcgccatcatgggccggaacgccgtgttcgacgccgtccgcgagatggccgtcgtgggcggcaccggcgcgttcaggatggcgcgcgggtacgcgcaggcccgcacgcacaccttcgacctcaacaccggcgacgccaccgtcgagtacaacctctacatcaagcactagctagctagcccatcggctttgtgtatctgattgttggtggtcatatatgaacacgatcgaactccataattgtcttgtgagcttaatttgtgccactagcttttgcagttttggtgaaaaagaagggggtaattaaaggacgatagcttcggtcgttgtaatgtaagctgacttcgatttaacttgcacaataattgaggacttaaagaacaaagatagcaatagactttgtttaac

SEQ ID NO: 155052 - DNA, 744 bp, Zea mays
  Clone ID: MRT4577_72991C.1
cctgtgcggcgctcgaggcgccggccgggccggccaacgtacgacaacacctctcaagtaacccagcaggcaccatggctgccgccgtgcccctcctcctcctgctactgccaacgaccctgatggccgcgtcggcggcgtccggcggcgagaagagcacgcacatcaagctgtactggcacgacgtggtgagcgggccgagcccgacggcggtgccggtggcgcaggcggcggtgaccaacacctccaagaccgccttcggcatggtggtggtgatcgacgacccgctgaccgagggccccgacctcaagtcctccaagccggtcggccgcgcgcagggcacctacgtcggcgccggcaaggacgagctctccctgatgatgaacatgaatttcgtgttccaggccggcgagtacaacggcagcaccgtcgccatcatgggccggaacgccgtgttcgacgccgtccgcgagatggccgtcgtgggcggcaccggcgcgttcaggatggcgcgcgggtacgcgcaggcccgcacgcacaccttcgacctcaacaccggcgacgccaccgtcgagtacaacctctacatcaagcactagctagctagccagctaatcgatcgggcgggtccggcccatcggctttgtgtatctgattgttggtggtcatacatgaacacgatcgaactccataattgtcttgtgaccttaatttgaaaaaaaaaaaaaaaaaaaagccccccta

SEQ ID NO: 155053 - DNA, 273 bp, Zea mays
  Clone ID: MRT4577_72992C.1
gggttgacccaaatattttctttctttcttccccatctattttatcatccacaattattgatcacaagggtaacacaacacattttaaattgcacaccacccatccccccatccaaacactaaccacccccctacactaactaacgaaacccacccgccacctacccttgccaaataaccaaattcgaaaaaccaacatctacaaatttccacaaccattccacggggcctcaccgttcccccctcccttaaaaacgggaaacccccccccca

SEQ ID NO: 155054 - DNA, 1001 bp, Zea mays
  Clone ID: MRT4577_72993C.1
atcagtccaaataatagaatctcatacatttgaatcatttaaattctaaatattacaaccaactatagcttactaaattgaataaattaattaatatgagctttattagggtgggcccctcaagtccaccacatacatgtgggcagttctagtccgatccacattattttatgctgaactacattttacacttatgtttttagatcatgctcgtactgatctaaaaaggccgtcccatattcctaaaaaaaaagtcatcaggttattctttacgtagtgttaccgcaacatgatccaaaaaccactgtagatcgacacaagcgtgggaacaactggtccgtcccaagcaaaaaccaactggatggtcagtcagttcagtgcttgatgtagaggttgtactcgacggtggcgtcgccggtgttgaggtcgagggcgtgcgtgcgggcctgcgcgtagccgcgcgccatcctgaacgcgccggtgccgcccaccacggccatctcgcggacggcgtcgaacaccgcgttccggcccatgatggccacggtgctgccgttgtacttgccggcctggaacacgaagttcatgctcatcatgagggacagctcgtccttgccggcgccgatgtaggtgccctgagcgcggccgaggggcttcgaggacttgaggtccgggccctccgtcagcgggtcgtcgatcaccaccacggcgccgaaggcggtcttggaggtgttggtcaccgccgcccgcgccacctgcaccgccgtcgggctcggcccgctcaccacgtcgtgccagtacagcttcatgtgcgtgctcttctcgccgccgccgccgccgcccgccgctgacgcgaccaggagcggcagtattagcagctggaggaggggcacggcggcggccatggtgcttgctgggttctgggttgagacttgagaggtctattccgcggtgggtggtgtgggcgtgtggctccccggccggcctcgaggtacccaatg

SEQ ID NO: 155055 - DNA, 350 bp, Zea mays
  Clone ID: MRT4577_72994C.1
cccccccacctgattttaaaaaaaaagataccctgtttttttaacaccaaatcaaacccgtggggggcaaatcaatccggggtttgatctatgacaggttttgagggtcggggcccaaaatgggcaatccaacttttttttttttagggcaaatgactgcccaaaaaaaagcctttttgatctcgccttgtaaccctttcccatgaaatctgggggaaattgatgcttgccccctcgggtaaggaaaccccaggggaccccaaaaacggaaaaaaaaatgggaatcccggcaaaaacttgttttttttccccattgaaagggaagggctccatccggccggggatccccc

SEQ ID NO: 155056 - DNA, 269 bp, Zea mays
  Clone ID: MRT4577_72995C.1
aaaaaacaaacaaacaaaaaaataataaaactttacacacggggccaaaaaacaaaaaggggacttccggccgatgaacaagtctacctaaaaaaactataggtgattaaaagcatgaaacaattgcccaaaagaaatgactgccaggttcccttctggaaaggaggagagcggagaaacgttcggggctattttatacaaagaaacaaaaaagggtgagaagcgcccatcagggaaaacccatttttctttgaggcaaaaacccaaaa

SEQ ID NO: 155057 - DNA, 192 bp, Zea mays
  unsure (1)..(192): unsure at all n locations
  Clone ID: MRT4577_72996C.1
ttcccgggctcgactccacgtcgtctcgtcccactgcgtctcgaatcgcacngtngccttcgtgctcgtgcgactgcatttcattcaaatnnttctgccctagtnannacttgtcgatggnttaggatagnngggcctactcatgnnngtggtgacccgggttgacgtnngagaattatgggtnnntcgatt

SEQ ID NO: 155058 - DNA, 158 bp, Zea mays
  unsure (1)..(158): unsure at all n locations
  Clone ID: MRT4577_72997C.1
aaaaaaaaagagcctttccataaggagtctgtttcctcccctcctctgtcgtccggcgggaagcaccacnccaaaaaaccctgctcctagctccctcatcgtcaataccataaccgtcctcccgagngacgcgcctccaagaatcagggaagggggga

SEQ ID NO: 155059 - DNA, 1984 bp, Zea mays
  Clone ID: MRT4577_72998C.1
ccgggagatgcttcttaatttaatagcagtggcggttgcactcctcccacgacggtggccagagtttagtcgcagcagtacaggctccacttgggagcgaggacgaggaggcgggtgccgctcctgtggcttcgccatgtgctctcgccccgcgtcctcggctcctccctcctcggtatctacatgccattatgccaagatctcccactctccgactccgatctgaccagggccgggccaccgcagccatttgcgtctgctcttcccgaatccctgtctcgctttgccctccgtttctccagctataaagccggggggtcctgtggcgtgtgacctttttataccggatgtgcagcgcagggtcaacttcgtcaggcttcttggctccaacaaccttccttggtcactctaaactgtaaagagatggggtgtggcccatcgatccccgacaagtacacgataggtgggaaggggcgcaagcgccggagcgtcatacaggaggttgccgtgttcgtgcccaccatccgcatcccagtggcctctgacatagctcatccactcaggggaatagtttccaaggatcttgtcgaccgactctccacactccgtgcccatgtcgcctcgctggctgaagaaatctatcacgcggacgtatcagctgttcaagaactgcagcatgcgctagaggagtacttgccagttgttcttggtttaacaacgaaagagagccgtcttgaatcgtcagtacagttcagatggaagaccttagacgacgaccaggagtgttgtctggcgagcgcgtggtatgaggtgctctcggtggtccacatgatggccatgcttgcgttgtttgaggctaacctattgctcatcccaaagagcagccaaggtggtggtgaaaggaaggtagcagaagacgcaaagaaggatgtcgtcgattcgttgctcagggcgtcgggatgcttagactactccgtgcatcgcatacttgttcagatacctgcgcaagtcaagaagggttttcccagttacttgcaggagggcatgcttgaggccatctcaattcaggcattggctcagtgtgtggaaatacagcttggcttggcttctgaatgtgagaaggcaacgctgtcagtaaagaggaggctagcttgtgagcaagtcagctatttttctcaggctcactattgtctgtcgggatgcgatacgagtgactcgtacgggaagaagcttctgctgttcctcaagtggaagtggatggaggccaaggctgtagcgtattactaccatggtctggtgctcgacaagggcggcgaaccggcaaaccataccagtgcagtctgctgcctctctgcagctgatgacctgctctcagacagcaaaagggcttgcttgagtttttgcttggcaaatcctgtcacgagggtgcctcctccttggggtgtcatgaaaaacatgcacaaaaagatcccagatgtcgctaacaagaagttccaagcgcacgggcatctgtttgagcaaaacaagaacagcgcactccaatccgttcctgacctaccagagtttgcgctgtcgctgagaccggatggatacgagttgccaatcactgattcgatctgggagaatgttgatggccaacctcagattcaaagcctcaaggagcatatgatagatgacgaagatgaagtaggcacaaaatgatagttctcacttccaaatgcttcttttcattgtaccaccaaaagtagcagatttcaaaaacgcttaatccaaaatgttttggattcagcatatggctcaactttaaaaaggaatcgcgatctctgtattattgcaagtattaccatatgatatagtaaagtcttgatgtgtaatagaatcataaataatagttggtttcttgctgtaatcgcctttaattttattttcccaactggcagaatagagcatcacagaaaaaaaaaaatacggcacgcatttcaat

SEQ ID NO: 155060 - DNA, 379 bp, Zea mays
  Clone ID: MRT4577_72999C.1
gggatagggggccacaagggaaggcctgggttcaacacggggggggtcatatattacaaaccaccaaggcccaggggggggtctcctaattaacggggtccccattaaaaaagggggggtcttggaatcccttttttcccactcataaaaaaaggggaccccccccgagggggggatccatccccaggctcaaaaagagcggagttaaataaaccaaaaacaccttccgggcgatggacgggggggaacaatggggggcttaaaaggacccccccaacgggtcaaaaaagggaggggggagcgggtccctcaagtggggggcccaattggtgaggggccccttgccgggggggggggcctgcacggggaaacccaggaa

SEQ ID NO: 155061 - DNA, 2089 bp, Zea mays
  Clone ID: MRT4577_7299C.1
ccggccgggagatcgatcgatctccaccgttccttctccccgttcctaatgtcagccgtgcagcctctccactgcgcccacttcttatactcccaccttctgctccctctcacggacgcttcgctctagtcggaaggtttcgaggaactcccgggctcgaggagatcgggacgatgatgggagggcgcgctctgctgctgctcctggtctcggcgctgctcgttcagatccgcgcctctgacccgctgctgtacgagccgtttgatgaggacttcgagggtagatggatcgtctccaagaaggatgaataccaaggtgtatggaagcatgccaagagtgatgggcatgaggactatggcctccttgttagtgacaaggcaaggaaatacgccataatcaaggagcttgatgagccagttaccttaaatgatgggacagtggtcctgcagtttgaagtgagacttcagaatggccttgaatgtggaggtgcctacattaagtacatccgccctcaggatgctggatgggatgccaaggagtttgataatgagactccatacactattatgtttggtccagataaatgtgggtcaaccaacaaggttcatttcatccttaagcacaagaatcctaagactggaaagtatgttgagcatcacctcaaattcccaccttctgtcccatacgacaagctctctcatgtctacacagctatcttgaagccagacaatgaggtcagaattttgatcgatggggaagaaaagaagaaggcgaacttcctttctgctgatgactttgagccagcacttatcccatccaagaccattcctgaccctgatgacaagaagccggaggactgggatgagagagctaaaatccctgatccagatgcagtgaagcctgatgattgggatgaggatgcccccatggaaattgtggatgaggaagccaccaagcctgagggatggttggatgatgaacccgaggagattgatgatcctgaggcagccaagcccgaggactgggacgatgaagaggatggtgaatgggaggcaccaaagattgacaaccccaagtgtgaagaggcacctggatgtggcgagtggaagaggccgatgaagcagaatcctgcttacaaaggcaagtggcatgcacctatgattgacaaccccaactacaagggaatctggaagcctcaggagatacccaaccctgagtactttgagcttgacaggcctgattttgatccaattgctgctattgggattgagatctggacaatgcaggatggcatcctgttcgacaatatcttgattgctgatgatgagaaagttgccacctccattctcgagaagacatggaagcccaagtatgatgttgagaaggaaaaggagaaggctgaggaggctgctgctggtgcagatggtctttctgacttccagaagaagatttttgacgtcctgtacaagattgctgatattccgttcttggcaccctacaagaccaagattattgatgttatcgagaagggagagaaacagcccaacatcactattggcattttggtctccgttgtcatcgtgttcgttaccgttctcttcaagctcctttttggtggcaagaaaccagtggcacctgtgaaacctgcagctgaggcgaagaagcccaaggccgcggagacggacggtgctggaagcagtggtgacaaggatgagaaagaggatgaaaaggaggagacaggcccacgtcggaggacccgaagggagacatagacctgtttttgacgtgttttagctcttctggcgtctgcttattttgagacctcttaatatttgtgagtgtataataggagcttatgtcacctctgcggcttcccccgctgctgatttgtttttaatggttagaccaggacccttcacgagcgtagaatttagttcttgttggtcatttatgtgctgtgcctgacggtgttcaatcagatagaggtgatggtttttttggtagatcaaatcaaggaatatttcatatgcctttttggcaactgtttcagttgggtattcgcctggttaagctttcgtttgtgtttcgg

SEQ ID NO: 155062 - DNA, 317 bp, Zea mays
  Clone ID: MRT4577_729C.1
tcgacgcacgcaatctggaagaaggctttagctatctgcctgtgtatgggatacaaccgaactgggtcgtctggggggccaacgaccgttcagcatacttccgttagtagcatcatcaccacatccatgttccacaacatactgagccaccgcagatacagcatttgcccatgcaccttttacacctaccacaccttaatcgaagccttcagcaagttacccagctactgcaccacctgcgaccatccaaaccgcctgcacaagctcgacagcttcttctgccagacgtaccactaaaccaccggatcatttaccac

SEQ ID NO: 155063 - DNA, 594 bp, Zea mays
  Clone ID: MRT4577_72C.1
gccggccgtgaccgggaaagtgaccctgccgcctcaccggctctctcactcagagaccgcacagccgctgcccgttgagcgccactcgcacgaacccatggtctccgctgagcttgcctgcacctacgccggtctcatcctccatggccatgccatcaccatcaccggcgagaagatcgcactaccgcgaaggcgagaagcatgccagccgagtaccactgggcgggactcgtcgacaaattgctgaaaaagggcatagagggggacctgatcctcgccgtcgtgtctgaaggagaaagatgctcccgctgctgctgacacgccggctgacgaagctgggcgcgcatgtgcccctgctgtggaggataaaaaagcagaggccgagaagaattccgctgaccagatgatgttcgggctggtcgactgacgagagcgctcgcccccaatcaatatcaaacctcacttgcgctgaccaagactatctagacgtaagacatgtgtctacggttttgatacaactacccaagagtgtgatatgttgagacgtggctatggaaatgtgacgatgaactcaaagcatcttatgaagatcaa

SEQ ID NO: 155064 - DNA, 289 bp, Zea mays
  Clone ID: MRT4577_73000C.1
ggaaagaaaaaatctggtcagagcgttgtgtgatctttttgtaacgtaagatgttttacagcccgtttttccaaacgatttttattaatttttccccttacgcgttgacgcttacatttttaaccagttcttgttagtgcccaaagggttgcccaagttttagggctggtttggtgacccgtgattttaagccccttttccccctcaatttactgattagtttggcgacccccttttttaaagagatttctttttttttagggaaaataaaccttttttttttgaaaaa

SEQ ID NO: 155065 - DNA, 778 bp, Zea mays
  Clone ID: MRT4577_73001C.1
ccggccgggacaggcaaacctcgtcggcgactgcccttccctccgccggtccctgcctccctgcgagcggatcctctgccgttacttgccgggactggcacgccgcggcaccatgtctctcctcctcaagcccaagccccacctctcctaccggcctcatcatcttcctgcgccatctctgcgaggggtcaccaagccagccgggccaaacgggtacggacacctcgcccccgcccctgacccgcgatgacaccaagctcgtggacgccctgctcgcggcgcttctcgaccaccgccgcgccaacccggccgccgagctcccggttccttctctatccaacacgctcccgtccctctcgtccgccatctccgacctgctcccttccccgcctccgcctcacctcccgctccacctcctcctccgcctcctcgcgctccgccgcggcgtaccgctcccggaggccgtcgccttcttccaccacgtttccccctcccttcccgccgactccctccctgatctctacgcctccatgatagtcctgctcgccaagcaccgtcatttcggcctcgcgcgccacctgctcgatgaaatgagagagcgggccgtccccatctcacggcagctcatcctcgccttgacccgccgctatgtccgagcggagatgccgtcggaggctgccgacctgttccgtcgcatggaggagtacggcgccggggcttcggaccctgccacgctggcatccctctggctgctctctccagaacgccttgccagcga

SEQ ID NO: 155066 - DNA, 379 bp, Zea mays
  unsure (1)..(379): unsure at all n locations
  Clone ID: MRT4577_73002C.1
cgacccatctcgtccggcccacctaattccctgccattcctcttccttctcctcctcgtctccccctangggagacgggttttattaaacacaaagacgcccccctcatcctatgaagccatggatcacaatgaggctgcgtgccaggccccctatggacccatcctctgcatcaataactgttgcttcttctgcagcgctgcgaccattaacatgttctccaagtgccacaaggacatgataactaagcatcatcatgccaatcttgcttcctcctctatctacaacatcctaaaccgcatctaccccttcatacatcctcttctttctttcaacaacaccttattaccttattcccaacttcacttcaaacaattaa

SEQ ID NO: 155067 - DNA, 140 bp, Zea mays
  Clone ID: MRT4577_73003C.1
caggaagagaaagcgatcggacgcgggatccttcccttgctgccatcgtgccacgctggtccactgtgacaatgaggacgggtccatcacaatcccgccgttgtggcctccccagaagatgcagggtcgtttatccctgc

SEQ ID NO: 155068 - DNA, 1252 bp, Zea mays
  Clone ID: MRT4577_73004C.1
aattcggcacgagggttttctctctttgcgccgctgttcaggcgcctcgcctctcctatccttgtcttgccctgtgtcccttcgtcgcctcggcgcgctcgcccttcgtccatcgggcttccgcgcgctcgcgtttttcattattccttctctgtaccccgtttcgatttcgagcggggtcagtttcttcttcaccggttgatttgttctgctgctttgcgtctccgtgctctcgcagatcccttgtagccgctttgcctccgcgcgacgccgggagcgagccgagtttggtttggccgggttgttcggtttgcggtttactctttctgcgattatagttttctggtggatcctgttttgttctcgacttctcagcgtgtgggttgcaggattgggtccgattcggtgttgggatttgttcgtcatggcgtcttgtggcgaggaggtgcaggcaggtcagtcttctgtcagatccggcggttcattggttttgtcactggacatggattcggtggtttcaggctccaatgtcttctggtgtggtaccatcagaatcagatagcgtcgtcgtagtttgcacaccaggaccaggtgaattcgagaccttgggtccattcttattttaacggctgatctcgcttgtggcctttcgggtgttcgtcctaacttcagaagtagaagaaagggtccatgctggttatggagagattagttgaagggatgaggtttgcttatggttcattccttgttttcgtttgatgtcgtcatattggtgtgaagatcgcaaccggacttactataagcttgtttgcacttcattggaaatgctgctggctggatctgcgggggcaacagagttttggaagttgattgaggtgttgactggaccggtgtatcaggaaaagatcgttgggatatacataccaaaattgcttttgtattggttcgtcttcagtttctgtccgctgcaattctttgttccttatattggggttggaggcgtgtttgatctggcttgtgcttgtgcaatcagaagttaggaactgttcagagttccttgtttgttcactaaccatcctctctcctgccgttcttcgaaaattgacactataagcatgattacccttcattggaaatgctgtttgctggatctgcaggggcaacatagttttggaagtagattgaggcattgactggattgatgccatagaccatagtatcgggagaagattgttaggataaaaaaaaaaaa

SEQ ID NO: 155069 - DNA, 234 bp, Zea mays
  unsure (1)..(234): unsure at all n locations
  Clone ID: MRT4577_73005C.1
ccctctntcnctctcnccncnncancancttcctcctcacaagccatagcngccgcctctntctgtgcttgcccgctcgcnatcttcgagtaacgncgagaatgcggngatggagntggacgagcangtcntcctgggaggagatcctctttctgcggaggggacgcctnggangnaatgcnntnngggaatacttcgcncnggctggtnaggactgcancttccaggatcgnc

SEQ ID NO: 155070 - DNA, 293 bp, Zea mays
  Clone ID: MRT4577_73006C.1
atgttctgtctttataatcttttgaagtccctaactagatgcttaaggagttagaaaagttatcgaagggataacgaaaaaaggaaagaaaagcataccttgccagtcagtctgtgaagggggggggtgggggcttgctatcatcgcggaggggcgttcacacaagggttggattgggccccctcctctctggaacgcgagctgtgttaataccggggtgagacatgttaattttactctattgaaaaccgcgcggggatcgcaattcaacctcctccctcgagctgcacctt

SEQ ID NO: 155071 - DNA, 337 bp, Zea mays
  Clone ID: MRT4577_73007C.1
cttcttcgtcaccgagccttctcgtcctcgcggacttgtgacttgtgactccagtcccttccaatcaacaagttgctatagtagtcccttccaaaatccacactggaaccggaacctccatctccaatccaatccaactccagaaccgcctccctgctgcatccccatcccgcacgaacaccaccccttgtactctccgcctctacatctcatcggctggtgcacctactccctcctctgcacggaccctccctcccttctcgtgctacggcagcgtggatgcacgagactacagctgtggcaaagcggagatccggcgggagtgcagcggccggcg

SEQ ID NO: 155072 - DNA, 326 bp, Zea mays
  Clone ID: MRT4577_73008C.1
ctcactccttctctctcttcaattacctgctcaataaactgcaacgatgtcgaaccgtgtctcagaccgtttctacgagctttcatacattgatacatacattgctataccctatttaggacaacaacgtattcttatgcatatctccatgctgatcttactactccttatccatgaacggaccattacatagactcttgcccataatccttcacataatcctccaaaaaatcagaagcatcacctttagcatcaaatttatcttcaaaatcatcctcaaaatcaaactgtgcatcaaattcataatccaattcatcatccaaatc

SEQ ID NO: 155073 - DNA, 152 bp, Zea mays
  Clone ID: MRT4577_73009C.1
gttctagatcgcactcgcgtctctttcctagtcgcgccgccgccgatgctgcaagcgccagctgtttgtactacggccactggggcgtcatgcatcagccgcgggaagtgcgtatctacgtcgtcggcgctgtcgtgtcaagagtgacgcct

SEQ ID NO: 155074 - DNA, 296 bp, Zea mays
  Clone ID: MRT4577_7300C.1
cggcggccggacattcttcgcgccgccgagcattggcgcttctgtgtccacgccaacgtcgcgacgttctccctctacgagctgcctagatgtcggaggggccaaacgggactgaggaagcagtaccttgctctccgtcgccgcctctgatctccgcgaggctgtcaggattcaatatgtcgaccagcatattcgctacttcctgcacgctgttgtcgcatgacagaacaacgcaggcctccccgaccagggaggatagccctttgtcttttgtcttcttcagccaaggcaccaag

SEQ ID NO: 155075 - DNA, 298 bp, Zea mays
  unsure (1)..(298): unsure at all n locations
  Clone ID: MRT4577_73010C.1
gaaatttcttcccaaacaacccctccccagaagccagagangatcccaactaggccggctctcccannccaggccgccaccagctccggcaagaagagctggcggaaggaggccgaggccgcctgctcgctgcggctggtcgacctgaaccaacgcaccaacggatgggcctcgccgccgggggacctctcccacctgcgcgcgcgcggctacttctccagcagcggtgggaagcgcggcatggcaccgcaccccccggactggcggctacttcccaccggtgtatactgccaaccaa

SEQ ID NO: 155076 - DNA, 503 bp, Zea mays
  Clone ID: MRT4577_73011C.1
gcaaatggcttttgtttttttcggttatgcccccaagttcccacatgagaaagttcataccatgtcttacctggcacagaaggctcccctactgcttggcacaagcctatgtgaaaaaatacacaggggcgcccctcagtttctgtttgtcaggtccaggtcatccaaaggggacgaaaccacttgtgtttttcattcaccccattccaaaccgaattagaaactggaccttactgttccattttgcatgcgaaaattgcaaacagtgcctaaagctttggccatcttgttctatgtggcaggataccttgcacataagcacgttagaggtgattaaattgcacaacttaatttgctagactttacccactgcctccatttcaggctattttgcaataggctaatccctggcttacaatgacctttttcggtgccttaacattaacaacacaattgggttggtgaatcattctctgttcttcaggaggacagctggcttcttt

SEQ ID NO: 155077 - DNA, 362 bp, Zea mays
  unsure (1)..(362): unsure at all n locations
  Clone ID: MRT4577_73012C.1
accaacaagcgggggagaaaggggaanccagaagcaccacgagaggaacaagggcgaccaagaaaaacccccccngagcaccncgcgcgccggcaggngngccaacgcgacaagggncccncaacgcncacaagcggccaaaagcnnccccgcnncccccaaacgggggagcaanganagcnngagngacgcgaaaacccagcccgcgcagacccgagaggccgcaacaagcaanggcaggaagcaacaaaccgcaaacacccccagcgcaacaagcgccagcccaagcggnggggcagacangggggcaaaccaccagggcacagaagccgaagaaacaggcgcaaccggggaccaaccaa

SEQ ID NO: 155078 - DNA, 351 bp, Zea mays
  Clone ID: MRT4577_73013C.1
ggcccaccgaaatagagctgaagatgtctcccgcggggtcgtcgacgtcgacaactgcgacggtctttcgatcatacagcacgtactgcacggggccgtacaacccgtacggacacatggtccccttcaagggagcggcgggggccctatttatgaccgggccgtcgtcgaatagtccgttcggactcctgtcgccagccacgccgacgcgcctaaccggggccaacccgtacgacctcttacagaacttcaccagggcgccaggcagaccacggcgcgcctcggacatatacacgcacgtcaccgaggggagcggaagcgactaccatgagtattacacgcgccgacgga

SEQ ID NO: 155079 - DNA, 839 bp, Zea mays
  unsure (1)..(839): unsure at all n locations
  Clone ID: MRT4577_73014C.1
ctcttccactcgaagtcggcaggcatcgccctcgcccctcgcccaggcacagccgcacagcaagcatagccgccaccgccagtcgccactgctcagctcggcgctccatggcgtgcccccaaattctgtgacggcgtgactcatcttcctcctctcctctctgctaggttgcacgtgcagaccacgaacggatgcactgcccccaaggccccaatccaatgatcctggtgggcgtggctctaagaagagcagcaccgcgacgtaagggagctagaatttgtggctgacacttgaatggattgtccctctctgaggttactggaccccaaaccagactcctccgaagacaggggcttcttgctgattatccagtagatctcggctacaacagtgtggaaggccttctccacagttcagaatatgcttttagtgagggtggtcgtgtacttgtgtttttgtgatatttataaactttgttgtattgtgatattttcatattgagatattttcatattgatatggttacagatctatatagccagttcgtagccaccatgaatcagctcggtggcccccatgttgccacgccaaagaaaattagggagctgatgaaggtgaacggcctgataaacgacgaagtgaaaagccatcttcaggttcgacatgccccatgcctactatcactctcgatttgaagaagagtctcaagattctgcaggtgagctatgtaattgacccaaaagacacttcaagcgggcaggaaagtctaaggccctttactagtacttccnagtaagtagagcaatcaccatcacacggatttattcaagatttttttt

SEQ ID NO: 155080 - DNA, 311 bp, Zea mays
  Clone ID: MRT4577_73015C.1
cctactatacctggatatcgagagctcgactccagcactgtattacaataatattatcctcatttttacaaaaaaagagagctactagaggtccacacaaatatttcggtaaggcaaggactcacataaatctcccagcctttacaaaaaaatttttttgccggtcctgtatccttccatcgaaatgatttgcacctcccctttaaaaaacggaccctaaaatcctctgatccatagcccgaaaaaatacccaaccatatctaccccctcaggattacgtctatatagcggaggggggttcttttctgggc

SEQ ID NO: 155081 - DNA, 438 bp, Zea mays
  unsure (1)..(438): unsure at all n locations
  Clone ID: MRT4577_73016C.1
gatggaaaaattatgactgccattaaacatacgccatctgagtggcatacattgttactcgtactagctgtagtagtagatatataacatgaattcagccggaaaaaaaatattcgtaacacgatcccaacaaaactgccggctgcttttgacttccgtcatgtatgctgtgttacgatcactatgttagttttactcagccttgtttgagacgccaacgaataccccgaccaccagattaggcaattgggcaaaagaataagaaacgataaaacagctattttctatgtaaggctttacatgtatgcaatcagatctctagggattgtatgcacttcacgagtgaccttatggtctccattcccctccattatccagggtgtgcaaaaaggtttcgncatgttatcctgacagctccatgatccaacaagaaactac

SEQ ID NO: 155082 - DNA, 1610 bp, Zea mays
  Clone ID: MRT4577_73017C.1
ctcgaaagctcatcacatcacaggccagcccaagcagcgatgccagcggtggcgtccctttgggcgccgcccgcggctgcccggcggcggaggttctcccccgtggtctcgtcctcgctgcgccgggtcgcgtcgggcggcgggtctagctggcggagcgagcggcggctcatgtcggagctggagcgcacagtgacagcgggcgcgaccgagcgcgtcatccgcagctacgtcggcaccaagtcggagcgcgccgcgctcgccgcgctctccaggctactcatggactccgaccccctcgccatcccgttctacgaggcggtcacacaggcacggtggttcaaatggagctcgatccacgcagctgcagtcgccgccttgctcgaagccaacggacgcgccggagaatccaggtccctgatcgccgactccgtctcgcagcacctccagcagtcgaccgacgaggtagccctcttctactgcgacctcatagcggcgttctcctcgcgcgggctcaaggaccgggcgacggagttccacatggagctacggtccatgccgccgctctccgggcgcaaggcctacgcggcgatggtcaagtccctgtgcctgctgggcatgccggccgaggccgaggcagcgctcagggagatggtctcgcgagggcaccggcccgaggcggcccagttcggggccgtcgcgaggtgctacggcagggccggctcaccggccgacatggagcgggtcatcgcgtccatggcggacgccggcggcatccgcctcggcgccggcgcggcggatgccgtgctgtcgtgctacagcgcctgccgcgaccacgccaggactctggcgtggctgaagaggatgcggaagctgcgcgtcgcggtgaccgcgaaaggctacaacttggtgctcaactcgtgtccgtcgctcgcttcggtggtgcgggagctgggccctgagcttccgctgtcgacggccgggctggtcgggtggctcaggtctgcgtcgacaacaccggcaccggcagcggaagtggaggtggtgcgggagctcctggcgtcgtcggcgtcggttctggacagggcgatggagtggtcggaggccgaggcgaagctgaacctgcacgggttcagcacggttgcagcctacgtgctggtgctgcagtgggtggacgcggtgaggggccgcgcccgcgcgttgccgttggaggtgtcggtggtgtgcggcgttgggaagcacagtgacgtccgaggcgagtccagagtgcgggagctggcgcaggaggtgctgggacggatggggagtcccctgaagctgtcggcgagaaacagagggcggctcgtggcgaagcgagaccgggtggagcagtggctggccagcttgccggtgcctgaggacggcacagacccatcgcctgatgcagcaaacgaagaaccatttgtatttgcacttttcagaaaacttgggcagtttttttccaaccttatgtagatagatgttgctgcccccatcacaccagcatcgatcgaaagagctggcctggtgaatgaatctgtctcgaacgaactgactgatggcctagtgtgtttgcttggctttggcgccgt

SEQ ID NO: 155083 - DNA, 246 bp, Zea mays
  Clone ID: MRT4577_73018C.1
tcttctcaaactctgccgatcgtgatagtgcgggggacatctttgagaagcttgtctatatcgctctcgactttcagcatgaatcggtgactgtaaagatcagctgctcacgtgagaacagctatgacctacgctatggccaggtcatcaccataagagcagatagattcaggtgcgcagaagtgctttttcaaccatgcatgcttgatctggaggatgatgacatccatgatacaacatacaatt

SEQ ID NO: 155084 - DNA, 463 bp, Zea mays
  unsure (1)..(463): unsure at all n locations
  Clone ID: MRT4577_73019C.1
atgtgggtacccctnncgaggccggccgggacttacgccccctcttggccgccaccccctttttctcccccttggctggacgcccggtatcgatatgaggaggatcactgcattgttgactaggacgagaggatcacgtacacgttatggaccatgacctgtaggagatctgttgaagaaaccagtaagagagtacctgcagatcatgtttgcacattctttcttctacgatgagggggctcgctgctcatcatacgctacagataatgagtagcacacccacctttattctcataataatgctgcccatactcaagcatgattgaaagagaaacttcacgcacctggcatgctcgtaattatgtagcccagacccctgcttaattcaattaatgacgttttgacaaaggatgtttgtttttaactagtcgtgcgcactgattaattcagttcatgctgctat

SEQ ID NO: 155085 - DNA, 2181 bp, Zea mays
  unsure (1)..(2181): unsure at all n locations
  Clone ID: MRT4577_7301C.1
ctcgagccgcgttccttctcccctctcctaatgtcagccgtgcagcctctccactgcgcccacttcttatactcccaccttctgctccctctcacggacgcttcgctctagtcggaaggtttcgaggaactcccgggctcgaggagatcgggacgatgatgggagggcgcgctctgctgctgctcctggtctcggtgctgctcgttcagatccgcgcctctgacccgctgctgtacgagccgttcgatgaggatttcgagggaagatggatcgtctccaagaaggatgaataccaaggtgtatggaagcatgccaagagtgatgggcatgaggactatggcctccttgttagtgacaaggcaaggaaatacgccataatcaaggagcttgatgagccagttaccttaaatgatgggacagtggtcctgcagtttgaagtgagacttcagaatggccttgaatgtggaggtgcctacattaagtacatccgccctcaggatgctggatgggatgccaaggagtttgataatgagactccatacactattatgtttggtccagataaatgtgggtcaaccaacaaggttcatttcatccttaagcacaagaatcctaagactggaaagtatgttgagcatcacctcaaattcccaccttctgtcccatacgacaagctctctcatgtctacacagctatcttgaagccagacaatgaggtcagaattttgatcgatggggaggaaaagaagaaggcgaacttcctttctgctgatgactttgagccagcacttatcccatccaagaccattcctgaccctgatgacaagaagccggaggactgggatgagagagctaaaatccctgatccagatgcagtgaagcctgatgattgggatgaggatgcccccatggaaattgtggatgaggaagccaccaagcctgagggatggttggatgatgaacccgaggagattgatgatcctgaggcagccaagcccgaggactgggacgatgaagaggatggtgaatggggggcaccaaagattgacaaccccaggtgtgaagaagcacctggatgtggcgagtggaagaggccgatgaagcagaatcctgcttacaaaggcaagtggcatgcacctatgattgacaaccccaactacaagggaatctggaagcctcaggagatacccaaccctgagtactttgagcttgacaagcctgactttgatccaattgctgctattgggattgagatctggacaatgcaggatggcatcctgtttgacaatatcttgattgctgacgatgagaaagttgccacctccattctggagaagacctggaagcccaagtatgatnnnnnnnnnnnnnnnnnnnnnnctgaggaggagnnnnnnnnnnnnnnnnnnnnnnntgacnagttccagaagaagaattttgacgtcctgtacaagattgctgatgttccgttcttggcaccctacaaaaccaagatcattgatgttatcgagaagggagagaagcagcccaacatcactattggcattctggtctccgttgtcgtcgtgttcgttaccgttctcttcaagatcctgtttggaggcaagaagccggtggcacctgtgaaacctgcagctgaggcgaagaagcccaaggccacagtgaccgacggtgctggaagcagtggcgacaaggatgagaaagaggncgaaaaacgagagacagcaggcccacgtcggaggacccgacgtgagacatagagacctatttttgatgtgtttggatgttctggcgcctgcttattttgaggactcttaatatttctgagtgtataataggaacttgtgtcacctctgcggcttccctgctgcttatttgttttaacatggttagaccaggaaccttcacgagctgtagaatttagttcttgttggtcatttgtgtgtgtgcctgacgggtataatcccttgttcaatcagatagaggtgatggttttttttctcgtagatcacaggaaggaatatttcataaagttctcgttaaattctggacgccttttgttttacacaattccttgtatcatagaatagtcagcgagcgtatattcttacaacagtttttgtccttcaatagaaaaattacagtttatttattatgaatacagtacatacaattatagtt

SEQ ID NO: 155086 - DNA, 657 bp, Zea mays
  unsure (1)..(657): unsure at all n locations
  Clone ID: MRT4577_73020C.1
agcgtccgcggacgcgtgggcggcttgccaacagagcgcctgcactgcgcgctacatccccgaagcaacaacgccgcggtggatctggctccggccatggcaagcgtgaggcgcgggccaccggcatcagtcgggaaggagaaccagcggcccaagaaccttggccacgggaaggcgacgactgcgacgacgaccgccgagctgacgaagcccacggagccggagccagcgcccgtggggtagcgctaacgccacctccaccgccgctgaggctgtcgtcgctatagctccgcatggaggacgaggcggcggctgcgcaggcgcagacgcaggcgccgcccgtgttcgtcgtcaggcccaggagcagggagctgctcccgccgccgtcctccaactacgaggcgtgggatctctccgacagcgagtccgcaccggcctcctcctgggccacgctccccaacaggtacaccgtggcaccacgcagcgttggagcgcaaggtcaagcgagatcgcggcagccggggcgagcggcgtcggcgtcacgagccacgacgggccgagggatgcctgcgcgctatggccggngctattggcggtggccggcgatggattcggngtctagcggtgacccgattcgaggtgacgtcctagggactg

SEQ ID NO: 155087 - DNA, 562 bp, Zea mays
  Clone ID: MRT4577_73021C.1
ggccgcttttttttttttttttttatggaggacaaaatagattatcctgcatagcaggctgtacctcgaccaaaaaaagagaagcagttctatccgcttcgattccacccagtggtcctatctcaaagatcgcgtccctcttgatttcaatcaggcccaaaagggttgttgccacgcctcttgcaactcttgcagagtgcggcgtctatagatgactcgggaaaagcctgaaaatgaaaattttgagggaataaggggtatccggcctttccgacgccgaacttggtgaaagacggaaatttaaccggcaaagatatgcatggcatggcggcggaaatagggaccggcggggctgaaggtgattcaacgcacgcctgccattaccgataatattacatttaatacttgagaggcttgggcttcttccaagggaattcctgggtggtgaagtgaccggtcttggcgggctggttggagatggggtgtggtgagggtcaactccttggcaatggcacccggacccctgttgaagttggccctggtgatctcaacaagctcctca

SEQ ID NO: 155088 - DNA, 177 bp, Zea mays
  Clone ID: MRT4577_73022C.1
agctcgttgcttcgatcatctggcttcttacctgctagccaacaagcgtgtgcccagctccactccctaaagtctgcaaggctacagctggctgggggagacactgccgctctggggctcccacctgctcaccgtggtgcggcccagcttgcagctgcctgggctcacaccaatgcc

SEQ ID NO: 155089 - DNA, 180 bp, Zea mays
  unsure (1)..(180): unsure at all n locations
  Clone ID: MRT4577_73023C.1
gtaaaagtgaanataatcaagagtgaagctgccggaggccgggtcctccttaaaaacttttgtgtaaagaacttaatgggaggagtttttacctcccaggtattgtaataatacttttcagcactctctggtctgtacaaataacttactcttacttctaaataaatgtaagtttatgtg

SEQ ID NO: 155090 - DNA, 239 bp, Zea mays
  unsure (1)..(239): unsure at all n locations
  Clone ID: MRT4577_73024C.1
aaaaaaaacaaggttacaagactttatttttttttttttactcaacttgaatcaccttgaagggaataaaacttaaaacagctatccttgtatcttatatgtgcgaaaccaatcggggattcttcggctaaacaccctgaggggggaatggccccgccctgttccagaggggcaagcgccgcccctgctggggggtgcgcgcagtgcgcccgctggggttgccanccccctagcgcggg

SEQ ID NO: 155091 - DNA, 3301 bp, Zea mays
  unsure (1)..(3301): unsure at all n locations
  Clone ID: MRT4577_73025C.1
anagaagagaanaagagaggaaaggagaggagaaaaggctgcagcaaagggagcggagtctaagacagggaggagcaagtggcacctaaaggcaaggttgacatgaagaagctccctaaacatgttcgtgagatgcaggaagcacttgccagaaggaaggaagctgaggagcgacaaaagagagaggaggaagagcgattgcggaaggaggaggaagagcgtctgcgacgtgaggaggaggagaggaaagcagaggaagcaaagaggaggaggaaggagagggaaaaggagaagctgctcaagaagaaacaggagggtaaactcttgactgggaagcagaaggaggaagcaaagaggttagaagccatgaggagacagtttcttgagcagagtgaactccaaaaggctgaggatgctgcccctgagaccaagaagaggccaatatatgattctaagaaaaagaaagctcaatcaaaggccacagagactgcaaaagtagtcgaagaacaacaggaagaactcaatgaagttaacaatgacgaggaagaatatgtgctcgtggatcaggaatctcaatctcaggttgaggaatctgatgagaaaactgaacctgaccaggagactgaagagccaaaaccagaagaggacgaggaagatgaggatgagtgggatgcaaagagctgggatgatattgatgtcaacttgcctttgtttcccgcttttgtcctgggtctcgcgaggccgcttgtcaggtcgcctgcgcccccccagaggcggggctttacttctgctcaacctgcgattcctgctgccaaaaagctagttccttctgttgcagactctaaaaagagtgaaactgatgatgagggtgccagtaatggacatgctaagaggcacaaaaagaaaggacctgtgaaagaggataactctaagagtggtagtgacctctgcaggtaccggtccggaattcccgggacggtttacgtttccgagacaaagctactagattgtattaggcgcactaatgtccaagaaggcgaagctgggggtattacccaacagatcggagcaacatacttccctactgaaaacattagagagagaactagggagttgaaagctgatgctacactcaaggttccaggcctgcttgttattgatacccctggggcatgagtcgttcagtaatctgcgttcgagaggttcaagtttgtgtgatattgccattttagttgttgacatcatgcatgggcttgaacctcagacaattgaatccctgaatcttttgaagagtcgagatgcagtgttcattgttgctttgaataaggttgatcgtctctatggttggaagaaatgtccaaatgctcctattgtgaaggctttaaaacaacaaaatgaagatgttaagagggagttcaatatgagactcacagatattgttacacaattcaagatgcaaggagtgaatactgctttgtactacaagaacaaggagatggaagatacctttaacatagtgcctacgagtgctgtaagtggtgaaggtattcctgatttgcttctgttactggttcaatggactcagaagacaatggaagaaaaactcacttttgttgatgaagtccagtgtactgtactggaagtcaaggttgttgaaggccatggtactacaattgatgttgttttggtcaatggtatactccatgaaggagatcaaatagttgtttgtggcatgcagggacccattgtgacaactgtcagggctttgttaacaccacacccaatgagagagcttcgagttaagggcacctacatacatcataaggagatcagagctgcacaaggagtcaaaatatctgctcagggtctcgaacatgcaattgcagggacagccctttacgtgttaggacctgatgatgatttagacaaactgaatgaagctgttatggaagagatgacacgggttaggagccggattgacaggagtggtgaaggtgtctatgtacaggcatctacccttgggtctttggaagctctcactgagttcttgaagagccctgctgtgaatattcccttctgtgatttcagtatagggccagtgcataagaaggatgttatgaaggctagtgtcatgcttgagagaaagaaagaatatgcaactatcttggcctttgatgtcaaagtgatgcctgatgcccgcgatctcgcagaagagtccggtgtgaggatctttgtggcagatataatataccatctgtttgatcaatttacagcatacattaagaacctcaaggaagagaagaagaaagaaagcgctgaagaagctgtgttcccttgtgttcttaagattatgccaaactgtgtcttcaacaagaaggacccaatcgttttgggtgttgatgtccttgaaggaatagccaaggtgggaactcctctctgcatacccagtaaagaatttattgatattgggaagattgcctcagttgaaatcaaccacaagcaagttgatatggctacaaaaggccaaaaggttgctattaagattattgcgaacaattctgatgagcagcagaggagcttcggcagacactttgatatggaagatgagcttgtcagccggatatcaagaagatctattgatattttgaaacagaactacagggaggatttgacaactgaagactggaaacttgttgtaaagttgaaatcaatattgaagatacaatgaaaagccccctcccctaacacacctgcccatgaatttgggagttgtggttctgtggcgccacacctatctctagttctctacaccggagttccccagggagggttaccaattttgatacggtttgatttttgtaatttgctcggaaggcgcttcattttacaaccacattccgtaataacataatattttgtgtttgtttctgtacttttcatgaactctgaagcctctcaccaacgaattgtgtaatatactacatgctatggaaaatctgtgctgtttacgacaaaaaaaaaaaaaaaaaaaaaaaaaaaaaaaaaaaaaaaaaaaaaaaaaaaaaagaaaaaaaaaaaaaaaaaaggcccctatgggggggccttgccttggctagtttgggaactcagatcctctctaggattgaagggaacgagggggaagggaaattagtttgtttcccgggattttccttagtctcgagggtaccccccccgttctcaaactagccctaaaagttgtggctttacatcttgccaagaagagattaatagcttgccaagaagagattatagatccccc

SEQ ID NO: 155092 - DNA, 183 bp, Zea mays
  Clone ID: MRT4577_73026C.1
ccttgcatcttgggggacagaaattatggggagacaccggatataacctctatacgattccatacccgtacaatacatctgcttctgttcaaaatatagaaccatcaccctaggaagtgtatctgccttccactttaaaatatggactacgttcagtaagctataactttttgtgtcctaaat

SEQ ID NO: 155093 - DNA, 884 bp, Zea mays
  unsure (1)..(884): unsure at all n locations
  Clone ID: MRT4577_73027C.1
ntgtgctcgtggnatcaggaatctcaatctcaggttgagggaactctgatgagnaaaactgaacctgaccaggagactgaagagccaaaaccagaagaggacgaggaagatgaggatgagtgggatgcaaagagctgggatgatattgatgtcaacttgcctaagataagcgcttttgatgaggaagaggcaaagcctattgtcaagaaggctgagcctgtccagaagcaggagaataataaagctcaacctgcaattcctgctgccaaaaagcttgttccttctgttgcagactctaaaaagagtgaaactgatgatgtgggtgccagtaatggaaatgttaagaggcacaaaaagaaaggacctgtgaaagaggataactctaagagtggtagtgacctcagatcaccaatctgctgcatccttgggcacgtcgatactggaaagacaaagctactagattgtattaggcgcactaatgtccaagaaggcgaagctgggggtattacccaacagatcggagcaacatacttccctactgaaaacattagagagagaactagggagttgaaagctgatgctacactcaaggttccaggcctgcttgttattgatacccctgggcatgagtcgttcagtaatctgcgttcgagaggttcaagtttgtgtgatattgccattttagttgttgacatcatgcatgggcttgaacctcagacaattgaatccctgaatcttttgaagagtcgagatgcagtgttcattggtgctttgaataaggttgatcgtctctatggttggaagaaatgtccaaatgctcctattgtgaaggctttaaacaacaaatgaagatgttaagagggagttcaatatgagactcacag

SEQ ID NO: 155094 - DNA, 879 bp, Zea mays
  unsure (1)..(879): unsure at all n locations
  Clone ID: MRT4577_73028C.1
ctcgaggccggccgcccaggcctatgccgtccgcaacctctcctcgagtgcgcgccgtgcggccgaggttgagctcaccattgatggcaagaaggtgtcgattgaggccggctcctctctcattcaagcctgcgaaaaggccggctccgttgtcccccgctactgctaccacgagaaacttatgattgccggaaactgcagaatgtgtctggtcgaagttgagcgcgcgcccaagcccgtggcttcttgcgcgtggccggtgcagcccggcatggtggttaagacagacagcccacaggtacacaaggcacgagagggcgtgatggaattcctcctggcaaaccacccgctcgactgccctgtttgcgaccagggtggcgagtgtgacttgcaagatcagagcatgagatacggtgcggacagaggacgtttccacgagatgactggcaagcgtgcagttgaggacaagaacatcggccctctggtcaagacatccatgaaccgttgcattcactgcacacgttgtattcgtttcgcaaacgacattgccggtgctcccgagcttggcagcgctggtcgtggcaacagcatcgagatcggcacttacctcgagactgctcttgacactgagctttccggaaacgttattgacctgtgccccgttggtgctcttctttctaagccatacgcatacaaggccaggccttgngaactttaccacatcgagactgttgacgtgcttgacggtattggcagcaacatccgcgcagatgtcaggggtcttcaggtcatgcgtattctcccagacttacgacgacgtcaacgaggagtggatcacgacaagacagattccctgcgacggtctcagcacacacgtct

SEQ ID NO: 155095 - DNA, 312 bp, Zea mays
  Clone ID: MRT4577_73029C.1
agcccacgcgtccgcctacgcgtcggaggacgcgtgggaaactgaataagaatgtacagttgacacatcaattagaacgttcagtgtcaaagttttttttattattccagcaggattcctgccatcggaaacagtacatttgacgtctgactaaaatctgcaatttcaccatggttttttaagagctattggattgagaatgttttaatgccgtatacgacacctgtcaagccgggtctcatacttctctggatttggcaatcacggatctgcaggtccatcacatggatgtgcatccgctaaaaattctac

SEQ ID NO: 155096 - DNA, 2180 bp, Zea mays
  Clone ID: MRT4577_7302C.1
cgaggccggccggggttccttttcctctctcctgatctcagccgtgtagcctctccaccgcgcccacttcttatactgccagcgtctgctccctctcgcggaggcctcgctctggttggaaggtttggagaaactccccggctcgaggagatcgtgacattgagaggacgatgggagggcgcgcgctcctcctcctcctcctggtctcggcgttggtctttcagatccacgcctccgacccgctgctgtacgagccgttcgatgaggactttgaggggagatgggtcgtctccaagaaggatgaataccaaggtgtgtggaggcatgccaagagtgatggtcatgaggactatggcctccttgttagtgagaaggcaaggaaatacgccataatcaaggagcttgatgagccagttaccttgaaggatgggacagtggtcctgcagtttgaagtgagacttcagaatggccttgaatgcggaggtgcctacattaagtacatccgccctcaggatgctggatgggatgccaaggagtttgataatgagactccatacactattatgtttggtccagataagtgtggatcaaccaacaaggttcatttcatccttaagcacaagaatcctaagactggaaagtatgttgagcatcatctcaaattcccaccatctgtcccatatgacaagctctctcatgtctacacggctatcttgaagccagacaatgaggtcaaaattttggtagatggggaagaaaagaagaaggcgaacttcctttctgctgatgattttgagccagcacttatcccatccaagaccattcctgaccctgatgacaagaagccggaggactgggatgagagagctaaaattcctgatccagatgcagtaaagcctgatgactgggatgaggatgccccgatggaaattgtggatgatgaagccaccaagcctgagggatggttggatgatgaacctgaggagattgatgatcctgaggcagccaagcctgaggactgggacgatgaggaggatggtgaatgggaggcgccaaagattgacaaccccaagtgtgaagaggcacctggatgtggcgagtggaagaggccaatgaagcagaatcctgcttacaagggcaagtggcatgcacctatgattgacaaccccaactacaagggaatctggaagcctcaggagatccccaaccctgagtactttgagcttgacaagcctgactttgatccaattgctgctattgggattgagatctggacaatgcaggatggcatcctgtttgacaatatcttgattgctgacgatgagaaggttgccacctccattctggagaagacctggaagcccaagtatgatgttgagaaggaaaaggagaaggctgaggaggaggctgctgctggtgcagatggtctttctgagttccagaagaagatttttgacgtcctgtacaagattgctgatgttccgttcttggcaccctacaaaaccaagatcattgatgttatcgagaagggagagaagcagcccaacatcactattggcattctggtctccgttgtcgtcgtgttcgttaccgttctcttcaagatcctgtttggaggcaagaagccggtggcacctgtgaaacctgcagctgaggcgaagaagcccaaggccacagtgaccgacggtgctggaagcagtggcgacaaggatgagaaagaggacgaaaaggaggagacagcaggcccacgtcggaggacccgaagggagacatagagacctatttttgatgtgtttggatgttctggcgcctgcttattttgaggactcttaatatttctgagtgtataataggaacttgtgtcacctctgcggcttccctgctgcttatttgtttttacatggttagaccaggaaccttcacgagctgtagaatttagttcttgttggtcatttgtgtgtgtgcctgacgggtataatcccttgttcaatcagatagaggtgatggtttttttttctcgtagatcacaggaaggaatacttcatagagttctcgttaaattctggacgccttttgttttacacaattcccttgtatcatagaatagtgagcgagcgtatattcttacaacagtttttgtcctttaatagaaaaatacaggttatttatttatgaataca

SEQ ID NO: 155097 - DNA, 1334 bp, Zea mays
  Clone ID: MRT4577_73030C.1
cctgcaggtagactctagaaggaagaggcaaagattttcaggaagatgcagaaggtgtggtatggttcaaggacagtttgtgtgttcccaatgtccagtccatttgggagttgatcctcaaggaagctcatgagacatcttattccatacaccctggaagtgagaagatgtatcaggatctaaagaagaaattctggtggtatggaatgaaaagggagatcgcagagcatgtggctatatgtgatagttgtcagaggatcaaggtagagcatcagaagccagctggattgttgtagccgttgcgaatccctcagtggaaatgggatgaaatcgggatggacttcatagtcgagttgcctcgcactcgagccggctacgattccatttgggtagtggtggatcgattgaccaagtcagcccacttcatacttgtcaagactagctacaacagtgcagtattggcagagttgtacatgtctcggatcgtttgtcgtcatggtgtgccaaagaagatagtgtcagacagaggaacacagttcacctctcaattctggcagcagttgcatgaagctttgggtacacatttgaattttagttcaacttatcacccgcagacagacgatcagactaaaagaactaatcaagtcctcgaagatatgttgagagcctcctggagaaaagcaagtgtttgggccagatattctgctcgaagccgaagagaacatcaagatggttcgggagaatctaaagatagtgttgggcctatgcttcgtcgccgaaggtcttctaggaagaagcgaccttcggctgaagctgtttgtcatttgagaacaagtccccaacagatagcgcaatcaaggcagccaagttatgcagacacaagaaggagagacctgagttttgaagtcggagattttgtttacctgaaggtatcgcctatcagaggagtcagaaggttcggagtcaaaggcaagctagcaccccgatatgttggtccgtatcaaattctcgtgaagcgtggagaagtggcctatcagttcagtttgccagaagatttgtcagcagtgtatgatgtctttcatatgtctcagttgaagaagtgtttgtgtgtgccacagaaacagttgccagtggaaggtctagaagtccaagaagaattgacctacatagagaagccaacacagattcttgagactacagacagggtcacctggaggaacactatcagaatgtgcaaagttaggtggggtcaccactctgaggaagaagcaacttgggagcgtgaagatgatctgatggccaagtatcccgaactctttgttggccaaccttga

SEQ ID NO: 155098 - DNA, 1007 bp, Zea mays
  Clone ID: MRT4577_73031C.1
cattgggaccctcgaggccggccgggaattcggcacgaggcccaggcgaacaggatatcgagcctctcctcgtttcggtcctcctcgcttgcgcgccgccgccgactatggccgccgccgaggtggagcctcgccccaacccgcctcctaccatggcttccgacctccccaacggaagtaaaaccaagtcgcgggagtccgaccggcgccgccgccgccgcaaggtcaagagaacaagtccgccgctgatgttctagctccgacgccaaggagaacgcagatcctaaccccgagcccatggtggaggtggagatagagtatgtactggagaaggccgagctggacgaccctctcctcgatgacttcaagaccatcttcgaaaagttcacctttaaggacgctgccgcagcagcggccgaggatgataagaaagatgagggtgtctctgacgccacaaagaaggggttattggatgacgacgacgaagaagatgatgcacatgaggcaaacaagaagaaagatggagggctgtccaacaaaaagaagaagctggagcgcagaatgaagattgcagacctcaaacagatatgcaacagacctgacgttgtagaggtctgggatgcaactgctgcagatccaaaattgcttgtttatctcaaggcatacaaaaacacagtacctgtccctaggcactggtctcaaaagcggaagttcttgcagggatggctgtaacaactggggcggctggtcttgctggtgttatacttgagggaagagaggtattgagaagcagcctttccagcttcctgacttcatagctgcaactggaatagaaaagataagacaggcgtatattgagaaagaggatagcaagaagttgaaacagaaacagcgggagcgcatgcagcccaaaatgggcaaaatggatatagattatcaggttttgcatgatgcgttcttcaatatcagacaaacccaattgtctagtcatgtgatctgcttatgaa

SEQ ID NO: 155099 - DNA, 189 bp, Zea mays
  unsure (1)..(189): unsure at all n locations
  Clone ID: MRT4577_73032C.1
tccatcatcccccttgcaagtatagtctcggcggctctagaagacgatgtgcaaggacgacgtgatcgaaagcggcgctggcgggggngagttctntgnaaaggactgcacggtttttgctttgaggctgatattaagaaggtgctgtgagtgataatgaatagcttgtattgaatcaaggatatgtta

SEQ ID NO: 155100 - DNA, 463 bp, Zea mays
  Clone ID: MRT4577_73033C.1
ggccaacaaaaaaacaaaggggccgatggattcattaaaaccaaaactttattaggaccccgcataaattatggggcaaaccacaaaggaaaagggggggcgccttacgggcttattccctatatagaaggggggagaggggtaggggggatttcccaaaaatgaagaaataacagtaggggggaagggcagcggaaaccccacagggggtggggcggaaactgggcaactgggactgggagagcccccccaggggcgggatgttctgccccaatatcaaggccaagggggtgagaccctgggctgccaaaaactggtggtgctgctgcaaaaaaaatggctcaaacagggtgttgttggggggagcggcaccccaaagctggaaaaatatttggaattgttgggcaaaggactgcacctccaacaaccccaactggtgggggcaacactgttgccgggagcg

SEQ ID NO: 155101 - DNA, 565 bp, Zea mays
  unsure (1)..(565): unsure at all n locations
  Clone ID: MRT4577_73034C.1
attcccgggctcgacccacgcgtccgattgcgtttctttgactgttgagcacccatagtattgttggaaatccctcacaggtggaggtaacactgttcgatgtggaaatcctcgacgttttctgcacccaaaaaaaggacaaggtcattgctgaaaaataccaggattctgggttttctgaagtgttatgattttgatttagacagtaaaatacccaagaagttggaggtttattgctgccttgaactgttctgggatctccatcaatgctgaaagagcaaattctgcctcctttttgctggcaggaacaggtcttgacatgatctctgtgaagttcacaaactgcatcgcactgtcatattagtatttcccatgattatgctaaatatgggctgtcacttaacccattaacaacagagcatacctggaagtttgtcgaacgcacgagaaggggatnngttgtcatcgaaattgcctcatcatatncccatgngcccatnncgccaactccaacanagcacaattgacaaagggggtagtcactgaaaaaaaaaagtcatgtttg

SEQ ID NO: 155102 - DNA, 463 bp, Zea mays
  unsure (1)..(463): unsure at all n locations
  Clone ID: MRT4577_73035C.1
canctacactatctatctccggctcccctttccctctccttccttccttcctagtcctaatcctagctagctagctagggttccccgccgccgccgccgccgccggccaacgagatccagccagcgagatccgaccgagcgacgcctgcaggcagaggattaggaagatcgacgccgccggaacccgtctctgcctccgctggttcaggttcaggttcagccaggagacagacagagccatgtcgcactccaaccaagtaaggtacaccgcgcgctccatcactcccccggncgacagggacagcggctccaagtcgccccctcccaggaggcgcgccgcttccaagtcgccacccctgccccctcctcccccttttcctcccaagggggtgcgcaccatctccaggtcgccaccacctagtagtacaagacgcagcgtctcgaggtcccctccgccaaagag

SEQ ID NO: 155103 - DNA, 390 bp, Zea mays
  Clone ID: MRT4577_73036C.1
tttttgtttttttttttttttggaacatgttcataccgcagtcttgattcgggcgcatagaatacaccgcttgtatttaggtccaaaagaaaagaccattgtccccatagacacttggcatcacacgttgtagggtttgttcctggtgcgtttcacttgacgacacagactttatatacaacaccgggtatcagcctgtggtatccagctacagggggggtcgggtaacttaattaagccatgcatgcagcgtcatgtgcaccggcagtgacctagcttgcccccaacggaagccatgtcaggtgctcgcgtcaagcaataggtgggctatgtcgcgcttttgagccttgggttggtcatcatcaccagtaaccgccacaggaacaggaa

SEQ ID NO: 155104 - DNA, 541 bp, Zea mays
  Clone ID: MRT4577_73037C.1
acaagcttttttttttttttttttttttttttttttgttttttttttttttttgttttttttttttttttttttttttttttttttttttttttttttttttttttttttaaaaatttccctttttctttaaaaatctaaggggggggtaaatttaaataatggatttttatattggattccattttgaaaccaattttggcttaaaaatgcacaaaactggttcccctgaagaaaaagatttccaaacacaaagggcccaaaaaaaaaaaccagaaacaaaaaggggaaaacccggggggcccaataaaaaaacaaaaaaacaataaaaggagagggataaatgaacgattcaaaaccaggaaaaagggggaaccaattttaaaaaataattggccaaaaagctgaaaaaaacggttttattattggggccgtttccaataactttatcaaaaaaaaaaaaggctggggcccggggtttcagggaaccggaagacccgaaaaaaaagagctcttaaaaaaaggccaaaaaaaagggaaaa

SEQ ID NO: 155105 - DNA, 506 bp, Zea mays
  Clone ID: MRT4577_73038C.1
accgctatgggtaggggcgtgagcgggttaatagatggaaattattccggtattcccaatgcttgggcattcccttatttttaatctgctaggatatctcctatggcgagcagagtagaattcttgagcgacatcgacgacctatatctccccttttatgaagatctttagttagtatgggaccgcagaaagactgattggatggacgcggattggatcctttaactataactcgatgacctattactaaatgtacgaatttcaaaaataatgccttcgatcggatgggagtagttcgatcattcataagatttacaacataatgtttataaagcacagttgctagttatgaactgctatggagcctattcctcttcttttttttaggatcccactcttataatacaacaatagggatgggagttgagccaagtcgatccaccatggaagggaggttcatggccaagggcatagatgttagagtccgagtcattttggaccgtatt

SEQ ID NO: 155106 - DNA, 656 bp, Zea mays
  Clone ID: MRT4577_73039C.1
cgccgccgcggctagccatggatataggcgctcccgcccgaccgtgcctaccggtccgcctgttgctggggttgctcaccgtcctcgtggaccctcacagcgcgctccagtgccgaagtcatcaccctcaccggacaggaccttttccgacaagataaaggacaaggacacggtgcggtttgtgcaggggggggtcccctggtgtaaacactggcaacgcatgcttctcacaggggattaaatggatgctggcttatcatggagagatctttctactgccgcgaacatgatacgctaagcgtatcgcgtgtgcaggaagaaccttggaacactatgggcaggacctgagaaaggctatggaaggtgcgactgaaattgaaactggacaagaggactgcggcgccagcaaacctggatgcggaaaggtcgatttacattcctacccaacattcaagggctaatatgaaggcgaagaagtactcaaatataaaggacctacggatgcggaatcgctatagaacttcctgctgaatgaagctgtcaaagcacgtgaggcaaagcttaaagctgattgacgcaggggagtttcatcctgcatgtggcgaccacaaggaacaatgcttcgcaacattgggttctatcctgtgatttacaaa

SEQ ID NO: 155107 - DNA, 369 bp, Zea mays
  Clone ID: MRT4577_7303C.1
ggaacaaaaaaaagggccaaaggggggccccgaacaatttatcacaaagagcaggggggaaacccacagcagcagcccccaaggggggggccccaaccgggggatccccaaaaaaacccaaccattaagcccccgggaacaaattataaaccgggtactaaaaaggaatggccctcggaaccctgggaattgggacccttggggccgacttcctaaaaggcctttaaaaaagcagccaagtccccaggggcctgggaaaaacaacccttttccaaaccctcaccgacgtaccagggaaaaaacccccgctgggggaaaaaaagggcaaacttgggaacgaggcgcgaaaacacctaaaaaacggggggg

SEQ ID NO: 155108 - DNA, 960 bp, Zea mays
  unsure (1)..(960): unsure at all n locations
  Clone ID: MRT4577_73040C.1
tcaccccgcgctcgccagttcgagcgggggcgagaaaaacactctatccattcccgttccagtctagtgtagtagactagagaaacaaaagcctcgcctccattccgttactcctagtcgtgatagatagatagatagatcccgccccggcccagcccctccgatcctcaagagccaccgccgcacgccgaccgacgatcaccgccgcctccatccacctcccgccaccaccgccttccctccctcctccgtctttgccaatccgtcgagtttccccggagtttccgccaccctctttcgagctttttcttgccggttaatgctggtcctggggatgggcggcggcgtcttctcttgtccggtggcggcgatctgccgatgtggcggccgcgtgggcggcgggaggaggagcacctgagactctgccgccgctctgccgccgtgttgccttccctttgaccgaaaggtgccgctcctttccggaaagggggaatttgtttctgctcttctggcgacttcctttgcgccgattccattccttgttgcctcgctaaatctcgctcggatttcttctccttacccttggactccctcccggccgcagatcctttgcctccctgcccgcccattcttgctctgcttcttcagccgctctgcaactgcaaccttgagttcttgctgagtttgttggtcaagaagatcacatctgggagaggatggcgtcgagatcctactccaacctcttggagctcgccggcggggctgaccgcgaccagccgctgccgtccctcgggcagccgcggataccgcgngtgatgacggcgtctggcattgtgcccggncttgaccgctccgacgncccagctgacgccgacgccgacgccgnctcgntgggctccgacgaccaacccgaccagccgncgcgggagcgcaccatcatcgtgggcaacagctcccatc

SEQ ID NO: 155109 - DNA, 365 bp, Zea mays
  Clone ID: MRT4577_73041C.1
gggcccccacaattttccattttatttaccaccaaacggggtctcccaaggggcaaaataaaaatgggtttcttacatgggtaagaagagcaatcttctgcacttggatccaacaaattcccctggcttggaacaaaaaaacttagaattgggggggggccctaacattaagtacaattccccccattttaacaaaattttgggcgtgtttaaaaagctttgcacaaggtattaaattcatgggaaaacccccacataagaaaggtgggagggttcaagaaaatcaaattggctaaaaaccggcgacctctggtttcggccgcctcaaaaaatagcgccagcttttaaaaagaacccgctgaaaa

SEQ ID NO: 155110 - DNA, 896 bp, Zea mays
  Clone ID: MRT4577_73042C.1
gaggggccggccgggccgggaaaaaaattacaaaaaaaaaaaaaaaaaaaaaaatcagacccgcgctcgccagctcgagcgagggcgagaaaaatactctatccattccattccagtctagtctactccagtagagaagcaaaagcctcgcctccattccgttacttgtagtcgtgatagatagatcccaccccggcccagcccctccgatcctcaagagccaccgccgcacgccgaccgacgatcagccccgcctcctcctgccaccaccgcctttcctccctcctccgccgcgtccgtcttcgccaatccgccgagtttccccggagtttccgccaccctctttcgaaaatttgttgctggttaatgctggtcctggggatgggcggcggcgtcttctcttgtccggtggcggcgatctgtcgatgtggcggtcgcgtgggcggcgggaggaggagcacctgagacggtgccgctctgccgccgtgttccgttccctttgaccgaaaggtgccgctcctttccggaaaggggaaatttgtttctgcgcttctggcgacttcctttgcgccgattccattccttgttgcctcgctaaatctcgcccggatttcctcttccccttggactccatcccggtcgcagatccttttcctccctgcccgcccattcttgctctgctccgtcactcgctctgcaactgcaacctcgagttcttgctgagtttgttggtcaagaagatcacatctgggagaggatggcgtcgagatcctactccaacctcttggagctcgccggcggcgctgaccgcgaccagccgctggcgtccctcgggcagccacgcataccgcggggtgatgacggcgtctggcattgtgccccggcctgaccgctcc

SEQ ID NO: 155111 - DNA, 337 bp, Zea mays
  Clone ID: MRT4577_73043C.1
cctcgaggccggccgggaaatgtatttatattcgtctaccttgttccatatctgttttgcttcgagctctagattctagagaggcgtatagttgctaggaccaccgcagggagcagtgtcagataggccgagcgagagagagagatggacgtggagaggaaggtggtggaggcggacgactacggccgcgtcagaacaggtacggtgtggacggcgacaacgcacgccatcaccgtcgtgatacgctccggagtgctgccgctgccctggaccgtggcgcagatgggctgggtcctcggccccgtcggcctcctcacatgcgactacatcacctact

SEQ ID NO: 155112 - DNA, 333 bp, Zea mays
  Clone ID: MRT4577_73044C.1
gagagaactatgtgctgtaccatagccgctggctagcttgctcgttgattctttctgcgtcgctttttgattcagttcccctcccacactaccttcggtccttctccctcttttgttaatcctccctattcctcattattgagggggggggggtgggtttcctagggctccctcccccctctcctctcctcttacctcccctgccctgtcccttaattcttcattcatcactcctccaaagccctttctccgtttgcgcgctctcttctttcctctttcactctctctctgtgctatcccttctatctcttgcttgccgtttccgctcactca

SEQ ID NO: 155113 - DNA, 242 bp, Zea mays
  Clone ID: MRT4577_73045C.1
gtctccatccacgggggaaacgtggcacgacagctatgcttggatgggcgcgctttccgacgccgccgccatgccccacatggacctacacatggaggctgaggagaatacgccgagcctgcctgccgctgggcgctgaccgctgcccggagctcactcgagaggttctgctgctggactggacccgcgtcgtgggcctgctgctacgcagcggcaggcacaacccggttgcgcgtcgcggc

SEQ ID NO: 155114 - DNA, 447 bp, Zea mays
  Clone ID: MRT4577_73046C.1
taccggttcggaattcccggctcgacccactcgtccgcccactcgtccgcccacgcgtccgcgaactcgtgggaaaaaaaaaaaaaaaaaaagaagaaatattaaaaaaaaaaaaaaaaaaaaaaaaaaaaaaaaaaaaaaaaaaaaaaaaaaaaaaaaaaaaaaaaaaaaaaaaaaaaaaaaaaaaaaaaaaaaaggaccaccattttaaagaatccaatttaactttcccttgcttacaacataaaactttttttatatcatccccaaaattaaattaacttcccgtattttaaaaaaatactaatttgaaaaaccctgggataaccaaattaaatcactttgctaaaaatccccttttcacaaattggcgtattacaaaaaagcccccaaccaatcccctttccaaaaaattgccaaccttaaattgcaaattgaaccccccct

SEQ ID NO: 155115 - DNA, 235 bp, Zea mays
  Clone ID: MRT4577_73047C.1
cacgactctttccctactacccacaccccacgagatcttctatccccgcccaaatcccactacgccgtcggggttcatattcggcaaggacctgacccataaccagatcccctatatgcgggaggccttctcactgttcgacaccgacggtgacagtctcatcgcgccctttgagctattcgtcctcatacgcatccttttctgtaaccccacgcaagctcagttcctgtacatc

SEQ ID NO: 155116 - DNA, 414 bp, Zea mays
  Clone ID: MRT4577_73048C.1
atggctaccacctatattgatgaaattgccactcatcctcagtaacttatgctgagagggtacattcaggctggtaaaatggttgctcagctgaagctttgcacacttactgactgaattgcacactcacgtgctatatgagaccctattaaatggcttaatagaagatcatgctcttctactccgtactaaggaaaacatttaggacctgcccaatttccgttgacaaattcatacatactgtatgaccctatgtatgtgacacattgacagcactccaaagtgacattcgagagataccatgtgcaactttctaatggctatgccctagttctggactgacacacctcacacattgctgtcaagtttgatgagctccgtaccaagattgatactctatccggcacggagctg

SEQ ID NO: 155117 - DNA, 277 bp, Zea mays
  Clone ID: MRT4577_73049C.1
caggtttgacctacagccgcccgggagaagatggctgccccagcagtgtccgggctctcccggcaggtgcgatgcttcagtacctctgtggtcagaccatttgccaagcttgtgaggcctcctgttcaggtatacggtattgaaggtcgctatgccacagctctttattctgctgcatcaaaacagaataagctggagcaagtagaaaaggagttgttgagagtagcacaaatcctgaaggaacccaaagtggctgcttctgttttgaatccctatg

SEQ ID NO: 155118 - DNA, 410 bp, Zea mays
  unsure (1)..(410): unsure at all n locations
  Clone ID: MRT4577_7304C.1
ccccccanaacccccgggaccacccacgcgactaatcccccgccactggcgtggccccggggggcgcaggcggcgcgacacgggacccccacctcccgccccctaaagcaagcgggcaatcagaactccgatcacccgcacgccggcacgccagcggcgactacgcaaccatgaactccatcgagcctttcaaccggccggggaggctggcggcccgcgcctactacgacggcaccatgaagggcgacaaccagcccaagactccccgcggggacaaccgcggcatggcccccgacgaccaggacgcgctcaccaggcagcaaaaaacgcaaaagcacataatgctgcagctgctaatgacggccaacccaacgctaaggagggagaagagaaagcaaagccgcacacac

SEQ ID NO: 155119 - DNA, 122 bp, Zea mays
  Clone ID: MRT4577_73050C.1
aaaacagagggaatatcaaatgtaatagaatgttgacatgaatgcactcccctcattgattgaagccacgtgtgttgtgagttcccctcacctatcaaaaacagaacacgggcaaactaaac

SEQ ID NO: 155120 - DNA, 250 bp, Zea mays
  Clone ID: MRT4577_73051C.1
ttgaattctattgtttatttacagtagctacatctactaccattcagacgggtggcttttgttttttctcataccttctttatacaaccacaatttgttatccttctacctgtacccttgtgcctaacttttggtactcctattacaactgctacaattgtttgacaatcaaacaacttatcttttacaaacctagcatcgtttctaccaacaacccattattttttgtgtccaattttagatttcttat

SEQ ID NO: 155121 - DNA, 263 bp, Zea mays
  Clone ID: MRT4577_73052C.1
cgaaggacatggctagttataagtttgggggtggtgggaaaagggatatctatgtttttaagtgggtaagatctgataggagataaggattaagtatatttcaaaatagatagaaaaagactgcatagcaaattagagcccaagattagataatcaaaaaaaaaaaaaaaaaaaaaaaaaaaaaaaaaaaaaaaaaaagtgaattgttaagggggggccgcgcgagatggggcccgccgcccggtaaattttctgggaggggg

SEQ ID NO: 155122 - DNA, 173 bp, Zea mays
  unsure (1)..(173): unsure at all n locations
  Clone ID: MRT4577_73053C.1
tttttgggtaccnctcgggccggccgggacgccactttcctccccgcaccgtggtccgtcgtttaaaatcgactccgcgctaccgagcaccaaacgccaaggcggtgtgcttaccagaggcatgccgaccccaagaaggctacctgcactgctgctggttttcggcgccgcgc

SEQ ID NO: 155123 - DNA, 368 bp, Zea mays
  Clone ID: MRT4577_73054C.1
aaaaaaaaggccaattttttaaaaacaggccccgggggggggggaaaaaatagccggggcccttttaaaacaaaccggttacaaaaggggccacatttttggaaaaagggaatccataactttaaccccccaaggtcccaagtttgccttggggggggaaaaaaagggggggtacaagggtttggagaaaccaaaaatggttggccccccccccgaaaagggggggtttttgcctttaaaaattttaagcccacatggaaaaacaaaaacaaaaccaaaacggggaaaggccaccacccacaaatccgggggaaggttacttcctacaagttggcccccagggaacaggggattattggaaccaaaaa

SEQ ID NO: 155124 - DNA, 245 bp, Zea mays
  Clone ID: MRT4577_73055C.1
ggttggggttttttttttttttttttttttcacatgggaaggcccagcacgcttaaaaacatttagaagaccaatttaaacattaaaacttatcccttaaaaggcttcaggttgggggtttaaacacattcagggttcattttacagagataagggggggcgtttttaagggttaagccttctattccttcttgttttaagattagttgaagcaccgtttctcttttacacttgggtcctgtgtt

SEQ ID NO: 155125 - DNA, 387 bp, Zea mays
  Clone ID: MRT4577_73056C.1
acgcccttttttttttttttttttttttttagaacttgaacatgtataccattataaagtgaatttattatgtttaaaacaataacaaatcacaattcacaattacatgtacatatcataattatatctacatactaccagttggtctaagtcgtgcttaatcgtgacaatcatctaatcgtgtcgtgcttgtactaggcaagcatagtactagacccgtgtcgtaccagcattggcactatatggatcgtgcccgtgcgccgaagcactaaaggcaatggtgtgcttagttccagcccatttagcatggccactcatctatatccacagtttcacaccacgcattgtctacgtaacgcccaatgagctcaatatgcactagttcgt

SEQ ID NO: 155126 - DNA, 456 bp, Zea mays
  Clone ID: MRT4577_73057C.1
aaaacccccccagggggcccatgggttatcccaaaaacatcactaaaataagggggggtaacaaaccagcaacactaggggtttttaaacaaaggggccacaaccctgcctgggttttacagggggggaaaaaaaccgaggggggggcctagtcaagctaaaaaccccctcaggagacccaaaaggtccttacatttaaaaaaaaaaactaagcttaaggtagcttatattttagcaacactaagggtttttaaccaaaaagaacatagccccccctggggattcaccgggagaaaaaaaaggaagggggtccacgggagaaaaaaaaccaaggggttccactggaaaaaaaaaacaaaaagggtttccaaaagggaccggaacaacgcttgggggttccaccactggagaaaaaaaagaaaacagctggggactttttggcaattttactatccc

SEQ ID NO: 155127 - DNA, 260 bp, Zea mays
  Clone ID: MRT4577_73058C.1
ctatggcctaaggcttccaatccaattggaacacacggttacacgaaaggcgctttctcgtgagcgcaagcaccatattaccgccaccaacatcgctcacaaccggaaaacaagcaaaaaaaggggatagccgcaggctgaaacgcacagggcgctgctgctcacggagcccaagcacaacaaggatgcctggcacattaaccagactcaaaggcggtaagcttgcctggaccatttctgggagccacctgccgaccgag

SEQ ID NO: 155128 - DNA, 674 bp, Zea mays
  Clone ID: MRT4577_73059C.1
ttactaaacatggagatagatatctaattctgaatagcgagaagaaggaagggaactgggtccggttgtccatagctgctagtgaaccgcagctgcatggccatctctcgccctacagggaatgcacctgaccactacgccaacaagtgaggagttgtctgcaatggctccactctggccaggcattctctatccacgacaatagctaggcggacagtgtaaccttacactttactacacatagctgtacaatcactgacttcactccggattgcatcctgcagagtcactgatcaatctctgatacggactagtttactcctgtgacttcaacttcagggccttcccttaagcacaactcttaatggaggttgccaagcaacaacaacgacgctaactctctggaactactgctgacacgatgattgggaaaggatactgatggatgctttaccaaaatgtcgtattagaatatcgcaccgatatgtacaccaacacaacaagcgagattggcgcaaggataatagggcatgtaggcatataagtactctatcacatgtgccagaagactgccgaaaaaaccaaagaaaggggcctaaacccctatggcatcaagtactacagacaccacagcaacttgatggtacaaaagggcatatagtcatatgaaacga

SEQ ID NO: 155129 - DNA, 406 bp, Zea mays
  Clone ID: MRT4577_7305C.1
ggggggcccaaccccgcaaaatttttttattaaccgggagccataaaattgttttgtttcccccccagaaatcccaaaaacgggcgggccaaaaatccaccaaaaaacccctagggcaaattttttggaagggccccccccaaaaaaaactttcaggggaaaaaaaacctttgtaaccctgtaaggggttggaggaaaaccttaacccaccaaaagattttgggaaaacttcttgaccacaaaaactacggttacggggggggaaacccaaatattggtggtaaggatttacaaaatttcccaaaaaccaattggggggcccattaaaaaaggttgaaaaattgaagggggggagctttttctcaacacgagggggccccccccccactggtttaatggggggggg

SEQ ID NO: 155130 - DNA, 1767 bp, Zea mays
  Clone ID: MRT4577_73060C.1
ttgtttttccaccgcggtggcggccgcccttttttttttttttttgaaactcagaggtctatcatctttaacaaaactagacaaattaagtgtacttattgatttgccacctatctatttttaatttgagcgcatacttccagtaataggagcttataatgagataaagaatcattgccatgctgccatgactgttgccatctatctgcaccaataccctcctgcttttccttcgaaataattttggcacctgccccccaccctttccccttccaacgccaacctatgcatactacacagtgctaattatatatagctgtcactaattatttgcttgcaaagttgcatgcatgcatatatatgagtataggtgccacacatacacacggcctcaattaatcattctctcttctgcacctgatccagcatgtatgcatgtcttagaagagaccaccggtaaacctattatcatatccatcatcgtacgtcttttcccttgcaaaacatccttcgattgctttgggccgcatcatgacttcttgctttccgtctcagcaggctacttagcttgctactaaaactggacgatcatcaccatctgtacaaaacttagtttgataagaacagatgagccaggttgttgctttgctttagcttcagaacactctttgcatgaggttgtttgtttgtctaccggaatgtgcctccaaatgtagggtgccagaactccggtgtctcggccgccacagtgtatgtgctcgccactgggacaaggcacagtccccggctccgcaggtcttgcttcgtgtcgccgttatccttggaatcctcagagcccttgtgctggaattgcttcatggggatcccatttttcaagtagggagagctcagtgactttccaaaaggcgagacgagttgctggagcgcagtgattctgtcccctagcttctctttcctcaccttcgccgtcggagagttagcgttggagctgcggctattgggcttagccgcctgcagggcctgcaagagaaggtgagacggcagcgggccaccgaaaggcaggtaactactgccggacaagtactgcatcggagcgccgacggcgacgccgtcgccttgcgtaggcgtagacgcgggcaccgaggtcctgagcagctgggaaaactgcatcgacgccgcggcggcgtcgtagctcaccgaggactcgctgtctccgtacatcaaaatgttgtgcaccgccgccgtggcgtcgaatagagcttgagcttgcgatggctccgtgccgccgtacggcgacggcgctagctgcgcctggtcggccaagaagccggcacccatgtccatgtggtccctgattaatggatcgttcgtcgcggagggttcttggagcacggcttggaagctggcatcgctcctcccgctcaagaaggtttgcgtccagtccaggtgtggatcaccgagcgaggaggcggcatcagacagaggctgatgggtggagtttctgtaagggtcctggaaggttacggagctcgtcgactcaacggctgcggtggggaaggtgctgccgcaggccaccctacccgtgaccgtgagcggcggcggcgcggcggccgagcacgccgacgtgccgtgactcctgtgagaggcactgccccaccactgttcggccatggatcggacggagcgacggaaaatctccctggctcttcattcttgcggtgcttgcttcgctcgaggtgtgtggcagaaaggtgggcgacagcaacg

SEQ ID NO: 155131 - DNA, 339 bp, Zea mays
  unsure (1)..(339): unsure at all n locations
  Clone ID: MRT4577_73061C.1
atttaccaagatttttcttttgtatttcttgccatcccatggaagctgagctaactcaatcggctaatggtgtggatgtacactcagatcacccaggttcaagtccttgtcgaggcgactttgggtgcctgttttcttcttaataaagccacctagctcctccttggctgatctagttttttcttgccatcccatttgttgtgcttctgtagttgtcaatacagtgctttaggctattcatgtattnttttaaatgaaccttcatatttgccttgcctacttgaatntcttaacaaatgcagataagcctcatttcagctttagtttatctgcattctg

SEQ ID NO: 155132 - DNA, 400 bp, Zea mays
  Clone ID: MRT4577_73062C.1
caggcccgcctgcgggagccgggcctgagtatattggcgggacgacgagattttttttcggcgggcgaccgtgagtgaggagcaggccccattacgaggaggaatgcgtgcgcgtctggctgatggagaagctttcaaactgatgccaacgttgacaaagcgatataaatcatgaacaacatatgactcttaggcaggatttacaggagaagctcactaaattgggcacatagcggataggggacttaaacatatgggctgaatctaaacttattgagcttgaggatacggcctgacatgacaggggccgtgcatacgcagccatcgcccatgaaagtggtttgactctgaaaggtcacataagcattttgctacgtgggtttggacaagcttaaaagga

SEQ ID NO: 155133 - DNA, 996 bp, Zea mays
  unsure (1)..(996): unsure at all n locations
  Clone ID: MRT4577_73063C.1
cggnagcgtgggcgngagcgtgggcgngagcggaacaaggtatcctcacgaaactggccggcgcggtgaggatcatggtcagcggcgccatagccaagatccaaggcgactcactgttcccgcacacgccgagcgccgcaggtggcgtccacccgctgacacgcgacgccatgacctgcgtcgagctgctggcgaggcaccgcaccacgctcgatctgatcctcgcgggcgccgacgagcgcggctccctcgccggcgtcgtctcggacctgatcgcgggcctggaacgcaacctccagaggagattcgctgtcgcctgcgcggacgcagggggctcgcggcacctcttcctggcgaacaacatcagcttcgtgctgagccgcgtcgcggacaacgacggcgtggcttccctgctcggggacgcgtgggcggcgcggcgccggagccgggtcgagcagcacgtagcgagctacgccgcgtcgtcgtggggccccgtcgtcgctctcctggacacgaccgcgtgtggcagaggcaagtcggcgaaagttctggcggagttcaacgcggcgtttaacagatcgcgcgacagcgagatgtgccgcgaggtcccggaccccgtgctccgagcggtgctgcggaacgccgtgtcggagatggtggtccctgcttactgcgcgttcctgcagaagcaacccaagcttgggaaatctgccaggtacacggcagatgatctggtcgagttgctatcggagttgttcgaaggggaatccacggatggcatcaaaatctagctttcaactttgccaaactgagaacgcttgacttctgtaacactacaaaaaaaagttccatttcttcattgatagcagcagtggtagcagtcagacttctttttttagcatgcacggataatctgaatattccattgtaataaaaaaaagaaaaggggacaatctggacatgaaaatgtgccagaaagcatcgactttccttgtt

SEQ ID NO: 155134 - DNA, 717 bp, Zea mays
  Clone ID: MRT4577_73064C.1
gagtgtctcatatcgcagacaagccccacagaaagtgtgcactcagattggtctctgtgtatttgatggtgcccattctgtcagcaatccaattgaatctgttgttgagaaacagaagcgtggttctgatcttttctgtactgcttgtgagatggctgttgtctggatacagaatcagctccgtgaaaacaagacaaaagaactcattttgaattatgctaatcagctctgtgagcgtctccctagccccaatggcgagtcaactgttgattgccatcagatctcaaagatgccaaatcttgcattcaccatagcaaacaagactttcaccttaacaccagagcagtacatagtgaagctggagcaagcaggacaaactatctgcatcagtgggtttatggcatttgacgtaccgcctcctcgtggtcctctctggatacttggtgatgtttttatgggtgcctaccacactgtttttgacttcggcgagaacaggattggatttgccaaatctgcatgaggactggagttctgcgctttagtagcatgtccagtttgttatcccgaaatctagaagattgtggcatgatatgtgtttgcaaatggagctatgctatgtatggagctccaggacctagagttttatgtaaagggagacgatgaggattagggcttttaacctattctcatcacgttattgtcctgattactatgtgt

SEQ ID NO: 155135 - DNA, 496 bp, Zea mays
  Clone ID: MRT4577_73065C.1
ctcgaggccggccgggccgggaacataactttaataaacactctaaaacaacctctaaccttcaaacaaaatggaaactcaaacctgcaagactgctggctgcaagtgcggtactgattgcaaatgtgatgccggtacctgcggtactcttgaatgctgcaagaactgcgccactaacaaatgcaagaccgctggctgcaattgcggatctgactgtaaatgtgatgccggtacctgtggtactcttgaatgctgcaagacttgcggtaaaggaggtgaaaagtcctgctgctcttaaatctagtgttgtatcagaacacagattgaatagttgttgaattatgtatgacgattatttaactatgactgattgattggtaatctatatatttaaagcctacctgtctctcttctatacttcattgaaaaagtattataactttaaaataaagaaatcctaaaattaaaaaaaaaaaaaaaaaaggcccctagggcc

SEQ ID NO: 155136 - DNA, 522 bp, Zea mays
  Clone ID: MRT4577_73066C.1
cccagctccccgcacatttaagaatttatgaagaatgcataacttctgcaagtatacatggagcctaacatatacttggaaaaagaagctaacttataaactcacgcctaaagtggaaacaattacgaccactccaacactcgcaactttgattgaaggcctgtaccttggtctcaccatctgaaccaactactcaatcaactactggcgagagcacccactaagagagaacttattatagagcaacatctttcaatacaggatggactaaccgcagaggacacagaggaggtcaaattggagggggaagaaagggaaatgtacctttaagccattcttaaggcttttggtgattaattgggcaacacaagggcctaaacgtggatctatgcaaagtggtgtacaaagagcagatcaagtcacaagtatgtttctagacttagtacattgctttatggactgatgtatggactgtaagagctggaaacaggagaaatacaaattgaaaaagaaatggcttta

SEQ ID NO: 155137 - DNA, 798 bp, Zea mays
  Clone ID: MRT4577_73067C.1
tttgaattatgctaatcagctctgtgagcgtctccctagccccaatggcgagtcaactgctgattgccatcagatctcaaagatgccaaatcttgcattcaccatagcaaacaagactttcaccttaacaccagagcagtacatagtgaagctggagcaagcaggacaaactatctgcatcagtgggtttatggcatttgacgtaccgcctcctcgtggtcctctctggatacttggtgatgtttttatgggtgcctaccacactgtttttgacttcggcgagaacaggattggatttgccaaatctgcatgaggactggagttctgcgctttagtagcatgtccagtttgttatcccggtattgtacatatatatgttgccaactggtgtaatctgcagtgtttaatagtatatattcatgcagaaatctagaagattgtggcatgatatgtgtttgcaaatggagctatgctatgtatggagctccaggacctagagttttatgtaaagggagacgatgaggattagggcttttaacctattctcatcacgttattgtcctgattactatgtgtaggtatagttgctgagcttgtttgggagcaagacgattggaggggatgagtggactaaaatttccttcctatcaaaattgaatatgaaaagtattttagctctttcaatcttctccaattctcttgctcccaaacatgtccttatagtttggggtgtgcctctttttgtgttgtagtttggttttgatgttcgatataacataatcttgagtcgtgcaggtt

SEQ ID NO: 155138 - DNA, 499 bp, Zea mays
  Clone ID: MRT4577_73068C.1
ccgggccgggcatcacgccgtacgcctgtccactttccccgtgcttctccgccgacgaggccgggtcccagcgcgaagagaccactactaagatggactgccgctgtgcccggcccgagctctttcggaacatcaccggcgacccgaaagtcagggaaaacaaagtagggagggcagctggtgtgaccgagaaccatgaagaggggagacgaaacgccatggatggcccaagaaggcaagcgcacgagaagactcctgagatcatgcctggcgtaacacagcactcactgaccctaagggaaacacgttgcttgggacatctaacactactaaccattgctactgaggagtatacactatgccgaccaccacagatgcagcgaaccatggtgaaccctgacagctacttgcgagcttggtggctaccaggaaaaccacttacggtggcaaacgtagatgcgaaccagtcgcaagaacaattgcaacagtttctggcagc

SEQ ID NO: 155139 - DNA, 244 bp, Zea mays
  unsure (1)..(244): unsure at all n locations
  Clone ID: MRT4577_73069C.1
ccacgcgtccgtccacgcttactttttctctttttcggacacgtattcccccacactggcgtttcccaaaaacagaaagaagccnctccacacattgcttctaataacaaaactctcataactcaaacttttcctactatcttcaaaatttcagatagaagtcactatttataagggaaaaaatatactaaaattatcatttactcatacaatagtaatttttctaaccataccatctattatc

SEQ ID NO: 155140 - DNA, 250 bp, Zea mays
  Clone ID: MRT4577_7306C.1
gttgtttcggttttgagctgaactgcaaaaagctgattagtacgtaggaaggtggttgacacactacacatacgtcaagcctacattacaaactacaaacacgttgcgagcaatcatgaagatacataaagcataacactactctggaactcttgctctgaaggtagattttgtttgttacgttaagttaactactcagggaatactaaacgatttgaggaatgcactttctagatactacttgaataac

SEQ ID NO: 155141 - DNA, 455 bp, Zea mays
  unsure (1)..(455): unsure at all n locations
  Clone ID: MRT4577_73070C.1
ggggggggtgtggggggtttaattttttttttttttttttttttttttttttttttttttttttttttttttttttttttttttagaacggggaacacagcagccgggatatataaatttttttttttgggncnnaaanaaagggtgaactgggggggggggacaacatgcgggggataattctgcttgccttgaacaaacaaggggaaagttctttcccggcccatttaaaaaaaacacaaatgttacaggctcctttgtccaaaccgaaaaaggggggggggaatctcctcacccaaaactgccaaatttttgggcctggtaaaatttaccccctggttgggatggccccttttagatatttatcagtttcttcattatactgggggaggggaactttgcaaagccgggaaagaacccccttcgacattttttaaaaaattggcactggttaa

SEQ ID NO: 155142 - DNA, 158 bp, Zea mays
  Clone ID: MRT4577_73071C.1
cccacgcattcgcttactcctttgctctttctatgtttgtaccacaaaagcctcaagggtgtttcagaaggttctctgtgacttacaaagatgattatcactataacaaaatactattttcaccactattttctcatcatatcaaccctattttaaat

SEQ ID NO: 155143 - DNA, 287 bp, Zea mays
  Clone ID: MRT4577_73072C.1
cacactagagccgccgccgtcgccgcctctgttttttcgcgcaccgtaccctagccctggtcagcggcggtttcgagctcctccagccataaccttcaagcgtaggaatggcctacgcaacaagcacttacgcgatcacgtcaagtacattcgctgctccaactgctccaagtgctgccccatggataaagctataaagccgctcttgctgaggaacactctatagcatactgccatcagagacgagcacaaggactacgtacatgactaatatgtcctaaccatat

SEQ ID NO: 155144 - DNA, 794 bp, Zea mays
  Clone ID: MRT4577_73073C.1
taagtttataaatttcagatttgccctattcacccccctctaggcgactttcaatgatgtcatcgtcgaatgcggtgcccagaacaacccaagagtcaccgacgttggcgacgaccatgaggtccccctgcttgtcgatggacagcgcggagcagccgttttgcaccgggtccaagcggcagtcgggtccaagcggggggtccaaacgtaggactgtttttagaggtcgaactggcagtcgccaagttttttcttgtcgtcgatgagcgaccccaacgcgagtgcctcctgctaatggtgtttgttcggggttttcaagtaataaacatggattcatgtttggcgttggtttaaaaaatgactcccaagtcagatccatggaaaaaatattccccagtattaatgtcacgcatgcaaaaaggaatttaagttgaaaacattattcaaacaaaaaaaattgcatgcaaggctcttctttaaatactactcccacaatccagaaatataatttaataatctcgttgatacttatttactactacacattgtgcaagggtagcaggtgggctttgggagggacatagtatatgtttttactatatagatatagagataaacacacatgtggtgtagtgatagctatgagcacatttaattgaggggtcgcgtgttcgaatccccttgagacatgtttttttaatttaattttagctagtcgtgagtgtgaggagcgcagaatgagaaaggaaacagtgaatggtgaccgaacatgagaatggactgtgcacccttag

SEQ ID NO: 155145 - DNA, 365 bp, Zea mays
  Clone ID: MRT4577_73074C.1
gacaattcctaatgaacggaccatgcaattgctgggacagctgcaggtggaggtggagaattttgtcctccgagtggcagctgagttctcctcaaggaaggagcagcttgtgtttctgatcaacaactatgacatgatgctgggtgtgctgatggagcgggctgcagatgacagcaaagaggttgagagcttccagcagctgctcaatgctcggacacaggaattcattgaagagttgctgtctcccccttttgggggtttagtggcatttgtgaaggaggctgaggctttgattgagcgtggacaggctgagcgacttcgaggggaagaagggagcgctgacccagctgatccagctctatcat

SEQ ID NO: 155146 - DNA, 679 bp, Zea mays
  Clone ID: MRT4577_73075C.1
cggacgcgtgggttcttccatgggcggtgccctggagcgcctgattgtctcacgtatttgaccagcaacaagggacgaagattggagctgtgtggattgtgtggaggcgacacgggtcaggagcatttcatctgcctatggccgaagcttccatgcttgattcttcaaacatccaatgcagatcccttttctctgatggatatgctgatattcaaggctgtggaagagcaggtcaagaagagagtagagaataaggcaatgatcttcgagcagaatgccactgatagtgagtgcaaggtcgatcctaaagtgctctccaagctatatgatcattgggtggatgccacacaccaaggatgtctgccttgactaatcaccgattagctgtagctgtaaattttatgtatacatggtttcagttgcgctcgaaccaattgtcttgaccttgaatggacattttgatgtttatttcatgaatgttcaggtcaacggcaagataaaccaattgcgttgtatgagttttagatcataactcaagttttttgtagatcttggtgctatttcattcaatgggtcaggtttgagtgattgatttaaagtgaccctgtaaaatgtaaaatgccctttatgacagacccagctgcaaaaacagagtattttgaggaccctttgttgaagt

SEQ ID NO: 155147 - DNA, 702 bp, Zea mays
  unsure (1)..(702): unsure at all n locations
  Clone ID: MRT4577_73076C.1
ctcgnagccggccgggttgttatggcaccgcaagctattagtgtgctaggtggatttaggcctcaagggaaaacgattgacaatgttgtaaaggttgtggagacaacacttgccatgcaggaggctggatgcttctctgttgtgtattagttgttggcagatgatttataagatattgagatcaaaatcaggatgtttccaaactgtctataatcaggatggctattgtagcttttacagtaggttggtattatatgtttccaatttgtgtttttattaaaccattgtctaattggtgtcaggtcttcttccatgggcggatcattgtcgactggtggtgtcaggtcttcttccatgggcggtgccctggagcgcctgattgtctcacgtatttgaccagcaacaagggacgaagattggagctgtgtggattgtgtggaggcgacacgggtcaggagcatttcatctgatttacagagaagtaaagagaagttgtttacatttagtcatcctctgtatctgaaacaagactatgtttctaccttgtctttctcatggttcttagcctatggccgaagcttccatgcttgattcttcaaacatccaatgcagatcccttttctctgatggatatgctgatattncaggctgtggaagagcaggtcaagaagagagtagagaataaggcaatgatcttcgagc

SEQ ID NO: 155148 - DNA, 588 bp, Zea mays
  Clone ID: MRT4577_73077C.1
atttaagtacgcgtatttggtatgaaagctggtggagacaagatcacataggctctgaaatccatctgttggaggagcaaggccattcaagtagaggaatacttgctctggtcttcttccatgggcggagccgaggatcacctgattgtctcacgtatttgaccagcaacaagggacgaagtttggagctgtgtgaatggtgtggaggcgacacgggtcatgagcatttcatctgatcccttttctctgatggatatgctgatattcaaggctgtggaagagcaggtcaagaagagagtagagaacaaggcaaggatcttcgagcagaatgccactgatagtgagtgcaaggtcgatcctaaagtgctctccaagctatatgatcagtgggtgatgccacagaccaaggatgtcgaagttgagtacctcgtgcgctgccttgactaatcaccgattagctgtagctataaattttatgtatacatggtttcagttgtgttcgaaccaattgtcttgaccttgaatggacattttgatgtttatttcatgaatgttcaggtcaacggcaagagaaaccaattgcgttgt

SEQ ID NO: 155149 - DNA, 957 bp, Zea mays
  Clone ID: MRT4577_73078C.1
tcggaatttctttcccaagctcttgaagctaaggatttgttgacagaaagcatcatatttgagcagtacacagacaacaaccttcaaactggatcgcaaattcacattgaaaatccagaatctatagatatctctgatgaactgcatcagaaggcagagcagtcagagattgatgaattgaagcaaagattgtgtgagcttactgaggccaaaactcaactagagacccacaatcagaagctgcaagaggaaagcatgtacgcaaaaggcctggcctcggctgcaggtgtggaactgaaagcactgtctggggaggtcaccaaactcatgaaccacaacgagaggctcgcgaacgatttggctttggcaagaaattcaacacgagtgagaagtggtcatagggttgggaggagggatagctatactaaacggcttgagccagcgagtagaagagatgttcatgctagcagtgagagggaatcagctctggaggtcatgcttatggcgaaagaccaaagagaggcagagctccaaaagaaaatcgaggagtccaagcagaaggaagccttcctggaaggggagcttgcgaacatgtgggttcttgtggcgaaactgaagaaaggtcaggtaattgaccaagatgatgtctcgatgccgtacccaatggatcgtgattcatgaccctagacaatgacaaaaacaattattgaatcggctatgcttcggcattgcactttccttgtctgtggactgtggtggtttgcaccagtgtgaatccgtgtatctatattgccggtagttgtaattagctggattggaatcttgtaatgtatataacaatcagattttgccttgttctcaggattgtcatgcctgtctagtttgttcagggctttcaacaattatactgtacatagattgtcgagtagaaaaaaaaaaaaactcgagcctggatct

SEQ ID NO: 155150 - DNA, 328 bp, Zea mays
  Clone ID: MRT4577_73079C.1
aaaaaaaaaaaaaaaaaaaaaaatttatttaaagaaaaaataaaaaaaaaaaaggaaggaaaaaaaaataaaaaaaaaaaaacaaaaaaataaaaaaacctaaacataaaaaaactgtccgtccttttacagcatcctaccttcctacccccttcatgcaacccaattaattttctttactgccccttaacttaatttaacttcccgtcttttcccaacatctccactcgaaaaacctctcccttccccaatttaatctctttgcaaaacatccccctttctccagctttccaattagcaaagaggccttaacctatcacccttccca

SEQ ID NO: 155151 - DNA, 393 bp, Zea mays
  unsure (1)..(393): unsure at all n locations
  Clone ID: MRT4577_7307C.1
cgcagtaccgggccggacncccggggcagcccagcccccacacaaggacgcccgcgcaccggaaaggagggggggcgccgccaccagcgccagcccgcncccggcggccgcaacaaccgcagccaggcgccaggccgcgcacgcgccaacgcgcgaggggggccgccggcagccnaggcgccgaccagaggacagcgcggccganccaccaccgggggggggggggccaancacacgagcganngggagcacncggccaggccaccccgcccgagggccacgcgcagaaaccaacgggggccgacgnacccgancgaagcaccaacgcggcgcccaaannagaacgggaaaacgaaccgaacgcacnacnggcnaanccccggcaacgaaccc

SEQ ID NO: 155152 - DNA, 279 bp, Zea mays
  unsure (1)..(279): unsure at all n locations
  Clone ID: MRT4577_73080C.1
cacatttcagganncccagcaagccaagcgaggccgcggggaaggcgcaggaagcggcccacggcgagccgagccgagnggagcgcgagccgccagacgacaagggccaacggnncgcccgcgcacgaggncnngacgcacccccaagaaaaaaanananacgaaaagacaggagcnncagaacagcaaaagaagaaagagcnaaaaaaaccgaganaccanngnancgnancggccaacgcgccgnnncagaggccagncanaacannacnacannac

SEQ ID NO: 155153 - DNA, 203 bp, Zea mays
  Clone ID: MRT4577_73081C.1
tcttcgctgactttcctcgccttctccgccgagcgcgagactcctatctcgggggcaccgcaacacacatagcaacccctacttccggtccgatccgcgctctcctttccgttgcttcaataatggataggaatgacacctgcaggttcttagttcgacgctaaacactatgattctaacatgcaagtatctttgatcacctc

SEQ ID NO: 155154 - DNA, 284 bp, Zea mays
  Clone ID: MRT4577_73082C.1
gtccctgctgcccccgcctcgtccgatcgaaccaccggaccaccaacggggcgggtggtgacttcagcaggcataatgaacgcctaccccacggcgaactaggactacctcaacgcggtcgacaaggccaaacgcaaactacgcggactcatctacaagaagaattgcgccccgctcattctcaccctctcatgacactttgcgagcaccttagatgctgacaccaaaaccggtggcccgcttcagcaccatcaataaccacccctttcaggctctctgagcca

SEQ ID NO: 155155 - DNA, 290 bp, Zea mays
  Clone ID: MRT4577_73083C.1
gaaaacgcacacatttgtaaatatttttaaggcatacaatacacgcccgcagggggcgcacctttaaatgggagaatttaaaactgcacatttttcaggttataatacagtttcggaagggacattaaaaaacacatgcgtaatacagtccctgggtgagacgacatggagaaaaaattggtggcgttttacacatagaaacaattcctagcttttatagttatggacggataaaaaaagtcccggggttggttttttgaccacaacaaagggtatatggggtagttttg

SEQ ID NO: 155156 - DNA, 341 bp, Zea mays
  Clone ID: MRT4577_73084C.1
taaaaaaaaaaaaaaaaaaaaaaaaaaaaaaaaaaaaaaaaaaaaaaaaaaaaaaaaaaaattgtatttttgaaagtttataatttttagggcgaaattttggagatataaattaaaaatggaggaattttaaaacatggttttaaaggggtaaattgggctttttgagagtcgttttaaaattgattgggggtaattttaaaactttgggattgaaaaaaccctgttgttaaccaatttaattttcttggagaaatattttttttagaaagttggggtaataacgaagaggcccaaaaatatagacttttcaaaaaatttctcacccttaatggggaatg

SEQ ID NO: 155157 - DNA, 182 bp, Zea mays
  Clone ID: MRT4577_73085C.1
gttctagatcgccgtcagcggcgcgtgagtcgtgagcgatcgcggctggcgccggcacgcgtgctggcgcgggctatatatatctagctatcgactgcgtgattgacagtgtgactggcgtgtatcgactccctgattgatatatatatgtgaataacacacacgatcatgacgcgatgcgt

SEQ ID NO: 155158 - DNA, 363 bp, Zea mays
  Clone ID: MRT4577_73086C.1
taggatatacaactgggtgcatctatttctattatagcgaaagagattctctacagacgggggcacatttctttcaactactactcaacctgcccttgcggttcatgctgacagagccgcatgaagtaccctcacctgaacgagacgaacacccacaaacatgacaccatccttctccatatcaacacgcaaaagaacgccaatcccgagatcttaacagccaagctttattccgcataggccttccactgttgcatctgcctttgcaactgcaacagcgaccccttcaactgctgatcacatctatcgacgaccatggatatattattatctatctaacttgagacgactgttgtacaataa

SEQ ID NO: 155159 - DNA, 573 bp, Zea mays
  Clone ID: MRT4577_73087C.1
aaatataaaagactgaatgggctatttgggaagagccatattttgatttttttttacttaccttcccttaaggtatccctaattaatgggatgtacatgcctaaagccagaagctaggtagatttgtagtgtcaagtgaaggatatggacatggggctcctgactgtatacgtgtctgacacccaacggaacgcgccttgcacgaccttggcacccttattattgtggctccgccacaccatcactttgaagctctgttcccgattcaccttggtgaacaccagttcgcttggaaacacggcgacagctgcatcgtcgtcaaatatgtcaaccgccgcgtaataaaccgtcgacacctcctctccgacgttcttcaccgtccgctcaacgaccacaggtgtgctcctattccacgtcggctggaagacaaccgagaccgatgggtaattcagcaagctctccgggatcaccgtggcggcagagcagtccaccggccgccgcgcgatcaacgagacgttctagctactgtacaggccgcacaggtagccgacgtagtcgctgcggacgcgtggg

SEQ ID NO: 155160 - DNA, 407 bp, Zea mays
  Clone ID: MRT4577_73088C.1
aagcagtggtaacaacgcagagtacttttttttttttttttttttttttttttttagccgtcgtgttaaacacggagctggaccatgcgctagacgagctgagtagggctcgtgttgagatcgcccggctgtgggctgagcgcgtggagcgtcgtcacctggatgatggctcccccgctcccgtcgagactcagcacccgtaccgctcacctcggcgtggacaccagtcttatgataaccccgactgcaagaccaagataagtttagaaccatagatcgtcagagtcagatcttgtaattaatacaaaaatatatacatagaagctatagtcttagcgttagtcttgcttttagttagtcttagttacccgcgtactctgcgttgttaccactgccttccgggcggt

SEQ ID NO: 155161 - DNA, 420 bp, Zea mays
  Clone ID: MRT4577_73089C.1
ttttttttttttttttttttttttttttttttttttttttttttttttttttttttttttttttttttttttttttttttttggggggccctttggcctctggggttcatcaagggtaaaacccgtcctaataataaatacagattagtaaggttcaaaagggggttttctggtcgggtaattgggaacaaaagaaaaaataacttgaaatctgaaaatgaaacaatacgatgggccaatgcagctgttttccctctccaaaggacaaaaaaaactcgctcaaaccaagggcttatggcaacactccctgaaactcttcctataaactgattcaattcgggaagggggaagtttcctttggctattaaccgaagctaaagaatccctctcctctaaaatggtaccaactggctcatattg

SEQ ID NO: 155162 - DNA, 212 bp, Zea mays
  unsure (1)..(212): unsure at all n locations
  Clone ID: MRT4577_7308C.1
gcacacgaagcaaccaagaaagaaaaaaaacggaaaaaggggagaccgggagacagcaacaaangaaacaagcaccccggaacaaccacnaacaaccacaacaacaccgaccaacaaaggaaacagccaaccaagccaagcgcgccgacgcacagaaacaacggaacacaccagagcagcccgaccgaaacaccgccgaggaacaaaaaaca

SEQ ID NO: 155163 - DNA, 368 bp, Zea mays
  Clone ID: MRT4577_73090C.1
tctaaacacgccgcccaaccgcccatccgacactacgaacagaaacggagacaaacacactggagcaactgctccaccacagatcataggtcgggaaaggaacctctacacattggagactggaacaaggaaatactaccttaaccgtgtcaactgaagactcaagttcctttaacttgtaattataatgaagataataatcaaggttatagtattatagtatttggtaataatacagaaagtgatcatgcttatgctgcaagtctacatccttaactatatctatatcaaacagatcttactcctcgttatcataatctaaataatcaacgtattcttcgtcattataatgaagaagatattcatgc

SEQ ID NO: 155164 - DNA, 365 bp, Zea mays
  Clone ID: MRT4577_73091C.1
ggacaaagggtgttgttgtttggcctggacccacccgcctgggatggttacttcagtcccttgggcggctgttgggttccagttttttggtttcaaccaatttaacaactggggggttaggcggttttgttttttttgttccggccaaacgggttggggactggggttttcggggaattttgaacacccgcccgggaaaaaaaagggggttaaattttggtggggggtggggcccccaaaggccattgggttttccgtttaacaatgggattgtcaggaccagttgttcactttccagattgggcccagggggccattagacatggggccccccattttcttgggaagggaacccggaaggtttt

SEQ ID NO: 155165 - DNA, 624 bp, Zea mays
  unsure (1)..(624): unsure at all n locations
  Clone ID: MRT4577_73092C.1
ttaattcccgtttcgacccactcgggcggtgaataaatataataatgccttatagcctcanccaattgttctctgtagctctttcctnntagggcacaagaatcatgaacgagaggaagcanttcttcttacctctttcngtgtggtgggtgaaggtaataatgcatatccctccaattcgaatggggaagaatcatgttccaataaagaatgagctaatcatgataccagtgattccagcaaggacagctattactccatagtgtctatacagcgaactgctgatgaagaggatctttattgggattagatttaagatctacgatagcattaataaaaaaaaggcggcatccacacctcaagccctgctcttaaagatgatcttctcaagaggcttatcattgtcgaatattattatgatttaagctgggatatcgaagattatgatgacaattccttaatgccattggtggtattgaagtgtcaattgtatttctacatttttgaccttccattactctcgcaagttactgtgatttgatcaataatgattagttattctaatctattgacactttttatactataaacttttcattttattatttcaagtgtcatttgtct

SEQ ID NO: 155166 - DNA, 216 bp, Zea mays
  Clone ID: MRT4577_73093C.1
acggaaataggtcatcaacagcttgctgctgcatgtgtagagcatcgaaccaccatgattcagccggaggtaatagccattacaacgatgatggaggatataatcagatggtactcatgagagcgcgacatgaacaactccactacctacaagtacgtgttctgacgagtggttagggacgaactccaatacacctccaggactctgcgataccac

SEQ ID NO: 155167 - DNA, 602 bp, Zea mays
  Clone ID: MRT4577_73094C.1
aaaaaccggggggggggccccctgttttcctttaaaaataaaccaagacgtttttttaaagaaaataacaaattgggaactggggggcccccaaaattaaaccccaaaggttttccccgggggtccgcccatgtttgcaaaccgccccaaagaaaaaagttaaaaacaggcccgggagcccctttgcttgttggcccccgcccaacccgggaaaccaatggaaaaaaaaaaaccccgttttaaccccgtttttttggctgggacctaaaagccggcctatgggaaccccggcccccaggggggccaaaaggcctaaaaggggtccttttattttccgaggggggccttaaaaaagggggacctttttttttatggggattttaaaaacccccttgggggccggaattttgcccatggaaaggcccccccccccgggggggaaacccccctggggtgggggaaggggaaaaatttttttttccccttgaccccccattgcccccaggggggggcttccaagaccttcccccgggggacccccccaaaaaaaccccggggggcccaaagggcccgcccccatttttttttggggggttttccca

SEQ ID NO: 155168 - DNA, 189 bp, Zea mays
  Clone ID: MRT4577_73095C.1
aaaagaaaattgggatcttcataatgttagcttagagcaaccagtgccggacaaaccctttgacaattcccacttcctggaaacgaacgaacaaactaacaattagccattcgcatgccacgcaaaaaaaaaaaaaatgggtggacgctcacgattttaaaccccccccgttcatggactcctgggtga

SEQ ID NO: 155169 - DNA, 129 bp, Zea mays
  Clone ID: MRT4577_73096C.1
gcgaggcgagccggatcgggccggtcgagagctactagtgatgccctactacatgaaggagggcgaactgctcacgcccgcgaacgctaggggtgatgccgaggacacacatcgaaacacggggatcgg

SEQ ID NO: 155170 - DNA, 676 bp, Zea mays
  Clone ID: MRT4577_73097C.1
tcgtaaaaccggaggagacacattggagttccacagcttctacaagaacttctcatcggagctgaaagatatcgtgtggaaagctgaatctgacgcaaataataaacagacgaataagtgatacccagagaatctgtgtagccctcatgaggccacattcagatagatcacctcttcgggtgataccacctgcttggtactgtatgctttttttttactggtaccacattagcagccaaaatctcttgtaaacgggaactccttctgaatgagcgcaattgtacaaaacacatatgaagaggccctccgtgagatgctccgaacactgcaatgggatgtcaaatagttctgaatggtgagtgctgtttttgcatctataggggcatatatatgtttccattccatgtgcatgtaccgttgttgtatgcgcatgggggtacgtgtgcagcaggagagagagaacatctgaacgtgtcctgagaggaaaaaaaaagtctatgtccgtttctaaaatgctttggttgtcaccagggttgagtgcctttgttttatgaaaatggacaatggagaatgatgtatgaagcttaactctagtatttgggagtaaaagtatgtttggttggatgtataatgaggaatggaagggggtcgtcacactttctatagtgtttggatg

SEQ ID NO: 155171 - DNA, 594 bp, Zea mays
  Clone ID: MRT4577_73098C.1
gggacccttctgcaggattgccaacacctgctgtaatagctgatcaggacctcactagggatcaatcatgtaccatgcgcaggaccagtggcactagtagaatgggcggacatgcggcgtatatgaggtctgtggtgcacctcatggtctgggtggtgcacaacggtgtccgccatgacatgacccaaccggggcttgcgcagaatgctcaccgatgcgctctgacccggcgaagatcaatcttgcccggaggccctctaactctcacgccctgataggcttcagctgcaggaatcttccggaggcaacgctacactctgatgggacacgtgagttgatgatcacgggcgaaaacgtctcatactactcaccgcctccacctccatcatcccattccctgggcacgaatgtaacagaccaaggactgacgcgcatgactaccttgacatcctgcgcaccctctcgtccataggtggggccatccgaaccatatgtctgcctcaccattgactaacgcggacagatgcgaatgaccccatcatggcagcacgaatgcatttggtttctatgagcctgattatctcttgggcgcac

SEQ ID NO: 155172 - DNA, 251 bp, Zea mays
  Clone ID: MRT4577_73099C.1
gcaattagctcatcgactctcattattgtagaactcgacaccatgaaggtgcggagcgttgcccttgctctcctggcgctcgctgcgagcgccgcctccagtacaagcggctgctgtggctgtcagacaccaccgtttcatctaccgtctccgttctatatgccgactccgttctatctgtcgccttatcatgtatccgcagccttggtaataccctacttaaccaccgcatttaagcccgtgccagcagt

SEQ ID NO: 155173 - DNA, 257 bp, Zea mays
  Clone ID: MRT4577_7309C.1
ggcactatgagagcttgacgtttatgcacgcgtgccgcgctcgtgatcctgtagtagcgtacggcggccgcccttttttttttttttttttcaaaaagccacaacagacgcgtgtttcatttggcttttctaatagatcaaaccaacctgtgaagtgcaccctatcacgtcttggaacaattgtttcgttgggcatggggctaatccatctcctacccttttttattaatcacatcaagttaccccctggggcgaca

SEQ ID NO: 155174 - DNA, 847 bp, Zea mays
  Clone ID: MRT4577_730C.1
gccggccgggccgggcacttcagtgataaaattgtcatttggatactggtaaaaaaaaaaaaaattaccagggtgtccggctaccgcgcaccggaggtcaccgacatccgccgcgtctcgcagaaggccgacgtctacagcttcggcgtcctcctgctggagctgctcacggggaaggcgcccacgcacgccgtcgtcaacgaggaggggctcgacctgccgcgctgggtgcagtccgtcgtgcgggaggagtggaccgccgaggtgttcgaccaggagctcctcaggtaccaaaacgtcgaggaggagatggtgcagctcctccagctcgccatcgactgctccgcgcagcaccccgacaggaggcccgccatgtccgaggtggccacgcggatcgacgagatccgccgctccagcctcggcgaccggcaggtggccgacagcgccgaaggcgacgagccatctctataaccgccatagcagtagctcctcccctgatccaccaccacacgtactgtgtcaatcccagtgaatgaaaattgcttagttctttgcatgaatcgatattgctcttgctcccccggctacttttttaattcaccagcaacttgtgcatgtacgctttttctctttctcgttttcttttcttctttgtctttttttttttgcctctttctcacgggctttgatgattcgatctattctatagcacatgtcactgtactcttttattcttggaaagcaacatttggtgatgccttacttgtatcgatctaagaccaacaccattgccagctgcgaaaaaaaaaaaaaaaaaaaaaaagtactctgcgttgttaccactgct

SEQ ID NO: 155175 - DNA, 1521 bp, Zea mays
  Clone ID: MRT4577_73100C.1
aagtttattaagcgcattctcgatcctaaccctgataccaggataaaaattgcagaaattttggaagatgaatggttcaaaaaaggctataaaccaccacattttgaacaaggcgaagatgttaaccttgacgacgttgatgctgcattcaatgattcagaggtattatatagaccaaatgttcattttgaatctacgactatcttgaaaatctttccagctttccagaaatattacgtgctttaaaagcatttttacattctattttatgttcacattatcgttcaggttcatagctgctataatatgaacttttttgtttcttcttttttggaaggccaggttgagaaattctaaggacttgatgacacaatagatttcttgttctttttatggctactcaaatgtctcattgtttttatagtgtatataggattcccttgaatatctgattggtgaacattgcagttaaccgataattaattgtaacatacatgactccagttaatcggtcacctttcaatttttacattttaggaccgtcttgtagcagagaaaagagaaaagccagaatcaatgaatgcatttgctcttatttcgaggtcacagggcttcaaccttggaaatttgtttgagaaggagatgatggtaaatttctcatagctttgaatctattatgtcatgtttggaatgtagtaaagattagttacaattatattggagaagtctggtctctggcgttgattgcccacttctgtaaatctcagtcttggtcagggaacaaaatgagtactttcgctgcaaatttttcttgatttcttgctaatgcatgcctttcctcgagagggaatggtaaagagggaaacatctttcacgtctcaatgcacagcacaggagatcatgacaaaaatagaggatgcatgtgggccactcggtttcaacgtgcggaaacaaaattacaagatgaaattgaaaggtgacaaatctggaagaaaaggtcacttatctgttgcaactgaggtttttgaggttgccccatcacttcacatggttgagcttcgtaaaaccggaggagacacattggagttccacagcttctacaagaacttctcatcggagctgaaagatatcgtgtggaaagctgaatctgacgcaaataataaacagacgaataagtgatacccagagaatctgtgtagccctcatgaggccacattcagatagaccacctcttcgggtgataccacctgcttggtactgtatgcttttttttttactggtaccacattagcagccaaaatctcttgtaaacgggaactccttctgaatgagcgcaattgtacaaaacacatatgaagaggcgaggccctccgtgagatgctccgaacactgcaatgggatgtcaaatagttctgaatggtgagtgctgtttttgcatctataaaaaaaaaaaaaaaaaaaaaaaaaaaaaaaaaaaaaaaaaaaaaaaaaaaaaaaaaaaaaaaaaaaaaaaaaaaaaaa

SEQ ID NO: 155176 - DNA, 243 bp, Zea mays
  Clone ID: MRT4577_73101C.1
gacatacagtcctgcgggaagctggcgcgcaccgacgggcgccgacgtgaggacgactggatttgcccgaactgacaaaacgattattttgactttcgaaccgcttggaacatgcgcaactgcaaccaggctagggcagcaaatcacacgaacatgcagaccctggctcgttatcccacgtgagggtacatgagcacagggacgctaccgtacatgtacctaggtggtggcgctcccccatat

SEQ ID NO: 155177 - DNA, 459 bp, Zea mays
  Clone ID: MRT4577_73102C.1
ccaattaaactgagcaagggttctttacaaaaatgcgggaaaaaaacaaaacaaaaaattctagccaaaattcccataaataacattggaaaaaaaaaaacgcccccaccccaaaaaaactaaaatcttaaaaaaaaaaaactaaaatgaagcaaaatcgcgtcctcaacacacagtcttaaattacaacacaaaaactacccttaccccgcgtgattaatttcccacaatgaatatcccccaaaaaaaacattcttcttcaaaaaaaataataccccgggggagggctcctcctcttcccacctaaaaacacaaccccaaggggattggccctctcaaaagaaacccccaccggactggaacaaaccctcctaaaagaacttttcgttgaacctggaccaagaaccccaaaaaaactcttttcgcccagaaaagcccaacccccccccccaagaaaaa

SEQ ID NO: 155178 - DNA, 1206 bp, Zea mays
  Clone ID: MRT4577_73103C.1
ccgcccgtccgggcggcgtcacgcaccgtgttgggcctccaacccatccgtatccgaacccccagcccacttgccacgtcgcaatcacccagtcacccactccatcctgcccgccgccctggctggtagctaagctacgtgaagaagatggttgggctcctccgtccactctccgccgccgccaccttactcctcgcccccgccacgccactcactggttcctcagtctccgctagttccgtcggcggcaggcggtggagaagcgtgagggcggacgccggcgggggctggctatccgggctgctgggcggcaagggcggcggcgcgtccacggcgatgatggtgacgccgggaaccgtgaaggccggcgaccccgtcctgcacgagcccgcgcaggaggtggcgccgggggacgtgctgtccgagaaggtgcagggcgtcatcgaccggatggtcgacgtcatgcgcagggccccaggcgtcggcctcgccgccccgcagatcggcgtcccgctcaggattattgttctcgaggatacgcaggagtacatcagctatgcacccaagaaggacatcgaagcacaagaccgccgcccctttgatcttctcgtcattatcaatccaaagattaagagcacgagtaaaagaaccgcgctgttctttgagggatgtctcagtgttgatggatacagggcggtcgtggagcggcatctggacgttgaagtttcaggtctggaccggaatgggagcaccatgaaggtacgggcttcaggatggcaagcgcgcatcctccagcatgaatgtgatcatcttgaaggcacgctgtatgttgacaagatggtagcaaggacattcagggtcgtcgagaacttggatttgccccttcccactggatgccctcaactaggtgcaagataatggggatagctttccatttttcctcgtcgaatagatgtgattctctctctctttttgaaaattacaacgtctcatgtacagtattgcattttgcttcccgtctaattgctgtgtttgttctactatccaaccaacattaacatttcatagtttaatactgcatgaccctctgatccaaacgatggttcgcatttgcacaatctatagggtgaccccatcactatgatcctttgtataaaaggaattacatgttatgaaaacattttcgtggatgaatgtaacaacatc

SEQ ID NO: 155179 - DNA, 616 bp, Zea mays
  unsure (1)..(616): unsure at all n locations
  Clone ID: MRT4577_73104C.1
attagaggggaagcaaaatgcaatactgtacatgagacgttgtaattttnnnnnnnnnnnnnnnnnnnnnnntcacatctattcgacgaggnnnnntggaaagctatccccattatcttgcacctagttgagggcatccagtgggaaggggcaaatccaagttctcgacgaccctgaatgtccttgctaccatcttgtcaacatacagcgtgccttcaagatgatcacattcatgctggaggatgcgcgcttgccatcctgaagcccgtaccttcatggcgctcccattccggtccagacctgaaacttcaacgtccagatgccgctccacgaccgccctgtatccatcaacactgagacatccctcaaagaacagcgcggttcttttacttgtgctcttaatctttggattgataatgacctgtgtgtgtccaaggaaaagcacagaccgtgagaagggttccagatgcttaatgggcggccgcgaacgcggcaagatgtaccgacgagaagatcaaaggggcggcggtcttgtgcttcgatgtccttcttgggtgcatagctgatgtactcctgcgtatcctcgagaacaataatcctgagcgggacgccgatc

SEQ ID NO: 155180 - DNA, 304 bp, Zea mays
  Clone ID: MRT4577_73105C.1
caaaacacaacccccttattgcttaccacagggcccgcataaaattttccgagtttgcttttcccaccgtacccaattccactggttacacaaatgtttgtggggcaagctttttcctcctcccaggtcccagggaaaacatccaacaagccctgtccaggatcagaaatccatggccagccctccattatgggcctaaacctccctccttaaatatccgggggaccccttaatggatcccgatttccaaggcctaagggtcctgcacaatgcccccccttttttttttgggcttggcacaaac

SEQ ID NO: 155181 - DNA, 276 bp, Zea mays
  Clone ID: MRT4577_73106C.1
cgggcccaaaggaaaacccagaaatttttccttccgtattccggacaaaacggagcgcagggggcccccggggaactttacaatggggggggggggaaaccctggcccctttttttaacccccagagccccccggtgggccacccccaagcaggggggagccaggtttttcaaagggccccaagggggtggactgttatgggaaccaccagggtgcgcttacccaagtcgggaaccggtactgggggggggggggggccttgaaaccccccaaaaa

SEQ ID NO: 155182 - DNA, 116 bp, Zea mays
  Clone ID: MRT4577_73107C.1
agcgagaaccaaccggttgcttgctgtcccagcggcgccccctcatcaccgtcgccatgtccggaggtctgcttctcggggacatggctcccaactttgaggccaatagcaccgtc

SEQ ID NO: 155183 - DNA, 106 bp, Zea mays
  Clone ID: MRT4577_73108C.1
cgccaaccagttcaagaactgcaaggcctgctccgagagcagtccgccgaataaggcctgggagaggaaaccagatagcaccaataggtgatgttgaatctgaaga

SEQ ID NO: 155184 - DNA, 559 bp, Zea mays
  Clone ID: MRT4577_73109C.1
cctcctctcgaacagaggagaaagggaaagaagagtcgggcccgactccggatctccgccgccggtgctgccggttggggaagagatggggaaggtgctcggagctctactataagtagtaggtctagtttagttgtttccttagtggagtttggcgagatgccggagtttggctttatgccgatggaggccgtgtcgctggcgcgcccgagccgcgtgcggtggctgctggagttgaccttgatggtggtggtgagttggttgttgctgctgctagctggcgtcaatccagcatctccggtaataagctcaaggtgtccctgcctctggaagaggcttctctttctcttcttggagccggatgccaccatggaggtggagaaggagctgaggagaggcagtcagatggttcttgcagggattcgagcacatcagcaacagcttcaatccagtggagctacgacgccggtctccgcaggcgaactgctgcttcttcaggccgaaaggtggccatcattattcctcctggccttgatgccatataggaggcagctgctgt

SEQ ID NO: 155185 - DNA, 135 bp, Zea mays
  Clone ID: MRT4577_7310C.1
gggatactaataattaaccggccgaggaaaacctcggttttaattcccttcttcgcttggacgtcccgggttcactctacaggcgggggaaaacaatcacttcaaaacatggttagggtgcaagatccacaacat

SEQ ID NO: 155186 - DNA, 608 bp, Zea mays
  Clone ID: MRT4577_73110C.1
agaagcacagcaaccagccgaggctcgtcgtccttgtagacagttcgaaagtcgtctcgatccatcatccatcccgtctcgccagcagccgatcatggccgcgcaggcggcgccgccgccgccgccggagcagaagatgatggtggcgatcgacgagagcgagtgcagccactacgcgctcgagtgggccctgcgcaacctcgcgccccgccgcctcatcctcttcaccgtccagcccttctcccccctcagctacctccccgccggctccccgcttggcccgtcggtggcgtcgccggagctcatcaggtccgtgaccgagcaccagcggcagctcgcccaggcgctcgtcgacaaggccaaggccatctgcgccgaacacggggttgatgcagagaccaccatcgaggtgggtgatcccaaggaaaccatatgcgaagctgcggagaagttgaatgttgatctgctcatcctgggaagccacagccgagggcctatacagaggtttttccttggcagcgtgagcaactactgtagccaccatgcaaagtgcccagttcttgtggtgaacaagaaagaatgaaaccatgatgcctgctgtactcctg

SEQ ID NO: 155187 - DNA, 526 bp, Zea mays
  Clone ID: MRT4577_73111C.1
ttgggaccctcgaggccggccggggttcactccacatcgattcgcctcctccgccctttactcttcgtcgtactcgtctcctcccacccgcaaccgcagggagagaaaggggaagcccgccgccgccccggcccccagcaaccagcagatcgggacctctgttctgcgcaatccatccatggcggccgtcccttgccaaagtttggtgaatgggatgtcaacgatccggcttccgcagacggatttactgtcatattcaacaaagccagagatgagaagaagggtgggaatggtcaagacacagactcaccttccaaggaccccaggactgagagggtggagtcttatgctgcaaaaccaagcacgaagaaatggttttgttgtgtgacatccagccctacgcaatcctgaggaaggcaattgcatgcgctggaaatactgcccctttaatcatttgcaaagtggacttctgcttgtaattctagtcctgtctcttttttttaaaaaaaaaaaaaaaaaagcggcc

SEQ ID NO: 155188 - DNA, 773 bp, Zea mays
  Clone ID: MRT4577_73112C.1
tgggcatcgcgaacctggccgggccgcgggaagtccacaccagtgcggcttttcctttccgtgccactccacatcgattcgcctcctccgctctttactcttcgtcgtactcgtctccccccacccgcaaccgcagggagagaaaggggaagcccgccgccgccccggcccccagcaaccagcagatcgggacctctgttctgcgcaatccatccatggcggaggaatcaggccgtcccttgccaaagtttggtgaatgggatgtcaacgatccggcttccgcagacggatttactgtcatattcaacaaagccagagatgagaagaagggtgggaatggtcaagacacagactcaccttccaaggaccccaggactgagagggtggagtcttatgctgcaaaaccaagcacgaagaaatggttttgttgtgtgacagccagccctacgcaatcctgaggaaggcaattgcatgcgctggaaatactgcccctttaattttctatacatactatccataagacactgtagaggtacccatggctctctgggctccaggatgggtgtctcataaaactctggcgtgcatgtatgtatggtgtgagagttgtcggcatacatttgcaaagtggacttctgcttgtaattctagtcctgtctctctttttttttaaaaaaaaaaaaaaaaaacgggtccgctattgcctgttcgtttcaaaggggattgagtgggattaaacccttcccgttcaaaaaaaaaaaaaaaaagcggcc

SEQ ID NO: 155189 - DNA, 1060 bp, Zea mays
  Clone ID: MRT4577_73113C.1
gccggccgggctgggagtctctccacaccagtgcggcttttcctttccgtgtgagggagaagcggtccgcctcctgcgctctttactcttcgtcgtactcgtctcctcccacccgcaaccgcagggagagaaaggggaagcccgccgccgccccggcccccagcaaccagcagatcgggacctctgttctgcgcaatccatccatggcggaggaatcaggccgtcccttgccaaagtttggtgaatgggatgtcaacgatccggcttccgcagacggatttactgtcatattcaacaaagccagagatgagaagaagggtgggaatggtcaagacacagactcaccttccaaggaccccaggactgagagggtggagtcttatgctgcaaaaccaagcacgaagaaatggttttgttgtgtgacagccagccctacgcaatcctgaggaaggcaattgcatgcgctggaaatactgcccctttaattttctatacatactatccataagacactgtagaggtacccatggctctctgggctccaggatgggtgtctcataaaactctggcgtgcatgtatgtatgtatggtgtgagagttgtcggcatacatttgcaaagtggacttctgcttgtaattctgaaaaaaaaaaaaaaaaaggcccctaccgcctttggtactgcttctcggatagcttttagaagctgtttgtgtgatgcatcgcagataggttagggagaatgggagatgctgctccgtgcatgaagacagcacactggcgcagggcgtcaaggcgggagggatggggccgcgacggggaggcccagctggagaattggcgcgggctgtgacgacgaggcatctctaagcgcgggcgtgggcctccttcgtggctccatgggcgtgggtacggccgcacggaagcgagtcggagataggctgatccggaggacgggaaaaagtacggcttaaaaacggtacggtttgaaatagtgccatctacaatacaaaatattgtaaaacagtatttagatgattatatagtcgaattattggacac

SEQ ID NO: 155190 - DNA, 254 bp, Zea mays
  Clone ID: MRT4577_73114C.1
caagctgtcgtctgctgtctgcctgcctgcctggctgcaaaaggaagccggatggggtgccagcctccactaaaggcagcggatgccctgctgaagggccccaccagagatctccagaccaggcactgccggcctagccatgctttcttggcctgacgaccctatatgcaacacacttagcgggccttgttcggaggtgggttattcagagggaagataaattcgcccgcctggttacccattcacacctccag

SEQ ID NO: 155191 - DNA, 585 bp, Zea mays
  Clone ID: MRT4577_73115C.1
cctcgaggccggccggggcctttactcttcgtcgtactcgtctcctcccacccgcaaccgcagggagagaaaggggaagcccgccgccgccccggcccccagcaaccagcagatcgggacctctgttctgcgcaatccatccatggcggccgtcccttgccaaagtttggtgaatgggatgtcaacgatccggcttccgcagacggatttactgtcatattcaacaaagccagagatgagaagaagggtgggaatggtcaagacacagactcaccttccaaggaccccaggactgagagggtggagtcttatgctgcaaaaccaagcacgaagaaatggttttgttgtgtgacagccagccctacgcaatcctgaggaaggcaattgcatgcgctggaaatactgcccctttaattttctatacatactatccataagacactgtagaggtacccatggctctctgggctccaggatgggtgtctcataaaactctggcgtgcatgtatgtatgtatggtgtgagagttgtcggcatacatttgcaaagtggacttctgcgaaaaaaaaaaaaaaaaaagcggcc

SEQ ID NO: 155192 - DNA, 387 bp, Zea mays
  Clone ID: MRT4577_73116C.1
ataaaaaaaaaaaaaaaaaaaaaaaaaaaaaaaaaaaaaaaaaaaaaaaaaaaaaaaaaaaaaaaaaaaaaaaaaaaaaaaaaatataaaaaaaaaaataaaaaaatataaattaatactgccttacatttaaaccttccttttacccggaaccaatatttgccttttaaaaaattcctttttcatcttcccttggccccctttttggggaatttttttttatttattttcctggcggggcccaatttaatcttcttttaaaacatcccacttttcccctttttgaaagttctttcaaaaattccctgttccgatttttttttcccattagttgcggatgcctccttggtttatgcaccctccctgtttcggttccttatctttttt

SEQ ID NO: 155193 - DNA, 780 bp, Zea mays
  Clone ID: MRT4577_73117C.1
ccggccgggacttctttggaatctggcaaaatgacgtggatagctattccctcataatctcgctctctccatgcgaccaagcatcaccgtgcggtatcataccctacatgcctccaacccaactcccagacctgccgacgtcattggagatcatgttctagacctgccaggctttgcaaagggagatggattctctggtaacccagatgctcaaaagcatgctgacgtcttctctcaatcttctgtgaacggctttgcagctcttggacgtcctgttcatcgcgttgtcagaagctatctccaggatatctttgccaaggacaccatatatgcccaaattctcaaggacaaccaaaagctcctagaaacagctcttctcaagagttcagatgtgaagaaccatgttcccctcaacattggagactacaccgacttctatgtcggaaagtatcacgccttccacgtcggctgtcttttccgtggtcccgataacgcgctgcaaccaaactacacacatcttcctgtcgcgtaccacggaagagcaagcactgttgtcatctctggaacaccaatccgacgtccatggggtcaaatcctccgtccgggcaacaaggttcctgatcttgcaccctgccgagaagtcggatattgagcttgacatgagcatgttcatctgtcgcgagaacgctttgagtgaacccattcctatcagcgaagcagaggactatagtcttcggctatgtccttctgaacgattggagtgcgcgtgatgtccaggcc

SEQ ID NO: 155194 - DNA, 305 bp, Zea mays
  Clone ID: MRT4577_73118C.1
cctttttgtttttgttttttttaaaaggaaaatgggtacgaaacacaataaacatgaaagcctaacaacgaatacatcagcatttacaactgtgcataccattgatgccgaagagccatgactgcagaacaacagataggggaaaggggatgcaacacatacccgaccctgccttacattttattaccagatgagaagcagcaactagcataagggatgcagaccaacccaccctaaaccaaaaccacaagtgccttgaacaagactgatacactgtggacaagcctgcacaaagcgggtggtgt

SEQ ID NO: 155195 - DNA, 803 bp, Zea mays
  Clone ID: MRT4577_73119C.1
ttcgcccgccaccccacatcgattcgcctcctccgctctttactcttcgtcgtactcgtctcctcccacccgcaaccgcagggagagaaaggggaagcccgccgccgccccggcccccagcaaccagcagatcgggacctctgttctgcgcaatccatccatggcggaggaatcaggccgtcccttgccaaagtttggtgaatgggatgtcaacgatccggcttccgcagacggatttactgtcatattcaacaaagccagagatgagaagaagggtgggaatggtcaagacacagactcaccttccaaggaccccaggactgagagggtggagtcttatgctgcaaaaccaagcacgaagaaatggttttgttgtgtgacagccagccctacgcaatcctgaggaaggcaattgcatgcgctggaaatactgcccctttaattttctatacatactatccataagacactgtagaggtacccatggctctctgggctccaggatgggtgtctcataaaactctggcgtgcatgtatgtatgtatggtgtgagagttgtcggcatacatttgcaaagtggacttctgcttgtaattctagtcctgtctctcttttttttttacaaaaaaaaatgctagcaaaaaaaaaaaaaaaaaaggcccctacaaagtggattgagtgggattaaacccttcccgttcaaaattgaaaatgaagggatataatcctcctcaatcccttactatctggatgcaactgaaccaaggctccgatatggaaaaacccatacgacacccacatta

SEQ ID NO: 155196 - DNA, 174 bp, Zea mays
  Clone ID: MRT4577_7311C.1
ggggaaaaaaagaaaagaaaaccaagcccccaaatccgagttagaaaggacttggcccaaataaggtgttaggatattcatttacatttacatttccaaccccaatttatttattaagctaaggtcacgtcccatacataatacggaaataatcctttgggttttttgccccct

SEQ ID NO: 155197 - DNA, 292 bp, Zea mays
  Clone ID: MRT4577_73120C.1
atcagaggaactgagctccgactcgctttccaggcgtgtctcaaggtggaagaattcgtggatctcatccttaaagccactgagccccagatgggtctcttcaacctgtatgacgactggctcatagactatgtcatcttacacggccttttcccgtctgatccttattctgcgtgccctatatgggaacaacgatcgggcaacacagactcgcactgtcaacaagcattgcgatgagatcatgacctgcaccaccagcaactatgagacccagactttctcatccgagact

SEQ ID NO: 155198 - DNA, 872 bp, Zea mays
  Clone ID: MRT4577_73121C.1
ccggccggagtgggatttttcactttcgtgtcacttgacatctgattcgcctcctccgctctttactcttcgtcgtactcgtctccccccacccgcaaccgcagggagagaaaggggaagcccgccgccgccccggcccccagcaaccagcagatcgggacctctgttctgcgcaatccatccatggcggaggaatcaggccgtcccttgccaaagtttggtgaatgggatgtcaacgatccggcttccgcagacggatttactgtcatattcaacaaagccagagatgagaagaagggtgggaatggtcaagacacagactcaccttccaaggaccccaggactgagagggtggagtcttatgctgcaaaaccaagcacgaagaaatggttttgttgtgtgacagccagccctacgcaatcctgaggaaggcaattgcatgcgctggaaatactgcccctttaattttctatacatactatccataagacactgtagaggtacccatggctctctgggctccaggatgggtgtctcataaaactctggcgtgcatgtatgtatgtatggtgtgagagttgtcggcatacatttgcaaagtggacttctgcttgtaattctagtcctgtctctcttttttttttcctgttggtctgctagtacgaaaaaaaatttgtgtgttcgtttcaaagtggattgagtgggattaaacccttcccgttcaaaattgaacatgaagggatataatcctcctcaatcccttacaatctagatgcaactgaacaaaaaaaaagatcaaaaaatactctaaattgtttgatatcgattctcgaacagctgttggagctgttctaggcttctggtggtgtctc

SEQ ID NO: 155199 - DNA, 338 bp, Zea mays
  Clone ID: MRT4577_73122C.1
tctttttcctccccttttaaccaagacctcttggggttagggttacttaggggggtgtggagggtccattgcaacaattgatgtggagtaccgttgcttctcggcaggcttgtctgggccaccagcaacgagtcgctggagaatgcctttgcctaatacggcgagatcctcgacttcatggtcattaccaaccgggggacggggaggtttggttgctaccgcttcttgaccttgtccaacaagacttcatgctttaaggttctctgagcttaaactgctaggagctcgcctgtcgtgacatcacctgtatccaatgcacttagccatgcatttatcac

SEQ ID NO: 155200 - DNA, 814 bp, Zea mays
  Clone ID: MRT4577_73123C.1
atgaacagtccaccagtgcggcttttcctttccgttcgctccccctcgattcgcctcctccgccctttactcttcgtcgtactcgtctcctcccacccgcaaccgcagggagagaaaggggaagcccgccgccgccccggcccccagcaaccagcagatcgggacctctgttctgcgcaatccatccatggcggaggaatcaggccgtcccttgccaaagtttggtgaatgggatgtcaacgatccggcttccgcagacggatttactgtcatattcaacaaagccagagatgagaagaagggtgggaatggtcaagacacagactcaccttccaaggaccccaggactgagagggtggagtcttatgctgcaaaaccaagcacgaagaaatggttttgttgtgtgacatccagccctacgcaatcctgaggaaggcaattgcatgcgctggaaatactgcccctttaattttctatacatactatccataagacactgtagaggtacccatggctctctgggctccaggatgggtgtctcataaaactctggcgtgcatgtatgtatggtgtgagagttgtcggcatacatttgcaaagtggacttctgcttgtaattctagtcctgtctcttttttttcctaaaaatctgctaaaaagggtccgaatttgtgtgttcgtttcaaagtggataacccttcccgttcaaaattgaacatgaagggatataatcctcgatcccttccaatctagatgcaactgaacaaaggctccgatccaccaaaaaaaaaaaaaaaaaaggcccctagggccc

SEQ ID NO: 155201 - DNA, 299 bp, Zea mays
  Clone ID: MRT4577_73124C.1
cattgggtacctcgagggccggccgggactgtgttaccttaatcctggacgctgctccgaatccaggccgaattttgttgagtgtactactactgcgttgcagatattggacggcacgttctgcgggagaatagctgcgctgacacatctctcagatctcgcctttcgctgtccatatttccctgacttgtgcggtcacctgacgtggtcaccgctcactccgatccaaggatctctggggacccctgttaactctactcgtcctcctccccctacaccagcgcagatgaccacctgcg

SEQ ID NO: 155202 - DNA, 332 bp, Zea mays
  Clone ID: MRT4577_73125C.1
cgaggcggagaaagtggcaccccacctgcaaattaattagctttggcgggggaaaaacggttaaaatcgctaatttttaaacgacaaattcccccacccttggaaccccaaggggtcccaaaacccaaagtttgtttttttggcaacaaaaaagctggggatcccctgatgggcgaaagcccccccccaaaaattccccaagcaaaagggggtccctccccctgggccccctacttaacaggggggggcttggtgccggtggaaatcccgaggcggggcaaggccccaacggtttgcccggggttgcatacccccattgttttcgaatttta

SEQ ID NO: 155203 - DNA, 380 bp, Zea mays
  Clone ID: MRT4577_73126C.1
gttgacggccctttccttgcccaaactggcttgcgtgtgcatacaaaaccggcccgggggggggccccgcgggcacaccccgggaaaagcgggcggggcggggggggggggccaccgtgcgcacagggggggggccccaccaccggggccacccgggggacacggggttgagggggggaaactcggagcccgcaccgggcacgccaccaacgacgggcgcgggaagcaacggaccgggccgggggcgacacagaccgcacccccacccaagagagcccgtaacccgacccgccgggacaggaagaggaaacgtgggaccgccacggacgcacgcgagaggacaccccgccgggggggggggctggacccctggggcccgg

SEQ ID NO: 155204 - DNA, 655 bp, Zea mays
  Clone ID: MRT4577_73127C.1
cattggtacctcgaggcggcgggtggactgtcccggcattgagagcccgagacgcgtcagctgaggcgactcgtggtagaaggggactgacctgctgggtcagctcaactgatccgaccacctccccgggctctggtgactcgacctgcagagcaccatcgcctatgtgcgaccgcctcgtcccgctcgtgatacgcttcgtctgaggcatcgtcgacgagcaccgcgcccggaaccacctgccagcgctgctccgactggagtctcgtacttcaccgacgtcctgctctcactgacgggcgacaacaggctcaccgacggtgacatgatcgccgtcctttgggaaatgtggttccgtggtactgacaccgtcgccgcgctgatggagtgggtgctggccatgctcgtgctgcaccctgacgtgcaagaccgcgttcacgacgagctggaccgcgtggtcgtgcccgatcggctcggcaccgaatccgacatggggtcactggtttacctgcacgccgggatctgagaggagctcatgatgcacccgatcgggcccgctgatgtagtgggtgcgcttggacacgtcagacgtgatcgtagacgatgacctcatactggctgtgaccgccgttatggtgaacatgtgccgcattac

SEQ ID NO: 155205 - DNA, 297 bp, Zea mays
  Clone ID: MRT4577_73128C.1
aattgccgggtcgacggtctcagctagtcggcgggcgcccttgcctggaggtaattgtggggcaggaccatgctatcttctagcaaggtgcaaaggcaacagatgcatgtaatgagaaaatccaggagaagaagagagctaaccatgttgcactgaagctgacttctgccatgatgtagaggccctaaccctaaccttggttgaaaccggatccagacggttgtcagcgtttatcccaacaaagtggtacactaccctgcaagaggcgcgaccgtttccaccggactagttacctat

SEQ ID NO: 155206 - DNA, 360 bp, Zea mays
  unsure (1)..(360): unsure at all n locations
  Clone ID: MRT4577_73129C.1
cccacgcgtccgccttgttcctccaacaagggtgataattattacatcanttaggtgagttccatttggttgcacaaaacatcacttcacaacaactacaacaacttatgctatcaaaccttgctgcatactctcaacaacatcaatttctttcattcaaccaactggctgcattgaactctactgcttatttgtaacaacaattaccattcatccatctagttgttgactacccacagcaatttcttacattcaaccaactatcaacattgaactctgctgcttatttacagcagcatcaactactaccattcatccatctagctgatgttagccctgcttccttcttgacacaacaac

SEQ ID NO: 155207 - DNA, 272 bp, Zea mays
  Clone ID: MRT4577_7312C.1
attacttccatgatactattttctttatttggagcctgagagccaggggagcaacaaccccaaaaaatttgcgcccacaggagggggccaaacaaaccaggggagagggggggtgataagggggcggaaagacaggagggcaaggggggggggggcaactgagaggaaacggggggcagacaaacacgcgcacacacacagagagaaggaagctgaagagaaaacgcaaagaaaccccgcaacgaaaattggtggggaagatcaaccgggac

SEQ ID NO: 155208 - DNA, 246 bp, Zea mays
  Clone ID: MRT4577_73130C.1
acccggccgacccacgcgtacgatgagtctgaacacactttttttgaacgtttcttttcccccacaaaaacatttctgggcgttctacataaaaaggaggaggcttattatacattataccttaatacctaccttcatatcgatcttattaaaataaacctcctccagttcctcaaaaccacatctgaaaatcctctagttcactaaaatattgacccagccatcaacctccataaacataaatat

SEQ ID NO: 155209 - DNA, 607 bp, Zea mays
  Clone ID: MRT4577_73131C.1
caaacattatccaaaatgccaacccggagcagtacctgaattggtgatgggactgaggcattctagacgtgttggcttcaatatgtgaacctgaccatcctcagctaatgcagttggccgtgattgtgcgtggacaatatttctatcaatggtctgatcctgtttacatttattctgcagatgggggagaaaagagacaaggctctcaaggagctcatggaccaggtggccatgaagcagcccaacagcatgtgccatggaaacaaggataatttctgggagagccagggcttcaggttcattgcctctatgtcgatgctggcgctagtgatcctcgcaaagcgttgaagcggcatagtttaagcagatgtgaatgtagcgtttacattagcttgtaggcttgggcagttgtgcatactgcatgccaaaatttgccgacatccaatcctagtctgtaaactgtaaaaatagttgtggcctgtaatccgtagcgcagtttctgctagttcatgtaaacccatataagctgtcttgtagtcacagctagtgaatgtcagctcatgtagtcaagaatctacaaccttataatttcagttccagaactgct

SEQ ID NO: 155210 - DNA, 286 bp, Zea mays
  Clone ID: MRT4577_73132C.1
tttgtacgtctggggggcttttttttttgggggatgaaacactcacaatgagcccccttcaagaggtacttcagaaaggattttcactccacatcaatgggccttggcccctcaaaaagaagccattgtgggggaactatacaactcgccctccgggggattaaaaatagggcaacacactggggttttacaggacccgcaggggagaaacccttggagagcggaaccacaacggggggggaaaaaccacggggcatcttcaaattaccacacgatatggttataa

SEQ ID NO: 155211 - DNA, 1168 bp, Zea mays
  Clone ID: MRT4577_73133C.1
ggggggtacctcgaggccggccgggagcaccacagcagactagcacgcgtggtcatctctaggctggactgctggaggtcgccgtggcatccaccctctccttcgaggtgccggttcggctagcggcctcccgcaccacgagcgccaagcctcttacctcctccaagatggcgcttgggctccgctcctacgccttttgcaggtgttctgtcagcggtggcgggagcaggtaacaacgttgttgaagagagaagcgacggaaaggagaagagagcttggatgaacttttgttcgcttagtgtcgaccgtaacaagattgaagagagaagcacagggaagaaaaagagagattgaacatcttttttgtgttcgcttattgtcgaactgtcgatcgtaagcctgagttgccctactaccctggtcattaatcagtttcaccgctgggtcagccatggccgccacatccgtcaaggtcgcgcacctcacgaccctcgcgctcttctctccgactccaaaccccttcggtccgaagtccagcaaacacagagctagagccccaccacccatctccatctccatggatccggccctcgtggaccctgcccacctgcaggcccttatgctcgcctgcggccactcttgcacgctccgcctctcgccggcgctatcagtttccgccgttgagccggtcgacctcagcaagctccggactgcccttgcgcacagcttcgtcgtcgtatctgtcttctgcggtgctaggttcttcacacatgacagggaaagggagggggagggacagagattcttgggcttggagatcggtctcgatcttcagggtgagcggcgccttgtcggattcgggcgcgccgtctccgacctcgggctcaccgcatccgtccatgacattgtggtacatccattactacagaggagaggaattggccaaaagatagtgaacaaaattacaaggcccttttttgaagcttgtggatttggtgatgatatgatgggttcaacaacaatgttgtatactagaaaaacacagaaatagagttcattaaaaagttctcaattggtataatgttatttgttgatatgataactcatctgtggtcttcactgctgatgtttcaaagcattactctcagaaaaaaaaaatcaaaacagc

SEQ ID NO: 155212 - DNA, 1436 bp, Zea mays
  unsure (1)..(1436): unsure at all n locations
  Clone ID: MRT4577_73134C.1
gggtacctcgaggccggccgggccggggtcccatcagcgtcttatccttggggcgtctccagctcgcgtaccagcaccacccgagcagactaccacgcgtggtcatctctaggctggactgctggaggtcgccgtggtatccaccctcttcgcctccgcgctccgctcaccattctcgacctcggggtttggatccccgtctcggccttgaccttcgaggtgccgtccggctagcggcctcccgcaccacgagcggcaagcctctttcctcgtcggaagcggccgcaggggcaccagctccccgacctcctctgcctcgctccagcgttccctcacctccgcagccgccagcaagatggcgcttgggctccgctcctacgccttttgcaggtgttctgtcagcggtggcgggagcaggtaacaacgttgttgaagagagaagcgacggaaaggagaagagagcttggatgaacttttgttcgcttagtgtcgaccgtaacaagattgaagagagaagcacagggaagaaaaagagagattgaacatcttttttgtgttcgcttattgtcgaactgtcgatcgtaagcttgagttgccctactaccctggtcattaatcagtttcaccgctgggtcagccatggccgccacatccgtcaaggtcgcgcacctcacgaccctcgcgctcttctctccgactccaacccccttcggtccgaagtccagcaaacacagagctagagccccaccacccatctccatctccatggatccggccctcgtggaccctgcccacctgcaggcccttatgctcgcctgctcctactcttgcacgctccgcctctcgccggcgctatcagtttccgccgttgagccggtcgacctcagcaagctccggactgcccttgcgcacagcttcgtcgtcgtatctgtcttctgcggtgctaggttcttcacacatgacagggaaagggagggggagggacagagattcttgggcttggagatcggtctcgatcttcagggtgagcggcgccttgtcggattcgggcgcgccgtctccgacctcgggctcaccgcatccgtccatgacattgtggtacatccattactacagaggagaggaattggccaaaagatagtgaacaaaattacaagggtacttcatagcagaggtatatatgacatctctgcgttatgtacagcaaaggagaggccctttttttgaagcttgtggatttggtgatgatatgatgggttcaacaacaatgttgtatactagaaaaacacagaaatagagttcattaaaaagttctcaattggtataatgttatttgttgatatgataactcatctgttggtcttcactgctgatgtttcanagcattactctcagaaaaagttgatcttcaaaaannnnnganannnnnnnnnnna

SEQ ID NO: 155213 - DNA, 505 bp, Zea mays
  Clone ID: MRT4577_73135C.1
ttgggaccctcgaggccggccgggacagtctttcctctcttgctgcgaccccgttggcgactgagactagatccccttctcctgcgctggcgacctccgtctgtgagatgcctcgctgttactgggactactgttacatctacctgacccatgactcgccatctgtacggaaaaacataatgctggatacaaacacaaggagaatgatcgaaactactaccatctattcgatgatcagcaaactcaaagttttattgatcaatgaataaaagatcatcttgaacaagctgcagatgctccaagcaggtgccccttacaaccaacatctgattgcattcccattatctatggaccaccctcgacttccaattctgacagcccctggacatgtctcttgggtttactcatgcacctgcaacaccattgatgacaggaattatgtccccgattttaccacttccacgttatcctggttctcctacaaccatgtagcaaccatgcgccc

SEQ ID NO: 155214 - DNA, 221 bp, Zea mays
  unsure (1)..(221): unsure at all n locations
  Clone ID: MRT4577_73136C.1
agcgaaaaacggggcgaccgagcctgctcggcctcggtttccggttcccttcccttcgtgcaataaccggtgcccttacccccaactacncgcgcccccgggggcccccgccggggtccttcttcctccgctcgctcggaaccagaggcctcgcgacgtctccgcctgcggnctcgcgactgctaggtttcttcgggggcgcggccatgtcgtcggcggcg

SEQ ID NO: 155215 - DNA, 272 bp, Zea mays
  Clone ID: MRT4577_73137C.1
ggtctgttttgatcggcgcggctatctccgcggtgaaagctttccccaattcccccccttctcccatttctcaccaccgtcgtcgaccccacggttcaacatcaccatgagggagcgcatctcgatccacatcggcgaggctggtgttcaggcctgaaacgcgtgctgggagctgaactgtctcgggcccggcatttaagctgatcgtcggatgccccgtgacaagccctttggggggggtgttgatgtttttggcacctttttcagcgaga

SEQ ID NO: 155216 - DNA, 744 bp, Zea mays
  Clone ID: MRT4577_73138C.1
aagattgtccatcagggtataaggctcagtgacaaggataggtaagctgctccagaagagggacttccagccagatcccaatgagaacgaagacctccacgtgcttgctgaggcacatacaccggaggcactgcatgcagctgctggtatggcgcagaagctgctcaccccgatgcatgacgtgttctgtgagcactagcgctaccatctccggtcagcttgccgctgtcttaatggaacaattagggcacgcatgatattttgtaggacatgtgcggaggctggtcacaggtcagtatcgcttgccccaacaagatgacacacgtgtaagagtgatgttcagtgcaagatctgcggacacggtgggcacccaactattgattgtccgctcaagggcacttctgcgaagaagatggatgatgaataccacaacttcctgtctgagcttggtggtgagagtgcacctgattccatgaacaaatctgagggcccgatgttgtctcttacaggaagtgtgggtagcgcaggtgcttctactggaactgctactaacccgccttggtcgaccggtgatggtgccgcttccactggactcaatggtatcgagaacagattatgacgagacgaatctttatattggatacctgccacctacgaagtacgatgcatggttagtcaggctgctttcgcagtttgctgagattgtcatgactaaggtgatcaaggatcgctacactgtacaga

SEQ ID NO: 155217 - DNA, 780 bp, Zea mays
  Clone ID: MRT4577_73139C.1
tcaggccggccgggggaggcatgtaggttgagcatatcctctagttctgggattagggataggaatcagggtcagtttgctctgctggctagtagcagcagcggtggaaggggcatgcgaggagcacgagcgaggcgaggtgtggctggaagcagccgggggcctgtgtgctatactatatatacccctcgcaagctctcctctcctctcctgtgcctgcctcttccattccttctgctacgccattatatgtttgcaagcgtcagaagtgcatgcttctgcagttgccctgtgcccctgtggtgaggaaaccaacagccaaacatcgctggcattccattccacacagctctactgcattgtgctagtactaaaagtttctcaggctctgcgttttgtttgcttgagatttttggaatctgtatttggtttaattgctagattctacagattcagttacatgcaagcacattacccctaggcatagtatctacatgcgtttggttcattatgagatatttttatccagattctaaaacccccaagaaaaccaaacagactttcagtcacttctgaatctcgatctctgctatgttagcaccacggatgctgagtgtcgctgctgaaacggatcccggagggcatctttccttgcgcgtgatcatgcataggcgcatagctgtgggggctgcatgcatcatcattccaaatagggctgtatatcgctcggctacgagctcgccaaaacaaaaaatatataataaccgatttctattaatt

SEQ ID NO: 155218 - DNA, 2719 bp, Zea mays
  Clone ID: MRT4577_7313C.1
gcatctactgtcaagtagtaatgaggaatggtgtgtttagatgctagcaagcggattgcgggaaccttaattatatgcgcattcggaatatcaacgcaacctaaccctggagctggacgtggtgccaaactagggcgcgctggacatgctccaaggtgacgaaggccaatcgagccggccggtcggcacgaggcccaaaccatgcaaacaatgacgcctcgcgctcccgcccactgacccacccacgccgcctcctctcccagtgggtcctccgcatctcccatctcccgtctcccctcttcctcctcccctgcgatctccaccgcatcacctccctcgaaccctagacccacccacgcgcccattgccttcggtcgccatgtccgccgctcagcttctccgtcactcgcgcaagctgcggagtttgcaaaatgctgtaggttgtgagaattttagttttgttcggcatttctccagcggttctgggtcctttatcgccagggaaaatggtattggaaaaagaaccagaggtaccagattttcccagcataaccagcctgcaaaacagctcgagacattctcagcaggagtaaatggaacctgcacttggagaatagcatccaactgccttaccccaagtacagttagctggctccgcagtctcataactagcgcagtgggggccctacggcagcaaacatttatgtgccatcacaagcccccctcagtaagcaattttggctattggttttgccgagaagtggctgatacctggttccgccgatggtctgtgtgagtttggttcgttcatgtcagccacactgagctgtgaccacagggttatagatggtgcaatcggtgcggaatttctgaaagcattcaagggctacatcgagaacccgacttcggtgctgctgtgaagttaggaacgatgacctaacacaatccttgtcaagatgtttagataacgaggccacgaaaatgtagcgtctcaaaagttcaaaaccaaatagcacagaaccgttaggatatccccagggttaattagaatcatcgtagccgggcccgaaggcattattgggatcgctcgctcgggcaatggatggccctaaaaatgaaagaagccaacatgggggagaacgtatattttccagccctcttgcccgtaaattgcctgaagataacaatgtcccactatcaagtgtgaaaggtactggtcctgatggtcgtattttgaaggcagacattgaagattacttggcttctgtagccaagggtgggctgagggaggcttttgcagatccagggttaggttatgttgatattccaaatgcacagataagaaaggttactgcaaatcgcttgctagcatctaaacagaccattcctcattactacttgacagtagatgcacgtgttgacaaacttgtccagttgcgaggtgaactgaacccactgcaggatgcttctggtggaaagaaaatatcaattaatgatcttgtcatcaaggctgcagctttggcccttcgaaaggtccctcagtgtaacagctcatggatgaatgattttattcggcaataccacaatgtgaacatcaacgtggctgtacagactgaacatggattgtttgttccagtaattagggatgcagacaagaagggactcggtgcaattgctgaggaggtgaagcagttggctcaaaaagcaagagataatagcctaaaaccagcagattacgagggcggcaccttcactgtatcaaatttgggaggtcccttcggaattaaacaattctgcgccatcataaatcctccccagtcagcaattttggccattggttctgctgagaagagggtgatacctggttccgctgatggtcagtttgaatttggttcattcatgtcagctacactgagctgtgaccacagggttatagatggcgcaatcggtgcggaatttctgaaagcattcaagggatacatcgagaacccaacttcaatgctgctgtgaagttaggatggatgagacctaacacaattttttgtcatgttaaataaccaggccaccaaagagtggcgtctccaaaccaagagcacagagccgtcttctccgttttgatattgccattgttaagtaggatcaacgtatacatgcattattggggtcatttttgggtttgtcctcacggataattgatggaaataaatatgaaagaagccaatcttggaaagtactctgattttgaggtcaatgctatgcgattaaaaaaatgcaaatccgttgagcttctctcgaaaaaaaaaaaaaaaaaaggcccctagggccgtcctcaagatcggtgacctcggcaagatgtgctccgtcgccatgtccctcgccgatgcttctcatagtagccacgccgtgtctgccgccgccgcctgagaggataattaagacgtgcaagatgtgctggatcggatcgcccggccggcgcatgcttaataacctgtgataagctcccggtgttgccatgcttgagcggattgtagtgtctttgcgtactcccgcactctagagtctctgtaccctgacacatgctgttaaggaataaggatgtagtgggatctttctatatgttagaaccaagtttctctggccatacccatataatgtccgcagctccggtttcaagaggaaaaaaaaaaagagcgcgccggttataagggttccaggcttg

SEQ ID NO: 155219 - DNA, 351 bp, Zea mays
  Clone ID: MRT4577_73140C.1
aagcctgctgggtttgtcaaagcaagttgtacaaagggcagcaacagttgcagttgtaagagggttgcggggttagccacaaactgctggtagaacggaagcacttgttgttgtgtcaagaaggaagcggggcttgttgtagctagctggccaaatggtagtagtatttgctgctgcaaataagcagcggggttcagtgcggccaattggttaaatggaagaaattgttgctgctgttagttcgtagtagctagctggctgcatggtggttattggtgctgctgctactactcccatgggtccgggtagccacttcgtggcctggttgctttttttgcctgctgcagtgct

SEQ ID NO: 155220 - DNA, 722 bp, Zea mays
  Clone ID: MRT4577_73141C.1
gccggccgggttgcagaaaccgccttccccctgacgtctcttccagcatcatcttaccaaaccctcgccgcacacgcagccacaccttgcttctgcacgatagtgcgcgggaccggccatctatggcggcaacactgctcctccgcgatgtgcgccgaaggaagatcgcgtcccctctcggatccctgggtgccaacttacaaacaacatgtggtggcaaatatgctccaatggggaaattttgcaagaccttttagtgcaaaagtgctggaaatgacgataatgggattgaataggtacacaaataactcctgcgatgctgtgatggaagggaacaaccccatagttattgagaatgctgacagggccataacaacatcatctgttgtcgaattcactcagaaggtcgagagacatgctgccactctagcccagtgccacgaaaaaaccactctccacaatactttcattgaaacctagatgatgattggccgacgctttgatgatccacagacacccaactacatgaagcatcgaaggcctactacgatcgtgcaacgctcccataggatgatgcttgatgttcatacaacacatggcaagcagtactcaccgagtcaagtcgatgcatttatgctgaccatgatgagagctacagctgaatcttaccttgaaaaatctgtctcaatgtagagattactgctccagcttatttcaatgat

SEQ ID NO: 155221 - DNA, 276 bp, Zea mays
  Clone ID: MRT4577_73142C.1
cccacgcgtccggtctcttctcccttcgccttcgccccacgcgcgcgtttacgtacgtgtctagccagccgtcgcgtgccgtgtttctgcctgtcatcaggttttgtttggctcggtctgaatcgggctgttcatccgctcgctcttactcgcgctctggtttgattgttatatccgctgtttctgtttgtacgcgttgttctgtttgcttattggcggttcgattccaaggcttactttatcaagaactgtctgcggttttctgagatctctcac

SEQ ID NO: 155222 - DNA, 296 bp, Zea mays
  Clone ID: MRT4577_73143C.1
aaaggcaaatccaaaaattttacaaaaccaaaggggtccggatttcagggttacaagcatttaatcttgacgggaactattgttgttcaaaggaaaaaaacaatgcgaggggccccggcccattgggggtttaaaacagtttacaattcatgcccttgcccaaaaaaaactaaactgttctgagcggggaaaagaccctgaattttaattgccctgcgctggccacccttgggtgggggggttttggtttttaatacccgggggagggaaccttttcttgggtgtggaaaataaaa

SEQ ID NO: 155223 - DNA, 491 bp, Zea mays
  Clone ID: MRT4577_73144C.1
agatcgcctatctggtgatcagcttgaggagaattagccctatgcattgtagcgttggagacgaggagctctctgaccacctgggtgcttacatgcccaagaagatcgccaatgttgaagttactctgctcattgcatgccaaccacaagaactctaacgcgatcatgacgcacaaccgatgctctgccacgattgctgcacacaccgaatctgtgatcgctgttcctttgacacctgatggaaagagtctgactagcggttcacgtgacaccactgactgctgtggggacctgagtacacagacttcattgttcacatgctaaggacacatacatcgagttctctgcatagcatggtcacctgatggaaaacatcttgttagtggaaccaagtgatgagaacttatgttatgggacccaattactaggaaccagtcgtgcactccacttatggtacacaggaaatggattactggtgaatcatggcagcc

SEQ ID NO: 155224 - DNA, 224 bp, Zea mays
  unsure (1)..(224): unsure at all n locations
  Clone ID: MRT4577_73145C.1
aaaacactacaataacaatttcctttcagaaccttgaaactncatatgggaggggtattccaaatgaacggccgtgtccaatatacaacaccttttcaaaatatttgcaaaattttccacattctaactttaactaactaccaaaaaaaacttttgatctttcatttagattctatttcccaacaaattttcatattgattgttaaagctatatttttcctaat

SEQ ID NO: 155225 - DNA, 245 bp, Zea mays
  Clone ID: MRT4577_73146C.1
gcgtccacgcgttactgcatcaccatgggtggcatttgtctgtgttagcaatgacctgactgaacgggggtaatgaaaagaaaaacggaccgttcctaaattttactaaccgttaatcaaaaagctgcgttaaataaaaatcaatcctcaaccgatataaaagaggactcattactttttgctgctttcttgaaaaaagatattaaaggacctttatttgtgggggtcgttcttaagacaccatt

SEQ ID NO: 155226 - DNA, 273 bp, Zea mays
  Clone ID: MRT4577_73147C.1
gtttggttctttttagctaggatcacaaattgattatgaaacattttctcataataatataacacacattttatatataagttatcgtaatatactggcattatatattaccgttgcaacgcacgggcactcagctagtaacactgaagcagtcaaatgcagacagagagagagagagctcgccctctcaaaagaaaccagaatatataccatgtgttgaagtcatcctcaatgcattggtcatcatctccaagaccaactggaacaaggcgc

SEQ ID NO: 155227 - DNA, 395 bp, Zea mays
  Clone ID: MRT4577_73148C.1
cggggacacaagccttaattttttttttttatttttaaaaattttaaaaaaaaaaggttgttcctttttttaaaccaccctttagggtaaattccacaggtgggcttttccctgggggcttttccggccttgggttaagggggcccaattggcccttttggggggcgggggggaaccccctggggggggggctcagaacccccttgccgggaagacccccgcttccccccccctaattggccgggcacccccccccgttttgcccgttggggcccacaccgaagaggccttcccaacattacccttcccaacatgggcgcgtggccccccggagaaggggcgccttctgccccggcgctttaaccgcctccccaagggggaatagaccccccttt

SEQ ID NO: 155228 - DNA, 464 bp, Zea mays
  Clone ID: MRT4577_73149C.1
gagatcgtcctaggtagacacacttcccttcacctctcatcggcgctctttcccttcctcgcagtcccaggtctcggctcccctctcagtcaagccgtttcatttcctccctcctacaaatatcctgatatggacgacgacgacgactccccgccgccaccgcctcgccggccagcaccaccaccactctcaccacctcatacgccggcgcccccgacggcggcaccagcaccaacgacgacgacgacgctgacgacgccggggagctcgacctcaacctcagcctctagcactgcttgtatctacatctacctacgcgccaaggttattaatcgtgtgccggcctatccgtaagctacgcgtgtcacttaattagctcttagtaggcacgttaatccctctctctctatctctgctccctccctctgtatgtcctgttattattagtacgtctcgtcatctcc

SEQ ID NO: 155229 - DNA, 1013 bp, Zea mays
  unsure (1)..(1013): unsure at all n locations
  Clone ID: MRT4577_7314C.1
cctttattacttctaactatgagttccttgtgtcactccaatcaacaggttgcgaggtgaactgaacccactgcaggatgcttctggtggaaagaaaatatcaattaatgatcttgtcatcaaggctgcagctttggcccttcgaaaggtccctcagtgtaacagctcatggatgaatgattttattcgccaatatcacaatgtgaacatcaccgtgcctgtgcagactgaacacggattgtttgttccagtaattagggatgcagacaagaagggacttggtacaattgctgaggaggtgaagcagttggctcaaaaagcaagagacaatagcttaaaaccagcagattatgagggtggcaccttcacggtatcaaacttgggaggtcccttcggaatcaaacaattctgtgccatcataaatcctcctcagtcagcaattttggctattggttctgctgagaagagggtgatacctggttccgccgatggtctgtatgagtttggttcgttcatgtcagctacactgagctgtgaccacagggttatagatggtgcaatcggtgcggaatttctgaaagcattcaagggctacatcgagaacccgacttcgatgctgctgtgaagttaggatcgatgacctaacacaattcttgtcaagttgtttaaataaccaggccacccaaaggcggcgtctccaaaccaatagcacagggccgttatgatattcccagtgttaagtaggatcaacgtatagagaggcctgaagtcatttttgggattgttctcacgggcaattgatgggaataaatatgaaagcagccaacatgggaaagaactcattgatatatttttttggaacattgctatgcgattaaaaaaattgtgtaaatctgttgagcttctacacggtaagcgtgatttgatgcgttgatgatatcttgataagagtggtaatcatggattgggttccaaaaaaaacaaaattnnnnnnttttttnaaaaaaataaag

SEQ ID NO: 155230 - DNA, 1017 bp, Zea mays
  Clone ID: MRT4577_73150C.1
cggccgcgtgggcacacttcccttcacctctcatcggcgctctttcccttcctcgcagtcccaggtctcggctcccctctcagtcaagccgtttcatttcctccctcctacaaatatcctgatatggacgacgacgacgactccccgcctcatgagtcggcggcggcggcggcggcagacctatcgctgacactggcgccggcgccggcgctggcgcctcccgcgccgcctccggcgctgcccgccgtcgcctccgacggaggcgtggcgacggcgcgcgtggacggcaaggacgtgcgcctgttcccgtgcctcttctgcaacaagaagttcctcaagtcgcaggcgctcgggggccaccagaacgcgcacaagaaggagcggagcgtcggctggaacccctacttctacatgaccccgccgcacccgcagcccaatgcggcgccggcgagccccaccgccccgccgcccgcctacgcggcgggcggcctcctccccgcgccgtacgcggcccacgtgtacgcccccgtgccggcggacgcggggacgggggcgccgacgaccgcgggcgtcgtgcttgccccgcgcgcgcgctacgccacggccacgcaccagcagcaggcccagcagcccggcggcttgcgggccagcaccaccaccactttcaccacttcatacgccggcgcccccgacgggggcaccagcaccaacgacgacgacgacgctgacgacgccggggagctcgacctcaacctcagcctctagcactgcttgtatttacatctacctacgcgccaaggttattaatcgtgtgccggcctatccgtaagctacgggtgtcacttaattagctcttagtaggcacgttaatccctctctctctatctctgctccccccctctgtatgtcctgttattattagtacgtctcgtcatctcccgtcccttttccccatggcctcatgaattgtttttttttggctcttgttttttttggaggatttgtctgattgcgccc

SEQ ID NO: 155231 - DNA, 302 bp, Zea mays
  Clone ID: MRT4577_73151C.1
tctgcggcggaaggatacgcacccattcttagagatatctcacagatagggctcgcttggctattaataacggggaacaggcaatgcaatgtagcacacagacttgctctagatgactggctatccctgaatgagagacatgatgcccattaagacggtggctaggttggtaacatgccttgttatgcgactgttgatgggctcaagagccagctgagcaaagagttccatgttactgatgaaaactggtgtgtgaacaaaggaggagctcgcactggtgaagtcagctctgaaacgctcga

SEQ ID NO: 155232 - DNA, 1334 bp, Zea mays
  Clone ID: MRT4577_73152C.1
ccttctcccgctcgcctccgtttcgtgtcggctcgctctaaacgtgagatcggggaggtggtggacttggggtcgttgtggtatcggcggcgagccgcgggggcctagggtttcctgccttcctggtttggatccgcgccctggcccatgggatccggaggcttcgcggccgcggtggccgcgtgcccctccgccgccgaggccttccttaagtactatggtattgtatcaggaggtacaagtgcggagtcaagacaagcattggttgagctttcactagctatagacggaattgaaggaatgagggatgtgatatttgctgatattccaaagctcattccatttattgatctggaggatatgagcctattcagttgcttctacgattttgttttcttcatctgccgtgaaaaggtcaaaagagtgtcactattcagagagctgtagcagcatggaggattgttctaagtggaaggttccgtttgcttgatcgatggtgtaacttcgttgagaagtaccaacgccataacatatccgaggatacttggcagcagctgctagctttcagcaggtgtgtaaatgaagatctggaaggttatgacccacgaggtgcttggcctgttctgattgatgattttgttgagcaaatgcacagaatttatcactccactgactgcagcagtgcgatggaatcacagtgtaacatttccagtacccttaaaggactggaccctcaacctggatcaaagaggaaatgcccacacctcaaatccaatgaagaggatgtagagctttcggatagctttacgcgctctgtccatcttacaccaataaagcgagtcaaggaaagccatgacgccagatatggagcgggggaatccgccaaaactacccatttctctaatagttcctctggtggttaccacgaggatatgaatttacacaactcaagaggttgccttcagaactccccctgtaatgttgaggatgccctgtccaaagggtttgagggttgtatttcgatgaaatgcccattttgatgtaacaaatttcgtgtcagcccagaaactatacattcccttttagcggcaaaatcatcctgtgtgtgtatctagtcattttgtgcaaaaaatgcagtaattgaatgcatttttttaaatgttttaaagtgtattgattagcatcggacctgttttttagaggcatcggtatgaagggagggctgttggttgtgtttacttgacagcaaatccctcccaatcaataccctgcactttctgaaaattgccactttcatattcccttcctttgagctttgttaaaaaaaaaagatc

SEQ ID NO: 155233 - DNA, 299 bp, Zea mays
  Clone ID: MRT4577_73153C.1
gtacgctagctaactctgacgaacactgtaactgtcgcgtacactcacatcacgttcgcgggtgggccaaacttaacccatgtaaaacaaattgttgcaacaaaagcggtagcaccagtagcggtcacagaggcaccaacatgccgcgcctacgagacctgtccgacaacaaagcaaactgaacataggaaaaacctaacacctgcttctgaactcccaaaccctcagcctagagctgggaatttagtacgcctacctaacggtaaccaaatacaaactactaacttgttaaccttaac

SEQ ID NO: 155234 - DNA, 781 bp, Zea mays
  unsure (1)..(781): unsure at all n locations
  Clone ID: MRT4577_73154C.1
cgatggcgacgccgcgagtcctcgttcggtagctccgctctgctcgctcccacacgcgcgccacaccatccacgcgctctcgcttccttttccctttggactcagctccggccttcttttcagttcgcgtcgcatcagaaaggcgagcggcacacacggcgcatcaaaaaaaaggttgccagctccggacccggttcaccaaccaaaacccccggccccagatcgggtggcggtgtggcacgacaacggcaacgtcacgcacgctttggacgccgaccttttcgtgttgtccaggctgagccagccaggcaagcaggcccagatgagtagagacggcgctgagccgctgaccgtaaccgcaaagcttctgcagacagtgggctcagacccaggccgccgtgccttagaccccacggcccaccggcgtggggcgtcgngcgtggttatccgcttcctgtggccacgtcacaactttctgataatttgcagggaccggcaacatatcttcgaaacaagtaatccagtaaccgcagtacactgtttaagcgtcaaacagaccggttgctggctttctcagttccctctggacaaaaaaaaaaaaaacagagctagtaaacgtcctgcgtcctgcctccagaaactgtgttgctgcctgtcaaactctctgcagcataggaatttctgaaatcggtaggaaactacactatagtgccgtcgaactcctgctgactttgtggtagaatttgggctttcatctctactttatttctaccatatttaa

SEQ ID NO: 155235 - DNA, 358 bp, Zea mays
  unsure (1)..(358): unsure at all n locations
  Clone ID: MRT4577_73155C.1
aacgaacaganaaacaaaaaaaaaaagcnncgngngcanggaaaanccannacaaancagnnacccccaacgaaaagagaagggagcncaanncccngnngaccccncagccnngacaaagcagggaggcaccnnnnaaancncncaggaaggaacgggncganccacccggaaacagcncggcgcacagaagagnnnagcccaaaagcaanggaanngaaaaggcccaaaagnccagcgaacccaacaacaagaaaggagagccagacnanccngngcccnggaagggcaaagncaaaaagacgaanngaagnngcaaaagcccaagaaccgannagaannagagggnaaaaacccc

SEQ ID NO: 155236 - DNA, 826 bp, Zea mays
  unsure (1)..(826): unsure at all n locations
  Clone ID: MRT4577_73156C.1
cagtatgtcggctcacccgaagcctataaattcctcgccgcccatttccctccgccgcctcctaatcctcaacacccgcgcccccaccgcgcccgtcgtatgccaccatgcaccgtcgcccgccccaccgcgcacgctaatgaccccgatgctgccgtacgccgaccgccgccgacgatgctgctggagcccaaactctaggacgaggaggtgccgctgcagcaactggcgaccccgggcaccttcgagtccctggaccagctgatgccggaggtggacgcgccggccgacccgcacccgctggaggggctgctgcacgggccgcagctgccgcccttcctgtccaagacgcaccagctggagagcgagccgagcgctgcacggagtcatctcctgaggcgctgccgacaacagcttcaccgggtgtgacccctccaccttcgcgcgcgacgggctgccgcacaacttccagcacaaccatttctccaccttcgctaggtagatcaacacctatggtctccgcaaggctcatgctgacacaaggcagattgctcgcgaagatctgctgcaagataccaagcatctattgaagacgatggtcaggcgcaggacctccccaagaaaacaaggtggcgttctgcctggcctgtcttctgtagaatccagcttggaccctgagctctcgcgctgacgagagagaagaaccgctgcttgaagaagtagcaagggtgacacaggaacacctccttactattgatgcaatgaacacgctgaatcactggctggtatctgcagaggaccggcagatgagnatggtctctttcct

SEQ ID NO: 155237 - DNA, 416 bp, Zea mays
  Clone ID: MRT4577_73157C.1
gtgaaacggtaaaatgattggtcaattgataaagttaacaatatcaaaggtacttagcattacataatgacaacaaagtacacctccaaagaaaagtacatgatactgaccgaatgacaacaaactagacctcctaaccaaagcacatgatacaaaacattttaattacatcaaaggttgtggggtcctttacacaccagatcgactgctctggttttactgcaatttcttcagtattttggaatagaggactgatagcttgtttgttgtagaagaaagcgttgacaacttcgtcccttgaactataacttttggaagaattgttactgaaacccgatactggctcttggtatgtggcccaatcattggacaccccccgagttttttgcctagacaccacataccattttcatttc

SEQ ID NO: 155238 - DNA, 371 bp, Zea mays
  Clone ID: MRT4577_73158C.1
actttttcgtcgtaaccgtacactcttttttttccgtttttatagttttttacgaatgcttctgcacttgtcaaccgggggcacctcttgggagtccaattgaaaaatccaccccttttgcttgggccaggggacatgcgaaacttcctagatgcagacccaaagggcctggggatgttgccttttaccctcctacggcgatcccaaaacccccaaccggaggggacactaacgccccctccaacctttttttttcccgtaccccgaagaaaaccgggagagtggcctgcgaaaccaaactgtactaagacccggagagcccgatttcttcctcttctttcgcaggttccaatccatgggggcgggggggg

SEQ ID NO: 155239 - DNA, 1234 bp, Zea mays
  Clone ID: MRT4577_73159C.1
gccggcccctgccgggagagctcccagtccgtcaccagctcaagaagactactagctagtgtcagtcatgatgacatcccactcatcagtattagtagcaggactagtgtgtctcagtgcggcggtggtcgtgccaatgccatggctagccgccggggagagtagtattggtggtgcggagtgcaaaagatcatgcggcggcgtggagatcctcagcatctctccggagcaaggtgaagccaaggtgctcctccctatctcttcttactgctacgactctgcgtctcggacgatggtggccgacgagtggcactggtccttgggcgccaattaccgtttctccagcacggccaacaagttcacggtggtagggtgccgggcgctggcgtacatcggtgacaccaggaagaagaggaacaacgttgctgagaataactacctgaccgggtgcgtgtccacgtgcttcagccgcacgatctccctaaacacttgctccgggatgggatgctgccagacggtcatccccaacggtccgccgtatttccatgtgtggttcgacgccggcttcatggacatctctgggatcgacggcggcgcggacttatttggtcgctgcagcttcgcggtgctcatggactcgtccaacttcacgtcgtggacctctagctccagcaacatctcgtcgccggagttcgtcaacaatgttagctcgctgttgcagttcttcaacagctcccgtggtggaaaggcgccggtggtccttgactggtccatcggggaggacgactgcaagaaccctgcaggatacgcgtgccgcagcgtcaacagcttctgctcaagcgcagccagcggacggggctacatctgtaagtgcaaccaaggtttcgacggcaacccttaccttcctaacggctgccaagcgctgttccgtcggcgttccgatgatgccgtaggcgacctgagcctgtggttccctttccgactgggacatttgggggaggggaagtagcagacttttgctgcttctgtactaaggtggttcccaagggagaacatcaagactgaagtgcgggaggactcggtcctccacttgagatcttttgtttttttagtccttcgggagaagttgtgtctccccggtttgtataattattacccttatgcactcactttttagaactggtctgtaataacttaacttgagcttactttggaaataaatgtaagattatgt

SEQ ID NO: 155240 - DNA, 2073 bp, Zea mays
  Clone ID: MRT4577_7315C.1
ggtaatccggccgcgcgtgccgccgggcgctcccacccactgacccaccccacgccgcctcctctcccagtgggtcctccgcatctcccatctcccatctcccgtctcccctcttcctcctcccctgcgatcttctccaccgcatcacctccctcgaaccctagacccacccacgcgcccattgccttcggtcgccatgtccgccgctcagcttctccgtcactcgcgcaagctgcggagtttgcaaaatgctgtaggttgtgagaattttagttttgttcggcatttctccagcggttctgggtcctttatcgccagggaaaatggtattggaaaaagaaccagaggtaccagattttcccagcataaccagcctgcaaaacagctcgagacattctcagcaggagtaaatggaagctgcacttggagaatagcatccaacagccttaccccaagtgctgctagctggctcagtggttcattctcatgtggacaggtagtctcagcgcggccattctcaagtagtgcagacctgcctccacatcaagaaattgggatgccgtctctttcacctacaatgactgagggaaacattgccaagtggcttaagaaggaaggagacaaggtctccccctggtgaggttctctgcgaagtggaaactgacaaagccactgtggagatggagtgcatggaagagggctatcttgctaagattattcatggagatggtgcgaaggagattaaagttggtgaggtcattgctataactgtagaagaagagggtgacatcgagaagtttaaggattataagccgtcatcttcagctgaacctgtagctcctgctgaaccaaaggctgaaccagaaccctcacagccgaaggcggaggaaaaaaagcctacgcaggctcctgagacgaagaccccgaagattgaagaagcttctcaatctggagatcgcatatttgccagccctcttgctcgtaaattggctgaagataacaatgtcccactatcaagtgtgaaaggtactggtcctgatggccgtattttgaaggcagacattgaagattacttggcttctgtagccaagggtgggttgagggaggcttttgcagatccagggttaggttatgttgatattccaaatgcacagataagaaaggttactgcaaatcgcttgctagcatcgaaacagaccattcctcattactacttgacagtagatgcacgtgttgacaaacttgtccagttgcgaggtgaactgaacccactgcaggatgcttctggtggaaagaaaatatcgattaatgatcttgtcatcaaggctgcagctttggcccttcgaaaggtccctcagtgtaacagctcatggatgaatgattttattcggcaataccacaatgtgaacatcaacgtggctgtacagactgaacatggattgtttgttccagtaattagggatgcagacaagaagggactcggtgcaattgctgaggaggtgaagcagttggctcaaaaagcaagagataatagcctaaaaccagcagattacgagggcggcaccttcactgtatcaaatttgggaggtcccttcggaattaaacaattctgcgccatcataaatcccccccagtcagcaattttggccattggttctgctgagaagagggtgatacctggttccgctgatggtcagtttgaatttggttcattcatgtcagcaacactgagctgtgaccacagggttatagatggcgcaatcggtgcggaatttctgaaagcattcaagggatacatcgagaacccaacttcaatgctgctgtgaagttaggatggatgagacctaacacaattttttgtcatgttaaataaccaggccaccaaagagtggcgtctccaaaccaagagcacagagccagtcttctccgttttgatattgccattgttaagtaggatcaacgtatacatgcattattgggggtcatttttgggtttgtcctcacggataattgatggaaataaatatgaaagaagccaatcttggaaaaaaaaaaaaaaaaaagcggcccggc

SEQ ID NO: 155241 - DNA, 381 bp, Zea mays
  Clone ID: MRT4577_73160C.1
gacaggaggaggaagaccatatcggtcgatcgatccatccatccatcaaattaatggcggagacaacaccgtacaagcccaagaggatcctgatcacggacaacgcggggttcaccagccacccacgaggcgatgcgcatggtgacaggtaccccagaaacaaggcggaggtgcagaacaagcttgactaatgctccaagctcaggaacctcctccccagcatgtagctccggtgggaacaactagaagttcgtcaagggcgacatcggccagcgcctgacctcatgcagcattcatcgctggaccacccagggacctcgacaccaaagaatgcactatggctgcgacataccaacgacgtacaactccattcgcaacact

SEQ ID NO: 155242 - DNA, 688 bp, Zea mays
  Clone ID: MRT4577_73161C.1
gccggccgggtcggggtcgtgcactcgtgtttcccttcctccacttgccttcgtgttcgtgattcgtgatttcgccgccggaaagccgagggagagggagcgatatggggttcgtcggagacacgatggagtcgatccgctccatgcagatccgccaagtgctcatgcagatcatcagcctcggtatgattgttacctctgcattaatcatatggaagggtttgatagttttcacggggagcgagtcaccagttgtagtggtgctctcgggtagcatggagcctggatttaaaaggggtgatatcctgtttttgcatatgagcaaagatcctattcgcacaggagaaaccatttattaagtacctgctgattggcgcactgggcttgctggtcataacgtcgaaagattagtgatgtcaaacttcagggccatgtagattttgctcttatggcgcaacagcagagatcactggctttgtggcgtttgagagatgccgctatgttgcgccatgtatcaaacgagaagatttctttatctactgcgagggcacctgcccattgatcggatagtcggttctaatccagcatccatcttttgtagttgtggcctagctaatgagttgaaccagtcgttgggttctattcgatgaagataactcgtcaaaaaaaaaaaaaaaaaaggccccta

SEQ ID NO: 155243 - DNA, 405 bp, Zea mays
  Clone ID: MRT4577_73162C.1
accaaaagggggacaattttttaccttaaccaaaaaaaaaaacccgggggggcaatccccctttcaaaaggaaaaccggcctagggttttaaaacaaaagccctttataacaattaaatttttttaaagccggggttttcccatctatgggggcaaaggctttaaacctttgaaaggggggaaaacccctaccaaaagtaaccttcccccggttttcccacccccggttttttttaaccattaaagaaaacccctcccctcaaaacaaaatttaaagccttaaaaaaaaaaattgagggacaagtcccagggaccctttttaaaaacaaatacttttttttggggaagcccagggccaaaaaactttatggatttctccataagcaccttcttttccttaaaaac

SEQ ID NO: 155244 - DNA, 1127 bp, Zea mays
  Clone ID: MRT4577_73163C.1
tactaccacaatatcgagcatcggcggggccgccccggaaaaaaaacgcgaacgcagaacgccgccggcccgtcgtgcactcgtgtttcccttcctccacttgccttcgtgttcgtgattcgtgatttcgccgccggaaagccgagggagagggagcgatatggggttcgtcggagacacgatggagtcgatccgctccatgcagatccgccaagtgctcatgcagatcatcagcctcggtatgattgttacctctgcattaatcatatggaagggtttgatagttttcacggggagcgagtcaccagttgtagtggtgctctcgggtagcatggagcctggatttaaaaggggtgatatcctgtttttgcatatgagcaaagatcctattcgcacaggagaaatagttgttttcaatatcgatggtcgtgagattccaattgtccaccgagtgattaaggtccatgaacgtcaggacactgcagaagtggacatcctcaccaaaggtgacaataattttggggatgaccgactattatatgcacatggccagctttggctccagcaacaccacattatggggcgtgcggtgggctaccttccatatgttggctgggttacaattatcatgactgagaaaccatttattaagtacctgctgattggcgcactgggcttgctggtcataacgtcgaaagattagtgatgtcaaacttcagggccatgtagattttgctcttatggcgcaacagcagagatcactggctttgtggcgtttgagagatgccgttatgttgcgccatgtatcaaacgagaagatttctttatctactgcgagggcacctgcccattgatcggatagtcggttctaatccagcatccatcttttgtagttgtggcctagctaatgagttgaaccagtcgttgggttctattcgatgaagataactcttcattgcagtcttgcaggaacctcctaggcaatgtgcaatgataaaaatctgcgcggtcttacgtgctgcttcatcgataaaaaaaaaaaaacgattgttgcctttgtttcatcttaggacaaacgggcacacgtacaaaccggcaacaggttccggtaatgtgctatgaacaag

SEQ ID NO: 155245 - DNA, 261 bp, Zea mays
  Clone ID: MRT4577_73164C.1
tcttgtttcttcttctgaattgccccccgcgggaggggggtgaaggaataaacgcagggcgggggagagagatctcctcatgcgaagctgctagagccgacctacgcgagcaagtaacctggggtcaccaacagcgacggcaccccagctcgttttttttttttttcacaaagccctggggggggggggggcgtaccccgaaaataaaccctatcttccgggacgggggggccgtacggactagtcactctatgcccatta

SEQ ID NO: 155246 - DNA, 685 bp, Zea mays
  Clone ID: MRT4577_73165C.1
cattccaggaaatctttcggtctcaaccaacctaccggattcgtcgcagtctctcaccctcgtgagtcccgacctcctgtagccgccgcacagatgataccctctgctgctttaacaagccgacgtacacgaggcccgcgagaggaggagcccgcgacatagaacgtggacaaggatccgacgccaaaaaatcccaaggctcgagcatggcgcctcccggcgggaaagatcaacggaggtcgtcagagggcgaagaaggatgacaaagaaagtcaagaacgccgtgcatacctacctcatctgacatcgttcaaggtgtctgtaggtggtggcacccctgcatcggcctctcgtgcaaggccatgtccatcatgaactccttcatcaacgacatcttcgagaatctcgcggccgagtccgccaaagtgctgcgctacgatgagaaggccaccctcacctcccgcgagatgcatacctcggagcgcctcgccctccctggcgagctcggccagcacgccgctctcccagggctctaagggcggtacaaaactcacctcgtcttaacatccttggaatgctcctgtgtgctgccgcatcagcatgtgtctcatgttatgcgatactggtaccgatgaattgtgatatatctgctggtaattcaattatagaattgtgctcatctttc

SEQ ID NO: 155247 - DNA, 269 bp, Zea mays
  Clone ID: MRT4577_73166C.1
agaggcaaccaaaaaaaccagattggcctctttatgagcgcggttaggggagctagccaaaagcagatattgccgtacactgatcatagcacaacgtagccattgtactgataccctacggactaactcaattattctgagatagcaagagcacgagaaaacctacacaccactatgaaaatcacattaactctgcaaacatatatgatctcaagaacaagaccaaaggcccataggaacttacaccaccactgggaccctaagtgctc

SEQ ID NO: 155248 - DNA, 221 bp, Zea mays
  unsure (1)..(221): unsure at all n locations
  Clone ID: MRT4577_73167C.1
cgggatactcggccgtggagcagtacatgtgatatgataacaacaagtagctaaaagttagtgaacctcttgagtttatccctacgtaatcttcgccgacttatcctcgcatggctctgttgcatgagggcttcagcgcgggaaagtcgggtctctgttatgatccattcgttcgacgttgtgggccgcctgtgnttgcactaaccagtctcacgtctcct

SEQ ID NO: 155249 - DNA, 516 bp, Zea mays
  Clone ID: MRT4577_73168C.1
gacctcgcgccctctccctctcctcagcacaagactaggagcttgcttacctctaccatcgctcactgcgctagcgtgtgataagagagagaatggacgcgatcgttggcgtgatactggggacgggcaacgcccctcccctgatctccgccgtctgcaatgacgccttgctgacactgtatgtcatcacactagagcgggttatcttcactaaagaaaagagcttacctatgtatcactatgcggctcgcaacagctgtgtacattatatagccggacgagccacccttaactctatcagtgctgcccagaggatgctatatactactgctgcacacaaattgcatggaatgcattgaaaaggacaaggttggagacagaattgtaagaaagcactcaagctgcaggtagttactgctcattactacgacgatgagactgcttctactggcgcatgtgctagatgtttagatggtgatgaacggtcattgattgcagatctgtcagaggtaaact

SEQ ID NO: 155250 - DNA, 364 bp, Zea mays
  unsure (1)..(364): unsure at all n locations
  Clone ID: MRT4577_73169C.1
agcgtggttgcggccgcgaccacgctaagcacgattcttgcnctctggctgtcgtttcccgtggttccgcgctcgttnccctgcttggcgttgtcttggtcttggttgtcccctgcttgcctgggtttttttttttttttccctgcttnntcccctttctttttgtgggggtttcntccccttttgttctggtggtttggtcctttcggggggggtttcgtttcccctgtcgctcctttgtgccgnttggntgcggtctgttggggccctttttccgcggtttttgtgggggtgtcgtgctggttgtccgctgctgtggccggnccctttttttttcctcttttcgctttctttcctgtttttt

SEQ ID NO: 155251 - DNA, 383 bp, Zea mays
  Clone ID: MRT4577_7316C.1
gcggcagcaatgttgccagcagttcaggcatgttgagccccagcaccggtaccaggcgatcttgggcttgttcctccagtccatcctgcagcagctgccgcaaagcggacaggtatcggtgaatgacacggcatgtatagcgcactatctgacggcgatttgcattattaactaatttcttatatgaccctacgctgttgccagcggataataataaatgaaaaaacaattttcattcatttacccgatggctaactctctagttgagacatctaccggcgatgattaattaacaatgtgtcacgcatcatcatgggcgacagtgtcagtgtgagcaatgacctgaatgaacaattgaactgaaaagaaaaaagcattgctcc

SEQ ID NO: 155252 - DNA, 612 bp, Zea mays
  Clone ID: MRT4577_73170C.1
cctacctccaatcccccacgtactatactacggtctacgtacgttattaaccccacctccccactcccgtcgctcctcgtcgctagcaaagcaacacccgaaggcctgcgggcgcgcggcgtgcggccaggccaccgcgccatgggcaacgctctggcgggcaggcggcgcgcggccaaggtgatgacagtggacggcgccacgttccgctacaagacccccgcggcggcgtgcgcggcgctgcgcggccacccgggccaccagctcctggagtcggaggaggtgcggcggctgggcgtgcgcgcgcgcccgctggaccgcgacgcgccgctcaagcccgggaagctctacttcctggtgcagatcccccgcggcggcgccggggacggcgacgacccgcgcgcgccgcgcaagacgtggtcgggcgcgctgcgcgtgggcgcccgcgagcgcctggagggcctgatgctgtcccggcgcaccgtctcggacgtgtcgtccatcctgccgccgcccgccgccgcgtcgtcgccgtcgtccgtggaggtgggcgccgacggcgcggtgcggctgcgcatgcgcctgcccaagccgacgtggcgcggctgatgc

SEQ ID NO: 155253 - DNA, 1270 bp, Zea mays
  Clone ID: MRT4577_73171C.1
ggcagacctcacttcttatgactatgatgcaccgattaaggagcatggagatgtgcataatgcaaaatacaaagcgctaagaagagtaatacatgagtgtactgggactcctctccatccacttcctgctaacattaaaaaagcaagttacgggattatgaaattacaaaaggttgtttctctgtttgacatcattgataatatcaatgatcctctgaaagtttctgtttcggagcatccactttatatggaacagataggccagatgtttggatttctcctgtacatgtcagaataccaagggaaactcccatcaagcatcctgtcaattccaaaggtacatgacagagctcaggtgtttgtgtcttgctcagctggtgttagaaccctaagatattgtggtgtaattgaaagatggtctaataaaacactagagataccgaacttaagatgttcatctaagaccagcctatatatcctggtagaaaatatgggtcgtgtaaattatgggccatatatttttgaccggaagggaatactatctcctattcaaatagatggcattactctccgtcactggaaaatgtatccactggcactcaattcactggacatccttccaaaacttcaactaatcactcaaataccttatgctggagccagtaaaatgtccattcatggagactcagaaaagattttacaggactcgtcatgctgttcaaatgaaagcacttctgcggagcctgcgttttatgaaggccatttccttattgacaatgagactgaattaagggatacattcatatcgtttcgtggttggaacaaaggtgttgcttttgtgaacaacttcaacattggaagattttggccggcacgcggaccacagtgtaccctttatgttccagcgcctatactcagacctggggataacattgttgtaatctttgaactgcatgctccaaatcatgagctcactatcgattttaccacggatccggatttcacgtgcggtccagaacagtgaaaaagggttgcacgtggacgtggtgtacatactgttacatagcagtacagtgcagtgttctgtccttcctcttgcttttttacgtcggtgctggtatagaatgggtaaatctgctctaggacactactctataaacgtggtattggctactggacactgctcaattgtgtacctttgatagctggatttgctgttgggtaccaaagaaaaaataaaatatcagggacagatcgtgactccctgccc

SEQ ID NO: 155254 - DNA, 1066 bp, Zea mays
  unsure (1)..(1066): unsure at all n locations
  Clone ID: MRT4577_73172C.1
tcgcgatctaggaacagcagcgctaagaagagtaatacatgagtgtactgggactcctctccatccacttcctgctaacattnaaaaaagcaagttacgggattatgaaattacaaaaggttgtttctctgcttgacatcattgataatatcaatgatggcggtgaaagtttctgtttcggagcatccactttatatggaacagataggccaggtatcaacaaatgtaactatatgtgtatttccattacttttactgaacttctgatttaagtttttgtttcatgtatctgtaatggggtttattttgtcagatgtttggatttctcctgtacatgtcagaataccaagggaaactcccatcaagcatcctgtcaattccaaaggtacatgacagagctcaggtgtttgtgtcttgctcagctggtgtcagaaccctaagatattgtggtgtaattgaaagatggtctaataaaacactagagataccgaacttaagatgttcatctaagaccagcctatatatcctggtagaaaatatgggtcgtgtaaattatgggccantatatttttgaccgggaagtgtttgaaatacaggggatgctagctcctattcaaatagatggcattactctccgtcactgggaaaattaaaatgtccattcatgggagaactcagaaaagattttacaggaatcgtcatgctgttcaaatgaaagcacttctgcggagcctgcgttttatgaaggccatttccttattgacaatgagactgaattaagggatacattcatatcgtttcgtggttggaacaaaggtgttgcttttgtgaacaacttcaacattggaagattttggccggcacgcggaccacagtgtaccctttatgttccagcgcctatactcagacctggggataacattgttgtaatctttgaactgcatgctccaaatcatgagctcactatcgattttaccacggatccggatttcacgtgcggtccagaacagtgaaaaaggttgcacgtggacgtggtgtacatactgttacatagcagtacagtgca

SEQ ID NO: 155255 - DNA, 660 bp, Zea mays
  Clone ID: MRT4577_73173C.1
cacgcctgcgtgtaccgggcccctattacacggtcgacctacgcgttcgattgagaccaactggcctcatttattgccgatacggcaccaacaatggccagacaacttatttagctgacttatgctcattggcctttttgaaaagggcgctaccaaagctcggttgccacaatgctaacagtctcctatgagctagcctgcttgccgcatgcctctcatcagtcgcagtcttcaaagggtgacaacccaagggatcaaccctacaggaaacaacaagcactggtgacaggcatataacgattatcaccctagatcctctaacaacctgaatggctattacagcagctgcctttaatacacatggtggcacaaagactattaggcgcaacaacgtgcaaaaactggtgctggcaagacacttgctgcatactctgaatggcatcagtttcttcacattaaaccaactggctacattgaactctggtgtttattggcaacaccaattaccattcaagcatgtagctggtgtctacccacacaatttgttccattcaaccaactagcagcattggactctgctggtcatttacagaatgatcaactactaccattcagccgggtaggtgacatgagccctgctgccttattgacacaacaaca

SEQ ID NO: 155256 - DNA, 226 bp, Zea mays
  unsure (1)..(226): unsure at all n locations
  Clone ID: MRT4577_73174C.1
aaaaattacatttttttttttgcagaaggngaaatagcaagaagggaccaatttaattgatatatgtgcacaggctaacagagctgaacagtaaacacaataacagctacgaccacaaacaaaacttggaatgatgaaaactagggattgctaaagcaggcgcaggatcgtattatttattataggaagcatctttgttgaccttagcgccgagtggatacatatt

SEQ ID NO: 155257 - DNA, 154 bp, Zea mays
  Clone ID: MRT4577_73175C.1
atgtccagaacgaggccttagggaatgacggcttgagggcaaagcgtacaacttatggttagtgattgaaaactgatatatcaagccctgcctcgtgtatatagagcggacaaaggtatctccaatgatgtagaggtacactgcacaaggcggg

SEQ ID NO: 155258 - DNA, 644 bp, Zea mays
  Clone ID: MRT4577_73176C.1
acggtcgacctcggccgcccttttttggaacaatttttcattttactaccgaaaatatatgattcaatggacaaatcaccctatatgaatcgttgaaaggggggggggcatttcggaccttttagaatcaaaaaacttgggctggggctgcttgctaaatagttgagcccaacatggaaaatattacacccacatccttttcgcaaaattacctgggtttggaggccagcggccttgaccattatttttaaaaactacaggatttgcccggggtgcatcactggggggcaaatgcaaatgccccaggggccctaatggtggttctacccaaaacaagccaaaaaactcaggacgggtaatttcattttaaagaggatcccgaagaccccttttgggcttactagaatacggggcgggtccccgggaattctattttctgggggggatcccccaaaaaaaaaaaatttttgtttccaacccagggaacccgggggtacatttaaaaagggcccttcctaggaacagcatcaggggattttttgagcaccctttgatccatgatcatgttaggaatcttttccccaaaaaaaatttttgagttgggggcaattgattaaaagaaccctcactccaaaaactcaggg

SEQ ID NO: 155259 - DNA, 374 bp, Zea mays
  Clone ID: MRT4577_73177C.1
caataacacgcctgtcttcttcctgcgcgatcctaccaaattccccgtctttatccacacgcaaaagaggaacccgcagacgaacttgaaagatgcaactatgttctgggattatctctccacgcatcaagagtctgcgcaccaggtcatgcatttgttcagtgaccgaggcactccgtattcctaccgtcacatgaacggatactcaggccacacattcaaatggatcaagcccgacggcactttcaattatgtccaaatccactgcaaaaccgaccaggggaacaagacccttaccaacgaagaggccggcgaacttgccaagtcgaatccggactggcacacacaggatctattccaggctatcgaacgag

SEQ ID NO: 155260 - DNA, 388 bp, Zea mays
  Clone ID: MRT4577_73178C.1
cgacttcaccaacattgttttcccgtcaccagaacaggacgcagcattcacaactgatcaaaactgggaaatggggtttgcgtgacacgtatcatgctggcgggaggggacatggcgctagggaaccccccaggccatcagcgcttctggggagaagggaccttcagccacaggcagggaatggtagtctagggattaaggggctgtcaggttgcccaccacccactgctactgaagccctcaggccaggccgtagcctcagcataggattcccaaccttaacatgtgtactagccccaccactcctatgatatatttgactgctactctaattaattacttcattcatggagcatcataagtgattatgttgatcatcctgtacact

SEQ ID NO: 155261 - DNA, 302 bp, Zea mays
  Clone ID: MRT4577_73179C.1
cgacccactcgtccgggggtttcaatctctgcaaccactgtctaacaacaaagacaatgatgaaattttcattaagctcttttatgacaaggatgacaagaaggaaaatgcttagcttaatgagcgtgccaagaactctgtcatcattaacaaattccttaaacctactgaaggatatatgtactacggcagacttcatcgtctaatgctccgagatcatcgtcatacatttagatgcctatactaaaaggcatacattcatgctccatctactgctgctccatacattgaatatcaacctc

SEQ ID NO: 155262 - DNA, 1702 bp, Zea mays
  Clone ID: MRT4577_7317C.1
cccacgcgtccgcccgctcgaccggggcggggcgcctgggacaccagcgtcgtgtccgaggtacggccaccgagaccagattcagatcacagtcacacacaccgtcatatgaacctttctctgctctgatgcctgcaactgcaaatgcatgcagatcaagatgggagacgggtgcggggcggggaggttcttccactgctacaagcgcggagtggaccgcgtgttcgttgaccacccactgttcctggagagggtttggggaaagaccgaggagaagatctacgggcctgtcgctggaacggactacagggacaaccagctgcggttcagcctgctatgccaggcagcacttgaagctccaaggatcctgagcctcaacaacaacccatacttctccggaccatacggggaggacgtcgtgttcgtctgcaacgactggcacaccggccctctctcgtgctacctcaagagcaactaccagtcccacggcatctacagggacgcaaagaccgctttctgcatccacaacatctcctaccagggccggttcgccttctccgactacccggagctgaacctcccggagagattcaagtcgtccttcgatttcatcgacggctacgagaagcccgtggaaggccggaagatcaactggatgaaggccgggatcctcgaggccgacagggtcctcaccgtcagcccctactacgccgaggagctcatctccggcatcgccaggggctgcgagctcgacaacatcatgcgcctcaccggcatcaccggcagggacaagtacatcgccgtgaagtacgacgtgtcgacggccgtggaggccaaggcgctgaacaaggaggcgctgcaggcggaggtcgggctcccggtggaccggaacatcccgctggtggcgttcatcggcaggctgcccaggcaaggtgcgcgccgtggtcaagttcaacgcggcgctggcgcaccacatcatggccggcgccgacgtgctcgccgtcaccagccgcttcgagccctgcggcctcatccagctgcaggggatgcgatacggaacgccctgcgcctcagcgtcgactgtaacgtcgtggagccggcggacgtcaagaaggtggccaccacattgcagcgcgccatcaaggtggtcggcacgccggcgtacgaggagatggtgaggaactgcatgatccaggatctctcctggaagggccctgccaagaactgggagaacgtgctgctcagcctcggggtcgccggcggcgagccaggggtcgaaggcgaggagatcgcgccgctcgccaaggagaacgtggccgcgccctgaagagttcggcctgcagggcccctgatctcgcgcgtggtgcaaagatgttgggacatcttcttatatatgctgtttcgtttatgtgatatggacaagtatgtgtagctgcttgcttgtgctagtgtaatgtagtgtagtggtggccagtggcacaacctaataagcgcatgaactaattgcttgcgtgtgtagttaagtaccgatcggtaattttatattgcgagtaaataaatggacctgtagtggtggagtaaataatccctgctgttcggtgttcttatcgctcctcgtatagatattatatagagtacatttttctctctctgaaaaaaaaaaaaaaaaaaaaaaaaaaaaagaagaaaagaaaaggggggg

SEQ ID NO: 155263 - DNA, 124 bp, Zea mays
  Clone ID: MRT4577_73180C.1
gaagatggttgttgctccaaggactgatgcgccgagtcgccaaggtactggagggcctggggcaccatctggctatgcatggtccggtcggactcatttgtgaacagcctggagtggaccctga

SEQ ID NO: 155264 - DNA, 496 bp, Zea mays
  Clone ID: MRT4577_73181C.1
gcgacaaggctcctgtgcagatccgcactagaaaattcatcagaaacgtccttctgggcagaagacaatgcatcgttgatgtgatccaccctggtcgcgccaacgtcagcagaagcgagctgcaagagaagcttggccagctgttcaaggtcagcgagaccaacctgatctatgtgttcggtttccgcaccgcatttggtggtggaagctcgaccggttttgccttaatatacgactctgttgaggccgccaagaaattcgaacccagatatagacttgcaagaaacggccttgccaagaagagagagggttccagaaagcagatcaaggagaagaagaacagacagaagaaggtgtggggtgttggccgcagaattgccagacacaaggccaagaagaacgccgattaagcattttgaagtttttattgtacttttatggaatgtttacgtcgccctcgttgtgcgttgttgcctaactaagctggtttgttgac

SEQ ID NO: 155265 - DNA, 463 bp, Zea mays
  unsure (1)..(463): unsure at all n locations
  Clone ID: MRT4577_73182C.1
cggacgcgtgggcggacgcgtgggcggacgcgtgggcgcgaggataaggcgagatctcgagggcgtgcctaccgtccgtccgtccgtcctgttcttcgtcgtcgtcgtcgccctcagcagcagctcgctcgctttatccaccttgagtgacgagttaatgcctgagtgctgctgacctgaccaagtgaccaccataccatcctgctcctttggacctttgcgcgcgcggaggacagttggtgctggcacgcacggcaaccatgcacgacgacacagcggcaggcttgtttgcgatcgtggcgtggctgtacaccgccacggagcgaggtgagcacgggtggctggcagcgtacgtcaggcccgggtcgtgctgtacggngcggctctgtacactgttggcgagtcgtccatgttttccgtgcacgagatctttgatatatgccgcacgtacagtcgtgggtgc

SEQ ID NO: 155266 - DNA, 746 bp, Zea mays
  Clone ID: MRT4577_73183C.1
ccggccggggagaccaattccatccaatttggtgttcgcggcagcgccagtttgcttcccggtgatcatggcggcggcggcggcggcaaaggccgtgcggggccgtccaagcgcgcgaccacgtaggtcggctccgccagaccgccactccggcctctgtgtcaccggaaattcgtcgcggaaaattagtgtgcactgggcagtgggcagatatgcagttggttctcctgtccatgaacaattaccatctcaagggaattaagaagctttcaggccttgccaaggaagactgggggattccaagatgaagaaaaatgttatgatgcacaaggttatagaaaattctagtgaagagaaataatatcataccttcctcttaagaaatacatcagcacataaccaagagattccagatcatctcttctgctttgctctgtaaggaaatgaagaaaggttaacccaaattcatctattaaggcatccagatttgtggatgaatatagtctgcagctaattgactacaagttcacaaatagtgttacaagttttgaagagttttaatttgtttcaaaacatttgtcttccctgttccgtttgccctagaatctgatcatttaatgctcagatactgatgatacagtagcacatatccatatttacaagacaaactcacctactccaagatgggtatttacactggcatatcgtgctgttcctgtgaaaaaaaaaaaaaaaaaggggcggcc

SEQ ID NO: 155267 - DNA, 123 bp, Zea mays
  Clone ID: MRT4577_73184C.1
cccactcgtcctgcgacgttctcagctatacgcgatgccctctgtcgctaggtgctttcgtgcctctcacagtcgcgctcccgggatcctatcgaaacaagtattgttggtggtcctgcagcg

SEQ ID NO: 155268 - DNA, 296 bp, Zea mays
  Clone ID: MRT4577_73185C.1
gctcatttctgtgaaaaacctccatcggtttcctatagcatcttggaatctgtgagcaaagcaaaatttgcagctggctcagttgtgagctttaaatgcatggaaggctttgtactgaacacctcagcaaagattgaatgtatgagaggtgggcagtggaacccttcccccatgtacatccagtgcatccctgtgcggtgtggagagccaccaagcatcatgaatggctatgcaatgtggtcaaactacagttttggagccatggtggcttacagctgcaacaaggggttctacat

SEQ ID NO: 155269 - DNA, 462 bp, Zea mays
  Clone ID: MRT4577_73186C.1
gtaaaaaaaaaaaaaaaaaaaaaaaaaaaaaaatggaaaaatcaatctaacaacaatgtctaaaaagacataaaaacatacttgcgactaataagccaaaaaagtgagtgacaacaaatgcaaaaataaaaaaaaaaaagaaaaaactaggctacaagagccaattataaacacaaaaactccgggccgccccttttaggggctccaaactcccatccgcgcgagggcgccggcttcatcttgttttagcggcccagcactttaattacccgggccgcccttttacaacggcggtcctgggaaaatccttgccgtgcccaccatttataacgcttggagcgacatccacttttccccttgccgtttttaaccctatggcccactcgcatcgccttctccttgggtggaacccacttggtggggaaggggtcgccccctaccaggggcatcaacacggggggg

SEQ ID NO: 155270 - DNA, 400 bp, Zea mays
  unsure (1)..(400): unsure at all n locations
  Clone ID: MRT4577_73187C.1
cggccgcggaatctcccggcgacgccaccacgcgtgctaataagcctcgggcgtactgggagatgaacttctgtctatgagcatacctgggaccagcgaggatccattggagcttaggacccaaagaagacctgtgcaagagacccaagccttactaagtgctagaaacatctgactgcatgatgtctagcactttccgctatctggtaactcccaaaacgccaagattgacaggggcaggtgtggcacccatatgagggtgatcatgcgctgngatgattctgaagggctagtggtggtacactatgaggtgagatttacatggtgctgcacttgaccggaatatcagacgtccgatcaagatactgcatatgggggagggcgtgatggaaatcccgag

SEQ ID NO: 155271 - DNA, 347 bp, Zea mays
  Clone ID: MRT4577_73188C.1
gccacgcgtccggccacgcatcggtctggctcgaatcggctgcacgctgagccgagatacgcggacccaccaaacatctaaccgtagctgcagtgccactaccggccgcttgcccggtctccggagaggaagccgatccaagcaacgatgccagccggatcatagactcaatttcggtacacgcagacgccgtccaaggtgctgtacctagagaacatgccttggcaatgcaccgaggaggagctcgtcgagctctgaaaaccattcatgcgggtcgtaaacaccatgtgcagcgacggcgataaccgaaaccaggcaaccggcgagtgagcagatgaaccaggcaa

SEQ ID NO: 155272 - DNA, 259 bp, Zea mays
  Clone ID: MRT4577_73189C.1
cggctcgagctccgaattagttatcttgagaaacattattcccattgctatgtatctatggctagcatgaaggttacatgggtggttgtgatcatgtgcatggccgtggtgggtgcaccgatgatggcgcaagccatgacatgcaatgatgtgacggtgaacatggcacagtgcctatcctacctgatgcagggaggaacaccttcaacactttgctgcagcggagtcaagaacattcttggctctgctgtcaccaccg

SEQ ID NO: 155273 - DNA, 261 bp, Zea mays
  Clone ID: MRT4577_7318C.1
ctcatatacaacctcgacctcccgtatcgctctgggcaccacgcctactcggggccgtcgtcaactccaataatcacctcctccaacctgctcttcaatctgcggaacctcttctacctgcacgcctaccaagcatccatcatcaacagctacgatcctagactcgactccaactcctactctgagctcgacaccatacaataccgctcctacatcgccctcggctcctaccacttggtgatcatctagatcgactcgtca

SEQ ID NO: 155274 - DNA, 754 bp, Zea mays
  unsure (1)..(754): unsure at all n locations
  Clone ID: MRT4577_73190C.1
tcaggactcgacctcttgcgccgccgccatgaccttcaagcgccgcaacggcggccgcaacaagcatggccgcggtcacgtcaagtacatccggtgctcaaactgcgccaagtgctgccccaaggacaaggcgatcaagaggtttcaggtgaggaacatcgtggaacaggcggccatcagggacgtccaggaagcatgcgtctatnatggntacgtcctcccgaagctgtacgccaaggtgcaccactgcgtctcgtgcgcgatncacgctcacatcgtccgcgtccnattccgtganaagcgcanggaccgcangccgccggagcgcttcaagcgcagggaagatacgcctgctnntgggacaaaggaggcccccgccctggtccctggtggctgctgctacaagatccaagctccacgcaaccggttgctgctccgcccataaggggtttaagctttttcgaccgttgttgagtcttctgctcaactcaagtttcgggagttgtcccctgttgcgggttttgaagctgctataattagagttacgtttttttccttctgcccactcagtttcggagttgtcccctgtgcgtgtgtgaagctgctatattagagttactttttgtctaaagtctgaacattttcgaagaatttgaatatctgaacatttgaatgttcgtgctgagtttttcaaaaaaaaaaaaaaaaagaagaaaaaaaaaaagggccgccgctcgcgatcgaacgagtccgg

SEQ ID NO: 155275 - DNA, 414 bp, Zea mays
  Clone ID: MRT4577_73191C.1
cattattgactcgaaccggatgagagcctatggtatacattgaccggacttgacacacaattacacaacaatacctccgcctataacaaacaaagcttggtacacctaccaggtcataagccatacaaggaatactgtgccattgggtcaagcatcagtctctttagatcaagatattatgttataaaaataatacgcctgacggaaaccaaagttttttttctttactaggtataattgaattttctccaccttcaactttaccaggggattggttgaaccgtatataggctgccaacaactgtagaaatgctacataaaaggggggacaaggataaagcctattcactcttgttcacttaaattcaggtgctcactttcagtttccgctcttgccatgctacttgcttgaac

SEQ ID NO: 155276 - DNA, 296 bp, Zea mays
  Clone ID: MRT4577_73192C.1
atcgctcactgcgtgcgctaaaagcagcagcagctccagccgtcgccgtctccactctccagtctccagcactgctccgcgcgcgccggattgagggagggcaggcggactatgaggagagattagtcgcttcgggcttggatgatagcacaggatattgcgcgccaggtacatcgctccatcatgtagcaggggagcagaggtccgagagctcatagatgcgagtctcgggagttgaaagcttacggaagctgtgatgttgcctcctggagaggtattcggtggatgtcttgcgg

SEQ ID NO: 155277 - DNA, 1081 bp, Zea mays
  Clone ID: MRT4577_73193C.1
ctgtgcggcgctcgcgggagtcgatctcttggctctcggacaggaccttaaagcgccgcaacgcgcgccccccaaggcattgcaggcgccacaacagcgaccgccaatagtatggccgcgctcacggcagccacatggggcacggcgagtgcgccggccgggccgggctactgcggcttcaggactcgacctcttgcgccgccgccatgaccttcaagcgccgcaacggcggccgcaacaagcatggccgcggtcacgtcaagtacatccggtgctcaaactgcgccaagtgctgccccaaggacaaggcgatcaagaggtttcaggtgaggaacatcgtggaacaggcggccatcagggacgtccaggaagcatgcgtctatgatggctacgtcctcccgaagctgtacgccaaggtgcaccactgcgtctcgtgcgcgatccacgctcacatcgtccgcgtccgatcccgtgagaagcgcagggaccgcaagccgccggagcgcttcaggcgcagggaggataggcctgctggtggacaaggaggcccccgccctggtcctggtgctgctgctccagctccagctccagcacctgttgctgctcgcccataggctttagcttttcgaccgtgttaagtcttctgcccactcagtttcggaattgtcgcctatgggtgtgtgaagctgctatattagagttactttttgtctaaagcctgaacattttcaaagaatttgaatatctgaatatttgaatatttgtgctgagtttttcgaagaatttgaatatctgaacaattgaatatctcacttgaacgttatatggcttattttaggcattttttctttttgtatggatttggtttcaaatcataaatacttgttgtaatcttattagcctctgagggcacaccttgcttcaacatatttgtctacggaattgatgacaagtaaaaaaaaaaaaaaaaaagctcgtcctagggccctctggcttattttcggcaaaaaaaaaaaaaaaaaaaaaaaaaaaaaaaaaaaaaaaaaaaaaaaaagggcggacgctcgcgcccacgcgtccg

SEQ ID NO: 155278 - DNA, 964 bp, Zea mays
  Clone ID: MRT4577_73194C.1
gcacgagctcgacctcttgcgccgccgccatggcgagtcctaaccaagcctgaagttcgatcttcctccctgtgcatgtacatctcgaatctaatccattttactccctgttctctctccgcagaccttcaagcgccgcaacggcggccgcaacaagcatggccgcggtcacgtcaagtacatccggtgctcaaactgcgccaagtgctgccccaaggacaaggcgatcaagaggtttcaggtgaggaacatcgtggaacaggcggccatcagggacgtccaggaagcatgcgtctatgatggctacgtcctcccgaagctgtacgccaaggtgcaccactgcgtctcgtgcgcgatccacgctcacatcgtccgcgtccgatcccgtgagaagcgcagggaccgcaagccgccggagcgcttcaggcgcagggaggataggcctgctggtggacaaggaggcccccgccctggtcctggtgctgctgctacagctccagctccagcaccggttgctgctcgcccataggctttagcttttcgaccgtgttaagtcttctgcccactcagtttcggagttgtcccccgtgcgtgtgtgaagctgctatattagagttactttttgtctaaagtctgaacattttcgaagaatttgaatatctgaacatttgaatgtttgtgctgagtttttcaaagaatttgaatatctgaacaattgaatatctcacttgaacgttaaaaaaaaaaaaaaaaaactcgagactagttctctctctctctctcctcgtgctaaaaaaaaataaaataaaaaaaaaaaaaaaattataaaaaaaaaaaaaaaaaaaaaaaaaaaaaaaaaaaaaaaaaaaaaaaaaactcgaggggggtttttttaaaaaatcaatttttttaacccggggggtgtgaaaatatatctttttttttggggcgcttaaaattaaat

SEQ ID NO: 155279 - DNA, 232 bp, Zea mays
  Clone ID: MRT4577_73195C.1
acacttttctccgttggtgcttaaccctaccggatgactcttggcttactgtaacacctagcacccagcgatcaggggttccaggcgacactgcacctgaaggcactctctcgcttgatgttaggcatgcaccaccccgaggagctccatctatcttacctgtgtcgaacctcgcgcagtatctagctaccctcattgatcatagagcatttcttggaagcatgatatagac

SEQ ID NO: 155280 - DNA, 273 bp, Zea mays
  unsure (1)..(273): unsure at all n locations
  Clone ID: MRT4577_73196C.1
cccgcggcggagaacncacaggggggggacccctgaaagtggggtgggcccacacaatgacaggggacaataggccctctggtgcgccattaatacgaaggacttcgtacttgccaataccctctaaaggcactaaaactcttggattacgtttccaaaaagcagaacagtgatcaagtgccacctcttaagcaagtgctcactcaccattgacactgtcaaccaggcgnatatgttngctncataaaaacgacggcgtttagggacacatac

SEQ ID NO: 155281 - DNA, 418 bp, Zea mays
  Clone ID: MRT4577_73197C.1
cccactcgtccgcccactcttacgcccactcgtcctgaaactcatgcatttgtattacagaaaatttaaaaaaaaaataaatgatataataaaaataaaaaaatataaactaaaaataaacataatttaaaaaaatacaaaaaaaaaaaaaaatataacaactaaataaaataacaatctaattacacaaatgaacaaaaattgaatctcaataatataaagccatccctttacttaaaatcccattttaactaaccattatttaaacttatatccttttttattctatactccaaataaaacaccttcaatgtttacaaaaactttcctactgaaaaactttcatctaatccaatctaaagtgttcaaaataatttccactttttaaacacatttcataaaatataacattcttttc

SEQ ID NO: 155282 - DNA, 749 bp, Zea mays
  Clone ID: MRT4577_73198C.1
cattgggtacctcgaggccggccgggaacacctatctgacgtacgacaagccgccatcatgtctctcgtctccggagagaagtctaacttccaatacatcatccgtttgttgaacacgaacgtcgatggcaagcagaaggtcatgtacgccttgaccaagatcactggtgtcggtcgccgttactccaacttggtctgcaagaaggccgatgtcgatctcaacaagcgtgccggtgacctcacctccgaagagcttgagcgcatcgtcaccatcatccagaaccctctccagtacaagattccttcctggttcctcaacaggcagcgcgatatcgtcgatggcaagaacagccagatcctcgccaacggtgttgcctccaagctccgtgaagaccttgagcgcctgaagaagatccgtgctcaccgtggtctccgtcactactggggcctccgtgtccgtggtcagcactccaagaccaccggtcgccgcggccgaaccgtcggtgtctccaagaagaagggataaatgttttcgcttgcgctgggcagctggggctgggacatgcctttacgaaatgggtggtgcacttacggtgtttatcaaacggctttcattggctttcacgtttacacttcatgcggcaatgcacgatatggggtgaaatgatgcgccacggttagggttggccgaatacagcctgtaccaaaatcacacattcaaatttcgaaaaaaaaaaaaaaaagcggcc

SEQ ID NO: 155283 - DNA, 284 bp, Zea mays
  Clone ID: MRT4577_73199C.1
caacgagcgtttggatgagttggccttgtttgggattggcactgccactggcagcaatgttgatcccgtagatgttgatgcggcgcctgtgactgcctcctcgagccccactgccactggtggtagcactgcccgtgacaaccggccgaggaagaggctagcgacatctagggtttgggctgacttcgaggaagtaactgggctcgacgacaaaggtaagaagggtgcttgaggagcgacgacgacgacttacaacagatatggttgaggtcttatcttgtatt

SEQ ID NO: 155284 - DNA, 1081 bp, Zea mays
  Clone ID: MRT4577_7319C.1
ctagttctgctgggcacgggcaagaagaagttcgagcgcatgctcatgagcgccgacgtgctcgccgtcaccagccgcttcgagccctgcggcctcatccagctgcaggggatgcgatacggaacgccctgcgcctgcgcgtccaccggtggactcgtcgacaccatcatcgaaggcaagaccgggttccacatgggccgcctcagcgtcgactgcaacgtcgcggagccggcggacgtcaagaaggtggccaccaccttgcagcgcgccatcaaggtggtcggcacgccggcgtacgaggagatggtgaggaactgcatgatccaggatctctcctggaagggccctgccaagaactgggagaacgtgctgctcagcctcggggtcgccggcggtgcagggcccctgatctcgcgcgtggtgcaaagatgttgggacatcttcttatatatgctgtttcgtttatgtgatatggacaagtatgtgtagatgcttgcttgtgctagtgtaatgtagtgtagtggtggccagtggcacaacctaataagcgcatgaactaattgcttgcgtgtgtagttaagtcgccttatccaggttttttcttggaagggccttgccaaaaattgggagaacgtgttgttcaccctcggggtccccgggggcgagccaggggttgaaggcgaggagattgccccgctccccaaggagaaggtggccgcgcctttaaaagtttggcttgcagggcccctgtttttgggggtggtgcaaaaatgttgggacatctttttatatatgctgtttggtttatgtgatatggccaagtatgtgtagctccccccctgtcctagtgtaatatagtgtagtggtggccagtggcacaacctaataagcgcatgaactaattgcttgcgtgtgtagttaagtaaaaaaaaaaaaaaaaaaaaaaaaaaaaaaaaaaaaaaaaaaaaaaaaaaaaaaaaaaaaaaaaaaaaaaaaaaaagggggccaaaataaaaaaggaggagtgttctagaggccgacccggtgctgaaaaggccaaatatttggggatttttaaaaa

SEQ ID NO: 155285 - DNA, 6224 bp, Zea mays
  Clone ID: MRT4577_731C.1
atgcgctcgcgctcccgtgcggcgctccgccgccgctcgctcgccttgggccgccgatcttcctctgccgccacccgccagccatcccgccccgcagttctgcccaccgctccagctccagccccatcctccggcggcatcgccgctgcagccacccccgtcctcacaatcgcctcaacatctggtttggaagctggggaggggaactaccatagtttccccctcacggtaagccctacaaagggggatttttgcttgcaggagcagatcaaggatgctttgccccatgtttttcattcccgcagagacaaagttccgtcagatttggatctgcagaagcacgccgcaactgctaatggcacgtctctgcttgctgcgtcagcttcagcgccaaaatcaacaaggaagttttattcagagacatcttcaatcggagatcctgtagatctattggcaccggcccgaatcccggtcttagagaagaggaaatgggcagtgggcagctcgccggtttttccgcctgactgcaatgaagttgatttcaatttcaatgcgagcaatgctacttcacatcagctggctgtggacggcggacatgacttgagaagttatggccgacttcatttcggtcagcacaaggctgacgccccggtactggaagaaggtggatggagtgtggtgaggcctaaattctggtggcgcaagactgttgaaaatcttaagagatctccgactcagcagcaacatgacacgaaaggtaccagcaccttcaagacaaagcttcagggtaaatgctacaactgcctctcgccagatcacttcgcttttcgttgctcggcgcttactcgttgctggcagtgcctacattttggccatagggctagggcatgcccagggatttactacagaagcaggcacaattcaactcctccccaacctgaaccagtgcagcattcaatgcagtacaccagcaatgtcaactccaggcaccaacaacaccagcgacagctcaactctcttcttaaggaacagaaacaggcccctgaacctgtgctcaacttttctccagttcaacacaacaaatcctacctccgtgcagctcaggagggccagaacatggaggctcgctacccaggtgacccaagggcaagaccgtcgcgcgccttctgtgcagtttcggcgactggctcaatccgtcgtcgcagggatgatctcatcagcaaggcggtggtgtgctcattcgatggaaatagccatgaggttgacaccattgtggcaggagacatgttgagagagaagttcaatctctgccatggtcagtatcaacttgtcaaacatttcccagaacagttttttattatctttcctgatgcaagaaccaagcaatgggctattgatagaagatcagtttcttatcgtgggcgtgagtttcatttcggtgactggtcagaagagagctatgctagaaagaccagctgggagtttagagttaaggtccgggtggaagggattcctgttcactgctggggtgaggaggtggcatcaagggccttaggcaggagctgcactattcattatgttcaggagcgctctaggcgtagagagcgtacccgttcttttgacctttgggcatggtgctctgacccctgtgaaatccctaaggaggtgtggctaacggtgtctgaacccgaccctgaattaccacctataagtacccctctgcctcttgtgggtgctcaccatgctgaaccgacagatctgaaaaaaggccatgtgtacacgcttcgcaaccatattgaagtggttgaggatctctgcttcattcatgggaggaacactaggggtgggcctatgaatcggaagcctcgcagagagttcgtgtggagctatggtgtttctgactctgctggtgaaaagcgggagcgttcagaggagttcagaggcagggagaccatgcgtcgggactgggaccatgatgatgatgaagattttcaccagcataggcatcagggcactcgtcggcagcgtagcctctctgggtgggcgcgttcctcgcgatgccgtggtggtgtggaggactgctacagctcgagtggaagatacaggccatccactcctttccggcgtagggggatggggatggggcagccagggcgctggactcccaagataaagaacaaaaaggtctcttttgcagatcctgtcatcactgctatctggcctacagatgtttctaaagggcacatctctgctgaaaattccatttcactgggaggtatggatcttggcactcaagctatggaggaataccaatgttctgcacatcccaaggtatctgtcccaattgcatcatattctgttaatgctctaatccattcatggtcgactagggggacagattctgctccagtccctattattagtggtagtcatcttgcaaatgaaacaatacaaggagatttatgtatccagaatgtgcaagtcgagtccaatttttccaattctgaaccaaacagtcaaaggaatgtcgttgctaatgaagatcgacaatgcattttacctactaatgaggttccacctattggacacgaatcatcaacacattccacccctcggccactagaaaatcagctgaactcaaatgataggttgcagattttcattgaatcaatcacaaacacaccagaaccgcccctcatcctgtcccctccgaacagcaacacacttgccacatcaccagtactaggggggtcagataatctagatgctaatgtaactataaatgctggcacacctgccatacaatatcaaggttcaagtgcgtcgatctccaataaccatgtaaattcttttgaacagattgaaggccttttctcaagacctctcaacaaggatcagatggagtggagaaatggttactatccaatgaatacaaattgctgtattttttcttggaatgtgagaggtctgaatgatcccgctaagcgagaaagtgtgaggcaaacaattctttctacgcacgcaactttagtttgtcttcaagagacaaaaattatgaactggactaacgatttattaaaggacactgtgggttacaagcttgcaaagcagactgcgcacttgccctctattggagcatcgggtggaattcttattgcttgtgatgaggacttttttgatattactccagttacttacgcttcaacctactcattatcagttcgactcctagaactggaccttatcggtaaaaagttcacttggtcaaatgaacaggatgatcctacgatgtctaggattgatagattgatggcaactactgagtggcatgggctctatccagcggctaatttgcaggcattgtgttccatgacttcggaccactctccgttattaatgcagggccactctccttgtaatttctataaggggttccgttttgaatcctactgggtacacattgacgggttcaaagatgtagtccaacaagcttggacgaccacagttaactcctctgatgccattcttcggttacatgttaaaatggtccgcacggccaaagctcttaaagcttggagacgacgcacggtcggtaacatcaaagtgcaattggctatcattaagattgtccttaccatgctggaaaaggcacaggaaaatagaacactttctagtgaggaacttgacttcaggagaaggctaaaaatcaaaattcttggccttgcaggcatccaattatctattgctagacaacattccagacagacctgggtgcggttgggtgatgcgaacacaaatttttttcatttgatggccaatcacagaaaaagaaaaaactttatcagatccttgaattgtggagactgcctgttaactagtcaggaagataagctacgagaggctcatagacatttcctagagatccttggcactagaggcgggaggactagtgttgttcgttgggaaaatctaggctactcgccttttgagttatccgagttggacaccatgatcaatgatgatgagattaggaatgcggttatgggcatgcattcagagaaagcgcctggacctgatggttttatagggcttttctacaaggaatgttttgaggtgattagagaagacctttccaaagcgatcaatgatttttatcatcataaatgcaaaagtttgcatttggtcaatgaggcaaacattgttcttctaccaaaaagggagaaccctgacaggatagatctatttagaccaatcagccttatcaatagttgcatgaagattataaccaaaataatggcaacaaggctggcgccgcgtatgaatgaaattgtctccactacccaaaatgccttcattcaaaagcgatcaattcatgataacttcctctacgtccagaaagtgattaaaaaacttcacaagagcaaacaagcagccctatttgtcaagctagacatatcaaaggcttttgactctcttaattgggcatatcttctagacgtcttaaaagccctaggcttcacccaaaaatggagagattggattgctaccatccttggatcatcttcatccaaaatcatcattaatggccagcaaaccaaagaaatcaagcacatgagaggggtgcgtcagggtgacccactatcgccttttctcttcatccttgcaatggatcccctacaacgaatgattgaaagggcagctcatgaggggctactgggccaggtattacccaatggggcaaagtttcgttgttctctttatgcagacgatgcgggggtgtttgttagagcagacaaactagatctcaaagttctaaaaagaattctagaagctttcgaatggtgttcaggtctgaagatcaattttgagaaaacagagattttcccaatacgttaccctgaatctttatggtcaaatttaatggaagtttttccaggcaagtactctaacttccctggcaagtatctcgggctaccgcttcacttcaggaatattaaaagaatagagtttcaacctctaattgagaaaataaataaaaggcttgctgggtggaaagatgtcgatctatttaatgcatctacgattgtaacaattggtgatggcaaaatggctgatttctggagatcaagctggattcagggtcaggccccaaagaacattgcgccaaccttattcatgaaagcaaagaggaaaaatatctcagtgtgccaagcccttacaaacaatcgctggatgcacttttgttctccttacacacatgaggatgagataaaagaattcatttccctctggcaaggttctcgtgtcccatgccaaagcacaggtctaaggcccgaccttaatcgtggtgaaaacggtcggaaacaaccgaaagctgctgtgtattttcgaacttggagaggccatcttcagaatctacttggatatgctttgtctgtatattgtgtttataagatgctcaagtccttgcagagcgcagtctttaagaagtcaggttctgttgatcctgtaacaataacgataacgattttcttgagacattttgacattggcattgatgttgcgctgttatctcagtacatatctttgatgttcattgggatgttagttgtcatatctgttcgaggtttcttggcaaatgttatgaaattcttcttcgctagttctagagttgggagtcggtctacaaccaatgttgtccttgtcctatcagagatcatggccaggtacttcatatcttccattctcctcataagaaaaagcctggcaaatgaatataggtattccggtgatcattactgcggtgttttgggtggtgatatccaatttgacttctaccaccgctggtttgatgctatatttttggctagtgcgttcctctccttgcttcttatatctgcccaatacaccaccaggcaaacagacaagcatccgattgattgatgcatcttgcccacaatgtgtgcatgttgtctttttaaccagtattcatccaagtgacgggacacgggattcattgtaatgcagtctgcacgatactactttttgactaggacaattgtggaagcccatattaggaattgattatgactttgtaaaatagcttgaaactagtgtcgtagcaccgtagcacggtatgttggtgtatcttatatatttttttggctgtttcatgtataacacacttcgcgacaactctgaatggtagatagatctgtttcttc

SEQ ID NO: 155286 - DNA, 349 bp, Zea mays
  Clone ID: MRT4577_73200C.1
aacccaaaccagggggaaaaaaaaggggcagtcgacaagcaaaagagttttataaagggaaaacatgcccccttaggggccagccaaggaaccagaagtcctaggaatacccaacccataaacatgcccccccaaaagttaaagggggaaaagttacagcccaaaccacccgccttccacctagaggttatttgggttatcttaaacggggggggcttaattcctttaaaaaaccaaatcctttctgcccggccttttttggccaactgatcctgcaacaaattttttttttttcaaactgggcttaaaaaaatcattttctgacaagggggaaaacctaggccccaaa

SEQ ID NO: 155287 - DNA, 550 bp, Zea mays
  Clone ID: MRT4577_73201C.1
gccgaggcgatggcggagaagtttgaccacctagaggagcacctggagaagttcgtggagaacattcggcagctcggcatcatcgtcagtgacttccagcccagcagccaggccgggctcaaccaaaagctgaattttattgttactggcttacaggatattgacaagtgcagacagcagcttcatgatattactgtaccgttagaagtttttgaatatatagatcaaggtcgaaatccccagctctacaccaaagagtgcctggagagggctctagctaaaaatgagcaagttaaaggcaagatcgacaccatgaagaaatttaaaagcctgttgattcaagaactttctaaagtatttccggaagacatggctaagtatcgaagcatccggggggaggatcacccgccttcttaaccagctcaccctccctgtgtgaagatccccctggactgcgatgcggcgtgaggctgggactgcgagtgctgacgccaccttcctgctgaggtgggactgggccctggacacacccctcagcccctctgtcctc

SEQ ID NO: 155288 - DNA, 584 bp, Zea mays
  unsure (1)..(584): unsure at all n locations
  Clone ID: MRT4577_73202C.1
cgagggccggccggggccggggaaaaaannnannaaaaaaaaaaaaaaaaaaaaaaaaaaaaaaaaaaaaaaaaaaaaaaaaaaaaaaaaacctaccccggttcaagaagaaagaaagtccccgagacccaaagccgcggtccaaagggggggggggccggaaacaacgaaaggggccaacgccaccacctccacctcgtcctcctcggaacctcccccgtcgggtccagggttccaggtccagttccccccgggatcccgacaaccccgtccgcctcggcctgggcctccccgttacaattacaagggtccgcccgggggggctggggaacaagggagcccctcctcctccacattcagggggggggaaatcctgtcctgggccccggaccgaaagaagccaggcgccggcgtctggaattcggacatgaaggcggcggcggcggtcgtaggtttcggcctgaccagggggaagggggcggcgttgtcggcgggggccggttgggtgtgggcggcctccttctacgacctcacgcgccgggggcgcgcgctcgtccagccgtgggtcacgcgccgggtgcacg

SEQ ID NO: 155289 - DNA, 602 bp, Zea mays
  Clone ID: MRT4577_73203C.1
cctgggattaggcggctgaccctagggcctagcttcgttttggcggtggctgctctggtgcgcagtgcagtgcctggcggctgcgcttcagcggttgtgcgcactgcgcagtgcgctccatgccttagtgcctgccgcggtgccgccctcccacctccagcgaatggcgacggtccagggctctaggcgtccagccctccagctccatccgttggactcctgctcgtcatccactcgagctcagctactcggcttactggttccttctcggcggctgttctagtgctcctagcctcctgctcgtcggtcggtcctggcccctgctgctcggctgctcacttgctcgttgggccctgctgctcgggttccatttccaaatatccaggtgagcaacgcctcctgcttgttgacccctagcccctgtgctcggctgctcgtcggtcggtcaacccctgctgctcggcttccatttctagttccagaacgcctcctgctcggatttgcagagcaccttaagtagcaaataagtttagtagtatcacgcatagatctacagttcgtgcatggttgttaatttgaagtctaaatcttgctcgggtaac

SEQ ID NO: 155290 - DNA, 555 bp, Zea mays
  Clone ID: MRT4577_73204C.1
ccggccgggacaccctgccttgagccaggaaccacccagcacgccgctcatctccgccatggcgccgtccgctgatgtcgtgccgtccacctcgccggagcacgaccccagcacccgcgctcgggtccgccgggattgcgatccgttttcgagcttcgaggaatcaaacatcaagcgttggcgaccaagtgatccagttcttcgagttccacgagatcgaagaccctgagcatctgtttgatgaagagataatccttcatggcgagttcattcgtgtgtcataagtgataaccaacggagccgtggtgtagtgattgcgaggaaccgttcgctcggagccttggatcatcaacgtcgagatctccactcaatcaaattatcgtatctcacggaagatcgggccgcgtctactatcatatcccgttctatgatgtaaatacttttaggtccacctgtcggaccctaagctctcttgtatcatgcccctcttgaactataaaaggtataaaaggaaggacacttgcttcggaaaaaaaaaaaaaaaaatttgcggcc

SEQ ID NO: 155291 - DNA, 510 bp, Zea mays
  Clone ID: MRT4577_73205C.1
cggagcgccactgtcgtccagactccagacgggaagccatgaaagcggacggtccggcaacgccgagcaagaagccggcgcccctcccaccgacgaccgcgctggtcgccgcgcgtgcgcgctcgcggtccaaagtcgaaggtagcatacattagagactttttcgctacatggcttgcagagcctccacccacgtccacgcaccacaggttgcattgcgatttggtgcttccgaatatttattaaaatttttagtagcgttggcacctggcggtcgtgatcgaccgaacttctatctccacggagtaatctgctcgaaactcctacggatgcttgcccagaggttagacgtggtgacgctggggaggctccggttcctcttaagcctcgtgatcctcaccgagcccctcggaggggagccgccgtcctcctccgaggagacctcgcgcccgtcggcgccgggcttcccgcgaccgtgctcatcaccgccgaagcaggtcgacacggatg

SEQ ID NO: 155292 - DNA, 432 bp, Zea mays
  Clone ID: MRT4577_73206C.1
agcagtggtaacaacgcagagtactcggtttttcattgttgttttttttttgtgggaaaaggaagctataattagaaaccgagttaagaggaacagatgagagctggattggatagcctagattgatccggattgacagaaagtggatgggatagaattagactcacactaaacttgagaataactattcaacaaacacattaaattaataactaaagggacaaggcgaacaaggcctgaatatgtatagtcacccattcatttttacagataaggtcaaactgatgatgcctggcgtgttagtgcccataacatggtacccaaacattagatgctgaggatcaatctgcctgacactctcatatgtgacttgttagatgttaacccaagtgctctgtgcggttgcaccagcgtttgggggcgaattgtgca

SEQ ID NO: 155293 - DNA, 332 bp, Zea mays
  Clone ID: MRT4577_73207C.1
gacgcgaaagcaaatatggggcttgctaacttatgccctgccttgcttgaagccaattttgcggtgattataatttccgaaacgaactggttctatcttaacggggtttcaatggcttattcactgcggaggcttaacaaagatgaggtttccgtgatgaaacctcccgagcaacaacataaagactaagcccatgagagactctttccacccacggaaagagaactgttcatgttacatggttaccttctataaactcagatgatcttctactacgatctgaaactaaacggtaaacagccaaataatcatgatacgcattcgttctttag

SEQ ID NO: 155294 - DNA, 403 bp, Zea mays
  Clone ID: MRT4577_73208C.1
gggcggcaaacgaattcgctcttgccaaccaaaattccccgcagggtttaacagttaacaggggatcggcccgcactctctagaatgcaatatatacaggttgacacccttacttaacttccaaatccccgcgtatatgctcagggggtttcaaatggggaagagggaacccaacttctacatttcttaaccaccacaacaatggcttctacagcagcagtctcgtcctggaacaattaaccatgccataaatcattttcccagctgctgcctcaagaatttgcacatcgcccaaatgtgcagcgtaaacatttccacttccaaaattcaattcatatggcattttggatctgccccatgatattgtccaaccgcatgattttgaccccagctttcccaacat

SEQ ID NO: 155295 - DNA, 241 bp, Zea mays
  Clone ID: MRT4577_73209C.1
gggtacgtccctccttgcacttctcaagcttcctcgggacagggtggctctttttcgtttcctcagcggcggcctcaacctctggtccctcagcattatccttctttgcagcaggggttttcttcttcctaccaaggtcaactccataggggagggaggtaccacggcttgaagggggcagcatcaacttgcacaagggcactcttcacaagggttggggtcctcacaagctcatggtttg

SEQ ID NO: 155296 - DNA, 385 bp, Zea mays
  Clone ID: MRT4577_7320C.1
ggagacctccttgtgactgttcttaccgaagctcaaacgaacttaaagtcaccgactccgatacaggacggcggccgagatttcaagcacaaggagacatccgtgtccaaaaccaccatggatccatcgtccatgggcaccggtctcattcactctaatcgtagacagccagcaaagacggtctgggaccaaaggccatcggagactaccctcgatagggagggcgatatatctctctctactggggcttgaacatgcgccggatcaggtcaactacgcggttgctggaaccacactccttgccgcaccaagagacgagcttgatgaattggccgttcagggcaatcccggccttggagatccagatgctcgaactgctgtcacc

SEQ ID NO: 155297 - DNA, 395 bp, Zea mays
  Clone ID: MRT4577_73210C.1
agcgtccgcccagcgtacgcccagcgaacgcgcagcgtacgcccagcgtccggcaacatacaaagcggaagccatagcaacaatagagcaacacaggcgaccaaccaatctgccatactgatgataagcgcccattgtacatgtgatgctaacacacacaattacccctcaaggctcacaagctccaaaagctaaccttctaaccccatacgttccaacaagtaaagctagaatgtgtgaaaacccagccatacaaccatatacgctacaacaagcaatcgcagcaagcaacacacctggatcgcccttggagacaaaacaatcgccagcactacctacgatgcagacagcggaacaaaccagcagggcacaccagccgccccaactcgcgctaa

SEQ ID NO: 155298 - DNA, 332 bp, Zea mays
  Clone ID: MRT4577_73211C.1
aggataaacccagtccttgtaacaaagaaggggcggtctgtgactaagaggagcggccgtcaagggttcaaaaaccgaacaaaaggaaccgctgccgctatcaaaacggcttaatagggtcaaacaaaggggggcaccctattaattaaacgcgtgacacggacactcccccccccgggtattccccggtccgggatgggaaaacgggcttaagtagatacacgcccctttaaaaccgtgggcccccccctgaagggaccccagctttcctcccggggttggcgactgatataccttatataggccccataattaaacccccggcccatttt

SEQ ID NO: 155299 - DNA, 285 bp, Zea mays
  Clone ID: MRT4577_73212C.1
attcaaaaaccatatgcaaaattgtggtggcgtgggcctcttattgtaccaagtatatacataattgtcctcttcttaaacaatatacattatgttttcattttaaactgttattatgtaccccttttgttacaaacttgttatggttacacatgtttttttgtagttctacaaatctacaacatcttccttccattccatataaaagataaatcatttagatgttaaagaattactattttcttacttgaacatttttgtttctaaacattggtctccttcatt

SEQ ID NO: 155300 - DNA, 109 bp, Zea mays
  Clone ID: MRT4577_73213C.1
gcgagcgttcgctcacccagtcgggcgatctattccagtagcaccgtgctacatcacgtacgaacaccacgtaggtgtagccatggataagatatctatctgacgacta

SEQ ID NO: 155301 - DNA, 204 bp, Zea mays
  Clone ID: MRT4577_73214C.1
atctcttttttttttcctaaggggagctttctacggccagcggtacttgaaaaatgggcggcaacacaattctaatttttcctatcttgttctttgtgcaagaacaatcattctagaatttggcaactttttgcttaatgaaagaggggtggttctgcattttttcaattatagtagtctctctttttaattactatcttctaa

SEQ ID NO: 155302 - DNA, 378 bp, Zea mays
  Clone ID: MRT4577_73215C.1
cccaaccccgccaatacagcaccacgcacacccacggcggggaagcctagaacgacaaaaacacgacccccaccaggggcgccagaaaacagcaccccgaacggacacaaccacagaaggcagcacaggaaagagcctagcagggacacacgtaagcacacacccatcgggagcacgtccatgaaaccctatacaaaaccaacaaacacggaggggggcgcacaccgccaacaacctgtgtccactgcgcggacagcgcgcaccaccacaccagacagaaagaacaggccaaccgtacctccccgaccgcccacatcatcgcccagcacaacagcacaaccccccccacgcgacacctagaaaaagagagagcacagc

SEQ ID NO: 155303 - DNA, 630 bp, Zea mays
  Clone ID: MRT4577_73216C.1
aaaaagagggaataatctaatcaatacaaaataggccatacataaatcatggaatccctggcaactttccaatcttactaatgacagatgatgtaacaatcaactttatgtacctagtacaatcggaataattcttaatgaggtaagcaagtacagtaaaatcatggatgctacaagattgcatcagcgaaatgattgaccaattgtttgatggaacatgggaaaaaacacagaaattatttctatgaacagttgtggtccaaagcatatccactatcaaaagacatgcccatttcatcaaccgtagttcaaatcctgctaaggccgccaacacgaaaaccaacttcatacttcataacacaattcaaacgaaactcaaattccacttaaaattttgctttttcaatgatatttcagatcaagggagcatggaggctgtaacacaaataaaagggactacttttcaaggatcaaaactatattgcggaaacgagcatgccatcaaaatgctaaagagtgatgaactattaacgaacctgtgtcaagcaaacatcatctagattttacagctttctaaaagaacataatctaatacttattgttatcaactgttcatatcaattaccaaag

SEQ ID NO: 155304 - DNA, 285 bp, Zea mays
  Clone ID: MRT4577_73217C.1
gtgctatcaaggctcagcataccttcgtgggcctttgatttaccaacactggaaatgcctgccaactaatcttggatagattctttaaggcattccacttagcttgccagttgagacaatcaccacagttattacccaaatactatgacatatttttgtaaaccagtcattctgaattatagtgatgagaatttaaatatatgcttttctagaatttgatgtttgaccatttatgacttaattaccagagagccagtaaattaggacagtgtttcaacaagccta

SEQ ID NO: 155305 - DNA, 359 bp, Zea mays
  Clone ID: MRT4577_73218C.1
accaaatcgcacccaacgaaactctctactggggagactattcaacaaagatttcatttctttcttgcttatgtggcatcttagaaacacaaatatgaaacctacccattgagaatagcctaagggtgttgtggcttttgaaaaagttgtgtggattgtggaaaagcagttgtgggttattagccgaggtcgcgctcagcccaggcagtaaacctgtgctcgaggtcgcgctcggccgaggcagtagacctgtggtggccgagccgcgctcgcctgctgtgtaacttgcggtgtcaatgggaggagggaaagacaagcatgacgagagcgacaaggggctcttctcgaacatgatgcac

SEQ ID NO: 155306 - DNA, 344 bp, Zea mays
  Clone ID: MRT4577_73219C.1
ttttgtttttatcataataacattatcatataagggaaagggggtatatcattaaccgcaaacacccaaaccaaacaccgcaacccacaaagaaaacgactaatgcacaggaccctacacatattaacaaacacaaggcatcatattcccccacaaaacaggggtgatgtcaaaaactcctaaaaagaccaaacgagatactatcacgggataggcaacggccataaagggatacaccatgattcccgcagaccatatttttactaggctagagacggcctgcaaacatagtagaaaccaaaggatgtcccccacacttccatcaaacacccctacccgaacat

SEQ ID NO: 155307 - DNA, 2111 bp, Zea mays
  Clone ID: MRT4577_7321C.1
atggcggctctggccacgtcgcagctcgtcgcaacgcgcgccggcctgggcgtcccggacgcgtccacgttccgccgcggcgccgcgcagggcctgaggggggcccgggcgtcggcggcggcggacacgctcagcatgcggaccagcgcgcgcgcggcgcccaggcaccagcagcaggcgcgccgcgggggcaggttcccgtcgctcgtcgtgtgcgccagcgccggcatgaacgtcgtcttcgtcggcgccgagatggcgccgtggagcaagaccggcggcctcggcgacgtcctcggcggcctgccgccggccatggccgcgaacgggcaccgtgtcatggtcgtctctccccgctacgaccagtacaaggacgcctgggacaccagcgtcgtgtccgagatcaagatgggagacgggtacgagacggtcaggttcttccactgctacaagcgcggagtggaccgcgtgttcgttgaccacccactgttcctggagagggtttggggaaagaccgaggagaagatctacgggcctgtcgctggaacggactacagggacaaccagctgcggttcagcctgctatgccaggcagcacttgaagctccaaggatcctgagcctcaacaacaacccatacttctccggaccatacggggaggacgtcgtgttcgtctgcaacgactggcacaccggccctctctcgtgctacctcaagagcaactaccagtcccacggcatctacagggacgcaaaggttgccttctctgctgaactgaacaacgccgtcttcgttctccatgctcgtatatacctcatctggtggtgctacgagaagcccgtggaaggccggaagatcaactggatgaaggccgggatcctcgaggccgacagggtcctcaccgtcagcccctactacgccgaggagctcatctccggcatcgccaggggctgcgagctcgacaacatcatgcgcctcaccggcatcaccggcatcgtcaacggcatggacgtcagcgagtgggaccccagcagggacaagtacatcgccgtgaagtacgacgtgtcgacggccgtggaggccaaggcgctgaacaaggaggcgctgcaggcggaggtcgggctcccggtggaccggaacatcccgctggtggcgttcatcggcaggctggaagagcagaagggccccgacgtcatggcggccgccatcccgcagctcatggagatggtggaggacgtgcagatcgttctgctgggcacgggcaagaagaagttcgagcgcatgctcatgagcgccgaggagaagttcccaggcaaggtgcgcgccgtggtcaagttcaacgcggcgctggcgcaccacatcatggccggcgccgacgtgctcgccgtcaccagccgcttcgagccctgcggcctcatccagctgcaggggatgcgatacggaacgccctgcgcctgcgcgtccaccggtggactcgtcgacaccatcatcgaaggcaagaccgggttccacatgggccgcctcagcgtcgactgcaacgtcgtggagccggcggacgtcaagaaggtggccaccaccttgcagcgcgccatcaaggtggtcggcacgccggcgtacgaggagatggtgaggaactgcatgatccaggatctctcctggaagggccctgccaagaactgggagaacgtgctgctcagcctcggggtcgccggcggcgagccaggggttgaaggcgaggagatcgcgccgctcgccaaggagaacgtggccgcgccctgaagagttcggcctgcagggcccctgatctcgcgcgtggtgcaaagatgttgggacatcttcttatatatgctgattcgtttatgtgatatggacaagtatgtgtagatgcttgcttgtgctagtgtaatgtattgtagtgggggccagtggcacaacctaataagcgcatgaactaattgcttgcgtgtgtagttaagtaccgatcggttattttatattgcgagtaaataaatggacctgtagtggtggagtaaataatccctgctgttcggtgttcctaaaaaaaaaaaaaaaaaaggcccctaaaaaaaaaaaaaagggcggccctcgcg

SEQ ID NO: 155308 - DNA, 450 bp, Zea mays
  unsure (1)..(450): unsure at all n locations
  Clone ID: MRT4577_73220C.1
naactgccaaaccgaaccacaggctggcatcttactcgcctatctcacgttactaaagcgcaccgctttgtttcatcattgtctgattgctgaacggccgcgacggtacctggtcatggacaacagcctagacgccagccgcataggttccatgcacatacaacactngcaccgctatcacacaagccgaaaatcctgcatgctagctaggcatggctggagcatagcgcatatgctgactcatatacgacgagacacaagacgatctcaagatgttactatacaacgaaaatcttgatgacggaaactacacttagcacagcacgtcgcaagagctgcaccggcatgacctgtgagcctactggcttaagcgacaggagcacacgcctctaatggtcaggtgtttaattctgttcctcatatgatgggcaactaggagtgagtcaacaa

SEQ ID NO: 155309 - DNA, 316 bp, Zea mays
  Clone ID: MRT4577_73221C.1
cccacgcgtggggacaagattggtggatcaacttcttcaagtgtgcaagtgtgcagagaattgtagcaagaatgtcgaacgttccatgagcttggagatagaatgggaacccttgatccgaacccctaagtagcagtaacttggacttcgcgatacgtcatatcaacagcgtcaaaggcattgcagaggcattatggtcctttaatgtggtaacaagtggacatgtgcaattccaagcattggctctgaatattcctagcaacaagaaaaggtgcaatgcgtactgtaacgaagcacctgtggtactgtagctgca

SEQ ID NO: 155310 - DNA, 1336 bp, Zea mays
  Clone ID: MRT4577_73222C.1
cattgggtacctcgaggccggccggggcagcgtccgcgtgtcaaattcctattggagccggatcctgaagtccccgaagcccactacgaaattgtacccatccccaaccagatcccccgcttctcccgcaaccgcgtcggcgatggcatccgcggcggcggcgaccggcgacggcgagaaggcgcacgcgcacctagggcagcctctcctcgtgccgccgcagccccctcaacaaccctactacgcctacccggccgcctcctacgtgcagcccgccccaccgccgccgccggccccgacgctcgtcttcgtgccgtccccctgctccccgatgctcgtgcgcctccgccgcctgcgcccgcgccgcgcgtcctgcctccgccgattctgcgcgcgcgcgctcccgctcctcctcttcctcgcgctcctcgcggggctcgccttcctcctctacccgtccgccccggccgcccgcgtcgccgacctccgtgtcgacagcttccgcgcgcagccgcccgtcctcggcctcggcctcgcgctgcggctccgcgtcagcaaccccggcttcgtcctcccgctccgctaccgcgcggtctccgccgccgtctcctaccgcggacacctgctcggggccgccaaagcgtggcccgggtccggcgagcttgcggcccagggatgaggtctatgcggatgctgaggtgtgggtggacgccgggaaggtgctggatgacgtgatcgagctcatcggggacgtggccgcggggtcagtgccgcttgagatcgtatctgaggtagtcggctcgatcaaggtgttccgtttccacattcctgtgaaggggctcatatcgtgctcggtaagtatcagcccagtgactcagggaatcataagccaggattgctactaagcgcgagtgcgggaggctcccgattcccgaggatattttaaacctgcagagcctgctcgatggaactgaagtacttactatctgtatataatctggatatggtgttgtgttatgtgtaggctggaataatgtagtaatgagtaacggatagcatgctgttggaccacaggggtatatgttattttgcagtacgtatcagaactgcctatgtctattttgtagctggtgtgatgccaccttagcatagctccgttttcgaatagttatcgttccctagtcggcaaataaaaaagaacggggagtagtaagttaatcatggggggtgtggttagtagcgtgtggtgtatgattttactagaccatgcatgatgtatggtggtcctcccgcacgtagcttatcgttctccgtgtggcgtatgaattcaagcgtg

SEQ ID NO: 155311 - DNA, 1397 bp, Zea mays
  Clone ID: MRT4577_73223C.1
gccgttttcggtgagatcacctacgagcagctggtccttgccaccggcggttttggcgacgaccagctcatcaaacacgggcattcgggggacatgtaccatggtgtgttggagaatggctcccatgtcattgttaagaaggttggtgcaaagggcgccaacagacatgcgagtgaattggatttctacgtgaggtactcgcacgaaaggatcgttccgctgctcgcgcatttgagcaatgacgatgacgaactcatggcttacaagtatatgccgaagggggacttaacccatgcgttgcacaagaaacctgtagacaccgcagatggcttgccctccctggattggataactagactgaagattgcaactggcgtggctgaggctatgtgcttccttcatgaggaatgtagcccgccattagttcacagagatatccaatcaagcagtgtccttctcgatgataaatacgaagtgcgacttgggagtatgagtgacatatgcatccagcaaagtgggggaagccagaatgtcttcactcggatattgagatcatcaaagtctctcgacaagcacacatcaggtccaccggccacttgttcctacgacgtgctctgcttcggcaaggtgctgctagagctggtgaccggcaacttgggcatcagcggaccaaacgacgcggcgtcggaagaatggctgtcgaacacgctgaaccacatcaacggcggcgacagggcgagcatcgccggcatcatggacccgctgctcctggtggacgaggaccacctggaggaggtgtgggcggtggccgtcatcgccaagacgtgcctaagcgccaagccgtcccgccggccctcggcgcgctacgtgctgcgcgccctggagaacccgctgcgcgtggtgcgccagggctcctcccggtccaactcggcgcggcagcagctgcggagctcgtcgtcccggagctcgtggcagtccgtgttccaggggaaccaccgggtgcagagcctggacgcctcagcgacggcggcgttggcgctggaccggcggcactcgctgaggtcgcacggtagcggaggcgaggcgtcgttctcgttcaagagagccttgcccgtgcccacggacaccgcgccggagccggctgcggcgctcgacgaggacgccgttattgtctagtgtaggaggcggacattccccggttcttagcttctttacagggcggtgttcttgattcttttcccctgcgtgatatcacgtcgtcgcatgtgtgtgtataatttgttcctgtctgatgcgttcatccgtgttccaacatgaccaaaaaaaactgtgcataaagagtacgttttcaatactcaaaaaaaaaaaaaaaaagggcggccgccaccgcggtggag

SEQ ID NO: 155312 - DNA, 220 bp, Zea mays
  unsure (1)..(220): unsure at all n locations
  Clone ID: MRT4577_73224C.1
ccttgttttnnnnnaagaaagaaaanaattgtaatctttagagggagaccccccctaaatctgaccagccaggaacagccaccctgattgccatgcactaacgcatatatacaggcaagacaaccacatagcctaaaaaagaaaaaagaatggaggaacaacaggattaagagccttacatttaaccaacggttgagagggtcactcatcagcatcacca

SEQ ID NO: 155313 - DNA, 697 bp, Zea mays
  Clone ID: MRT4577_73225C.1
cataggcacataaacacaaattcacattagcaaatagacgtcgatcgatgaaacgacaaagcaagaacgaatcctcaccgatggacgacggtgtcgtagacgggatgcgcaaaacatcaaacatccgacgacgccaaaagggttggccacgacacagcactcctcttgagcatttatacaaacaccttacacgcacggggacgtaggggctgcaaagaaaggcactaaagagagggggttcggcatccatggctgagggctggcgtccatgggaggtggctggaacagggaagtggagattaggcgagcaggaatgcaggggcgagctcgccacctggggcaaggaaaggggcggccatggagaaatctggagcagggagggagtgcgaggtcgtccaacgcaggggaaaacagaggtgagcaccagggagatgcggcgtcaggcactgaagggggctcagccggcgaccagcacgacggcgcagcagggcgcgacctcatggagaaggacgagccagagaaatgaaggaacggctgggagagacgtgcgtgaggtgggagaggagttgaggctgcgtgctagcttgagggaggaaaatggttgggcggcagtgagataaggccagcagatgagcggcggcagggaatgagctgagggagggcggcgtcgaaggatctaggggagagggagaagacg

SEQ ID NO: 155314 - DNA, 667 bp, Zea mays
  unsure (1)..(667): unsure at all n locations
  Clone ID: MRT4577_73226C.1
cattggtacctcgagccgggatctcttcaatacatctacaacaacttgaacatcaatacctgcagccaacagcttcaactatcaccatcaaactactctactctatcaattaccacaaacaaactcaacaaccatgcctcttgcacgccgctctgctccccgtaccactcgcactactgcgcgtccatctctcaagacccgcctgatgggaggccgcaagacacgcacgcacacgaagcgtgctcccgctggtaccaccactaccactaccactaccaggaccacccgcactaccggtggtcaccacggtcacgccgccccagttcaccaccacaagcgccatgccaccatgggtgacaaggtcagcggtatgatgatgaagcttaggggctctctaactcgtaggcctggtctcaaggctgctggcactcgccgcatgcacggaactgatggccgcaatgcccgccgcgtctactagacattccagccgacttagtggcatgatttcttttatgtattaatagcgttgtaacgattgtacgatacgaggacagatacccaatattttgagcgtttagcatagaataaactgttcaaactcttaaaaaaaaaaaaaaaaaagcgaccnnaaaaaaaaaaaaaaaaaaaaaaaaaaaannnggcggcc

SEQ ID NO: 155315 - DNA, 1387 bp, Zea mays
  Clone ID: MRT4577_73227C.1
cttgccggaggaaacttgattctatgtcactttgtgccttgcgattcccgcgagtacccatataccagcttcgtagtacgccacgtttgcgccatctttttttcccgacacaatacatacgatctttctccgcgttagataagcctacagccatggacaaagctcccggacaagagagcaagggatcaatcacagattgggtcaagcctggcgataagagcggcgagttcaagcgtcaaacctctgtcttccgaaattggattgagaataaacccaacgccgaattcccaccagaaaaaggccgataccatctttacgtctcgtacgcatgtccatgggcccatcgcacactgattgtgcgccaattgaagggcctcgaagatattatttcgtacaatagcgtccactggcacatggcagaaaagggatggcggtttgcgtcatccgatgaaagaattccaggaaacactacgccggatccattgcaccaagattacacacatctccgagacatctactttgagcagaacccagactatgaggggcggttcacagtaccgacgctttacgacaagaagacgaacaagatagtgagcaatgagtcagcagagatcatcaggatgatgtacacagcctttgacgacatcatcgaagaaaagtacaagaaggttgatttgttccccaaagatctacaaaaggacattgaggagatgaatgagtgggtgtacaatgatgtcaacaatggtgtttacaaatcaggattcgcaacaactgaagaagcatacacaaaggctgtcactcaactgttcaagtctctagaccgactagaagagtcactctcacagtcgaagaccccatatcttttgtcagcaccacacgttacagaagcggacgttcgtcttttcacgaccatcatccgcttcgacccagtctacgtacagcatttcaaatgcaacatccgtgacatccgctccggatacccgcacattcacaaatggctgagacatttatactgggactaccctgccttcaaagacacgacgaattttgagcacatcaagaagcattacacaaagagccacggtcaaatcaacaagttccagatcacgcctattgggcctctgcctgatatcctcaacaaggaagacgaggtgccgagtgtgaaggctgcattagcgaagtaagcagatatacacatgtataggcatgcagacaatttttaaagtgtcatggtagtgtatgccggtagttgagagtgtttatcaagagtgtgcaaattatcgggtttccttgggtatctagttttgtgaaatttccagacttttgcagcaaatacatgtcaaacgcgccgacctggtggctagtaccattcccatcagtctatacg

SEQ ID NO: 155316 - DNA, 397 bp, Zea mays
  Clone ID: MRT4577_73228C.1
tctcttctgcatttttgtttcttcttgacttgtttcttggtcgtggatcgttggatcccgagcctctgtgatctctgttgatccattttaaaaccgattacggttaggttatctaaacactaaccctaaaatgccgatttgtttttatctcgcattccatgggatctggccgagaccaagtgtctaatagtggccaaaaccctatcactaatctaacgtgaccaattactcgtcggcggacggacacgccgcaatggcgactgctaacgcggcgttggcagcaggcaacggaggaggcgaaacctcttccttcacatacatctgagacattatttttttttttcaaccccccccgcggatgaggagacccagcggactcaggactgcgctgataccc

SEQ ID NO: 155317 - DNA, 421 bp, Zea mays
  Clone ID: MRT4577_73229C.1
ttgataccaacaagcaacatataatgtgttttccaatagcaacattataacaacaatgacgaccaatatatattgcggccttatgctccatgctctttctgcatgtgttgctaatgcaaccattttccctcaacgctcacaagctactataacttgcctaattcaccaataccttccatcaatgatagattcagcatgcgaaaacccaactcttcaaccctatatgctccaacaagcaaatgcatcaagcaacttacctttatcaccctcgttgtttcaacaatcgccatccctatctttggtgcattcattggtacaaaccatctttgcacaacagctgctataactcttgctacttgtgatcaaccaagtagctctgtcaaaccttttttcctactcttaacaacaacagtttctttca

SEQ ID NO: 155318 - DNA, 365 bp, Zea mays
  unsure (1)..(365): unsure at all n locations
  Clone ID: MRT4577_7322C.1
aaagttacttcatctaaaactatagccagacaggagggcattgtggctgtgactagcggtagatacctacacctgatctactgcaaatagaggaaggaaactctcattattaacaaacacccgaaaattatcacgtctttggatgttgacgatgatgcccttaagctgttgctgacagagtacatcgatggcaaaatcatgatctggagctactggctctactaccaagcacgtagaggcatacttaatacctgtcattctaaaaacacatatgacaactgaaagccaggtctgaagcaagactctgntattgctccaagtgtgcatcagaaaatgagcactatgatctgtactgctcgagacac

SEQ ID NO: 155319 - DNA, 1326 bp, Zea mays
  Clone ID: MRT4577_73230C.1
ccggccgcgccctccgcccttccgctagcgtcttccccaaggattcccgcccgctcccgtgcctcctcctcacttccctgctgctgctcctgaccctccatttcctctcctcctcccccaccccctcgccgcctccaccgcagccccgcctcgcgccgctcccgtccacagcctccgcgggcccggccccgtcagcgctcgcgttcctcctcacgggatccgcgggcgacgcggaccgcctccagcggctgcttctcgccacctaccacccccgcaacgtctacctcctcctgctcgaccgcgccgcctccgcggccgaccgcgcgcggcttgctcgcagcgcgcgggctgcccccggccgcgacaacgtccatgtcgtcggggaccccgggttcgccaacccgcgcggtgcctccgccctcgccgccaccctgcacggggccgcgctgctgctgagggtcgaccagggatgggactggttcgtgcacctcgacgccgatgagtacccgctcgtgacccccgatgatctcctgcatgttttttcatacctaccgaaggatctcaacttcattcagcacactagctatattggttggaaggaggaaagacaaataaggccaattatcgttgatcctggtctatatctctcatccaggaatgacattttctacgccacccaaaagcgtgatataccaaatgcttacaaattatttacaggctcttcgtctgttatcctttctcggaaatttattgaatattgtattgttggtatggataatctgccaagaactctgctgatgtactacactaacatgcccttgccacacaggaagtattttcagacagttctttgcaactccgctgaattcaacaagactgtagttaaccatgacctacactattcaacatgggatgctcgttccaaaaacgagccacgcctactgactatagatgatgtagaaaatatgaccgaaagtggtgcagcctttgggactagatttcccaaagatgatcatgcgcttgatcgcatcgatgaagaaattttgcaccgtcatcctggagagctagttacaggaggatggtgcataggtgttgggcatgatagtccatgcgacatttcaggtaacccagatgttctgagacctgggcctaaagctataaaacttgctaagttcctttctgaaaggctgtcatatcggaacttttattcccagcaatgtatatgggattgatgattgtataatttcattatcagggaactgttatctcttaaaaaaaaaaaaaaaaaaaaaaaaaaaaaaaaaaaaaaaaaaaaagaaataaaaa

SEQ ID NO: 155320 - DNA, 399 bp, Zea mays
  Clone ID: MRT4577_73231C.1
tcgcccaagtcaacaagcaataccgggtggggttgtgatccgaagcctttcttccaacgcaaaaagaaccccacccgacgtaccgtgagccggcgatggcgacggtggcgatggacatcttgaagcccacgccggcagcgtccggtgacgaggctacggcagcggcgaatgggatgatgcggagcgggggctaggggctgctgaatactacctgcagcacatgcatgacctgcagcttcaagatacggcataagacccataaccttaaccgactctaggcccaacacaacgacctcaactttccagttagaatgctcatggaagaattgtagttgcttcaagagcctgtctcatatgttggtgaggtggtgaacgctatggggaaataaaggttttggt

SEQ ID NO: 155321 - DNA, 472 bp, Zea mays
  Clone ID: MRT4577_73232C.1
gatgtcccgatctgagagagagagagagcgcatagtcgatcatgaacggtgtcaacaaagaagtgtgcgctgcggtggtggccatactgctggatcgagcgtgtcatggcagatccaccgacgggcatgggcgcccgctcgcctcacggagccgggccacatggatccctcgccacgacgcccaatgtgacgatgctgtgctgacacgctgtgctacagcgccggacacatgcacaatagattgcatcgcctcactcctgccttgctcatgtaactatggcgcatcgtgtatgctacatcatatttactcctgtcgcttgaggcattcccgaagccacaagctcttacatgcatgctccgcgcgatgacgacggtgtctctcgtgagcttctgctcaagtgatgaatgtatcgaggcatccatggatgctttatgtatatgatatgcgaattattaactagccgtgtcaagg

SEQ ID NO: 155322 - DNA, 561 bp, Zea mays
  Clone ID: MRT4577_73233C.1
gcccagcgtccgcccacgcgtccggcggcgcgtccgcccacgcgtccgccttttttttttttttttttttttttttttttggggggtgggggattagggaaggtcttcgatttgtttgtgaaggaggaaaaaatcggggggagaaaaggcaggttaaaatcccattcaaaaaaaagggggggggggggggggccttcccaggaaaccgggatcctcccggggggaagagaagaggattctattcctaaaaaaaaaggggggggggggataatttttggaggaaggagtctaaggggggggcggcggcgaaactgggctggggggagggagccttttgggggaggagaagctgagggagggtagggaaaaaaactccggtggggagggggggacccccaggaatttttttcattcaaccaactaggagcatggaactcggggggttatttacagggggaacaagtactaccattcagccagctaggtgaggggaggcctggggcctttttggaaaaaaaaaagggggggggggtttaacgggagggtatggctaaggggggg

SEQ ID NO: 155323 - DNA, 413 bp, Zea mays
  Clone ID: MRT4577_73234C.1
agctccgccaatctctcccatctctctctctctctctctctctctctcggcgcaccgcaacaccacctctctttctctctagcagcgcgtggtcggacatggcagcctgtgtggacaagtggaacccagcatactcctgccaccgcatctcccgatccatctaccgcttcatgccggactgcaccgtcaccgcaccggcgggcgcgcccgtgaacgggaacggcggcgatgaagtctgggaggagctgtacggcgaggcgcaggccgacgcgcaggacgagccgctgctgggcatgctctactccgagctcgtcctgtcgcacccgtcgctggaggccgccctcgcggcgcacctgtccgcgaagctctgcatcccgggcgcgctgccgcacgacgcgctccgggacatcctc

SEQ ID NO: 155324 - DNA, 311 bp, Zea mays
  Clone ID: MRT4577_73235C.1
ccgtatagcgcccggcctccccatatccttccaccctggaggggttactagtaacgattccgcagaacaaaatgtccatatatctcacactcatgacaaattaactacaactaatgtcttggattacactaacaccgaactccaaaatatgaacataactaatcaaaacctcgctctggataacgaaaagcatctcaaaatcaatctttgaagacctgacattactccaaaaatccttattgactccattatgatctactattcaactggaaccacctgttgaccaccccttgagaaattgcttggcaccc

SEQ ID NO: 155325 - DNA, 420 bp, Zea mays
  Clone ID: MRT4577_73236C.1
gggacatccaatccgcacagcgtccaaaggatttccagtatttttactaacaagaacacccccttggtgggcccaaagaatacctttagagtaataaggggaatcccccattgtttaaaaataaaaacctcttttggtacaattggaaaaccaatgtggaaagtaaccgcttaataaacttggggaaaaaattttttttttggggggtcaagatacaactaaaatgtctgaataaccggactaaactgttggttgggggtgttacagaaagttttttttttttgccacccaaactttgggtgtgcctagccttcatttgtggttggtggtttccaggtatctatccccttatctcctccaaatttttcttttttttgacgctttttttttttttttaataaaggttttttttctgcaaga

SEQ ID NO: 155326 - DNA, 420 bp, Zea mays
  Clone ID: MRT4577_73237C.1
gcaacacagagtaccaacaatggcagccatacaatttagcgtggttatgcatcttgggctgcgtgcgagtgctgctatcgcaaccgttgttccacaatgcttacatgctcctatagctttccttcttcctccatacctatcaccagcgcggcttcatgcgtgaagacccaatggatgcaccctacctgatacaacaggcactcgcaacaagcatctgagcagtatcaccactgttgcatcaacaaccgtcatccctattacaagagttaccttaggtcgatgcggtggcgcaacacattctggcacaacaactacaacaacttgtgctagcaaaccttgatgcatactcgcagcaacatcagtttctgccattctaccaactggctgcatcgaactatgccgcctatttgcaacaacaac

SEQ ID NO: 155327 - DNA, 1745 bp, Zea mays
  Clone ID: MRT4577_73238C.1
cagcaacaatacatttctcagtccatacctcatgatcgttccatgcagcagctttatgattcttcccatgggacaatacatacttcattgtcatctggtgaccgtatgaagctttgtcttcaaagaacagaagagattcttgatcttgctctgaagttacctggtcatggtaagcataatctacaactacatgcaagtgtgaaattgagagacacaggaaatattggtttgtcggaaagttgcgctactgccctaccactgccccatgaaatgatgggtcatgcagcttggaaagaatgttctgctagtctcacacagggctctgcagttgttgatgctctttcacaaaaagaaagtattgtagactcaccatctaagaaaactccaagttatggttctaacgattatagcaagatgactgtttttgaagttacaggttttcctcaaccatttcaaggtcttcagaaaccgaaaagtgtagcatctcatatctcaaatgaagttcatgaaatggatatttcctctgtccatcctcattcatggaaacctactccaggtgttagggctaaatcagtgttggaaattcaagcagaggaacgattggaaactcagagggaaatagccctggaaaatacaaaggtaactacaacaacagcttccgggctatctattcattgggttgatttggttgaaacttctgggcaacagtttggagatcaggctagacctatgtgtgataaaaaaaatggcaatatatcacagagtaacagaagtcatttacatgatttattggcaagagaggaactgataaagtcaaatgctaatgctggtgttatcataaacagtgctgatgatacatcttttcctcctctggcaccttctattactcagtctgatgctcatattcatgatggtgctgatttcattgagttcaagggcacaagaaagataagtaacagggggaagaaacccaaaggttctgcagttaaaaccccagcatcacatgcaaatgttatacctggaccagctactgatcctgcacaggtacgtgaaccatgttctctgagaaatattcaggtggaagaagaacaggaatcagctaatcttcagcaactagtaccagcatcatcccatgcaaaagggcctatggaccagcatattcatgggaacaattcatcctggcaaggttctgaatcacctccatcgaggggtaacgaactcctcaaaatgacttctcatgtttccagtcactccactcctaattcggaagagtatctgttttgggagcctcgtgagcatgcaaagcaagataagccgagactccaatcacctccgagttccgtggtcaatacaaggtctgctgcattggacattcagaagaaggggaagaaaggtacaaagctgagcacgtcagctttggggttcaaggttcagagcacccgtatcatgatgggtgagatcgcgcatgttgacgagtagatgtccagactgcacagaatttttatcatggtagtgagcttcctgaagaatgaagatgatgacagtttggcggctgaagttacgagaattcaaattgagcaactggcaaaggttttggttttcagaaggcttggttgtaacttgaaaatcgtataatgtttgttgctgggcggattttgttcgaaacattgagcctggaaggttgattccggtctaatttgcagaatggaatatttgagtgcttggttgtgaccgtttcctgaaac

SEQ ID NO: 155328 - DNA, 197 bp, Zea mays
  Clone ID: MRT4577_73239C.1
acggacgcgtgggaagcgggcgccccccgtcgtcgcgttcccccgcgcacgtacaggtggcgaagtcgcctcgtgctatgcataacaggcagtccttgatctccatgagaattatgctaacgttagatgcactggcattagtctaggatactcacttgcacgtatttctatcggcctacacttcttcacaccattta

SEQ ID NO: 155329 - DNA, 385 bp, Zea mays
  Clone ID: MRT4577_7323C.1
tggaaaaccggggcggaccacaggcgtccgccacacgcttcggttgattttaaggccggttgtttgccggccaaacttggattggaaccaggggcccttggggttgttaaaggggcaaagcgtaggaaaatacatgctttaaaataaaaatcccgttttgggcagttggaatttgcccaaaacaaagggcagattgcttggcagcagttttaacccaaggggaaggccaaaaagggggggtttttttccggtggcaggagggggagcattttaaggtaaccggccgaccacagaggtaggggggtggtaactgggggtggcaaaggcctagccgacttccagaggggggggaagctttggtaccttaaaggtgggtccggggatg

SEQ ID NO: 155330 - DNA, 971 bp, Zea mays
  unsure (1)..(971): unsure at all n locations
  Clone ID: MRT4577_73240C.1
cctcgaggccggccgggagaggcacagcgccacagacctccctcccagtgggcgattctttgcttgtagctagctgtaccagcctctctctctccgtctcttgtgttgaaggggagacagagaagggtaggcgacacgccatggaaccgacaaggctgctgcttcttctcctcgttctcggcgtgtcgctgcaaggatgcattgcgcagggcggcggcggcggcggagggctcacgcgggggagcttcccgaagggattcgtcttcggcaccgcctcctccgcttatcagtacgagggagcagtgaaggaggacggcagagggaaaaccatctgggacaagttcgcgcacacgtttggtaaggttgcagacctgagtaacgccgatgtcgcggtcgatcagtaccaccggttcgaggaggatatacagctcatggcggacatggggatggacgcgtaccgcttttcgattgcctggtcgaggattctgcccaatggtaccggccaagtcaaccaggccggcgtcgaccactacaacaggtttatcgatgcactgctatcgaaagggattgagccatacgtgaccctgtaccactgggacctcccccaggccctggaagacaggtacaacggatggctggacaggcagatagtgtacgacttcgccgagtacgccgagacatgcttcgaggccttcggagaccgcgtgaggcactgggtcacgctcaacgagccgcacacggtcgccgtccagggctacgacgccgggctccaggcgccgggccgctgctccctgctgctccacctctactgcaggtcgggggactcggccaccgagccctacgtcgtcgcccacaacttcatcctggcacacgccaaggtctccgacgtgtacaggaaaaagtacaagctaggcggctcagaacggagagcttgggatagcngtcgacgtcaggtggttcgagccgatgac

SEQ ID NO: 155331 - DNA, 631 bp, Zea mays
  unsure (1)..(631): unsure at all n locations
  Clone ID: MRT4577_73241C.1
gcgcgtaatctggtacgaaccaatgacaaacagcacgatcgacattgaagctaccaagagggcgcaggagtttcagctaggatggttcgcggacccgttcttcttcggagactacccggcgacgatgcgggctcgggttggagagaggctgcccaagttcaccgcagacgaggctgcccttgtcaagggggccctggacttcatgggcataaaccactacaccactttctacacgaggcataacgacaccaacatcatcggacggctgctgaacgacactttggcggacaccggaaccatcagcctgcccttcgacaagaacgggaagcccattggagatcgggctaattcgatatggctgtacatcgtacccagcgggatcaggaagctgatgaactatgtcaaggagcggtacaatagcccaacggtttacatcactgaaaatgggatggacgacggcaacagccctttcacctccatccaggacgccctcaaggacagcaagaggatcaagtaccacaacggctacctcaacaacgttgctgcctccataaaggagnacgggtgtgacgtgcgtgggtctntcgcgtgggtcgttgctggacaactgggaatgggccgnncgggtaca

SEQ ID NO: 155332 - DNA, 2427 bp, Zea mays
  Clone ID: MRT4577_73242C.1
attcacaacagcgccactgacctccctccctagtcggcgattctttgcttgtagctagctgtacccgcctctctctctctccgtctcttgtgatgaaggtgagacagataagggtacgcgacacaccatggaaccgacaaagctgctgcttcttctcctcgttctcggcgtgtcgctgcaaggatgcattgcgcagggcgacggaggcgccggaggactcacgcgagggagcttcccgaagggattcctcatcggcaccgcctcctccgcttatcagtacgagggagcagtgaaggagaacggcagagggaaaaccatctgcgacaagttcgcgcctactttttagcctggtcatttgtccaacctaaaacaatgggttggattcagacattcagtatgggcagtcaattgttggcatttgttcagacttgccgtgactgttagagaccaatgcaggagtgtccgcttgtgattgcaggaagctgaacgcagtttttttttcatttccattttgtaactgcgtggctcacacggatagcctcaagtggtgccccaagaactcgggccagcggttcagcaccctactgagctcgaggtgtagtcgtcaccccggttgtggtggcaagattccagacctcagcaacgccgatgttgcggttgatcagtaccaccgtttcgaggaggacgtacagctcatggcggacatggggatggatgcgtatcgcttttctattgcctggtcaaggattctgccaaatggtacgggccaagtcaatcaggccggcatcgaccactacaacaaagtgatcaatgcactactatcaaaaggaattgagccatatgtaaccctgtaccactgggacctcccccaggccctggaagacaggtacaacggatggctggacaggcagatagttaatgacgatgcggcttatgctgagacatggttcaaggtgttcggagaccgagttcagcaatgtagcacgctccacgagccgcaaacggttgcagtccaatgctacgatgctgtgcttcatgtgctagggcattggtcggtggcgctccatctacactgccagattggggctccacttcctggactacacagataacctcaagaggtaccccaagaactcggtccagtggttcaagaccctgctgagctccagctgaaggcgtcacacgggctgtgattggactgaccatttacccgacaccaatacccttatcctgttgtgtcaagcactcaagctccaatcaatgtaaaataatattttcagctaggatggttcgcggacccgttcttcttcggagactacccggcgacgatgcgggctcgggttggagagaggctgcccaagttcaccgcagacgaggctgcccttgtcaagggggccctggacttcatgggcataaaccactacaccactttctacacgaggcataacgacaccaacatcatcggacggctgctgaacgacaccttggcggacaccggaaccatcagcctgcgtgagtcctcatcgtgtgtgtttgcaagttcatttcaactgaaaaaaaagaaacctgaaagatgagaaaccttgaaggctgctactgagccttcaaactgacaacacgtgccaagcttcctatctgtctgtccaaaaaaacttctagcgacacttgaaatttgaaaccgtgggtagctgatacttcgcaatttcacagccttcgacaagaacgggaagcccattggagatcgggctaattcgatatggctgtacatcgtacccagcgggatcaggaagctgatgaactatgtcaaggagcggtacaatagcccaacggtttacatcactgaaaatgggatggacgacggcaacagccctttcacctccctccagaacgccctcaaggacagcaagaggatcaagtaccacaacggctacctcaacaacgttgctgcctccataaaggaggacgggtgtgacgtgcgtgggtacttcgcgtggtcgttgctggacaactgggaatgggccgccgggtacacctccagattcgggctctacttcgtggactacaaggataacctcaagaggcaccccaagaactcggtccagtggttcaagaccctgctgagctccagctgaaggcgtcacacgggctgtgattggactgaccatttacccgacaccatacccttatcctgttgtgtcaagcactcaagctccaatcaatgtaaaataatgttacccctctctctctctctctggtagaaaaacatgtcgtgtagggctacatttagttacacattaaaagggcatatcagtaacttcaaacttagttcgtttgaaagcataagttacacgtgtggatttgtattgaaatacactttgtaaaaaaaagtcatgtttgtaaataaattaaataatatagcctagaatt

SEQ ID NO: 155333 - DNA, 253 bp, Zea mays
  Clone ID: MRT4577_73243C.1
agatatgtatggtggtgttcactggtacaagcaggcctatagaacaaacgaaacaaattcacgtaggctcctagaccctctgtaaaaaaacgtacatgaagtgctagtctgatccagtccgtgcccaacgagatttctggatcagggcattgcatttcatacacgttgcacctaagtagataggacacttggggttgcaaagcatcttaacgacccgcatggcgtatgttccaggataggtagccgtggactc

SEQ ID NO: 155334 - DNA, 384 bp, Zea mays
  Clone ID: MRT4577_73244C.1
gagactacccggcgacgattcgggctcgggttggagagaggctgccgaagttcaccgcagacgaggctgcccttgtcaagggggccctggacttcatgggcataaaccactacaccactttctacacgaggcataacgacaccaacatcatcggacggctgctgaacgacactttggcggacaccggaaccatcagcctgcgtgagtcctcgtcgtgtgtgtttgcaagttcatttcaactgaaaaaaagaaaccttgaaggctgctactgatcattcaaactgacaacacgtgtcaagcttcctatctgtctgtctaaaaaaacttctagcgacacttgaaatttgaaaccgtggatagctgatactttgcaatttcacagcc

SEQ ID NO: 155335 - DNA, 265 bp, Zea mays
  Clone ID: MRT4577_73245C.1
ctcgaatcacagacgcgtctatctcatcttgctgcactgcactaccctgctctgccatcatatcgtacgttatctcggtcgagcgagatcagggagaggcatggctgctccgaagctcgcgacgctggctctggccgtgctcctggcttctatcgtggtggctcccccggccgcggtgcgctctgcgatgtcgtgttccaccgtgtacagcacgctgatgccgtgcctgccgttctgccagatgtgcggggccatgccgccccag

SEQ ID NO: 155336 - DNA, 267 bp, Zea mays
  Clone ID: MRT4577_73246C.1
atccgggagggtctatcgtgtagctctgagaattgacaccattatcagggacctgtaatagcaaagatagtttcttgtatatcgttgctaacctgactggatttattttcagggcactggtaatgcaaatttctacttctccactggtttggcttacacttgccttcagactgagttgctggtagagagtgtgagttcatgattaagcacgacagaaatgtaaagcttcttgttacaagctaatttgggtccttataatcagaatct

SEQ ID NO: 155337 - DNA, 431 bp, Zea mays
  Clone ID: MRT4577_73247C.1
ggcgattgggaccctcgaggccggccgggatcgatccactactcgcgatcaaggggaggtattcgccatcaccaaaccgtggcggaagctgcgcggggattgtaatcaatcaaggtcgactctgagctcggagggacaggggcgaacggctgattctcgttgatttcgtcgcgtccgcgcggagccgtgggacatcgtctccatgatagtttctgatcgatgctcggtcaagaacaggtaccacaggatgaggtgcttggaggatgttgtgctgcgttcgtgagaggtctaggtcgtcgtctcccagtcaactttgggttgctggaccgttgtctccttttgatgtaattatctatttatttatttgtatagaactcttattatatagtaaagatgtgacatacaaaaaaaaaaaaaaaaaacccgcggcc

SEQ ID NO: 155338 - DNA, 386 bp, Zea mays
  Clone ID: MRT4577_73248C.1
ggggaaaacaaggacgataaataatcaatctttgctcacaacagttggggacatgcaaacctttttcattaaaaataaacagggctcaggcctacctaagtccatcaattttgaattcgggggggggtttttacactttcgaaatggtttttgaaaaacaaaaaaatgttgaaacgaatcgttgttacaaaagcattgttggggactttcaaaactttgggggagtcatcagggttatgggcagacataattgtatgctcatttttccgggatgacacaattttttcaccaaatgggccaaaaaacgttggggagcttattgagcctttccttcaaaaactttgcgtaaagcttgaggagtgcggacccttgggttaaaccccagt

SEQ ID NO: 155339 - DNA, 704 bp, Zea mays
  Clone ID: MRT4577_73249C.1
gggaccctcgggccggccggatcgttagatcccatccgaagctgtgtgatgcttgctgctcctccggctctttctagatctgcgcaagccggggatcgccatggccgactgggaggagcaccacttaaaattgaaggccaccgccggagtcgtcaagacctacccgcaggaggttggcgccgcgcggaagaacgggaatatggggatcatagaacggcccgtgcctgggtgcggaggagtctacctaagagggtggagagcatgggcatgcactatgccacgtctgaggacatagacatgttctgccgcaaaagagctagaagatattgaaacttaccatcacaactgtgacatgccagatgggatccgccctgacatccttatggacgatagatgccaagatgtatagatgcgcccagttactctgaacggtaacgctcttgatgacgctacactcccaactgatgatattttagacgacaatatcaaggaatggaaagacagcgaagctgatcttgttgagactgcgcaggatggtattggggaggacacaatctgcgcactacaggaaggtggtcctacagatgtaacatcacttgcatagctgggtgtcaaaagctcacccgtataaggaagtggatagcggattggtacaaagacatacaggtggctagagctagagcttctatgggctacacacttgc

SEQ ID NO: 155340 - DNA, 2442 bp, Zea mays
  Clone ID: MRT4577_7324C.1
agcaagcaggcccgcctacgtgagccggtcaatcgacgcgcgctccatccacccatcgaccgatcgatcgccacagccaacaccacccgccgaggcgacgcgacagccgccaggaggaaggaataaactcactgccagccagtgaagggggagaagtgtactgctccgtcgaccagtgcgcgcaccgcccggcagggctgctcatctcgtcgacgaccagtggattaatcggcatggcggctctggccacgtcgcagctcgtcgcaacgcccgccggcctgggcgtcccggacgcgtccacgttccgccgcggcgccgcgcagggcctgaggggggcccgggcgtcggcggcggcggacacgctcagcatgcggaccagcgcgcgcgcggcgcccaggcaccagcagcaggcgcgccgcgggggcaggttcccgtcgctcgtcgtgtgcgccagcgccggcatgaacgtcgtcttcgtcggcgccgagatggcgccgtggagcaagaccggcggcctcggcgacgtcctcggcggcctgccgccggccatggccgcgaacgggcaccgtgtcatggtcgtctctccccgctacgaccagtacaaggacgcctgggacaccagcgtcgtgtccgagatcaagatgggagacgggtacgagacggtcaggttcttccactgctacaagcgcggagtggaccgcgtgttcgttgaccacccactgttcctggagagggtttggggaaagaccgaggagaagatctacgggcctgtcgctggaacggactacagggacaaccagctgcggttcagcctgctatgccaggcagcacttgaagctccaaggatcctgagcctcaacaacaacccatacttctccggaccatacggggaggacgtcgtgttcgtctgcaacgactggcacaccggccctctctcgtgctacctcaagagcaactaccagtcccacggcatctacagggacgcaaagaccgctttctgcatccacaacatctcctaccagggccggttcgccttctccgactacccggagctgaacctcccggagagattcaagtcgtccttcgatttcatcgacggctacgagaagcccgtggaaggccggaagatcaactggatgaaggccgggatcctcgaggccgacagggtcctcaccgtcagcccctactacgccgaggagctcatctccggcatcgccaggggctgcgagctcgacaacatcatgcgcctcaccggcatcaccggcatcgtcaacggcatggacgtcagcgagtgggaccccagcagggacaagtacatcgccgtgaagtacgacgtgtcgacggccgtggaggccaaggcgctgaacaaggaggcgctgcaggcggaggtcgggctcccggtggaccggaacatcccgctggtggcgttcatcggcaggctggaagagcagaagggccccgacgtcatgcggccgccaatcccgcagctcatggagatggtggaggacgtgcagatcgttctgctgggcacgggcaagaagaagttcgagcgcatgctcatgagcgccgaggagaagttcccaggcaaggtgcgcgccgtggtcaagttcaacgcggcgctggcgcaccacatcatggccggcgccgacgtgctcgccgtcaccagccgcttcgagccctgcggcctcatccagctgcaggggatgcgatacggaacgccctgcgcctgcgcgtccaccggtggactcgtcgacaccatcatcgaaggcaagaccgggttccacatgggccgcctcagcgtcgactgtaacgtcgtggagccggcggacgtcaagaaggtggccaccacattgcagcgcgccatcaaggtggtcggcacgccggcgtacgaggagatggtgaggaactgcatgatccaggatctctcctggaagggccctgccaagaactgggagaacgtgctgctcagcctcggggtcgccggcggcgagccaggggtcgaaggcgaggagatcgcgccgctcgccaaggagaacgtggccgcgccctgaagagttcggcctgcagggcccctgatctcgcgcgtggtgcaaagatgttgggacatcttcttatatatgctgtttcgtttatgtgatatggacaagtatgtgtagctgcttgcttgtgctagtgtaatgtagtgtagtggtggccagtggcacaacctaataagcgcatgaactaattgcttgcgtgtgtagttaagtaccgatcggtaattttatattgcgagtaaataaatggacctgtagtggtggagtaaataaaaaaaaaaaaaaaaaaaaaaaaaaagaacaaaaaaaaaaaaaaaaaaaaaaaaaaaaaaaaatccctgctgttcggtgttcttatcgctcctcgtatagatattatataaagtacaaaattcttcttcttctt

SEQ ID NO: 155341 - DNA, 149 bp, Zea mays
  unsure (1)..(149): unsure at all n locations
  Clone ID: MRT4577_73250C.1
aaacccaaacaacaacaagggttttggttacattttcttttacaaaaacacacctcctactctcacaaattcataatctaaacccctcgtccgttttttgtttatnatggngaggattaatccttttactctctacctaataataccca

SEQ ID NO: 155342 - DNA, 257 bp, Zea mays
  unsure (1)..(257): unsure at all n locations
  Clone ID: MRT4577_73251C.1
cgccccgngccggctggccatggcgatcagggctggccgctcggccctccacctgcacgctctcgctttcctcatgctggccggctncccctgcctccaagtccaagctctagtggaccatngnaaacaggtatntgactggggtaggnaacccaactttngaatgtagagggggtggggggagtgaaagggatggntntnatntnttgggtagattaaaggtaataagatataggagaataagggggggaattggt

SEQ ID NO: 155343 - DNA, 325 bp, Zea mays
  Clone ID: MRT4577_73252C.1
aggaggggcatatatttttaaatcaaataaaaggggcccactttatctatcgttccaggaaccacactagggttaaccaaaatccctgtaaccacgcatacaatcgcgcaggaacctgactccttacaagccaagtgcacttacctcctatacacctctgacaatgtgtatttcacacacacacaacacaatgcctgtgtttggtatccagcctgggcttctttatttttttttttcccccacctcatgctaggtcaatgatacctatattcacaggctacggtccttgagggcagtaaacatatgggttgtactgcaggtctta

SEQ ID NO: 155344 - DNA, 373 bp, Zea mays
  Clone ID: MRT4577_73253C.1
acaaaaaaaacacacatacaaccaaacatacaaaaaacacaaaattaataaataggacggaaaaataataacatatgaccatgacacaaatacacaagaatactacaatatctatactatccctttatatatctaactatatattatgaactacttacttctcttggcaagctctataccttaactcgactatgcttttgaaatccttcgcttactatgttccatactcctacagagtgaaagattgatggtaatacgtgcactatcaagacttatctgatattaatatgaatctatctatgacacatctacttggctaacaatctctccgaactcatcaacatattctaccattaatacaactgctcgtata

SEQ ID NO: 155345 - DNA, 542 bp, Zea mays
  Clone ID: MRT4577_73254C.1
cggacgcgtggggtcggggggtgtgggtgtggggggcggggggagtgacgcccggggtggcgatgacgacgctgcacatggacccgccggcgccgcctgcgcggcgttcgttgtcgaccagctgcgacctgcacccgggcgaggcgttcaccggcttctgcgccgcgtgcctgcgcgagcgcctccagggtctcgaagcgtctgccgccgcggcctccgcgccgggccgcaagtccacatcggccatccggtccctcttcgccagaccgttcgccgccggcagctcgtctgcgtccggtcccgccgagccgccggacctccggcggtgcaagtcgttctcgtgtggccacggcggggacgctcttgccgcagcagcggcggcggcggctggtgctgctgccaccagggcggacgagccgcagcggcgttcgtgtgacgtgcgggggcgcagcacgctgtgggcgctgttccaccaggacgaccgtgaccgcgtccgcgatggcacggcgttcgccgcgttcccagcctcctcatcgaccgcc

SEQ ID NO: 155346 - DNA, 1937 bp, Zea mays
  Clone ID: MRT4577_73255C.1
cattgggtacctcgtggccggccgggccggctgggtggctcaccttccactttcccccacctccaccatcgtgcctcagcatcagcactcgaatgccacgagactgacctctccctcgtcgccgcagccgcgatgcccgcaccgaccgccgagccggcgctcccggcggccttcctctgcgtcccgtccccgctcctctccacgccgctccccggcgctgcactctccgcctcccccgcgccctcctcccaccatgcctccttcctcccgcgcccgcgcggcgggccccgagcgctctccgtcgccatctccgtcccgggccccactttctccgtggcgtcgcggctccatcagatgtggggcgagttcgcgcggttcgtgcggctgcacgggaaccaaatagcgccgctcgggttcgcgtccatgggcctgggtttcggcggcggtggcggggataacgtcggcggtgggggaggagggggtggaggggatgtggatggggtaggcgaggtagaggaggccgcggcgcgggccgaggcgccaaagaaggtgctgatccttatgagcgacacgggcggcggtcaccgcgcgtctgccgaggccatcaaggctgccttcacccaggagttcggcgacgactaccaggtatttgtcactgatctgtggactgaccacactccatggccattcaatcaactgcctaggagctatagttttttggtgaaacatggacccttgtggaagatgacatactatggtactgcaccgcgtgtagtccatcagcctcattttgctgcaacatccacattcatagcaagagaagtggcaaaaggtctaatgaagtaccaaccagatgtaattatcagtgtacaccctttaatgcaacatgtccccctccgaattctaagatcgaaaggtctcttggataagatcccattcgcaactgttatcacggatctcagcacttgtcacccaacatggttccataagcttgtcactagatgttactgtccatcaactgaggtggaaaagagagcactaaaagctggactgaagcccgcacagattaaagtctatggcctccctgtccggccctcttttgtcaaacctgttcgaccgaaggatgagctgcgaagagagttaggcatggatgaagatctgcctgctgttctattaatgggtgggggtgaagggatgggtcctattgaggccactgctaaagcacttggtgattctctgtatgatgaaaacctaggggaacccactggtcaaatacttgtaatttgtgggcgtaataagaagctggtcaatcgattgcaatcaataaattggaaagttccagttcaggtgaaaggctttgttacaaagatggaagaatgtatgggtgcttgtgattgtatcattacaaaggcaggacctggtacaattgcagaggcaatgatccgtggcttaccaattattctaaatgattatattgctggacaggaagctggcaatgtcccctacgttgttgaaaatggatgtgggaagttctcgaaatctccaaaacagattgcgaagatagttgccgactggtttggcccaaggtcagacgaattcagggtaatgtcccagaatgccctcaagctagcacgacctgatgctgtgttcaaaatcgtccacgatctgcacgagctcgtcagggaaaaatgttttgtgccccaatatgcatgtgcaacataaaaggccgtatcctctattttgtgtttgcttaattttttttaaccccatgcggcactagctatagctgattgtgaggattgcgaatattgattgatttgaaacgtttccgtaagagaaatgaaaatgtattgaatgctctagtttaattttccgaaatactttttcaggctaacaaaaaaaaaaaaaaaaaaaactcgaggaagggcgccggtacc

SEQ ID NO: 155347 - DNA, 333 bp, Zea mays
  Clone ID: MRT4577_73256C.1
gtattctactgcccttctgttgcggttgtttttactgcttgctcctgttttcagcagcagagcagtgcaatttgcaagcattttaacagcagcagccggggacggaagcagcacaacagacccaagcatggaaaaagacaagagcgaaaagcggggcgccatcagaacaaccagacgacggaactccccaggaccgccccaaagcccgcaagcgccgaagggctccaccctgaacttccaaccccccttgaccgcgccgaaggacacaaacccagcgcccggcggctccgccatcggcacgagcagcgccctggacctataaaccccggcccc

SEQ ID NO: 155348 - DNA, 245 bp, Zea mays
  Clone ID: MRT4577_73257C.1
acacaccctgctcatgagcgcgccaaccatcgaagccataatattgaggctcattatgctcatcgatgcactcaagaccagctgcaatggagacaatatggccaagatgcagacaatgaccaagcccttgtctaagtcgatcgtaactttcaccaccggcatgcatcgtaatgggtacattgattagttaaacttcacaggatcaacccggaaatggcaacagggatgtgaaccttatcacccta

SEQ ID NO: 155349 - DNA, 402 bp, Zea mays
  Clone ID: MRT4577_73258C.1
tttctttcgcgttcgcggactcgtgggtcctgaatgtatgcagagaccactgttgactccgggagcaaggcgctgcagttcctggggctccatgaccaggacagcacggtttctcctgtccacacgcaccagttggatgtggttggcaatcaggatgtggctgtgaacctgatcatcacagactactgcatgcctggcatgacaggatatgacctgctcaagaagatcaaggtgactactgaactactccggcatgatcactgatcattctgtatagtgcttgctttctggcatgtttactgaagataacaaggcctaaagatgcatgtttggttttgctctaccaggagttgtatgctctcagagatatcccggtggttgatcatgtcctccgagaacatt

SEQ ID NO: 155350 - DNA, 1441 bp, Zea mays
  unsure (1)..(1441): unsure at all n locations
  Clone ID: MRT4577_73259C.1
ggaccctcgggttggccgggattctcctattgtttcagatttaacagtacgtaaatttgcagtagtaaaatgatgtgtgatggttttgaaacttgtttacgggatatagaagtcatccctatatgggtaatcgtaagcgcgtcagatcgccttaagttgctgctgacttaagtcagttgcttctgttaatagggcatagtggtcaccccgagttacgtaagcgcgagcatgttgcaccggcttaagtcgttgccaacttaagccgattgctccgttagcagggcatagtggtcaccctgagttaagtaagcgcgagcatgttgcaccggcttaagttgttgccaacttgagccgattgctccgttagcagggcatagtggtcgccctgagttaagtaagcgcgagcatgttgcactgccttaagtcgttgccgacttaagccgattgctccgttagcagggcatagtggtcaccccgagttaagtaagcgcgagcatgttgcaccggncttaangtcgttgccgacttaagccgattgctccgttagcagggcnatagtggtcaccccgagttaagtaagcgcgagcatgttgcaccgccttaagtcgttgccgacttaagccgattgctcgtatattcatttcctggtcacatccccgaacaatgtgaaggcgtgtaatcagatagatgacgatgaagaagaacaactataataagatttgccctagcctgggttctcagttatctctaaaaaaaaaaaaaaatgacgatgaaaaggggcagcaaaaataaaaaaaaaaaaaaaaaaaaaaaaaaaaaaaaaaaaaaggggagaggggggggacaataaaaaggatacaagtttaggggcggggggggcgccgtttccggccgggttggccgccggcgtgttcaccaacagcctggacacagccaacaccctgacgcgcgcgctcagggccgggaccgtctgggtgaactgcttcgacgtcttcgatgctgcgattccgtttggtgggtacaagatgagcggcatcgggagggaaaagggcgttgacagcctgaagaactacctgcaggtgaaggcggtcgtcaccccaatcaagaacgccgcgtggttgtagacgctgcaagtgtggccttgtgcacgagaaccacgtatattcatttcctggtcatatccccgaacaatgtgaaggcgttaatcagatagatgacgatgaagaagaacaactataataagatttgccctagcctgggctctcagttatctctaataagttttatggttggtgcctatatattgtgcaatttggttgctcccttttattttgtttctttttgataagactgttctagcaacggatatgcagagttcattatgaaaatgcatttgttagtgtctttgatggtgaaaaaaaaaaaaaaaaaaggggcggcc

SEQ ID NO: 155351 - DNA, 234 bp, Zea mays
  Clone ID: MRT4577_7325C.1
gacggggacggttattttttttacaaataatcaaatttacagcattcgtatattttcagcaacggttacaagaacatcaaccgaggggcactgtacttttttataaagaccatcatgggaaatgggacttggtaagcattcctggggacaggaggggaacaaaacctgcgctttaaaagcgttgccggcctacaaattattatgcatcaagcgtaaacttttcccagcgcaaaa

SEQ ID NO: 155352 - DNA, 310 bp, Zea mays
  Clone ID: MRT4577_73260C.1
ccgggaatccggctcgggcccaaagtcgaacccaactactctgcacccgcccacaacgtcttaaacgggggggctcttgaaaaccaggggggggagaacaacggaccccatcacgggggaggacgaaccaaccgcgaccagacacagcaagcaacgcatacgggccactccaacgggcccatcccccggacgaaccgtggcagaaggaacaaacgagcgacggcacgcacacacgacaggagccaacctgcagaccacagcaaggccccaaaagaggagaactgcttgaaccaacagctcggacggccgg

SEQ ID NO: 155353 - DNA, 576 bp, Zea mays
  Clone ID: MRT4577_73261C.1
atagacaagcacgagcggaggtacctggtcagccagcatggctagcccggctctgtctccgctggctaccatgccacttcggtcacatcatcaggccccccacgggaaggaggggtgtcaacaaatacaccgtagatcccttctctaagaaggactgccaggacatcaagatccgatcgctcttcgctgccccaatattgcgaagactctctcgtccagcataccggcgtgccatgattggctctgctgctcagcaacacggagactttgacgattggctagctaatgttaacgctgacgaggctcacgcttacatgagcatcaggctccttgctgaacatgtgaaaggcaggaatgagctcaccaacttctgggacatgaatttttccaccgataagatcacatctctacgaacaaaacggtagacattgattgatggccatgctggtgtctcgacaaccgccaactacatgtgtgggacgtgttctgcattagatttaccaatacgcgcccaaagcatttgaagagaacccgctatgctctggcatgccatattctgcagagtcgcccccatat

SEQ ID NO: 155354 - DNA, 427 bp, Zea mays
  Clone ID: MRT4577_73262C.1
tattatttttttttttttttttttttttttttacggggttccccttttgggttttgccggggacccatcgtttttgtatgaacaaaacaaggggttaatttagtttccctaaaggaaagccggaaccgtaacctttaatgccccacccaaccctggtcttgtacggccctaaaaaagcttggacccacataaaaacaagggggccaaaaccacggtgggggaaacaaaagggacctcttcagagaagatgacataccggaccacaaacctacaatgggccaatgaataaagacttgggactcaagagacccccaaaaacccatggggcattatggcttaacctttgggccaaaactcaggccttatggtaataccagacaggaaccgctttcaaaaaaaccaacatgatttttattttccaaggggg

SEQ ID NO: 155355 - DNA, 819 bp, Zea mays
  unsure (1)..(819): unsure at all n locations
  Clone ID: MRT4577_73263C.1
ccgggaacattgacctacttacccagatactaccacaatttcaaacgtcactcgaacacctcttcaaacccccgaaatttggcaagatggcatcgcaatcaggcatggtcaacccggccgtcttccaggaccttcaagcgcgcatagacgaggactccgcggttcgagatgagctgcgcgacatcatccaggcgcttgagaaacacaaccgcaatgtctccttcgtgctgtcaagagcccattccacgcctgtcagcgagttgtcagagatcttgaaagctgcccaagagcccattggcaatgtcattgacactgtttccaagctgtcgcaagctgcgtccaagatgccttactacaagttcaacaacatgtggagccgacagatgcaaggcgcatgcgagagcattctcttctggggctggcttggcggctacaagtatgagggcggtgcggtacaatgcgggcgactcttaaccattgaggagctcggtgaaatcttcaagatcccagtcaacctcaaggagcgcgatgagttccacctctcacttgaggagtatctgcatgcccttatgacgcttgtcgaagagcttacccgccttgcccgcaatgctgtcactctgggcgattacgagcgcccgctgctcatcaatcagttcgtcaaggatctgcatgctggattccagatcctcaaccttaagaatgacagcctacgccgncgcagtgatggcctcaaatatcgtgtcaaggatgtggaggacgtggtgtatgatctttcattgagaaacttggttccgaaaagggagagcagtagtaggtatc

SEQ ID NO: 155356 - DNA, 274 bp, Zea mays
  Clone ID: MRT4577_73264C.1
ctgacgcgtggggtttcacgtataggagggagaacaaaggtcgcgtcgggaaagttcttgccttgttgggaagggatgacatcggaggtggaggacgacgcggctgtgccgggctcgcctatggtctccaatggtgcagcctgacttccaccggaggagagatcaagctaaggcgattttgtcctaacaggccgtcatagatcgtctccaatgccgagcattccttgcgctaaatatttaagggcatttactcaaccctgccttcttataatct

SEQ ID NO: 155357 - DNA, 866 bp, Zea mays
  Clone ID: MRT4577_73265C.1
ctcacccaactgaactgaactactcagcagcagatcaacatctctatccaacgccttctacccgataaatcatctagctagctttcatacgacatcagcatcgtattcatcatggccatgggcatcatcaccatcattcacgccgttctggcagtctttctcatcatcgagctgggtctcaccgcatacctcgtcgatgctactagcacctggtggagtgactctcctgcttcggtgtcaatcctgatcttctgcgtcgtctggtccatcctaatcctgctctatctcgctctgacgcctctcttcgctcctcgcatgtaccacagcatggtcgctctcggtgttctcgccctcaccacgctcttgtggttcgccggcgctactgctctcgctgctcacatcggtgttcccaagtgccacggcattacaatctgccaatgcgctcaagcggctgttgctttcggttacttcatctgggccatcttcactggtttgaccattatggagggccttgctttcatgcgatcgcgcggtcactctgctcacgccgataataagcccggtcaccactctggtgtctaaacgattcgagggtgtaatgagttgatggaatggataacgcaacctcaaccttggaaatggagtggtggtggttggattcgtcttttatcgcctgttttttatgcgacacggccgcaagatacccttcaggaactgactggctcgtcagaagcgcccagattatatgattaactttttgtattattcgtggtgtattagtgcgttatggttagaagggaaagctatcattgatcgcctgaaaaaaaaaaaaaaaattcctgcggcgcgaaaaaaaaaaaaaaaaa

SEQ ID NO: 155358 - DNA, 626 bp, Zea mays
  Clone ID: MRT4577_73266C.1
ggaaaaaaaaggggggccgccctacagaaacaaaaaaccttccttttttgggtggcccagaaaaaaggcccaggcccggccaacttttcgcccatacaaaaaaccgactagcccaggggggggggggacgtttttcccggggaaacccccggggaaaaaaaaaaaaaaccccgagggcggggggccccccggttttttacggggcccggggccaaaaaggaccatatccccaagcggggggacaaccccggggggaaaaaaccttttgaaaaaagccccccggggggacccgttcacggaaaacggcccagggttcacgaccgggttcttcccgggggacggggccccgttccccgactttgaacaatgggagcccccccaccccaggcccagggtggccaagccaaccccaaattttttatccttaaaaaaaaaacccccgagaaaagttatttttgggcccgggttcctttgccacccaaggccccaaaaaacccgggggaaaaaaaaacccgggggaaaaaaatagtttttgggtttccccgacttggaacccccccccaaaaaaaaaggggttccggggggaaacgaggagccaccccggggggaagggaaaaagcatgggc

SEQ ID NO: 155359 - DNA, 132 bp, Zea mays
  Clone ID: MRT4577_73267C.1
aagctttccatattttggacagttggtcgaagtgacatctttgttgtgttgactacacctgtggagggcgtctatggctacaaaagttttttacatcagctgcgtatcaagtttgtcataaaaaatgcccct

SEQ ID NO: 155360 - DNA, 592 bp, Zea mays
  Clone ID: MRT4577_73268C.1
ccccaccacgcacgggaaaacctcgcaggcaaccggcctccgccgccgccgccgccgccatcgaagcatcagaaacagccagtaagatgtcgttccgggcgcgggagatttacaagaaggtggtgcgccgcgtgggcggggaggggaagctgccggcggaggtgatggacacggtgaagaacatactcccgaatagcaaggtcgtcatgggccgggccaagcgcggcatcttcgccggccgccacatccagttcggcaacaaggtctcagaggacggcggcaacaagtcaaggcgaaactggaagccaaacgttcaggagaaacgtcttttcagttatattcatgactgacacattagagtcaaagtaaccactcatgcactacggtgcattgacaaagctggcgggatcgatgaatacctcctgaagacaccttacaacaaaatggatactgagatgggaatagcctggaaggcaaagattgagaagatgtattcagagctagctgggatggaagttggcttcttccctcccaaggaagaggctaagatagagcagggtttcgaggaggttcgatcggccaagagagagtt

SEQ ID NO: 155361 - DNA, 195 bp, Zea mays
  Clone ID: MRT4577_73269C.1
cgcgtccgcccacgcgttcgcagacacacctacacatgcttttttacagtattccatacaatacacggcgactactttgccatgcctactccccacttataactactcaccaaacacacataccagtctacccctctatgccagatccctttatggccccaaatctattgatcatcaccaaacagacatgagttt

SEQ ID NO: 155362 - DNA, 872 bp, Zea mays
  Clone ID: MRT4577_7326C.1
atagatgccctggtccctccctttcactagcaagaaaattaattaacaagtctagtgtacggcgaaccgcgtgccgcgccgcgccgcgccggtagttccacctgaaaaggagacatgaagcagtccgtcgttctttaccccagcgccggcaccggccacgtcgtgccgatggcggagctcgccaaggtcttcatcaaccacggcttcgacgtcaccatggtggttgtccctgagttctccagccagttcaagcgggtcgccgcggccaatccgtccatctctttccacgtcctcccgccggtctccccgccgcctgccgacgtcgctggctccggcatgcacccgttactctccatgctgaagacgctgcgatggtacaacgaggagctcgagaggttcctctgctccgtgacctcgcggcagcacctgcactcgctggtcatcgacatgttctgcgtcgacgcgatcggcgtcgccgcgaggctgggcgtccccgcgtacacgtttgccccgtccagcgcttcagccctggccgttttgacccaggtccccacgctcctggcgagtagccagaggggtttgaaggagctcggggacacgcccctcgagttcctcggcgttccccccgtgccggcatcgcacctgaacgcagagctgctggagcggccggaggaagagctgtgcagtaccgtggcgagcgtcttcaggcgcggcatggacaccaggggagttctggtgaacactttccaggcactggaaaacccgggcgttgcaggcgctcggggatccccggtgtgtcccgggcaaggcggcgctgcctccgatctactgcgttggggctttatttggaacagcgcacgggatcctcctgc

SEQ ID NO: 155363 - DNA, 1016 bp, Zea mays
  unsure (1)..(1016): unsure at all n locations
  Clone ID: MRT4577_73270C.1
gggtacctcgaggccggccgggattcgtcgtgatttcgcaatggtcgccgccgttgccagagccggagcacctgaggaagtcgcaagaagccgaaccctttcttcctgactcgcaatggaacctggagcacgggatgaccgccggcgggaagaagcgcaggccggagcagcagctcgaaggagaccggcgcacaaaggcgcgcaaacactcggcacgggagccgcttcccctggacttgaacctgtccatgtccgatgaccataccgacgccgtagacgacagcggcggcgagggatcacggaactcgtccagtgacctgaccgtggagcacgagcaggagtacgtgcagcccgctcactccggcagatgctcggcggcgccactgaccgtgtccgaactcatcaaagctgtggacggagtggtcgtgttcaagccaccggtgagcttggagccactgaagcggagcgtctccgacttggtggtgccggcggcgaagttgggggaaatcacggtcggcgggtggcctgttcacgtcgacgacggcttgctgggcaggctagccgcccgggcagctggagcggcggcggcgggcacgcccatggaggcgtggacgaccggcgaggtgctgtgccctagcagcatgcggcagttcaaacgtagcttgagcagcaacgacgtggacggggcgacggtggaaggcagccgccggagaaaggacggcgagatgttcccgatgccggtgacggtcgacggcaactgatggagatgcgcatgcacactccgacgacggcttccatcttttattcgctggtcatcaagatatgatcaagcacggtgtacattagtacattcatgtaaattttccagcaatcggtttttttttgttttcggtcggagaggagtaacgatcataaaactaaactagctagagacaggacaagggactaggcaggcactagtagtagctagctcctttcnccccattattttgcctttattacgtgctatttcacgg

SEQ ID NO: 155364 - DNA, 636 bp, Zea mays
  unsure (1)..(636): unsure at all n locations
  Clone ID: MRT4577_73271C.1
gccagcgccgcgcacgcggccaggaggcccgcgcgcaggccccgcggctcgggcggcgccagcttccaggccagcgtgaacgcgagcgcggccagcgagaagaccaggaggaacgcgagcgtcggccacgtggccccggccccggcgtagcggcggtacacgacagcgttggccaccatgtagaagacgaagagcgtgccgatgcagaccaggttgagcaggatgtccagctccgtgaacagcgccagcgccgccgtgaagaggccgaggaaggcggaggcgttgacgggggtggcggtgcgggggttgacccgggcgagccacgccggcatgacgccggagcggccgatgacgcacaggtaccttgcctgccccagcatggccaccatgagcgaggtgaggataccgaggctggcgccggcgccgaccacgttggacacccacgcgcaccggtcccgccccttgaacgcccccgaggacggcgcctncgggtcaatctgcagtcagcgcacagcatcacccaccagaccagaagaaaggaacgttcagacaacgatcgagagcagaccatgtggtgaaaatactgaaaaaaaaagactggcactggtatccatgtcacgatcggttttttttttt

SEQ ID NO: 155365 - DNA, 327 bp, Zea mays
  Clone ID: MRT4577_73272C.1
gacgcgacgcctgggttgattttttttttgaaaccgaacaacctaacgcagctgcttctgtcgcatcgtgaattggtgaacatcatactaataccttttatttgctcttcaagactgttcctttttttttactggcaccctacaggaacgagagtattgctcttatctgacacggagagaaataggccaccgtcactaacgccaggtatgtctgcgttgttaattttgtagatataaacctcttccaacttctggtggctgccaagaaaccactggcaactttcagaccctcttgtggcgggaataaaaccaaagccgcgtacacag

SEQ ID NO: 155366 - DNA, 256 bp, Zea mays
  Clone ID: MRT4577_73273C.1
tcgagccggccgggaaaatatttcaaacacagggcagagcagaggtatttaccaaaggtgggaagaaatggctccgattgaccatgctgccacgaagcacgatgtaccccatcccggccaaaagaggcatatagtcaagaacaacaaggagagtcgctcacggcacaaccggtcgtctatattctgacacagcagcaagggaaggtgtaagcggagttttacgccaaaaccagcaagaccaggcagccacaatgga

SEQ ID NO: 155367 - DNA, 289 bp, Zea mays
  Clone ID: MRT4577_73274C.1
ggaaaacgcaattacaaataaggctcccaaccccaaaagtctcttgtccagtgctccctctccctgggtctccgacttcctcttccagtccccgcgctttatatcgccgccccgagaggaagctagatgccgatgccctcgcgacgccgcaaccagatcaaggacatcatcctcgacgatagtgtccttggaaagaatcccttgatgaacccatgatgctaacaagaatattacctatccgcacaaggccacgatctgaacctgttcccccacctccgacccccccctt

SEQ ID NO: 155368 - DNA, 294 bp, Zea mays
  unsure (1)..(294): unsure at all n locations
  Clone ID: MRT4577_73275C.1
tatctcccgaacgcgcccttagcgtcaataataaacttgttcgggcgatgtatgtggccaaccagaaataagaagctacnnttttcnccttanccccttccntcccctccnctntttttccctnccccctctttttttttttcttcccctccttgtggggggggggggggggtttttctttctttgcctcctactttcgggggggggggggggggggcccctcttggggggtgccctcttctctgggctggtcttccctgctttttggggcccccattttcccttggggtgtgg

SEQ ID NO: 155369 - DNA, 1945 bp, Zea mays
  Clone ID: MRT4577_73276C.1
ttttcctttctcctcacgcctacaacgtgtggcatgccatgccgttccgtcctcccccattccctcgtagtaccaccgccggtcgtcactcgtcacccatctcaagcctcgtctcatgtcatgcaacgcagcgtgcggcggcgccacacacaatcacagccccggccggtcggctcgcgctacagcgatgtatcgtcctcattctcacggacgcgtgggcggacgcgtgggctccccggccgcccgtctctcccgagctaaactgtggcaggcagctagctgttacgagctagctccgcgcgcgctaggcggcgtcacgtacgtgctgtgatcaactgtctagttctctactcgacgcggacaccctgacccgcgcgcgcgccgtggccatggtcgccgccgccgccgccatcctcctggtcctgcccgtcgtcgccgtcctcgcgtcgtcgtccgcggcggcggacgggtcgttcataacgtgggacgacctcagcaccccgtccgccgccgccgtgcagggcggcgtgaaggcggccagcgggggaggcgcccgcgagctggacacgatcgtggtggcgcaggacgggacggggcactcgcgcaccgtgcagggcgcagtcgacatggtgcccgccggaaacagccgccgcgtcaagatcctcgtcaggcccggcgtgtacagggagaaggtgacggtgccgatcacgaagccgttcgtgtcgctcataggcatgggcagccgccgcacggtgatcacgtggaacgccagggcgtcggacatggaccgctccggccaccaggtcggcaccttctactccgcctccgtcgctgtcgaggccgactacttctgcgccagccacatcaccttcgagaactccgcgccggcggcgccgccgggggccgtggggcagcaggcggtggcgctgcggctgtccggcgacaagaccatgctgtacaggtgtaggatcctggggacgcaggacacgctgttcgacaacatcggccgccacttcctctacaactgcgacatccagggctccatcgacttcattttcgggaacgcgaggtccctgtaccaggggtgcacgctgcacgcggtggcgacgagctacggcgcgatcgcggcgtcgcagcggagctcggcggaggaggactccgggttctcgttcgtggggtgcaggctcaccggctccggcatgctgtacctgggcagggcgtggggccgctacgcccgggtggtctactcctactgcgacctcggcggcatcgtcgtgccccagggctggagcgactggggcgaccagtcaagaacaaagacggtgctgttcggggagtacagctgcaagggcccaggggcgagcacgaggaaccgggtgccttggtcccgctcgctcacctacgacgaggcgcggccgttcctcggcccgagcttcatcaacggcgagcagtggctcaggctgtagatccgatccgtcctcccggctgccgagctgagcttcgtcgacggcgagctatggtccctccgtccgagctgtgtgtaggtcatgcgacttctctggtcttcttcggtgcatatagcgtgacaagcaagcagctagtcagactgtagacatgtacgctgtaccatatactactagtaccatgtacaaacctgatacccatatgtgtagtgagatactgagatggccatgtccatcattcatggcaagatacatagtagtttgcatgcatgtatgtgaaggaaaacaggggaggccaaagtccgatacgtgacacgtacgcctcatgcagatgggtcatggggcctccacctcaggcccgcccaacataccagaaaatcaaaatgatgagatcactgcatggctttcctgatttctagcacgggcaagttcagatccagtatgccaaatgccacaaatagatggcgcatggctttgggagt

SEQ ID NO: 155370 - DNA, 585 bp, Zea mays
  Clone ID: MRT4577_73277C.1
ctactccgcctccgtcgccgtcgagggcgactacttctgcgccagccacatcaccttcgagaactccgcgccggcggcgccgccgggggccgtggggcagcaggcggtggcactgcggctgtccggcgacaagaccatgctgtacaggtgtaggatcctggggacgcaggacacgctgttcgacaacatcggccgccacttcctctacaactgcgacatccagggctccatcgacttcattttcgggaacgcgaggtccctgtaccaggacggtgctgttcggggagtacagctgcaagggcccaggggcgagcacgaggaaccgggtgccttggtcccgctcgctcacctacgacgaggcgcgggcgttcctcggcccgagcttcatcaacggcgagcagtggctcaggctgtagatccgatccgtcctcccggctgccgagctgagcttcgtcgacggcgagctatggtccctccgtccgagctgtgtgtaggtcatgcgacttctctggtcttcttcggtgcatatagcgtgacaagcaagcagctagtcagactgtagacatgtacgctgtaccatatact

SEQ ID NO: 155371 - DNA, 566 bp, Zea mays
  Clone ID: MRT4577_73278C.1
ctctcttttttttttttttttttttttcctctttttttttttttttttcagttggtccatccgcccatttaggaggcgcatattcgatttttaaatcggtaaacaagtccaataacgtggctccatagggaaaaactgatcatttgcaaacaatgctgttggataatacatataaccaacaaattccggcctcggcaaaaaaaaaaataagaaaagtatgccctgatcgcccacctaagtgatcttcacaaccgagaaatctcccaccttttggcaaacgacaacacggacatgggacttgaccacaccaaatgccttgccatggtcaagagcaaccttaagaaataactcatttgtattactggccgattccgctggcaccctaggattaaaatctatcgaaaagaggcctctaactatcagctactgccttcgtctaaaagcgccaatgaaacttcatctgagttggattgtcttcaacgagcaatgacatccaaaagaacaagtatggtggccctgtacctgcccagctcggtcgaatggccaattctgcaaatattcatcac

SEQ ID NO: 155372 - DNA, 2424 bp, Zea mays
  Clone ID: MRT4577_73279C.1
ggggaccacaccacgcctccgcgcagaactccgcgccggcggcgccgccgggggccgtggggcagcaggcggtggcgctgcggctgtccggcgacaagaccatgctgtacaggtgtaggatcctggggacgcaggacacgctgttcgacaacatcggccgccacttcctctacaactgcgacatccagggctccatcgacttcattttcgggaacgcgaggtccctgtaccaggtacgcaaataacgtagcagaaatgaattctataattttcttttcttttttttctttttacaactgacgtgtaagagcatctccgaggagactcctcatttttttctttttatttaactatttatttaacttttcataaaaattacactctattagggtgtttggttcgatgaatgagctagtccatcatcttctcaatcctcattttttttatttagtttatggaatggaatgagttgatacatcaccatctcattcctcatagttagttagttagtattaatatgaggaattggatcattccaccaaatttgaagaatgaactcatgatgcatcacctaattttggatgtagtgatttctcaaaccaaacacaccgtatatgtaccatttcactcgaacagactatatatctagtatggctagtcagatgactagtcaaatttggctagtgagagagctaatttatagtcggataatttggcgagttagataactagtcgagctattttgatgttgagtagataaaatttggtttgacgagccatttggctagtctcttgaagagaagatgctctaagcatttcgattttttttaccgcttacacaatatctctgatattctgaccacaccactgtcctgttttgaccacactgctggttttatggtgaggtcattagcttcccatctccatgccttgcagttatcccaactcccatccctttgatgggtgctgccgggttgctatcagaaaaatcacaattcaggcactcgccaaccgtgtccgtgcctgccatttcatagccgccttgcagcaagaaatgctcataacagcttttcatctctcactttctatgtgtctagcgcacacatgctagcacctaggttacctagccagccagccagctcagtggaaccaggccgttatgcacttagcccctgcacgacgcttgaaagcactcctacacaaatccatgcatgcatgctcgaaacgctatcatatccagtggtcacgtccctttcgtgcccttgcacacgtactactcgacccgaagcaaacttccgttccgtggcaacgagggcgatggatggatcgtcgccgattcgacggcgactgccgccgcgccgctgcccctcgctggttctggcttctgacgaacgttgcaactaacggtgaccgcgcgcgcgcgcgcaggggtgcacgctgcacgcggtggcgacgagctacggcgcgatcgcggcgtcgcagcggagctcggcggaggaggactccgggttctcgttcgtggggtgcaggctcaccggctccggcatgctgtacctgggcagggcgtggggccgctacgcccgggtggtctactcctactgcgacctcggcggcatcgtcgtgccccagggctggagcgactggggcgaccagtcaagaacaaagtgagcaacgctctgccttcttccctgctactgtagctgtagctgtagatgtagatgcaattacagttactgaactggctttttctgttaaccctttgtgctgacgatgacgacgatcatcagatgattcagattgtaggaagtaggtaggcggttgcctagcaggacaggctcaccaaacggtctttacagggaaatgcaacgcaggcagttagttaccacatgtgactcgcctgcttgttacccgtcagagagtgacatttccgggctcttttttttttttttttttggacaggacggtgctgttcggggagtacagctgcaagggcccaggggcgagcacgaggaaccgggtgccttggtcccgctcgctcacctacgacgaggcgcggccgttcctcggcccgagcttcatcaacggcgagcagtggctcaggctgtagatccgatccgtcctcccggctgccgagctgagcttcgtcgacggcgagctatggtccctccgtccgagctgtgtgtaggtcatgcgacttctctggtcttcttcggtgcatatagcgtgacaagcaagcagctagtcagactgtagacatgtacgctgtaccatatactactagtaccatgtacaaacctgatacccatatgtgtagtgagatactgagatggccatgtccatcattcatggcaagatacatagtagtttgcatgcaaaaaaaaaaaaaaaaaaaaaaaaaaaaaaaaaaaaaaaaaaaaacccccc

SEQ ID NO: 155373 - DNA, 791 bp, Zea mays
  Clone ID: MRT4577_7327C.1
ggccttctcaccaactcccctacaagccgccgggccgcccacttccaagtgtactgtttgctgcccgcctggcgcctgcccccataactactctgccaccaatccggggaggaatcaacctagcggtaagcggacatggcggcggcgaagatagcgccgtcgatgctctcgtcggactttgccaacctcgcttcggaggctgagcgcatggtccgcctaggcgccgactggctacatatggacatcatggatgggcacttcgttcctaacctgactattggggctccggtgatccagagcttgaggaaacataccaagtggaagcagaaaatccggtagaattggttcttgtgatgacagtcgagcctggttttggtggtcagaaatttatgccagaaatgatggataaggtgcgcacactgagaaagaagtacccttcccttgacatagaggttgatggtggtctaggtccttcaaccatagacgtggccgcatctgctggggccaattgcatcgtcgctggaagctctatatttggcgctgcggacccaggagccatcatatctgtgctgaggaagagcgtcgagggctctcagaacaaaaactgattttggtgtttctgctgtaaagtactcccctcgtttttttttattcgtcgcgttttagttcaaacatgaactagcggacgactgatattcgagaatggagggagtacttcgaccctgcacgtcagatgagctgatcctcacattgcaccggaactgttcggcgagaataaaatttgatggtag

SEQ ID NO: 155374 - DNA, 202 bp, Zea mays
  Clone ID: MRT4577_73280C.1
tcgtctcgctccactgcgtcacgctccacgcctgtccgcaagggtgcctgaagcagtgtgcacctcggacatctggcatctgggtgcaaggtccatgtccatctatgaactctcttcatcaaccgacatcgttctgagaagtctcgccgtgcgaggtcggccatagctcgctccgcttacaacatagatagcccactcatca

SEQ ID NO: 155375 - DNA, 136 bp, Zea mays
  Clone ID: MRT4577_73281C.1
cgtcccgcagttgcctccacccgagagatctccggcggacggactccctacgctcctccggccggtggatcggatccaaccgcccccaaaccccccaccccgagcttccctttctcctccacgcccaacgcccgag

SEQ ID NO: 155376 - DNA, 448 bp, Zea mays
  Clone ID: MRT4577_73282C.1
gagcggaataatagtaaatttaaactgggagaaaagcttgccaataaataaaaattccctaaaaccttaaattcctgaaaaagcccttaatgagaattattaaaattaaaacttgcttttttaccaaaggaaggaaaagttattttattacccaaaggaatggtaggttaatgttggaataaaaatcggatcctaaaaatggatcggaaaatgcaaaaggaaaaaaaaaacatacgtccccaataaaaattttattggaaaaaacaaaattttttttatttaaccagtaacgccaaaaattttattccatggggtacttttgggtcaaatttggggttttcgccttttacttaagccgatccgttttttaaatttgaaaaatttaaaggaaaaaaaggtcgtttgggttgggatcagtaagcagggagcaaataaaaagcaaaacctt

SEQ ID NO: 155377 - DNA, 365 bp, Zea mays
  Clone ID: MRT4577_73283C.1
tgcggctcgagacaagttccgcccggggttgcgtcagctcttccgctgcgacgtcatccacgtgaacaacgaccgcgaggtgcactgcttcccgcggatcataatagggtccaccttccaccgggccatgggcataaacccctctcgctcgcgcgggggcgtctcggcggcctactgcaagctcctgctccggctggcgctacagttggagcgaagccgtccaggaccaaggatcggaggcactccatcggctagtgattggaattggctcatgctcattgccggcttctttcatcttgaatcttcttgacggctatttcactcgatgaacgtaaaaaaacactcgttgattgattgattgaatg

SEQ ID NO: 155378 - DNA, 272 bp, Zea mays
  Clone ID: MRT4577_73284C.1
gcagaaggaaacatgggaagaactatttttcttctcatctctgtggtgcttgtagcttattatatttatatacctctcccagatgatattgaagagccttggaaaataatattgggaaatacacttctaaaacttggaggagatttggcttcttttggtgaacttttgggactcaatcatttcatggacacggtacagttatttatgagatgtcaagttgtcccacccacttctgatgagaatgtcactgtgatggagacagatttcaacag

SEQ ID NO: 155379 - DNA, 331 bp, Zea mays
  Clone ID: MRT4577_73285C.1
aaaaggtaataaggcttaattccccgaggggaggtaaattaaaaaggagggaggaatggcaaaaatcagaaacagggaaacaaaaccgggaaaacaggccagggaaaaaataagggacccaaagggaaaagaggaaattaggggggaacaaaaaagttccaaagattaaaacacaaacatgctacagaaaagcgctgggaaagggacaaattttaaagcctttttgggggactgggttgcctttttgggggactggggggccttttaagggaactggttttctttgttgccgccgtgggaccccttttccgccaccttttggggaagaaaa

SEQ ID NO: 155380 - DNA, 617 bp, Zea mays
  Clone ID: MRT4577_73286C.1
agggaccggatggccgggagcagcacgggcagcgccgacgggagcgcggtcgggacctcgtccccgacggcgatggcggagacgacgttcggggtgctggagttcacgcccgcgaaggggaccacgcggcgggacacccaggaggcggccgtcgccggggaggatcccagcgccaggagctcgtcgttggggacccccacgatggcacgcacgccggaggccgctagcgccgacagcagccgcgggtccgcgtcgtacagccgcacgcgggtgatgcgctgcgcgcgcaggaacgacgccaggtccgacggcgacagcaggttcgtcacctgcgtgccgatcgtcacgcccacgtacggctcgccggaccccgccgccgacaccagcaccgccgatgggcagcgaagagagatgaggtggagcaagaggaggaaggggaagagtagcaagcagctgccactgacactccctcctccgctcctgctccccattgggatttggtagtgtgccctgctgcgcctgctcctgctcgtgccggcctccgggactgcttctttcgtccaagactgcttcttttgatgcgcactcgatcgctttctccaggaatctccttccct

SEQ ID NO: 155381 - DNA, 339 bp, Zea mays
  unsure (1)..(339): unsure at all n locations
  Clone ID: MRT4577_73287C.1
ttnngggcccggggttatttgccttattcctccttatttttttcttttaccttccaaaaggcaaattccccgggggaaattaaagttgggctttttggccaggtttgcaggttggtttttcctttttaccctttttgcttaaggtaagttttggttcacttttaacttttttagggaacccagggaaaaattttttaatttttttggggggggcttttggaacgaaaacaacacaattaacgggttccggtttcccccccccggccggaaaaccccatatatttttttttttaaaggggcctttttttgcgggttttttcgggcccaaatttatttttt

SEQ ID NO: 155382 - DNA, 470 bp, Zea mays
  Clone ID: MRT4577_73288C.1
gacacgacacacagtcaaaattaaagagcctcacacgtgaaattcaacacaccatataactggcacgtaccaatctcctggtaaacacagtaaaattccccatttaaggatgataccacatcaggcggggctttaaaaatttttaagacacaaccaattccaaccggcccataaaacctgaactttcctaatttggatgtggggaggggattcctttttccaaattgaagtcactccgttttgaacaaaagtgacgtagtctccctttttaacatattgggctttaagcaagctgttaattgttttggaaaaagttttttttgcgtcgtcaaaaaactgcttgtgaatagggatgaccccctggtaaagggctagccgttgcttaactcgttcctcgttggaaaatgcaaatagggtaaacaagggacaatagtggttcaggaggacagccatggagcctgtctgtgtaa

SEQ ID NO: 155383 - DNA, 263 bp, Zea mays
  Clone ID: MRT4577_73289C.1
tttgtttggagtgttaaattaaaattgcagtttatttgggacagggtaaatttaaaaaaacagacatagggaccatttgaccgatccaatagcacgatacaggtgaacagacgtggggaagacaaaaaaaccggatggattcgggaggttcctgggtgagttatgtaccaacagaagtaacctgacgcgttttaaagaggaaaacggaacaagcaggtctagaacctgtaagtattgagattatttgtggacaagtggggaaa

SEQ ID NO: 155384 - DNA, 274 bp, Zea mays
  Clone ID: MRT4577_7328C.1
ctagctcaccaccaacctcagcacgtcgaggagaagaggagtggccagtggcttcgtcggtggccgccgcggcggagcacattcctgggcagccggctggcggacccggtgccgcagaacgggcgcatcgtggcccggttcgggttcggcggcggaaagccgaaggctgccgtcccgaagaaggtggcgaagacgtcgatctcgtctgacctgccggtgtggttccccggcgccgtggcgccggactagctcgacggctcgctggtcggcgact

SEQ ID NO: 155385 - DNA, 1554 bp, Zea mays
  Clone ID: MRT4577_73290C.1
ggggacacgccgccgggcctcactaaccgcaggttcgggagtactccggaacccgccgccgcatccacacgacgccacgactgacgacggagagccccggtctccttccacggctccaccgccaccaccccgcataaaacagcagcagaagaacaagggtatggcgaaggatgggggtcccgactggaacggcctgctcaagtggagcctcgcccacggcgacagcaccaacccgccgcgtgctctcagcgaggaagacagaaaatggttcatggatgctatgcaagccaacacggtagatgttgtgaagaggatgaaggagatcactcaggtgatgaaaacaccagaagatgtcttgcagtctcagggtgtgaccccggagaacattgaagatatgttggatgagctacaggagcatgttgaatccattgacatggcaaatgatctacattctattggtgggctggatcctctacttagttacttgaaaaattcaaatgctggcatccgagcaaaggcagcagaagttgttagtacaattgtgcagaataatcccaagagtcagcaacttgtcatggaatccaatggactagagccactgttgacgaacttcaaatcagatccaagtacaaatgcacgcacaaaagctttaggagccatatcttctctaattcgtcataaccagcctggagtttccgcatttcgattgggaaatggctatgctggattgaaggatgctcttggttccgatgatgccagactccaaaggaaagctctcaatctcatacaatacttgctgcacaactacaaggcagacaggagtgttgccacagagcttggtcttccgaagctgatgatgcaccttgtgtccagcgatgattccttagtgcgtgaagctgctctaggcggcctccttgagttggcgcgggacaagacatctggtaacgcgctacctgaccaagaaaagctgaaagacatgctcaagagccgaatagaagggatcagcgcaatggacactgacgatctccacgctgctcgcgaggagcggcagctggtggattcactctggaaggagtgctacaacgaaccttcgtctctcagggagaagggcctcgtcgtgcttccgggagaggatgctccccaacagccgccaccagacgttgcagggaagatgtttgagccaccgcttcgtgcgtgggcggctgcaagacctgctcaggaagatgactctgactctggcagcggaaagaaggatccgccattgctgcttaagttttgacggccttcttatgccgatactagttcttaggctccaccatgggtgttgaaagctgaaagatcagatctgatggatgcctgaccttcttcgaacctcagttgtggttcttgtaatttgcaccgcatttcttctgagtatgttttttatgagaagactgggaagatgacagacagatactgtatcacgtgatgctcgtaaattaacactacctgtgaattctctaaaaaaaaaaaaaaaaaagggcggccgtctaaggacaaagttacgacgcggca

SEQ ID NO: 155386 - DNA, 798 bp, Zea mays
  Clone ID: MRT4577_73291C.1
cctcgagccggccgggacatacgtacattatggacgccgccggccacacaaaccgcaggctcgggagtgctccggaacccgccgccgcatccgcacgacgccacggctgacgactgggagccccgttcgcctccaccgccacctccccccgcgtagaagtagagagggaagctttgcagcgagaagccgagaaccctgtcgatctttcctgaagcaatccgctcctgtcgtgagctgaaccctacagttcgtatcacctcctctcgcagcagctgcagaaagagcaagggggatggccaaggacggaggccccgactggaacggcctgttcaagtggagcatcgcccacggagacggcaccaacccgccgcgtgctctcagtgaagaagacagaaaatggtttatggaggctatgcaagccaacacgatagatgttgtgaagaggatgaaggagatcactcgggtgatgagaactccacaagatgtcttgcagtctcagggtgtgaccccagagaacattgaagatatgttggatgagctacacgagcatgttgaatccattgacatggcaaatgatttacattctattggtgggctggatcccctgcttggttacttgaaaaattcaaatgctggcatccgcgcaaaggcagcagaagttgttagtacagtcgtgcagaataatcccaagagtcagcaacttgtcatagaatccaatggactcgagccattgttgacaaacttcaaatcagatcccagtacaaatgcacgcacaaaagctttaggagccatatcttc

SEQ ID NO: 155387 - DNA, 1659 bp, Zea mays
  Clone ID: MRT4577_73292C.1
ccccgagacgcagcaggtcggccgcctccacacgacgccacgactgacgacggagagccccggtctccttccacggctccaccgccaccaccccgcataaaagtagggaagagagctttgcagcgagaaccgtatcgatctattctcgtctgaagcaattcgcccctgtcgtgagcagaaccctacagctcgtattcgcctcatctcgcagcagcagcagaagaacaagggtatggcgaaggatgggggtcccgactggaacggcctgctcaagtggagcctcgcccacggcgacggcaccaacccgccgcgtgctctcagcgaggaagacagaaaatggttcatggatgctatgcaagccaacacggtagatgttgtgaagaggatgaaggagatcactcaggtgatgaaaactccagaagatgtcttgcagtctcagggcgtgacccctgagaacatcgaagatatgttggatgagctacaggagcatgttgaatccattgacatggcaaatgatctacattctattggtgggctggatcctctacttggttacttgaaaaattcaaatgctggcatccgagcaaaggcagcagaagttgttagtacaattgtgcagaataatcccaagagtcagcaacttgtcatggaatccaatgggctagagccactgttgacgaacttcaaatcagatccaagtacaaatgcacgcacaaaagctttaggagccatatcttctctaattcgtcataaccagcctggagtttccgcatttcgattgggaaatggctatgctggattgaaggatgctcttggttccgatgatgccagactccaaaggaaagctctcaatctcatacaatacttgctgcacaactacaaggcagacaggagtgttgccacagagcttggtcttccgaagctgatgatgcaccttgtgtccagcgatgattccttagtgcgtgaagctgctctaggcggcctccttgagttggcgcgggacaagacatctggtaacgcgctacctgaccaagaaaagctgaaagacatgctcaagagccgaatagaagggatcagcgcaatggacactgacgatctccacgctgctcgcgaggagcggcagctggtggattcactctggaaggagtgctacaacgaaccttcgtctctcagggagaagggcctcgtcgtgcttccgggagaggatgctccccaacagccgccaccagacgttgcagggaagatgtttgagccaccgcttcgtgcgtgggcggctgcaagacctgctcaggaagatgactctgactctggcagcggaaagaaggatccgccattgctgcttaagttttgacggccttcttatgccgatactagttcttaggctccaccatgggtgttgaaagctgaaagatcagatctgatggatgcctgaccttcttcgaacctcagttgtggttcttgtaatttgcaccgcatttctgttctgagtatgtttttatgagaagactgggaagatgacagacagatactgtatcacgtgatgctcgtaaattaacactacctgtgaattctatcatgtgatgctcgtgctcaattgctcaaaaaaaaaaaaaaaaaaaaaacaagagactagttctctctctctctctctcctcgtgc

SEQ ID NO: 155388 - DNA, 604 bp, Zea mays
  Clone ID: MRT4577_73293C.1
agggggaacgctgacatcaattgggggggggggggaaaaaaaaaatgacggggggcaaaccaccccccctcaaaacaaaaaaacatgactggccttaaaccaccaccactcaaaacaacatgatgctccacagcccccaatgatagacacactatacagagcatgccagttagccccaaattacaggctattcaagcctagtagtctgaataacacactaaacagcacctcaaagcttcacaaccgaaacgtacagctccaattactgtacgtggcaaaaggaaaaaagaaacaccaaagaaccaatacacatgcacaataaagctcaactgtttaaatctatggatttaccagcatttggctgctgcctgctggtatggagaaggccttaatcatctttgtggccttggcagacgccgccagggactcaacaacgtggatctgtcgagaagcagcaggaggccaaggaacgtagtcaacagaccaaaggtatacttggcagtagagcttccgtttctccagaacagggttgatagcacccacttgcaaatgccgagttctgagaaactgctcccagggactactgctttcttaccgatagctt

SEQ ID NO: 155389 - DNA, 444 bp, Zea mays
  Clone ID: MRT4577_73294C.1
aaaaaaaaagggtcaggccccccacttgccgggaaatttaaagaccgtttacccccccttgcggggggggggggtggccacagaaaaatcaaccctgcccccaaagcattgggggggggccccccatgaaaggaccccggggggtcacgattcaaacatagccccccacaggcggggggggataactttggggagccccccaccccgggctttagttgcccccgaacagggggcccagggaagagcccccgccaggagcaggggggaccttgggtgagggacggccccaagggaagttgccagggttctgaccatcacccctggggaaattattggtttggctggaaaccccaggagaaacctggttggccccattagtttttgcagcaaaggggttctcaacagggggagcccttgcaggtggggcccctggtggttgggggg

SEQ ID NO: 155390 - DNA, 461 bp, Zea mays
  Clone ID: MRT4577_73295C.1
ggggaaaaccgggaactttttccttttttggacgaaaacgagtttataaaattcaatccccccgtcccgggccaaagggggtgaaaagcaaaccccttcttggtgcccccggttgttaatacacccatgacccagggcccccccaactaacttgacctaagtttcaccccccgggtagttccaggtccaaaaaaaatttgcccctcagggttacaggagaaacctttaaaagtactttgggcgccgggacaattttttaagggaaaccctttcctgggtttgggaatgaacgcattcaaaaaggaaaacccatttggaccccctaaaatgatgctgctgccggtgaaccccaaaaacatgggcattgaaaaggaatggccccccgtttccctccctgaaacaaaaaacaagggcacctttaacaacccttttgccctgggaggaccccaaaggaaaggaac

SEQ ID NO: 155391 - DNA, 1743 bp, Zea mays
  Clone ID: MRT4577_73296C.1
tttttttttttagcggcaacgctgacatcaattgttggcggcaggaaaaaaaaacatgactggggtggcgtcaaaccaccaccactcaaaacaacatggagttccacaacttacgatgatatacacactatacagagcatgccagttagccccaaattacaggctattcaagcctagtagtctgaataacacactatacagcacctcaaagcttcacaaccgaaacgtacagctccaattactgtacgtggcaaaaggaaaaaagaaacaccaaagaaccaatacacatgcacaataaagctcaactgtttaaatctatggatttacgagcatttggctgctgcctgctggtatggagaaggccttagtcatctttgtggccttggcagacgccgccagggactcaacaacgtggatctgtcgagaagcagcaggaggccaaggaacgtagtcgacagaccaaaggtatacttggctgtagaccttccgtttctccagaacagtgttgatagcacccacttgcaaatcccgagtactgagaaactgctcgcagggactactgctttcttcacgatggctctctgctcagcaaccatctcccagcagagccgccgcgccatctccctggccatcaccagctgtgccctctcggcccgcagcacggaaatctccctccgcagcgctaccctgtccgcctccagcgcctcgacccttgcatacaatccccccgagttcccgtcccccacatactctgcaaccacagatgtagctggtttcgttgtgctcgcgcaggtaacgtccaccgtgtactcgaattccttctccactggggacgacggctcctcctcggcgtcctccacttcttcctcgccatcgttgccaacgaccatggttttcaccatgccattggtcgactcgcgggcgttcggcttcacctccagcgcagccatgtggacctgctccacgtcttcggcgcccacctcctcgtatgattcctcatcgtcctcgtcggtgaaggagtccgggtcgatgccgtgggactggaggcgggagtggtaggaggcggcgagatcggagagcgacgcgagctcgtcctggacctcgcgctccctgtcttcgcggccctcggcgtagcgcttgaactggcgggcctccatctgcgcggcggccttctcccgctgcaggcgctcgatcatgagcatggcctcgctggccgccgtctccgccgaggcccgctcggcgtcgagctcctgccgcagcccccgcgcggcgtcctccgcggcctccatctccccgcgcagccgcgccgcagctgccaccagctcctccacagtacggatcagctcctccgccgccgccgcctcccttgcccccggacccgccttgggcgacagctccggcgaccgcgctggcggccgccgcttcagggatcgccgcgacggcgacgggtccgcgaccggatccatggaggcatgaagtaagcgcccggggactcgcgcctccccagtcccaagccccgattccgccgcgccgtcgggactcgggagctaacggttggcggggcgcgcggcaccgccgcctcctgctttgacactgagacgagggcgagggcgggcgacgactggtggcgtctgttggaagcgacgtgagctaggttggagcagctggattaggagaaggcggcggcggcggcacagcagctgctcagcagcattgagaattgaataattctcgtgccgaatt

SEQ ID NO: 155392 - DNA, 1586 bp, Zea mays
  Clone ID: MRT4577_73297C.1
cggaaaggccggggtcgtctcctcgtcccgggccggccacgcgtccgccgcatctcgtcgtcctcaccatgccgatccggcgtcagcgctagggttagggtctcctctgcgcctttatcgccatggctcctaacgaagccgctagcatcaccaccccgtccgagccggagagcgtgggcggcagtgagatgagcagcgaagacatggccgccgccagtccgctcctctcgtcgtcctccccctccccttccccctccgcagccccggtgctggagagcatagaggaactggaccggaagtacgcaccgtacgcgcggcgggacgcgtacggaccgatggggctcggccccgtgagcgcagcggaggctgcgcggctggcgtttgccgcggtcgtgctggtcccgctccgtgtcgtggcaggtgttctcgtactcgtggtctactacctcgtgtgccgcgtgtgcacgctgcgggtggaggaggaccgggagggcggcgaaggggatgggtacgcgcggttggacgggtggaggcgggcgggggctgtgcggtgcggccgcgcactcgctcgcgccatgttgtttgtcttcgggttctattggatccgagagtacgacagccgccttcccaatgctgaggatggccatgtggaccagtctaaagaaatcgaaaggcctggggcaattgtgtctaatcatgtatcttatgtggatattctttatcacatgtcagcctcttttcctagttttgttgctaagagatcagtggctagattgcctctagttggtctcataagcaaatgtcttggatgcatttttgttcagcgggagtcgaaaacaccagatttcaaaggtgtttcaggtgctgtatctgaaagaatccatcgtgctcatcaacagaaaaatgcaccaatgatgctactcttccctgagggcacaactacaaatggggattatctccttccattcaaaacaggtgcttttcttgcaaaggcaccagttcaaccagtcattttgagatatccttacaaaagatttaatgcagcatgggattccatgtcaggggcacgtcatgtatttctgctgctctgtcaatttgtaaattacctagaggtggtccgcttaccagtttactatccttctgagcaagaaaaagatgatcctaagctctatgcaaacaatgtacggaaactgatggcagtggagggaaacttgattctttcagaccttgggctggcggagaagcgagtgtaccatgccgcactgaatggtaatagtctagctcgtgctttacatcagaaagatgattgaaatgccatgctatcgtgcttccataatactggcttgcttgtaactgtgtgcttgcttgtgcatcgtcatggttgagaggaatgtcgtgaatatactatccggcataaatctgtaaagtaatttaccaactgtcatagttcagtaattatgttggttatactcctacatggttgggcatccgcacatttgatcctgtggtcaatccatgtgagccttttttactaaaaaaaaaaaaaaaaaagcgaaaaaaaagtactctgcgttgttaccactgct

SEQ ID NO: 155393 - DNA, 223 bp, Zea mays
  Clone ID: MRT4577_73298C.1
tagtgagtcgtattagaagggagagcccaaccacgcgatcgttcaagaggaataccagcttaggagcaacagcaggagcaatcccacgcgttcgatgacatggcccgcgtcggtggcggcgccgtgttggcgctcctagtggcggtcggggcggtagccgcgttcgtcgcggtgctggtctcggggaggtctggggagctgagcgccatggggttgctggcgg

SEQ ID NO: 155394 - DNA, 525 bp, Zea mays
  unsure (1)..(525): unsure at all n locations
  Clone ID: MRT4577_73299C.1
agaaacaaagcgtatatcataaaataaggtaagacatcaattcatgttgacacgaaattgaccaaaaatacggcttactcaacttcaaaaagtatccaaaattttggacctagaaaataaacagcacatgtaaataaaatgattgactgaacgcaaaataagagagttttagttgtgcaacgatgacatggaatctgcaatgaactttcactcatcatcttcatcattatcagcagcagagttgatagccgccacacgagcaatcaacttagccttcctctcctcataagtgagtttcttcagattgtacctcttgtgttccttcgggggctgcttctcagatttcttgagagaaggatcagcacggatggcagcatgaaccttcttgtacagtgcctcaataccatcagcttctattccacgcttgatgtattcctgaagtgtgactgatatttctcaggttcatcttnccgcagatcttcatataggcagcaacatgtccaccaaaaacatatttgcgatgca

SEQ ID NO: 155395 - DNA, 1250 bp, Zea mays
  Clone ID: MRT4577_7329C.1
ccgccaacctgagtgccaccggccacctcaccaactcccctacaagccgccgggcaagtgccggcgggccgaacgaccgaagcatccacttccaaagtgttttgtttgttgtccgcctggcgcctgcccccataactactctgccaccaatccggggaggaatcaacctagcggtaagcggacatggcggcggcgaagatagcgccgtcgatgctctcgtcggactttgccaacctcgcttcggaggctgagcgcatggtccgcctaggcgccgactggctacatatggacatcatggatgggcacttcgttcctaacctgactattggggctccggtgatccagagcttgaggaaacataccaaagcatatttggactgccatcttatggtcacaaagccttcagattacgtagaaccatttggaaaggctggcgcttctggattcacattccatatagaagttgctagagacaactggcaagatctcatccaaagcattaaatcaaagggtatgcggcctggtgtatcattgaggccaggtactccagtggaggaagtttttcccctggtggaagcagaaaatccggtagaattggttcttgtgatgacagtcgagcctggttttggtggtcagaaatttatgccagaaatgatggataaggtgcgcacactgagaaagaagtacccttcccttgacatagaggttgatggtggtctaggtccttcaaccatagacgtggccgcatctgctggggccaattgcatcgtcgctggaagctctatatttggcgctgcggacccaggagccatcatatctgtgctgaggaagagcgtcgagggctctcagaacaaaaactgattttggtgtttctgctgtaaagtactccctccgtttttttttattcgtcgcgttttagttcaaacatgaactagcggacgactgatattcgagaatggagggagtacttcgaccctgcacgtcagatgggctgatcctcacattgcaccggaactgttcggcgagaataaaatttgatgttagaccttggacgtcttttgcaatatgcttttttgtctgccctgattatattctaccccttcatataacgcttgatgtgccgtcaagaaatggcgaaacattggcatgactgtaaacaagaaactaaatacgggtataaaaatcgtgtcatgtcatgtccaaaaaaaaaaaaaaaaaaaaaaaaaaaaaaaaaaaataaaaaaaaaata

SEQ ID NO: 155396 - DNA, 497 bp, Zea mays
  Clone ID: MRT4577_732C.1
ataataacagtaggcctaaagataaatgacacaatataacctgagaattcaattacatacaggcagtcttacaaaagctgagatgaactttgcaggaactaaaaaggatacttggagccagaaagctgaccgggagacgccacctaaatcgaatcgaactcacgccttcttggctcgcacttgagaccacctagttttctccttcaacgagctcctgctaagaagtgtctacgaggtgaacctgagaaggctctgactattgctagtcattgacatggatgaaacgacgactgtccaggagcggggtgaatgctccgcatggagacccgcaccggaaagggaacaccatggccgaggccattcatacgtacatataccgctagaagaagactctcacaggtactgtcttaaatagttttccggtattggaggtactaaaccccgcacacctggcagactacgaccgatggctaggttaacaaacggcatgagctgat

SEQ ID NO: 155397 - DNA, 392 bp, Zea mays
  Clone ID: MRT4577_73300C.1
gctcctcaaattcccagctccggctcatcttgcaccaacgcgcgctgctccagcctttagctccctggtcgccgcgcagaggagctccctcagctcgctcctcctgtgtcgcgccccagcccctggtcctgcaactcggtgcctctcccagctcgctggtcgtcgagtccttctccctagcgcatggatcaagttgttgcccccagccatgtcttcatctccatcaactgacactttctgctcggccacatgccatggagctcgccctgcccctgtttccatgaccggcgtccccaagctcctcccctgtgcgtcgcgattttccctggcacagctcgctcactgttcgccgcacgctctgggaccctccctgcaccgcgtcatggcaaccc

SEQ ID NO: 155398 - DNA, 280 bp, Zea mays
  Clone ID: MRT4577_73301C.1
catggagctgaatctttaaggcagtgccctgccacacagtcacggacacgaagatctggtgtgatttcccggatggggacttgtgcctaggtactggcatcccccacaggtggtgagagatagcattagcgagttggtaaagaactggcttaaaagtgtaaacgcctaggttttcagacgccactttttatgtggtcctggatatgtgattcttttctgccttggcattcctgtctagaacactgatctagcaatcccagaccaccctttcatttttgcg

SEQ ID NO: 155399 - DNA, 2299 bp, Zea mays
  Clone ID: MRT4577_73302C.1
ccccaagcaaccctagctctcccatcccctcacgccaggaaacatgttcttcctccaggagcccccgatctgcaccgccgacggcgtcatctgcgccgccacgacatccctccgcctgcccaggaggcccggcaccgctcgattaccgcacggcgacaccacgctacccttcgcgaccacctcgccgctgccatcgccaaatcgtgctccaagacggtacgaagagctcgcgagacacaagagggatcacgacgcaagagagaagaagaggaatggaagatgcggaagcggcgaagaaaagtagcgccttttaaaaaggaggcccacacggataagcaatgtcgagagatgtctttaccagataagcaatggcacgatacatgaagactggaggtatgcaatgactgagttgcaatctctcgtgacagaaagtcgctcgacatagatgtcatttggagcaatgggttttcctatcctcctcaatattttgaaagaagaccgtgaggatgtagagtttgtgagaggtgccctggagacctttatgagtgcattgactcatattgagacgtcacaagggtcaaatactccgcttcaaccagcgttagtgaattctaatacgctatctcgagaaactgagaagatttctcttattttaattttactgtgaatcctgcaacaaggatgtccccatcgtccacgtcgacatgcacaactatagccttgatgagaagatcaggatgacgctcgaggcgcacattgtcgagaagaccgacgaggtccatgaggtttcttttacttttcttcacaagctgaatccttctgcaagaccatggacagaacatttgctattgatttgtattcgtcctatataaaacagaaactatcagaattttctctatcaaatagttctaaatgtcttgtagcactaattatagaaccaggtaaaaaagtttcactctttgagcttcttgggaatattttcattttttcctctttagcctttagtatgtaactatgcgcactatcatttgatgctaatagctgaaaaaaactcagtactttttccatgccatttactggttcaacctcttaacccatatttgtgtagtaatatacaaggtgcaggtggaatcctcatgatggatcctcttttccagcgagtacttgtgagtgagtgtagaagtcgaaaaataccgatttgtcatatttgatgagatatttttaggattctgacatcgtggtgtggatatcatatttgacaatacctttttagaggataaataggtattttctttgtattttatgaccttaataacttctctttcagtctacttctgagttacttggttgtttacctgttatcgcttgctatgcaaaactgatgactgaggtaattgtaccattatctgcaaccttagcaacagaggaagtttttgaatccttcgaaagtgactctaagtttatggcgctcttacatgaccattcatacactgtttatggtatgggctataccgcaacactaaacgctatggattgatatcaggatcctattcaaaccttgatgccggccacatgaaactcaaggagggtgcagggccacaccacacttatggactacttcagtttgtgtgtcaaatctgttttccacaaagaaattatttaaacaaaaggatcgcatcacagagaaggatgggacagtgatgagactttcaggtggtgggcataactgctttcaagatagtgatgaggcaagattaacattcaaacggaagttctggaagaaggttgtggagatagatgatctatgtggaaatgatggtgcatggtggggtattaaaggttacatgcgagacaatttcaaccatagcaataaggtcacatcgcaaaaagagcatttttagaacagtaggctcgtgaaatctttgttggatatgtattgggagcttcgtcctgttaccagttcatccttaacacaccaaacaaggtatgacccaacacgtgcagttgacccaatcattgaagatggtcactacaccttgttttgaagcctagcgagattggacgcctcagtgttcaattgttacacgcagatggtatttgtgcagatattaggtttaatgttgagcacaaacaatatttaaagattttctgtgttgagcttgttttgcttttggcccactgttgatagtgttttttgtacaaaagtgattccttgccccctcccaaaaaaaaaaaaaaaaaaaaaaaaaaaaaaaaaaaaaaaaaaaaaaaaaaaaaaactcgagaagggcccggtacc

SEQ ID NO: 155400 - DNA, 1580 bp, Zea mays
  Clone ID: MRT4577_73303C.1
caaaatgcagacttttcttcacaagctgaatccttctgcaagaccatggacagaacatttactattgatttgtattcgtcctatataaaacagaaactatcagaattttctctatcaaatagttctaaatgtcttgtagcactaattatagaaccaggtaaaaaagtttcactctttgagcttcttgggaatattttcattttttcctctttagcctttagtatgtaactatgcgcactatcatttgatgctaatagctggaaaaaaactcagtacttttccatgccatttactggttcaacctcttaacccatatttgtgtagtaatatacaaggtgcaggtggaatcctcatgatggatcctcttttccagcgagtacttgtgagtgagtgtagaagtcgaaaaatacctgtcatatttgatgagatatttttaggattctgacgtcgtggtgtggatatcatatttgacaatacctttttagaggataaataggtattttctttgtattttatgaccttaataacttctctttcagtctacttctgagttacttggttgtttacctgttatcgcttgctatgcaaaattgatgactgaggtaattgtaccattatctgcaaccttggcaacagaggaagtttttgaatccttcgaaagtgactctaagtttatggcgctcttacatgaccattcatacactgtttatggtatgggctatactgcaacactaaacgctatggattgatatcaggatcctattcaaaccttgatgccgaccacatgaaactcaaggagtttttttcatcaccagctcaataggattttacctgaggaacattttgctttaattggtttgatctgccgtggttgctggtaatttgatatgagcaggaggcaactaatcaacaatgttcagggtgcagggccacaccacacttatggactacttcagtttgtgtgtcaaatctgttttccacaaagaaattatttaaacaaaaggatcgcatagagaaggatgggacagtgatgagactttcaggtggtgggcataactgctttcaagatagtgatgaggcaagattaacattcaaacggaagttctggaagaaggctatggagatagatgatctatgtggaaatgatggtgcatggtggggtattaaaggttacatgcgagacaatttcaaccatagcaataaggtcacatcgcaaaaagagcatttttagaacagtaggctcgtgaaatctttgttggatatgtattgggagcttcgtcctgttaccagttcatccttaacacaccaaacaaggtatgacccaacacgtgcagttgacccaatcattgaagatggtcactacaccttgttttgaagcctagcgagattggacgccttagtgttcaattgttacacgcagatggtatttgtgcagatattaggtttaatgttgagcacaaacaatatttaaagattttctgtgttgagcttgttttgcttttggccaactgttgatagtgttttttgtacaaaagtgattcatttgtactatcacatataaaagtctgcatggtattgat

SEQ ID NO: 155401 - DNA, 2038 bp, Zea mays
  Clone ID: MRT4577_73304C.1
gcagcgaatcctgcaacaaggatgtccccatcgtccacgtcgacatgcacaactatagccttgatgagaagatcaggatgacgctcaaggcgcacattgtcgagaagaccgacgaggtccatgaggtttcttttgtagatattctggccgaggacttttttagatccttccactttgtatattaaaagtgaggtctacaatatttatttgccccaatcaatgcagcatggtcctcagacatatggtgatacatattagttttaattccgtatgtgtgtttatttaatttgttcttcaattcaaaatgcagacttttcttcacaagctgaatccttctgcaagaccatggacagaacatttactattgatttgtattcgtcctatataaaacagaaactatcagaattttctctatcaaatagttctaaatgtcttgtagcactaattatagaaccaggtaaaaaagtttcactctttgagcttcttgggaatattttcattttttcctctttagcctttagtatgtaactatgcgcactatcatttgatgctaatagctggaaaaaaactcagtacttttccatgccatttactggttcaacctcttaacccatatttgtgtagtaatatacaaggtgcaggtggaatcctcatgatggatcctcttttccagcgagtacttgtgagtgagtgtagaagtcgaaaaatacctgtcatatttgatgagatatttttaggattctgacgtcgtggtgtggatatcatatttgacaatacctttttagaggataaataggtattttctttgtattttatgaccttaataacttctctttcagtctacttctgagttacttggttgtttacctgttatcgcttgctatgcaaaattgatgactgaggtaattgtaccattatctgcaaccttggcaacagaggaagtttttgaatccttcgaaagtgactctaagtttatggcgctcttacatgaccattcatacactgtttatggtatgggctataccgcaacactaaacgctatggattgatatcaggatcctattcaaaccttgatgccggccacatgaaactcaaggagggtgcagggccacaccacacttatggactacttcagtttgtgtgtcaaatctgttttccacaaagaaattatttaaacaaaaggatcgcatcacagagaaggatgggacagtgatgagactttcaggtggtgggcataactgctttcaagatagtgatgaggcaagattaacattcaaacggaagttctggaagaaggttgtggagatagatgatctatgtggaaatgatggtgcatggtggggtattaaaggttacatgcgagacaatttcaaccatagcaataaggtcacatcgcaaaaagagcatttttagaacagtaggctcgtgaaatctttgttggatatgtattgggagcttcgtcctgttaccagttcatccttaacacaccaaacaaggtatgacccaacacgtgcagttgacccaatcattgaagatggtcactacaccttgttttgaagcctagcgagattggacgccttagtgttcaattgttacacgcagatggtatttgtgcagatattaggtttaatgttgagcacaaacaatatttaaagattttctgtgttgagcttgttttgcttttggccaactgttgatagtgttttttgtacaaaagtgattcattgtactatcacatataaaagtctgcatggtgccttagtgttcaattgttacacgcagatggtatttgtgcagatattaggtttaatgttgagcacaaccaatatttaaagattttctgtgttgagcttgttttgcttttggccaactgttgatagtgttttttgtacaaaagtgattcattgtactatcacatataaaagtctgcatggtattgatggttccaatccagtgatgaaataggtagattaaaataacaaaatttatgtatggctaggcccacaaatggattacgccccttttcttataatagtat

SEQ ID NO: 155402 - DNA, 151 bp, Zea mays
  Clone ID: MRT4577_73305C.1
tcgccgcacgtctgagacatttgatcgcccatgccctgaagaagcttacgtgaagctgacttcctactatgatgctcttgatgtggccaacaaaatcggaataatctaagtgctgcattaggcatctgtagtttcctagtacaatctgttg

SEQ ID NO: 155403 - DNA, 585 bp, Zea mays
  Clone ID: MRT4577_73306C.1
cactccatagggcgattgggttcctcgaggccggccgggacttatcatccctctccgaacctctctccatctccctgctaactccgactccttcttgatccaatccacctcctcgatccgctatggcggactctgaggagctcattttcaatcgaagtgcacgacgccctagcgcccataacctacccgcagcaggctgcgatcgtgcgaaagaacgcgttcgtcttcatcaataaccgcccctgccaggtggcggagggttctacctcaaacgactggtaagcatggccatgccaaatgacactttgttgccatagacatattcaacgacaagaagctcgaagatatttccttcgccacacaactgtgatattccgcatgtgaaccgtactgagtaccagctgattgatatatcaaaggatggatttgtgagccttctctacttcatatggcaacactaaggatgatcttacagtcccaactgaagagactcttgtggcccagatcaaggaagggtttgaaagctgcaaggatcttgttgtgactgtccagtctgctatgtgggacgaccacatctgcgcgctg

SEQ ID NO: 155404 - DNA, 604 bp, Zea mays
  Clone ID: MRT4577_73307C.1
gaaggcttggagctgttgttgtcgaggagcaagcgatgcacagcttcggtgttccgttctgtcgcaggagcaagcccagacaccctgacagcagaaagccgcaactagtgccgtggcctcggacacactgcagtcactgcttgtctaatcagacaaggccctctctcgagctggaccgatggccttgtcgagacggatggctgtcttcattaatgtactttaaattttatcctaaaaaatattctccgtaatttacagaacactctaaaggattgcatcttctatattttcaatgactcctgcagcgtcctctaaaattcatcttttatatctcatccaatttaatatgccaacttaacaaactgaatatattattttactaaatcagaaccgtcgtttttttgcttcgcaagggctagagtatttcgtcgagaaccttgcgcgcgatatcccaccaccttcgccatggctacaatttggaccacctcacgccatggctgtagcttggagcaccttgagtcatggcttcagctagagaacgttacgccatggatgtagcttcgagcaccttcgccatgtctaccagtgtcgctgtttgctccag

SEQ ID NO: 155405 - DNA, 321 bp, Zea mays
  unsure (1)..(321): unsure at all n locations
  Clone ID: MRT4577_73308C.1
ctgagagatctagagaaataataaaaaaaaagccggggttctaaggaaggatggaagcgctancncccccggccccggtctccgcccccccgccttcgccgtcgcggtcgcgccccatggcgggggagncgctttctttttttctatccccgaaaactataccatcaatggttcggacagattcatcaagcctgtcgattgcgtactaatgagggcatatgatgcttcaaagccaccttatatatcaagagttgaggcaattgatgcaacagagatctcgaacaccaatgtaagagtacaaatgcatttttattatccacc

SEQ ID NO: 155406 - DNA, 120 bp, Zea mays
  Clone ID: MRT4577_73309C.1
attgaagaccgtgtttgctttatagtcaaattcaaatcttcataatatggaaaggaatctgttagaccattgggcaaaacctttctagttattgagacatctttattgcataaacggcta

SEQ ID NO: 155407 - DNA, 183 bp, Zea mays
  Clone ID: MRT4577_7330C.1
ccggttggaaaggttgaagtcgatctacttgaagggagaagggcttccgcatgatcgaatggttccaccagtgggccttattatgggccgattggaaaatccaaaggtaaagctggttttttggaatctgggaggccagcctggcctacgaccatattgggggaaatatattggggaggccct

SEQ ID NO: 155408 - DNA, 852 bp, Zea mays
  unsure (1)..(852): unsure at all n locations
  Clone ID: MRT4577_73310C.1
tgggtacctcgaggccggccgggattttgttaatgttgattggttgttagagaaaagagtcattggaatgaggcttattgatgtttcgcatagtggctctaatattgcagagcgggttgcaactgttgttgaagagtttaagttgattgataaggttttttctgttactctagataatgcatcagctaattctaatgctatgaacatccttacaccaagattctctggttatgttggttctctattcttgcatcagagatgtgcatgtcacataattaatctcattgtaaaatctggtttgaagcgtttgaaaccttatgttgaagatttcagaactgcaatatcatttttaaatgcttccaaccaacgcatcgctgcatataaatcttattgtgttgctatggatgttcgtcctcgcaaatttggtttggaatatggatgttagatggaactctacatatctaatgctaaaacatgtcattccatataagaccacatttctctgtttttatccaaacacactatcnagcaggtgatgggtcaaacattacttacacaagcacattggggagaattggtgagaaaattctaaccttttctttgaggttgttttatggattcaactgttgctnnctatccggaatttattatccaaccntctcctcttatgttgcaccatatttaattgagattgcnttctcatctgagcaactatgagaacgatatattgcttanaaagatattgttgtgcctatgaaatctaaatttcttaagtactagaaaaacattcctatactataattcatttgcttttgtcttagaccctagagcttaaactcagaggtttcaaca

SEQ ID NO: 155409 - DNA, 317 bp, Zea mays
  Clone ID: MRT4577_73311C.1
ggggttgggttgtattttgaagggacaatactaaaaactcgatacgagatgcataaaacaaaaaacgaataatgggctgaaagctcaaaacaacgccaaagaccgccgataccttgcaaatttgtcaggtggcaagatcgggatattagttgttggctattgctcaccgatcagaaaacaaaactcttcaccgttttggtgggggcggggcggattgggcttgttccttgttgcttcttgtacatgggacatttccactcgcaacagccgggaccaaatagttatatcttcagggttctggactttaatccaacaac

SEQ ID NO: 155410 - DNA, 346 bp, Zea mays
  Clone ID: MRT4577_73312C.1
gtagctgcgaacaaaaaccttgctaattgttctctggtctcgattgatagcgggagcaaccaaagcgaacaacagggtaccaacacctaatccaaaggtagaacggacactaacacggcgacagaagcgaacggtgacactatactatagatggataagataactgggccgaagccaggaggggcccacacattaggccttccagtcgacgtcgacagcgatgtcgtagccaccaccgccacccttgtggcgaccgtcgtagccgttacttgctggggagccgccgcatggacattggctccgacatcattttgcggtaacggcacaataacgcgattgacgaagc

SEQ ID NO: 155411 - DNA, 312 bp, Zea mays
  Clone ID: MRT4577_73313C.1
cccacgcgtgcgtaaaaatgattctcacaaaaaaccaacacacgtgcacgcacccaatttatgtggtgggataaacaaaacccaactcaacaccgaacgaagccaagaactacagaatgtcaaaagaaaaggcaaaccgccaataaaataacatgattccacacaacaccagcaaaagaacgcacaccaaaacattcaagagaaagaacagcaaaaccaatcactccctcagcatatacaagccaaaaacatatcactgcatacaacacaaggagcaacaaaaatccatacccataaaacacataacacacc

SEQ ID NO: 155412 - DNA, 183 bp, Zea mays
  Clone ID: MRT4577_73314C.1
aaaagatgctcactcccttcagctacagcctaggtagacgtgcgcagtcagtagtcctttagatgttgtctgggaggttagaagccattttagacgtgagcagtcagcagtaccaggcttctcccacattttagacgtgcgcagtcatgagcagctgtattctgcgccattttagtggggtga

SEQ ID NO: 155413 - DNA, 815 bp, Zea mays
  unsure (1)..(815): unsure at all n locations
  Clone ID: MRT4577_73315C.1
gccgggtaatgtggcatatataaaattccatatgactccaagtcatgcatgccagttgaaagcaaagtttatatatttaagttgtagtacaagaagagatctataatttttatagttaactaccttttcacttgtcatttagggcaagaatttttttgtttaaagtttttagaattcgcaattcaattactttgactaataatgatcttacatggataaatggccaaaaccaaaagttgtattattagtcaaggatatcaaaactttgtagttcactgtgtttctatttgaagtcacttagggcctaaaatagttttaaaattctagactttgaaatttatttattttttttgaattttttaaacggcctcagattgagaaatgaaattaaacaagctaagtttgcagcacatgaagagaacctcaactttgtaactcatgacatggatttgaaataatttaggtctaacaactttggtttaagttttcaaaaaagaaaactcatatttgtggtattaaaatatacagaaaactttttcaacccaaatattgtttaattaaatttatttagatcagtctcaaataatcattacaatatttataaaaggtgaatatatataaaagatatattagcccactttggttacaaaattttcgcgtgaaattaaaatcatgcgagccatgacttgnggacctacaagtgcgactaccataggttgcctacgcttctctacggattaaaagggaaagggaatntttcttacttttcagctcgttttgtaactatttttgtaaaatatttatagaaccagttc

SEQ ID NO: 155414 - DNA, 154 bp, Zea mays
  Clone ID: MRT4577_73316C.1
aaaaacggggggcccccaatttttactggcgaggtgtataacaggcttcgcacccaaaaaaccagtttccagatcactttttatagggtaatcggacagctgcaaactctttctcctatttttaaggcacataaagccggtttaactgcccctt

SEQ ID NO: 155415 - DNA, 290 bp, Zea mays
  Clone ID: MRT4577_73317C.1
tcgcccacacccttccgtttaaaccgggaccccctgttctccaggatccaagcttagttggccttctacccaaccgagaggctttttatggacctaggggacatggacccaggtgccctcaagggtaaagcctattacatgtaaaaaccctcagggttcctatttttgtgggttccccccaaaccctgattgcccccttttgctttttaccaaaaaggcctgcacatggggccgtccctttcaatccagcaggttgcccgaggaccgggacccgccccagttggtgcttt

SEQ ID NO: 155416 - DNA, 572 bp, Zea mays
  unsure (1)..(572): unsure at all n locations
  Clone ID: MRT4577_73318C.1
cctcgaggcttggcncgngaaaaaaaaaaaaaaaaaaaaaaaaaaaaaaaaaaaaaaaaaaaaaaaaaaaaaaaaaaaaaaaaaaaaaaaaaaaaaaaaaaccggggggcccaaaaaaataattttttagggcggcctttgccaagggaccattttggccctattagaagggggggaacccttgcctttttgccttagggcttgggggggaaaaaaagtttcccttggacaaattaaagctcccaaagggatggccttgttttaaaagttgggggttaacggtggattcgcccatttggatcctggggggccgtatggaaaaaatatccttattggccttggcaccaagaaaattttaaaaggtttttccccctacaaaaagggcagagggagcaaaattctaaagaaattcacctataccaaaaatgttcctaaggccaaatggccaagggctgcttgaattaaactgttatggcaatttttatgttttaaatctggaggggcaaaggcaacactggttaatatcccaaaggaccgggggttctgttacatcggggggattttgcccaaaa

SEQ ID NO: 155417 - DNA, 154 bp, Zea mays
  Clone ID: MRT4577_73319C.1
tcggctttacctttctacaccaaagaaaggactaacagggcggtccttccagctgcatgtccctttttgcacattctttttcttccgatcaacctgtgcatatctcatgtacatactctcgtgcctgtagctctctggtcagggctagttagat

SEQ ID NO: 155418 - DNA, 391 bp, Zea mays
  Clone ID: MRT4577_7331C.1
ttttttttttttttttttttttttttttttttttttttttttttttttttttttttttttttttttttttttttttttaaaaaacaaaatttccggggggtttaccatataaacggtaatatagggaaggaaataatgggttttttggggagaaggggtttcatacctggaaactttttaaacaaagaccggcttggggtattttacaagatacaaaaaaaatgtttacaaaaacaaagttttaaacccaacccggcccactttgggggggggggggcctcaaaaatggcccatagggaaaagggaaaaattggggggaaaaaaaatccttgttcccccaaagttcgttaaaaaaatttaaaccttggttggacaaataaaggcgcaggac

SEQ ID NO: 155419 - DNA, 629 bp, Zea mays
  unsure (1)..(629): unsure at all n locations
  Clone ID: MRT4577_73320C.1
accgnngctctagaacatctgggaagtattctaattcttttgtcacataaccaactggtagtggcgtgtaatctttataccctctgttaaattcacaaggattctctcttcgtccatctgtatacgatttttcttcatagactgacgcataatcagctggtacggaaggagcttcgttatatcctcgattacgagaagtgtacgcacctccgtattcttcttgatttacagtataatcattacacgttaccgtgttatttggatagatttcctcttctacgcagttgctaaacttcagttcgtctgtattgttctcgatctcatgaatggttacgcaaccttctccatatccctccttgtacgctgtgacacgaaggatatagccacgacccggacagacacgaacttcttgtgacacttctgcttcccattccggaacaacaaggaccgaacgttggttgttttgttcttctacatctacatgccctttcacgttccagcaggataagccattattaaaatcaccatttttaatgacatttctcgcatcatatagggagaatgcagtgaaaatacgcccttctaattcttcaaaaatagccgcattgacacccggaatcacagacagc

SEQ ID NO: 155420 - DNA, 163 bp, Zea mays
  Clone ID: MRT4577_73321C.1
tcttggagactggatagagggagaagctgcatgggtgtggttcgtgccatcacagctattgttggctgcaaaaagaatagaagaatgtgataggcaacgctgccacgtcaggcagacagcacgcagctggtaccggccaacggtactgttataaaaaaataaa

SEQ ID NO: 155421 - DNA, 430 bp, Zea mays
  Clone ID: MRT4577_73322C.1
gtaagctcggaattcggctcgaggccaattattgggaccttggtaagcccgagactgatcgaacacaaaggccgacaattcgtcctctcaaggctaggaagggactacctttctaactcatgagcaaaaacagcctctagtatgctcctgactacccagagctaatcggtattctgaccaaacatgatcatcttggtgatggcactgcaagcactgacaaaagctcatgcgcgggcgacaaacctgtgataaaaatgcttactacaaagcttagcttcgggccgctccatcacaccgagggatggataagttagaacccagtcagggatgaggatgctacggacacattgttggaagcgagggacattcaggatgatctgaacggcataccgtaaacaaaaacctagtatggccacaacatttgattctt

SEQ ID NO: 155422 - DNA, 232 bp, Zea mays
  Clone ID: MRT4577_73323C.1
cctcttttttttttttttaatgaaatactgagggatggttttcaaacctccaagactatattccactccattctctctatggctccacacctcgtacttatcgacggctcctgctatacaacacttgattatggttaatatacataacataagtgaacctcctacccattggttgtccactacattgcgccacacattcaagtacaatcctatcttaaagccaaaaattaaa

SEQ ID NO: 155423 - DNA, 387 bp, Zea mays
  Clone ID: MRT4577_73324C.1
ccacggggtgaaatttttaggggggccaaaaaagcctttttaaaaaccagaaaaggagacccccttttttggcccattggggttttttcccctccggaaattgtgaaataatcttttgcccagaaaaatttgggttgcccaccgttgcttggaacgcaaatttcaaggtttggggttttttttggagaaattctttttccaaataatttttgggggaaaattttttttcgctttaaaccccctaaaaaatgggggccccccaaaccccgcccccggaggagttaaaaaaacccttttttgggggcccgaaagggtcaatttacccccaaaaaataatgtccttgattttttcccccccccgccccgtcgggtagggaacttccgggt

SEQ ID NO: 155424 - DNA, 826 bp, Zea mays
  unsure (1)..(826): unsure at all n locations
  Clone ID: MRT4577_73325C.1
ctcgaggccggccggggtcctgtttcgctttcttgtagccggcgtcgtaccttcctggtgcccgcccttggtgctggcgggccgtgctgtgcagcaacacggtggtggaagcaatctgagaccgaggctgtcatcgctcccggagttcctgcggtgcggccgtgtgcgggtggtcgtgccggctcgccggcgtgggccacggaagctccaggtacggtgaagggacctcggcagcagctccagtcacgccggcacgggaaggtatggttggtcgttggaggtggcgtagacccgcgccgctgcactttgccgctcgtggtggtttatgctttcggaaaagaagaaatttcggccctagccgaaaaaaacagaaaatttcggaaatttcggaaattctagataaaaatcaaaaagatctaatattttttaaaatgaaaatgatataatttatattaaaaagtattaattttggaaatatatatttttcggacaccagtgaaatcaatgaaattttggaaatttctaaaatttctgaaatttccggccgaaattgtaaaccctagttgctccaccgctagacccgtctaattccgggactctcgaagacgctatcctcctcgccggcagccgctcggtgtcttgaaaaggcaatctggcgcgcgcggcttctcctcggcatttggctgtgacagatgatgcacagaaatccgctaaatgtagtggccggaggaacattctatttttttagcggaaaggctagcggatggtacttatgaaactctaatatagcataatggaccgntttacgtcttttatctagctctac

SEQ ID NO: 155425 - DNA, 832 bp, Zea mays
  Clone ID: MRT4577_73326C.1
cggacggtgggcggacgcgtgggcggacgcgtgggcggacgcgtgggcggcgctccctcgctgcgccatagggctgcgactgcgagagccagccgcacccgcaccagtccataggccggcctcctctcttaccttcccacaccccttctcgaccgtacgtaccctgtcgtatactctagcctagttgtgctaggtagccagccagccagctcgccggccgatgatgggaggaagaccagtgcctccgccgctcgtcgtcgcgctggtgaccatcttcgccatcgcggcggcggcggccgacggggacgaggtgaagtgtggcgggtgctctccgtgcggcggcgccgactgcccggtgctgtacccgtcgccgcccccgccgccgtactactactacagccctcccccacccgcgacctaccccggggagtcctcgtcgtactaccagccgccgccgccgggcgcgtacatccagatcgggagcgcgccgccgggcaagggcccgctgtacccgcaggacccagggttcatcccggccggcgcgccgggccgcgccgcgccgctcgcggtcgtcgctgcgctcgcgccggcgttggcgtgcgcatgggccttattgtgatctctatgtgcttgacttgacaagcgcaggcgagctgcttattcgtcggtaagtaacgcggcggatcgtgccggcgttccacgtacgtacgggttaattcccccagtgtatctacgcatgctccttgtgatatatataataatcttcattggccgtcatttgggctaaaaaaaaaaaaaaaaaaaaaaaaaaaaaaaaactcgagggagggcc

SEQ ID NO: 155426 - DNA, 180 bp, Zea mays
  Clone ID: MRT4577_73327C.1
ggccaacagctgcaaataaaatacatggcgcgggtgcggctttgcagagcgcaatgcaaacaccatgcttagcccaaaagaacacatcttaccatcccggttcatcgtcatctcgtcatcttcctcttgttaggcctcgcaattgcgtctttggccaccggagacgaccagtttgtcgtc

SEQ ID NO: 155427 - DNA, 498 bp, Zea mays
  unsure (1)..(498): unsure at all n locations
  Clone ID: MRT4577_73328C.1
ctcgaggccggccgggtattcacttacaccatcaccccggcgaccatgctccattttctctcaagtcacagtcacaggcaggctctcgagctcataccacccatcgcaggggatggcgacctatatcgccgtgaacaactgcatcgcgctatgtggataccccggcgtgcaacgataagggacccggacgactcctgcgtgataggatatgtttgcctagcagncggctctcggggactgcacaactgcaacgtgatcgtggagggcctgaacggctgctactacttcgtgaaggatcggaggcgtatctctatcccgaggctatgaagtgtggcgtatttctgtgcgtggacccgatgaacgtctccgacgatctcttcaggatcgccgacaccagtgaacgtcctcgtgctcgtcgtggtccccgtagggagcgtgatgcgccggctggaggtcgtcgtggacgtagctgagtcctgtgcgagattgtgatccggt

SEQ ID NO: 155428 - DNA, 744 bp, Zea mays
  Clone ID: MRT4577_73329C.1
aaaatttcacaacgacaacggcacgattctccttctccgtccgcgtagctctcggtttcggcgatgtcggggcgcggcaagggcggcaaggggctgggcaagggcggcgccaagcgccaccgcaaggtgctgcgcgacaacatccagggcatcacgcccgccgcaagaccgtcaccgccatggatgtcgtctacgcgctcaagcgccagggccgcacgctctacggcttcggcggctaggccgcctccccttctgatgctttgatgtgacggccgtggtcggttgtgtgtctagttggccggtctactgtagtttgttctgtatcttcgtttcgaggtgttccagtttctagcccatttggtgtaatattttcactgctattatcaatggaaagccctcggttctatcccaaaaaaaaaaaaaaaaaaaaaaaaaaaaaaaaaaaaaaaaaaaaaaaaaaaaaaaaaaaaaaaaaaaaaaaaaaaaaaaaaaaaaaaaaaaaaaaaaaaaaaaaaaaaaaaaaaaaaaaaaaaaggggcgcccctttaaaagaaccaaagttaacttccccttccatgcaacgaaaaaactttttaatagggcccccaaaataaaatccatggcccctgttttaaaaacgtgggtacggaaaaaaccctggctttcccaaattaaaatcctttaaaaaaaatccctttttacaaattggtttaataccaaaaaggccccaaccaatcccctttt

SEQ ID NO: 155429 - DNA, 248 bp, Zea mays
  Clone ID: MRT4577_7332C.1
cacaaaactcctcgaacgaagggagctttaattttgttaataccaatgctctgcgggagatcatcatgtgttgctcccgtaaccattctacggaaatgatcacaggctctcatagcttcacatcttggcccataccagagagccgttgttactcctttccgaagtacattcactgtacaacgctactaaatccaacattctcttgcaccaagcatgttaccagtactctgattattcctgcaagaacc

SEQ ID NO: 155430 - DNA, 423 bp, Zea mays
  Clone ID: MRT4577_73330C.1
ggcacgaggatcctcttcctcgagttctcctcaaccaaattcaaagtcacagcggcgaaactctcggcgatgtctggccgcggcaagggcgggaagggtctgggcaagggcggcgccaagcgccaccgcaaggtgctgcgtgacaacatccagggcatcaccaagccggcgatccgcaccctctacggtttcggcagactaaatcggcccatctcccggtggcgaattacgtggtggcggtggacggtggtggtcgtgttgtgtgtttggtctagtgtagtctgtgttgtctttatcggtgctgttttctgtggtggttgtactgcatcattctagtttctagtccatgtgctgtaatatctcgctgctgtaatcaatggaatgtcctcgtttcaagcctcaaaaaaaaaaaaaaaaaaaaaa

SEQ ID NO: 155431 - DNA, 532 bp, Zea mays
  Clone ID: MRT4577_73331C.1
cctcgaggccggccgggatccacccatcagtacccaaccttcccctacaccagaaaaatccccagttctttggtccgcgtcagagaggcggcggcgatgtctgggcgcggcaagggcggcaagggtctgggcgaggggtggcgtgaagcgcatctcggggctcatctacgaggagacccgcggcgtgctcaagatctttctcgagaacgtcatccgcgacgccgtcacctacaccgagcacgcgcgccgcaagaccgtgaccgccatggacgtcgtctacgcgctcaagcgccagggccgcaccctctacggcttcggaggctaggctaggcgcctcttcgtagtcggggactggttaggggacatgtctctgtgtgatgctttctgaggtagtattgctgcaatagctgtgtaatccatcgcttctgcaatgaagcgctttgaagcatgctacgtatgttgtgtctgtgggtgattgtatttctggtagtaacagtgattcttcctgaaaaaaaaaaaaaaaaaagcggcc

SEQ ID NO: 155432 - DNA, 534 bp, Zea mays
  Clone ID: MRT4577_73332C.1
gtaacaataataaatatgcattgctttaatcaactctcagaagacaaactgacaatagagacaaaatgcgtcacagcgctgaaggacctactagaaacgagcttactactaggggaacggggagaccgacttgtggcactgcgagaaggcgtgcttggagagcaagacacggtagaaccaggccgatggaggtcagcaaataccagcccgtgatggtagggtaaacatcagagcgggcaacatgagacccctgccctgcgagctccaccgataagtcgctgaagaatcacgtcataattgccatagccttcgacagaaatgccacctgcggaggcaccagcttcaccaccgtagaaaatgttgaccattgtacatctacacgctcttcttggtctacttccaccccttattgtggacacccacttccttgacggcggattttaccgccaggagccgattcaacgccttcgggttcatagcagcgggggcattctacgtcggagacagggactcctgctatgcacacttctttga

SEQ ID NO: 155433 - DNA, 671 bp, Zea mays
  Clone ID: MRT4577_73334C.1
aatatatactgccatccaacataacgaatgattcggtcactcgcctatcgaacatcgatgataatcccttgcagcaagcggagtacttcctgcgaatactcagggctcagagcgcaccggactgccaaacactggtggcggcccccatgcccagcgacctgctggctggaaaaggccctcacgaccttccagtaatcaccctccgaaggctgaagagacagcatacacgaagcctggaagaccttgtatgtactacaaatacggccagaacgaaggcatccgacgtgaacctactcctgccgtgaaggatctccggtccacctgagacggtgatactgcataaggctcgactgaacaggacaacaacaggaacctgaccatggacaacgacaacgtccagtgccggatgacccgtcttatccacgccatatcagacgtggaattcaaaaaggaccaggccgatgagctcctatcaaagtatgatgttaaacagcgacccacccggcttgctgatggcacacgatgctcctgcgtctacctcaaactatacatgtgatctcgagatagagatagctctatagacatgactgcatgatcgcacggacgattcaatggatcgatgcgggcacaattctctgtcttcacactgacccatctccaagggcacattg

SEQ ID NO: 155434 - DNA, 398 bp, Zea mays
  unsure (1)..(398): unsure at all n locations
  Clone ID: MRT4577_73335C.1
cggagccgagggccgttttgnnncnnnnnggaaacggaggaaaagaaaggaaacgacgaccacgganaggacggcaaaaaggacggaacaaacaaanaccggaaagcggcnaaaganagagaaaaacgacccggngagcaccacgaaggaaagcaccgcgcagcaaagcggaccaggggcacannagccgaggcaagaggcaaacagcgaagacagacgacgggcaaagaaaaaaaggggcaaccaagcaccagaagcaacaaaaaggacagnagagaagcgcgacaacaggaagnaacaaagagaagacagaagcagcaagngcaacacacaaacacggaaccgggcaaaggggcccccaaggcaaagggaaccgaccacaggaggacaaccaaaca

SEQ ID NO: 155435 - DNA, 624 bp, Zea mays
  unsure (1)..(624): unsure at all n locations
  Clone ID: MRT4577_73336C.1
tgtgcggcgctcgaggcggccngtcgggagcatccactcaccatacactttcatcactacgatgcatcccatatatgtgccgatctcgatcgagctcgtctgcttcactgtggctctcacctccctcgcctctgcgcatactccgcgaccagcaccaactacgtcttcccggagacgtgcatcaccatgctcaagactgctggaagacctctggccagcgcccgttaggcatacgcctaggtacgcgtgctccacgcgcgatcctagtacactagagcccgcatgatcaggccagcgccccaagtataccgtgaccgtcccatctctcccgcctcactactcaatgggacacccgcgtggcgtgtccaccgacccacagacttgtcgccaacaaccgcgagctggaggtgaatccactgcctgtggtctatgatggccgcgctcgcatgcgagttcccgtagttcctcgcccgaaacgtgctgaagctcgataatcccagtgtggttcaaggccatcccccatatcttcagatactgtgcactcttactatcctcgagatgccaagtctgatccacgtagtagagtcatcttgtctctatctatcagtgacaactgatgctcat

SEQ ID NO: 155436 - DNA, 1985 bp, Zea mays
  Clone ID: MRT4577_73337C.1
caatatttgagatgcagtttccttgttggtactcattaattcctcgtctcttgaagacgtgataggaaagtcacatcagtaactttattgcttgtttcatactttttagtatgggaaaggatgccactaataactaggtatcaaaattatgttgttagaagctgtctctaacattatggttccatctgtattggtttgcaattcgagagtattcatataaccttttgcaaattaatgttgaaatgctggatttatcacggatatggaaaattaatctgttgttttgtcattttgtattgttctacatccaactttttttattgctttgaatgatgatatattcaattattttgcaatactgtttaattcttgtcatcttgtgtatatattatgttgagttggtaggtcatgtgatgaggtataatataattgtgcccttatcctgttatacatttatatgttggccaatacaataccatatcttaggtctttgtatctttattggggaggtccacttctcttcttggatgcactgaacattccagagtatgctattgggtatgagttgtatggttgagtcgaggcttttcatgccgtctagatgatgaggtgcatgatgtagattatgcacacgtatagttccagttgatatgttgtcaaattatacacacatagaccataaactttctgcatggtgtccagagctgataatattttcccttgatttgttgttactatgtgttgggtgacaattagttaacctttggtgataaagttgctcgattctatctcttctcttttctaataactatagagaaacatgactgagaagggtagacctttgcagtggtgagaactgagtcaggggaaggcttgctcggtttatcccttccgcaccctactcatgtgggagtctactgcactggatcttttctttttatagacatgactgagtgatgatgttatttgttccatgcctttttcgtcatcagtatttatatctttccttgtctttttcaggacaagcctcagccgccacctgagggccgtcttcctgatgccaccaagggttctgaccacctgaggcaagtctttggcaagcagatgggtttgagtgatcaggacattgttgccctctctggtggccacaccttggtttgttgctgtccactcatgtttgcttcaggaatttaatgtgtatgcctgtactgatttagttttctttgaggttttattagggaaggtgccacaaagagcggtctggttttgagggggcctggactacgaaccctttggtctttgacaactcttacttcaaggaacttctgagtggcgacaaggagggccttcttcagctcccaagtgacaaagccctgctgagcgaccctgtcttccgccctcttgtggagaaatatgctgcagatgagaaggcattctttgatgactacaaagaggcccacctcaagctctccgaactggggtatgctgatgcttaaatggtccatatcctggagcgggacacaaactgctgcctgtatggactcgtgcgattcagggtgaaccatcagattgtctagtgtcttctttgtaataaatttatctgttcttggtactttgtctatggttgaatcggaacccattttccgtttgcctagattcttaatttctggtgctgtatccagctgaaactagtagatctatgatcttgtggctgcagcatgttcttgtcacttttatctggtctccgttggttcggttcacaggttgtgtgctttaaaaggctgtgcttaagtcctgcaattcgagtccaccaaactgtagggtgcaagtcgagattttattagtgatgcaagttgctggtattggtgcattatcgggctaatacgcttgcgttgccttctgattttataagtgatgtaaattgctggttttaacgtgcattacctggtgggctggttctataactgatgcaaattcctggtttt

SEQ ID NO: 155437 - DNA, 1873 bp, Zea mays
  Clone ID: MRT4577_73339C.1
tcaataccatatcttaggtctttgtatctttattggggaggtccacttctcttcttggatgcactgaacattccagagtatgctattgggtatgagttgtatggttgagtcgaggcttttcatgccgtctagatgatgaggtgcatgatgtagattatgcacacgtatagttccagttgatatgttgtcaaattatacacacatagaccataaactttctgcatggtgtccagagctgataatattttcccttgatttgttgttactatgtgttgggtgacaattagttaacctttggtgataaagttgctcgattctatctcttctcttttctaataactatagagaaacatgactgagaagggtagacctttgcagtggtgagaactgagtcaggggaaggcttgctcggtttatcccttccgcaccctactcatgtgggagtctactgcactggatcttttctttttatagacatgactgagtgatgatgttatttgttccatgcctttttcgtcatcagtatttatatctttccttgtctttttcaggacaagcctcagccgccacctgagggccgtcttcctgatgccaccaagggtagatttctaatctttactagattggcatgaatgctgagttaatgggttacattgaccttgcatctttttttaagtgtttcaaagatgttgttttggcatccctgtacccagcttgctttgggtaacagtggttccttgtagccgaggcaccgcgtaggcggccagaccaaacactcgttttcatgtcacttctattgacacgaggactggcacttgctgcttgcttttttttaaccaggttctgaccacctgaggcaagtctttggcaagcagatgggtttgagtgatcaggacattgttgccctctctggtggccacaccttggtttgttgctgtccactcatgtttgcttcaggaatttaatgtgtatgcctgtactgatttagttttctttgaggttttattagggaaggtgccacaaagagcggtctggttttgagggggcctggactacgaaccctttggtctttgacaactcttacttcaagtgagtgtatgtcttgtttactattgaaaagcaactgcatttagttaagaaatacttaaaatttgtttacctttgttatgtcattactgggcagctgaatgctgtgctagaaattaacagccatcccatatatcctactattcccatattttcatagggaacttctgagtggcgacaaggagggtcttcttcagctcccaagtgacaaagccctgctgagcgaccctgtcttccgccctcttgtggagaaatatgctgcagatgagaaggcattctttgatgactacaaagaggcccacctcaagctctccgaactggggtatgctgatgcttaaatgtccatatcctggagcgggacacaaactgctgcctgtatggactcgtgcgattcagggtgaaccatcagattgtctagtgtcttctttgtaataaatttatctgttcttggtactttgtctatggttgaatcggaacccattttccgtttgcctagattcttaatttctggtgctgtatccagctgaaactagtagatctatgatcttgtggctgcagcatgttcttgtcacttttatctggtctccgttggttcggttcacaggttgtgtgctttaaaaggctgtgcttaagtcctgcaattcgagtccaccaaactgtagggtgcaagtcgagattttattagtgatgcaagttgctggtattggtgcattatcgggctaaaaaaaaaaaaaaaaaaaaaaaaaaaaaaaaaaaaaaaaaaaaaaaaaaaaaaaaaaaaaaaaaa

SEQ ID NO: 155438 - DNA, 254 bp, Zea mays
  Clone ID: MRT4577_7333C.1
acgcaaagcggaaagatggtcagatgacacctccaagcattctgtggatggacgtcgtgttccgcaggagcgctggggcgattccaataataaggatggcagttatgaccaacgacgtgagaataagtggactgcacgttggggttccaatgataaggagtatgaaaattggcgtgataggtggggggattcaggcaaagagggtgatgcttaccgtgaaaaaggtttatctcaccatgggaaggatgccaaca

SEQ ID NO: 155439 - DNA, 457 bp, Zea mays
  Clone ID: MRT4577_73340C.1
tgggaccctcgggccggccgagtacccacacaaatccagtaactcgcatcttcctgcgtcatccaagttctagcagcgcagcgctcggtttcgacaatgtcggggcgcggcatgggcggcaagggtctgggcaagggcggcgccaagcgccaccgcaaggtcctgcgcgacaacatccagggcatcacctacactgagcacgcccgccgcaagaccgtcaccgccatggatgtcgtctacgcgctcaagcgacagggccgcaccctctacggcttcggcggctaggtcgcttcctcatctggtggcgaactgcatgtgtgtcggtggtggtcgtgttgtgtgtctaatctagtgtagtccgttctctctgttgtcgctgtgttgtgtggtgtcttgtagttcatttcctgcaataccaacttgccattatcaatggaaaaccctcgttttcatcctc

SEQ ID NO: 155440 - DNA, 1746 bp, Zea mays
  unsure (1)..(1746): unsure at all n locations
  Clone ID: MRT4577_73342C.1
aattcggcacgaggcaccaacacacccggccatcttctcccccttccctcccaattcaaggcggcccggaagctcctgcagccttccggaagggcttcgaggccgaggcgggcacgggatgtgggggcggcactactggggcggcggccggcgcccaagctgggcgcccggagggaacggagccggcaccggcggcgtggtggtgatgttcgcgtggctgtccagccaggagcggcacgtgcgggcgtacgtggagctgtacgcggcgcacgggtgggcgtgcctcgtctgccactccgacttcctcaccctgtttttccctgagaaggctgccatgctcgccgacagggtgattggggagcttgtcaaggtgctgaagattacacctgtacctgttgtgtttgcgtcgttttcgggagggccaaaagggtgcacatacaaggttcttcagctgatcgagagaagatgtgaagggcaactaagcatggatgagtaccagctcgtacgagattgtctatgcggacaaatgtatgattcaagccctgtggattttgtcagtgacttgggcactcgcttcctcctcgatccaagtgtcctgaagatgtctgaacctcctcgtgtcttgtcatggatgactaagggcattgcctcaggtcttgatgttcttttcataaacaaatttgaagaacaacgtaaagattattgggaaacactatactcatcggtgcattttggtccaatactaatactctgctcagaggatgatcaacttgctacatattcagttgttcaaaattttggccagcatctgctagagcttggtggtgatgtgagcctaattaaatggcatagttctccgcatgtcggccactacaagcaccatcctgaggaatacagagctgctgtgacggagctcctaaagaaagcctcgacgctctacgcgagcagacgacaactcaacggacacgccgtgggcacaagcgagcacaccgacgcgcccgcgcctgcatccacctccaagtccaacccacacagagatgccgcgagctctgtcggtcgtagcaggctgattcaagcaccggccgatccagccggccagtttccttccataccgagctccatggagtaccacgagagcagcagccaaggtccgccgcagccggagctgttgagcatgcccggcgtggagagctcgggcctgcgttgtggggtgctggggcaggcgctgtacggtgtctgtgttccgaaggacgtagaagacggctgggacctcgcgccgccttccgcgtcgtcggatgcgttgtggggtgctgctgctgctgccgcgccgcctcgccgtggtagcttccgtccgatgagatgtgtacggcgctcgagattgtgatattgtgcgtgcgttttagtttaaaaattaaggtgagcaacaaatattgagaacggagggagtagtacgtattctctatacaaatcaatataaatatggtgatcgtaatggtctattcctctataaaaaaaaaaaaaaaaaaaaaaaaaaaaaaaaaaaaaaaaaaaaaaaaaaaaaaaaaaaaaaaaactgggctggtatgaaccgntgtgtgttttctttctttctttcttttctgaaggaaaaattgaagggacggtggtgcggctgtcgtgagcggtgattgcacgaggagcactcccgattctgacggcgctcatcagtttcgttttcagaggaaaaaaaaaaaaaaaaaagcggcc

SEQ ID NO: 155441 - DNA, 297 bp, Zea mays
  Clone ID: MRT4577_73344C.1
agtacctgtgtccatgacagtattagctcctctcctcagccactagattgtaaacttgtatgagcagagaaaggaaatgctaaggcacatgagatgagttctcatacctagcttcatcaaattactgtgtattcatttcgattatacccaacattcattcttgagtagttatcctgaagggataacacttcaaggacgaaggtttctattgtttaacattgtgttgctttgatttcggttgaatatagcaattgaaaacaagtgtacaacacctactttgttgatacacatgtttta

SEQ ID NO: 155442 - DNA, 314 bp, Zea mays
  Clone ID: MRT4577_73346C.1
gccacgcgtacgggtgtcgcctgcgacagtgattgcccagctgctctgcatgatcagcgtcacagcgttcatggacagcgtcgttggagtctacaatggctcgtccttcgacccagtcgagatcatgcttgtgatcattgaccgctagcttgcaatgtcatctatactgtactagtcgatcttgcacgatacgcccagatttggagccacatagtagtcgcatgtgatgcttgtgtaatgatatgataccgagatctgtatctatatatgggggtccacaggcattgcgacatgaggatagctgctagacacga

SEQ ID NO: 155443 - DNA, 562 bp, Zea mays
  Clone ID: MRT4577_73347C.1
aggcgcgtctcgaggaggagatagaaaggtaaatacgtgttgcttaacaagtccgagggatgcgctcccacttagtcctacgggcacggtccgctcgggagaacaggatggacccttcaggggcgggggacgccacaccgatgcaccagccagaggtgatgttgatcgcgatccatacgctgtaggagtggagggttcacatgcaggacttcacataacgctcaagaacatggtgtagtgtgacttgactgaaatatggcgcctctgtgccagggcatgcgtccacttgttgctgatatgcgcaagaaacacggacatgtagatctactgaacgcagatgtggatcataagagtacctttgatgggcagtgcagccgacaggccatgccgacattactggcaattaatgaggaaggcctccaagacaaagatcaatgcagcaggacaggaacagctagctcagcagctagaactacacatgtgctcgtctatcagtgatgccgtatatatctgtactgctaaagatgaggtcgcttagcctcaagtgtgaaaaaactagggc

SEQ ID NO: 155444 - DNA, 332 bp, Zea mays
  Clone ID: MRT4577_73348C.1
tcacacgactgaacatttccactcattagaattattaaattcattcacattgctatcccaccataatatccaactatacataccactcgatatctttagcactctctcatcaataaactcaataacaacgtcctttctagagcctttaactactactatctttcaaaccaatactatccttacaaatgctaaatgatatccttgttcatcaaaaccccctaatagtcttctaactccatttcataaacattctgttcagttgataacatcttcaaaaacaaatcacaatcttttttccaatatctccaaaaattctctcactttatgaaacc

SEQ ID NO: 155445 - DNA, 278 bp, Zea mays
  Clone ID: MRT4577_73349C.1
gaaacataagttattaagtttttattatattggcacaaaaaaaaagggggggggttctaaaacatggcccaattttttaactgaaacggggctttagcaaccggcatgctaccatgacaaaaattctccaacaggaaacataaaaaccttgcacattgaagaatttccaaatattcaacccttgggtatccataggagatgggggaagacttaaaccatgaaaaaaatcaccaggaaaacatgagacttccctttggatataacaaccaaaggggagc

SEQ ID NO: 155446 - DNA, 407 bp, Zea mays
  Clone ID: MRT4577_7334C.1
agcaccatttcgaataacacaggtgagcaccacgatgggatccctcactaataggaggatcgtcgagggcgccgtccttgccgaactcgtcaacacccagtcgtgccaccccaccaacgtgccacccggccccaacatcaccaccaactacaactacaagcggctcaccgttagggccacctgtaaccgtcagcccaacagcgactacactcctgacaactgcggtacgtgcgggatcaagaacgtgaacctgtcaccctacagcaacatgacggcatgcggcaacactctcatcttcaaggactgcaagggctgcgtctcatgctacgaagtgagacgcaaagaaaaacctgagtactctcacaatacaggcactgtgtacatcactgacatgaactacgaaccta

SEQ ID NO: 155447 - DNA, 261 bp, Zea mays
  Clone ID: MRT4577_73350C.1
ttcacgcaataactaatcacctaggagcatgcataaatacggaggggtatcagaggttgttgcgtgaagaccaaaacatgaagagatggacagaacggcggactacaaatccacgaatcatcatctattccatgaatggatatccaacgatagctagcttaaatagttgacggtgatctttcccaccattccggttccttgatgctgcttctaattataagccgtttgttccccataccgtatagggagactgatttatgt

SEQ ID NO: 155448 - DNA, 351 bp, Zea mays
  Clone ID: MRT4577_73351C.1
cgcctcagttcccagcccccttcctggcacatcaagcaggccgaacagcatggttgtgaagaaggtttgcccgcgggagttcatcccggcgcacatcatcgcggaggcgatctcgacgctgcacgggctggacctgcggtggtcggggcccatcacgcccagcgagcggcagtacgtggagcagtacgtgctggccatgtacccgcagtactcgcacggcctcatcgaggacggcagctgcgacaaggacgacctctactccacctactacatgtcgccggaggccggcggcgagcggcagcgttcgtcgccggcggggtcgccgtcgtcgtcgggcggcacgagggccga

SEQ ID NO: 155449 - DNA, 732 bp, Zea mays
  unsure (1)..(732): unsure at all n locations
  Clone ID: MRT4577_73352C.1
gtacgcccgcaggtaccggtccggaattcccgggtcgacccacgcgtccgggcaggagcgcatgaggagccgagaggatgaagatgcgctggaacaggcacgtcgagcccatgaggaggcacgacggcgccaggagcagcagcagcagcagcagcagcagagacaggagcagcagcagcagcagcagcaggcagctgctgtggccgctgcctctgccccccaggcccagagctcccagccccagtctatgctggaccagcagagggagttggcccggaaacgagagcaggagcggaggcgcagggaggcaatggcagctacaattgacatgaatttccagagtgatcttttgtcaatatttgaagaaaatcttttttgagagcacccaggtgacttctgactttttctggcaaaaatgttgactctccatccatagtgttaggggcagccgtggaagcagcagcagccagggatgtctctgggcctggctctcctgcatgctgtgcccggggcaggcctgacgggcgggcagctgaggatcgcagagcccatctgccttacagccagccggacagacgtcctactacatgccaccccctcagaggacgtcagttcagggcacgtctcaatatgagtcaagtgccagctggacctgaggcctgcttccccgcgtgcggngcagaggcccttctctgcgccaaatgtctgactacacagtatacacaggacatt

SEQ ID NO: 155450 - DNA, 502 bp, Zea mays
  Clone ID: MRT4577_73353C.1
acactctgatcgattaagctctccgagactgcggttatctcttcttggggtcgtgtatcatcattgtccatcttcggagtggatgttgacgccagacctggctgtcacgaaggtgattgtggtggtttagactctgctgaagactgcctcttggaatcactcgcggtgtgctagatattcattgctttgagcgtgggcctgtgcctgcgaggcatgtgtaacatgctccagtggaacgagcataggatacactacgtgcttctatgacatgctcgagaagtacctcaccagcgactgacaaccaggatgaaatagttcttcccgggcatttatcacagacatctctggagagctcgagaacgaggttgccttgcctgtagagatgtccgctggaaatactcacaaccatgctactacatcacgattatggcgaattgtcctttcctctcagatgaatatttgagaacgtccatgccaataccaaagctgtggtgttttctct

SEQ ID NO: 155451 - DNA, 306 bp, Zea mays
  Clone ID: MRT4577_73354C.1
caaaagctcgccgcaagtgtatacatccttaggaactagcacaggcccaagggatacacgtgctggttccaataccaccagcgcgcaccacctctcgtacattatccttggtcttcacctccacctacacctacatctcaagctaccgaacatcaggaacgagaagacagggttagactttgtcgaagccctcttcgctagtggaggtatcgaccatcactcgtcgctataccccgatggcgatcgacgatcgtgagcttccatgttatgtgttgtgatacttgagacttttattatgactatgta

SEQ ID NO: 155452 - DNA, 263 bp, Zea mays
  Clone ID: MRT4577_73355C.1
aatatgattgcactaaataaactactttgaatagaggccaaattaatcttttaaaaatgatgataatcatcaggtttactcagtgaaatcatattaattatttgccaaaatataaaagctgtagctggagaagcccatggccacgaggaagcagcaattaattagatcaacacttttctccagggttctccatgcaggcaacattaccttgtctttcaaaagacacctaccttatgcaaggggaaacctgtgaaagctgcact

SEQ ID NO: 155453 - DNA, 224 bp, Zea mays
  Clone ID: MRT4577_73356C.1
tttctttgacgcgtgggtcttgaagttcgggtgggatttgatacagtttggaagcggtctttttcttaacttattggaggacaaccatcccttcttgctcttagtcttattctggctctgtttctttttaaacctgcaccactttacatattttaccaggttgatgctgctcttgatcttttaccacatttaaaatattttttgaatttacatcgctttatttt

SEQ ID NO: 155454 - DNA, 725 bp, Zea mays
  Clone ID: MRT4577_73357C.1
cactccccactcccattagcgtctccccacaccgagctcagtgagccccaagcagccgccgccggagccggagctgctcgagactcgacgccgatggccgggttcgcctcctcgcggccggcctccctcgcgctctgcggcttcctcatcttcctcaacgtcttcgccttcctcctcgccgtcggcgccgagcagcgacgcagcaccggcaaggtggtgccggacgagtacgacgagcgctcctactgcctctacgacaccgacgcctccaccgtctacggcgtctgcgccttcttcgtgctcctcctcgcgcagctgctggtcaccggcgtcacccgctgcctctgcttcggccccgccctctcctcccgcggctgcgccgtcgccgccttcgccgtctcctggctgacgttcctcatcgcggaggcctgcctcgtcggaggatccgcgaagaatgcgtaccacaccaagtaccttgggtactacacgaagcacgacctggtcagctgtgccgcgctccgcaagggggtgtttgcggcagctgccgccatgatgctcatcaacctcgcagcctccctggtgtactactggagctactcgaaggcggcggacggcgggttcatcaagcaccagaacgaggccggcgtgggcatgaccgactacggcctcgacaggggcggtagccctgggctctgagtgagtgaggctttgtgttgctttgcttg

SEQ ID NO: 155455 - DNA, 589 bp, Zea mays
  Clone ID: MRT4577_73358C.1
ggcgattgggttcctcgaggccggccggacctgctagttcataggaaagaaaaccgcgtggggcgtggcgcggaatccgcgcgagctcgccggcgcgccgatttccactggtcctccccgcggatccctataaaaatcgatgccgggccgaccaacccccctggtctattctctgggcgctctggagatcactgcctgcgccgccggggttaccgtcgtcaacgaaggttgttccggtccgccgagcgccgtggccggggtgattgcgcgccaaatcctcgtcacaaccatggtctggatgctgcttcagtggaactcggatggccacaacccccgttccggtcggtctacttccaagcagatgacctgctagaccggacttcgcaggttgtgtcaccgttgctaccttcttggcaacatggaaatctgtaatcttttttctcgttatcctcgtctcatttcgatgtcccggaggctactgaatatagtccgcaagctgtaacacgctttattttgtcatcagtgataaatgccatgtgaaatataaacgactacacttctgaaaaaaaaaaaaaaaaaaggggcggcc

SEQ ID NO: 155456 - DNA, 150 bp, Zea mays
  Clone ID: MRT4577_73359C.1
cgccgtctctcgccgccccggcaccaacccctctcgggctaggcgagtggaccggccgcccagcgtcgtcgccggctagatattcccaccgctgctcgcaatggctgccccgcacgacgaggccgcagcgtgggctgaggaggcgacgcg

SEQ ID NO: 155457 - DNA, 345 bp, Zea mays
  Clone ID: MRT4577_7335C.1
gggaaaaaaaaggtttttgcccagcccgtttttggggagggcacccccaaaattggttttttgggccacccccctcccccctaaaccccattaaaaaattggggtgggttccggggactccacgtaaccggtccccaccaccatttacaggttggggggggcgtggacaaccccccccgtggtattccccccgggggggccccccccccggtggtccccggcccacccggggggggggcacccggcccccacccccttggggttccccccgaagccccccttcccgggggccggggtggggcccaacccctcgggggccttcttgggggccctctccaccttttt

SEQ ID NO: 155458 - DNA, 451 bp, Zea mays
  unsure (1)..(451): unsure at all n locations
  Clone ID: MRT4577_73360C.1
cattgggaactcgaggcggcgggacccgttctcctagcccagctagatattggacacatatcgaaacagctctagctagcgcgctcgtcgtctaacctggcttccggcatggcttccaagcagatcggagtcttgacctgcttcattgccatcaccgctctcgccttccgtccctgcgcatccgccgtgcccatggnacgggtgggctggtccgaacggccggcgccacctgggtacgcgcccagccaaggggcgcttggaatcccgacggtggtggcgtgtgggtaccagnggtggcgtccgaccacgcctccggttctcgtcaaatgatcacccgcccggcaggccaatccatccttccagggacgggcaacggcgtgcgggcaccctgctacccaggtgaagtgcaccgggacacgcggtcgtgctccgggaagcccggtgacagggg

SEQ ID NO: 155459 - DNA, 260 bp, Zea mays
  Clone ID: MRT4577_73361C.1
acagatgtgtgtgtgcagtgtgctagagagtggcgataagagtctgtcccgatagccaaggatgacttgcctgtggcttcttggcttgccttggctcgggctgattaaaaccttgtgcacgtttttttcccccccccgtggcctcgatcacaggcagtctccttggctagtccgggcaggccccttatctgaaaccgatatatcggtgagcgtgggaccgagggaaagcatatatgcggtgcaggtgcaggcgtgcagct

SEQ ID NO: 155460 - DNA, 566 bp, Zea mays
  unsure (1)..(566): unsure at all n locations
  Clone ID: MRT4577_73362C.1
gtccccatgggcgacgccactaggggcagccacgatttagcaatcaccagctccatcgatgagagatttgtggaccaacataagggctgatctcacaaagatgcaagccacgctccagaaggttgagcaagggctgctgcaaatcaaggcagcagtgcaacatgagcaacaccagctggcgctgtccgcacggctccggacgtcggcggctgtgggcatacaagttgctgctcgtggcttccttgcacgacagaaagtgcgggagatgcgccggcagatgctcgaggcagccttggtgacggttgacctcgacacacgtcggcgcgacctcaccctgtcggacggccatcagcagtggcaccaggccgctatctcgaagtgcgagcatgatacgtgtcccgcgggcgacgaacttcaactctacggcagcggcggtagggaaggcactcacctcgtcatcaacaagggcgcactatttagcgccaccacattccgctaccggccgccactagggcgcctccactggttattgttgcgacctatnccaggtgcctancccagaacgc

SEQ ID NO: 155461 - DNA, 432 bp, Zea mays
  Clone ID: MRT4577_73363C.1
attaaaaattaatttcatttattatctaggatcgcaaaggtttcaccctttttcattacataggtggggggggggggggctttaattcgtaccgacttttactacttatacaggggttttgtctttaagggttagtccatggttttaatccaaagggaacaagctttatttttgcagtctttttaaccaatttcccttgaggagaaatgttcgtagagtccagcagtatattttttgactttcacctttttggttagggctggatggttttcgtttatcagtttggcagggggccggatttttctctcagggtctatagaataaaacaaaaccactgatagcctttttttttccgggtttgttacaacccggggcactgggcttttgaagatcccattggttattatctctattgggcctcctagattgacc

SEQ ID NO: 155462 - DNA, 502 bp, Zea mays
  Clone ID: MRT4577_73364C.1
cgtcgcacgcgtcgcgaatactcacagctttcctcacacagtgtttggcttgcctgtggaagcaaagcatgtcatattggagaaaccctccatatactggtgtcaaatacttctacacgacagtgattgccctgttgtttggaacaatgttctggggtgtgggcagaaaaagggatagtcaacaggacctgttcaatgccattggttccatgtatgcctcggttattttcatgggagtacagaattctggttcagttcagccagttgtatcggttgagcgaacagtcttttacagggaaagggcggctcatatgtactcgccattgtcgtatgccttgggacaggtcgtaatcgaactcccatacatctttgttcagtccttaatatatggcgtgctggtgtatgctatgatcgggtttgaatggacagctgacacgttcttttggtaccttttctttacgtatttcaccctagcatactacacgttctaccgtatgatggt

SEQ ID NO: 155463 - DNA, 247 bp, Zea mays
  Clone ID: MRT4577_73365C.1
acgccaggcgctctattaacattgagaggcccaactactgcaacctgaatcgcctggagtctggggagatctcatgtattactgctcacctgacattcgatggtgccccaaatgaggatgcaaacaaagtatcagaccgaacctgttaccttacccgtgtatccacttaatgctgtattactacgcaccggagaggtcttatacggacgtcttacataagcaggagactgttgtggatatcaccacc

SEQ ID NO: 155464 - DNA, 320 bp, Zea mays
  Clone ID: MRT4577_73366C.1
cagcggccggcccgacgggctcgaatacagatcctatagagcggcgcgctatcaatcctttaaacactaacctgtttgacagatggagtagcccaactactaccacctatggtagcgtggatacgaggcaacaatgcgtgaatagcgcttagctttatgatactagcacgcatgctatgactataatggagaagcactatgaacgctgggctgcctcgagcaccctatacttgggaacactagctggactccaccggcttgagacagggtaggtctaccctactgatgagcgcgccttgcacggaatgcatcctaacacg

SEQ ID NO: 155465 - DNA, 120 bp, Zea mays
  Clone ID: MRT4577_73367C.1
cggcgcgtctccggcgtgctcagcaaggcgcccttcatcctgaaactcgcctgcgaccactaggtcgagaagagcaaggccgtgcgcgaggccatgtgcttcctcatggacccgcagctg

SEQ ID NO: 155466 - DNA, 397 bp, Zea mays
  Clone ID: MRT4577_73368C.1
aatgaactcaaagactaatcagtcagatgactcaccatttttctgtggcacttggtttccctagttttagcttagtacagtttcataagagctcgaacaaagtataacatatgaaaatattcagaggatctaggtttgcacaaagaaagtttgtgagctaaactgctgctaaatcctgcaacttttttagtacttcaattcgtaagggtcatacatagtatccatcatggtcactacttactcgatgtaaacgcctatggctccagtccaccttgtgctcccttgaatccttgatactcggaatcacgggtctctctgcctctggacgttaatttgttgtgtcgctctggagcgttaatcgattgtttgatgttcatcttcttgattatgctgacca

SEQ ID NO: 155467 - DNA, 485 bp, Zea mays
  Clone ID: MRT4577_73369C.1
aaaaaaaaaaaaaacatttcggtgggggaggaacttttaggaatccaattgaaaaatcaaccggttttagggggcccagggtacaacggaaacttcctaaagcccaacacaagggcctggggaattgtacatttacagacgtcctccgatacgaaaaccccaaacaggggggaattctagcggggccggccaacctttttttatgcctgacacaaaaaaaaattgggggggtaccctgcaaaaacaaactgtaataaaaaacgggcaaccggttcctttcctttccttttccttccccgaatccaatccatggggggggggggattaggcgaccgggggcatgtccttgacccaggcgttaagcggtttgccgttggagaaaacgaggaagccgatctccctcagttttttggagacgacgatgttgcggccgtcaaaaaccaaggcggtcttctgcatgttgtcaaaaatcttttggaagccca

SEQ ID NO: 155468 - DNA, 166 bp, Zea mays
  Clone ID: MRT4577_7336C.1
cggacgcgtgggaaaaaaaaaatgatgtgtttatactaggctccagcagacccatgcgggccgcagcattgactggtgcaaagatacatgccgctgcctgcgacaggcataattctttattaaggcaccaagaaaaaatggaacggccgggggtttacaaacaaaa

SEQ ID NO: 155469 - DNA, 401 bp, Zea mays
  Clone ID: MRT4577_73370C.1
tcgaccccgcgtccgcccaccggctccccgtgatctgggggacaccacggggagccggtgggatgccggagagctcgaacttcccaagcaggttgttgtcgcggtttctgggtcgtagcagctagcaggtaacagggaaatgtactctactccatgttgacgtgtttggagaaggccagcaaagcttttagttgcgttgggccttattcgagttgagcctagccatgaatgagttccacgctctctcctcttcctctatagcacgtacaggcccacacttgttagcccacaacgcgtgctactgctgcagcaacaaggcagcagacgaaatgacgaattcatttgtttctgtatgcccgaatggtgtccatgaaatgagatcgctgcaagaatttgcactg

SEQ ID NO: 155470 - DNA, 1521 bp, Zea mays
  Clone ID: MRT4577_73371C.1
gaggacgtcgagaagctgctgcaggcgctgtccaaggaggaggaggccgtgcgggcgcgccttcgccgccgggcccgcgcctcccgccagtccgcgcacaacgtcctcgccctcgccgccgcgctcgagattgttgccgttggatacgccatcatgaccacgagatcgccggacatcagctggcagatgagggcagtcagggtgctacccatgttcttggttcctgctctagctgctctcatctactcgaccattacaaacctcacgaaaatgcttgacaacagagaccaacaaactcttgaaaagctacgaactgaaaggcaagccaagattgatgaattgaaggagagaacaaattactacactactcagcaacttatacagagatatgaccttgacccagctgcaaaggcggcagcggcaacagttttggcatcaaagttgggtgcggattctggactgagagtctttttgggagatgaaacaagcagggatgcagcaataggtagaagtaatgataacaatcttggaccaactactggacttaggcaaagaaaaggacacgtaaccaatggtgctggaagggcccaatcccttgagccatttgatggctccaatgtgtatgatggcagtgatgaaggccccagccctcctaatcagactgttgagcactttagaggtccatcgggtaatgatggggggtggcttgcacgagtagcagctctgcttgtaggagaggatccaacacagtgctacgctctaatctgtggcaactgccatatgcataacggtcttgcgaggaaagaggactttgccttcgtcacgtactactgccctcactgtaatgccctcaatggatcccggcaacatgatgaccatgaattggtacctgattctggcaaggagagtcctgattctcaatctggcggaatcattggccaagctggtgcaagccttgcaacctcaggtgctgcgagtcctgttgcaagcagcctaccaacccttgaagaactctctgcagaggaagattctggggagaaggcgagcagtgaccaacctgccaattgaactcatcatttcctgtatattgtgttctttgtggagtattgttttggatttgactctgggtatcgaaatttttgtacctaccatgtagtatatatggactaccatgcttcctgcatgattgtggtggtttttatcgtggcttccccccctagggtaccaggacaacgcccatttgctggcgtcttgtcgcaaccgaagggcttgaacagtgatgcatcaactcacaaattggatgtattgttctttgtttatggagtgtatagtatttgaaagactttaggcatcgttttcattttcattttaattataaccgagttctacgtttaccgatgcatgatgcatcaactcacaaagtgcctttgtttttcagttatctgtgtgggggggttgctgaagctcggaatgtgttggtggcatcacgtttagtgttgtgtgtttagtgcttgtgtcaaa

SEQ ID NO: 155471 - DNA, 325 bp, Zea mays
  Clone ID: MRT4577_73372C.1
gggaaacatgatgcttaaaattttggttttaggaagaggatccctcattgggtttataatgggcatcccattagattttccagacttttataacctttttagcagccatccctgtttagtttgttattaaaaaaaccaatgcaggggggttattctaaagagtttttttttggtttgaaattcaaaaattaaaatcagaaaactaaacctcctttgggctttagtattcttgggcaggggggcctttagggtgggccacatgagaccctgacctgaataggctgaattttatgaagacaacttaatgctccccaaaccatttttt

SEQ ID NO: 155472 - DNA, 872 bp, Zea mays
  Clone ID: MRT4577_73373C.1
cagttagctcacctcccccgccagttcccgtgagctcagcacccccatttgcaaaagtcccgaccgccacagttcaaaggacctgcaccaccaacttcgagaagatctccacctccactggtgaagcccccgccaccaccgccacttgtaagctctccaccactgccaccaatgacctccccacctccaccagccgtcccatcaccacctccacctgcaccatcatcacctccaccgtcggcacctgaggagttcatcttgccaccaatcatggcgcagcagtatgcgtcgccaccgccgcctctgttccaaggatactaagcggtgatcacagcgcgctctactgacgatgagagtaatcgcgacgagggaggccaggagaagcagtgacaagtcgatcgcaccatgcaatgctctagcgacctgaattgaatgctatcggataagcgcatgtacgtttgtgcgtaagggtataacagcataggtaatgtaacgagtgtgtgcacatgtaacatgatgaccgagaagagaaacatgcaaatggagaaggaattgtttctgcctttctaggattcttcttagcacaatgtgcaaaactttttcataatgtaagagagttctggcgtcaaaaaaaaaaaaaaaaaaaaaaaacaaaaaataaaaaaaaagaaaaaaaaaaaaataaaggacaaaataaaattattagtatgaaataatatttacataatatgaaaaatatgtcggggggggcgctttaaggggaacaacataaaaataaagtctgcattaaaagaatagacgccacaaacatacagaagatactcatggcattcgaagacaacacaaaaaaaaaaagggggggccccccaaaa

SEQ ID NO: 155473 - DNA, 989 bp, Zea mays
  Clone ID: MRT4577_73374C.1
aggtggtggtgagtttgcttgtggagtaggtggcgacctgtacggtggaggagccggtggtgagtttatttgagccggtggaggaggtgatttacagggtggtggtagtgagctgactggagcaggtggtggaggggattgcgccagaggaggtggtgagcttactggagccggtggtggtgattttataggtggtggtggtgagctgactggagcaggcggtggaggggattgcatcggaggaggaggtgagcttattggagctgatggaggaggtgagtttgcttgtggtgggggtggcgaccttatcggtggtggaggaggtgatgatttcgttagcggtggaggtgacctcaccggcgctggtggcggcggcgaacttaacagtggtgaaggaggtggtgatttcactgacgatggaggtgacctcaccggcaccggtggtggcggtgatttaatcatcggtggaggtgatggtggtgaaggagatttcaccgttggaggcggttcactcacatatgctggagatggaggtgattttactagtggtggtgagctaaccgaaaccggtggaggagggaatttggtaggtgggggaggcgagctaataggtgctggtgggggtggagatttcattgatggcggtggtgaactaatcggtgatggtggtggcggtggtggtgacctcaccggtactggtggcggcggcgaacttactggtggtggaggaggtgctgatttcactggcgctggaggtgaccttggtggcaacggcggtggagatttcacagatggaggtggtaaactcatagatactggaggtggaggcgattttagtagtggtggtggtgagctaaccggaaccggtggaggaggagatttgataagtgggggaggcgagctaataggtgctggtgctggtgcgggtgcgggtggagatttcgatttcactgatggaggcggcgacggctgtgggctcactggctgtg

SEQ ID NO: 155474 - DNA, 772 bp, Zea mays
  Clone ID: MRT4577_73375C.1
ctccaccggctcctgtgatttcaccatcacctccggtgaaaatcctcccaccaccggcaccagttagctcacctcccccgccaattcccgtgagctcagcacccccatttgcaaaatccccaccgccacagttcaaatcacctgcaccaccaacttcgagaagatctccacctccaccggtggtgcccccgccaccaccgccacttgtaagctctccaccactgccaccaatgacctccccacctccaccaacactggcgagctcaccgcctcctccagtgaggtcccctcctccaccggcgccaataaactctccacccccaccggtcaaatccccaccaccacctgctccagtgagctcgccacctcgaccagccgtcccatcaccacctccacccgcaccatcatcacctccaccgtcggcacctgaggagttcatcttgccaccaatcatggcgcagcagtatgcgtcgccaccgccgcctctgttccaaggatactaagcggtgatcacagcgcgctctactgacgatgagagtaatcgcgacgagggaggccaggagaagcagtgacaagtcgatcgcaccatgcaatgctctagcgacctgaattgaatgctatcggataagcgcatgtacgtttgtgcgtaagggtataacagcataggtaatgtaacgagtgtgtgcacatgtaacatgatgaccgagaagagaaacatgcaaatggagaaggaattgtttctgtcaaaaaaaaaaaaaaaaaatttgcggcc

SEQ ID NO: 155475 - DNA, 1466 bp, Zea mays
  Clone ID: MRT4577_73376C.1
gctccaacggtgaaatctccttcaccaccatcacctccaccgatgattaaatcaccgccaccaccggtgccggtgaggtcacctccatcgtcagtgaaatcaccgcctccttcaccactgttaagttcgccgccgccaccagcgcccgtgaggtcacctccaccgctaacgaaattatcacctcctccaccaccgataaggtcgccacccccaccacaagcaaactcacctcctccatcagctccaataagctcacctcctcctccgatgcaatcccctccaccgcctgctccagtcagctcaccaccaccacctataaaatcaccaccacctgtaaaatcacctcctccaccggctccagttagctcaccaccgcctcctgtgaaatactcttcaccacctactccagtcaactcaccgccaccacctgtaaaattacctcctccactagctccaatggtttcaccatcgtctcccatgaaatcccctccaccaacggcacccgtcagctcgccgccaccgcctgtaaaatcacctcctccaccggctcctgtgatttcaccatcacctccggtgaaaatccttccaccaccggcaccagttagctcacctcccccgccagttcccgtgagctcagcacccccatttgcaaaatccccaccgccacagttcaaatcacctgcaccaccaacttcgagaagatctccacctccaccggtgaagcccccgcaaccaccgacacttgtaagctctccaccattgccaccaatgaccacaccacctccaacaggagcggcaagctcatcgcctgctctctgaagttcccgtcctccaccggggatatgatcctcgtcatcttcatagctcaaatccccactgccgcctgcgtctcagtgtgctctgcagttaggatccttccccaaccgaccctgcgccgcctccacaccatatcacctccaccgtcggcacctgaggagttcatcttgccaccaatcatggcgcagcagtatgcgtcgccaccgccgcctcagttccaaggatactaagcggtgatcacagcgcgctctactgacgatgagagtaatcgcgacgagggaggccaggagaagcagtgacaagtcgatcgcaccatgcaatgctctagcgacctgaattgaatgctatcggataagcgcatgtacgtttgtgcgtaagggtataacagcataggtaatgtaacgagtgtgtgcacatgtaacatgatgaccgagaagagaaacatgcaaatggagaaggaattgtttctgcctttctaggatttttcgcaaaaaaaaaaaaaaaaaaggggcggccgtcaaaaaaaaaaatataaaaaaaaaacaaaatgatgctgaacggaaaaatccacaaaaagctcgaaaccaccgagaaaaacgccatcaccgaggcacaccattctaggaaagccggggggggcgcttttaagg

SEQ ID NO: 155476 - DNA, 614 bp, Zea mays
  Clone ID: MRT4577_73377C.1
cattgggtacctcgaggccggccggatagatgtctacgcgactataatcgactgctgcagtttatccgcactctgacaggggccacctccaaggtgagcccgctcctacactcgaccgacacgccgcagtccgaaccggcgactcgtcatgaacgcagctgccgcctccttcttgtcccctccgcgggaactgctcaaagtactcacactcttatccatgtcactgtagatcctgagaacaaatatcgtaccaactattgctgtgtgaccgcatccgctggatctcaccactaactgcgggaagatcagattctactgctagaataccgcacggacaagagaacgctgcggcactcatggatgcatactatatccgtggccactgagcgatcatcatggttgatgtaacactcaaggattacttactagaatgtgcctacgaagcatacggagctgtgcaggtgctgcgaaaacatccccattgtcctctgcatgcaataacgagtgatgtcgaacaacaggcaggacaaagccaagaaggctactttccgcaggaagaataatctgcagcactatgaaatgtctgacaagagcaactacgactttgagaaacc

SEQ ID NO: 155477 - DNA, 252 bp, Zea mays
  unsure (1)..(252): unsure at all n locations
  Clone ID: MRT4577_73378C.1
acaaccagggtctagtagccctagctggaaccctttagcctctatattaggtagcaactccggtacgtctggattaggcagtgactgtggcgcgagcgttatctgttcgagctaccagtaagtgtggggtccatgtcatgtcaggctgtctgggcgatttgacactctggattgctgtaactgngctaaatcatagcgatgtagtataagtaatgggtttcatgtaccgatggtatttagttgatgtttgga

SEQ ID NO: 155478 - DNA, 764 bp, Zea mays
  unsure (1)..(764): unsure at all n locations
  Clone ID: MRT4577_73379C.1
ggaatagcatgcagctgcanatatatgtacgccctttcttccggnntggtggcaattcatgtgaatgatcagtgttttcacaggagccatatcgtccataaagtacacgtcgtgattctcgacgatgtaagcgaacgggtcggcaagccacaccatgtcgacgtcgttgtacatgacgctgtacccgagctcaaggatctgcagcaggtgccgtggacggcgcgaggtgaagttgaagaacccctgagatccgaatttgtgggcggtctgggcatcgggcgcggggggcacgaggacggcgtgtcctggccaggcggcattgatgcggtcgagggtctcgtagtcctcggcgatgacgagcacctgatccgcgcggccggcgcgacggacgctgatgagccaattggagaggaaggggaggtacggtccggagacagcagcgaggagcacggtgccgtttcccgctgcggcagcgaaggcggcggcatcctggagggtgtaggaacgccacgaggacgaggacgaggtcgagcgcgctgctgggccccagggcacgaggagtgcaacgaacaggagaaccgcaaggagggagaagaggtaggggagtgtgaggagggggtgcgggcgtgatgcggcggtggaggcggttggggaggaaactgggagagagtcgcccgcggccggcggcttctggtgcggccgctggtggagcgacattgccaaacgctggagacgagtttcaggcttcccgggacccggccggc

SEQ ID NO: 155479 - DNA, 316 bp, Zea mays
  Clone ID: MRT4577_7337C.1
cagcaccatgataccaagccaccaacagggccgccacttggagggcacctcctcggacccttcttccgtcgccactctcaccgggctcagtgacgacgactcgacgcggacccacaccaccggaccgacgagacgccgcgaccagaagtggagcggacaacttacgcagggcatcctgccgagggcggacggggacgacctcaacgccgacggccctcgagggtacctcccggcggacgcagcttccgcgccggcagcatgcgggccagacagcagccgcgagccggccaatcagccgctgacacacatcctggag

SEQ ID NO: 155480 - DNA, 370 bp, Zea mays
  Clone ID: MRT4577_73380C.1
cttctgtttagcatacctgtatatataagaggttggatttcgcaccagaattgatggctgattctgtatccttcaggctcactctagatattgacattaacatctactttcctctctttctacaatgatctccttcgttgcccttctagctgccggagcagccttggcatcaccaattgagcgccaggccagtacagcaggcttgccgttgaagcgtgtttcgaatctcacgtcgccaaaaagtctcgttagtaaaggccaggctcgcctgaataaggtgaacggtgtggctgtcaaggccgtctccgatgtcagctctggttcagtcacgaatgaagacgttagctatgttgctccagtctcaattgga

SEQ ID NO: 155481 - DNA, 462 bp, Zea mays
  Clone ID: MRT4577_73381C.1
atccaggttcggccgccgagttggcgtaatacctacgtcctgcgtctggttgtattgatttgtgttgagagaatatgatctgatgtgtcctctaggggacccctgcccctccttatatatcctgaagggacagagttacaagcaaagtatcctatttggtacaaaatcttgtagccttgcggtgcacgccgaccagtcgtgcgccgcacgtcttcatcttgtgggccgagccacctctgatggtgcggcccatataagcccatgagggtataggggtttatacccccacagctagtccccgagcaccatgttttatgatgtaacacgccgtcttgagcttcttcgatcagtgaggcttgacgtcttcaataagcaggaaagtcgcccaaacagttgcaacggtattttgaccaactcaaaagacaggtgatcaacattgacatcgaagaaacaagttgttcg

SEQ ID NO: 155482 - DNA, 183 bp, Zea mays
  Clone ID: MRT4577_73382C.1
cttgcatatgatagggaagcacattagcatggctaagcaaaatgcttctggtctgcttgacgctgtacaattagaagagtggcagcacgctagcgccgggtccacataatcttgaagaattgttgattgcagctagcttttgattcctactcattgtctacctgagtacccccttttgcatgc

SEQ ID NO: 155483 - DNA, 291 bp, Zea mays
  Clone ID: MRT4577_73383C.1
agtagggccagatgccgtcgcagattggtgttctgctccgtgaccagcacggcatcccgcttgtcaagagcgtgactggtagcaagatcctccgcatcctcaaggcccatgggttggcgccggaaatcccggaggatctctacttcctaattaaaaaggccggggcaattaggaggaacctggagaggaccaggagggacagggactccaaattcagactaattcttgttgagagcaggatccaccgccttgcccgttactacaagcttcccaggaagttccaacccacct

SEQ ID NO: 155484 - DNA, 389 bp, Zea mays
  Clone ID: MRT4577_73384C.1
ttttttttttttttttttttttttttttttttttttttttttttttttttttttttttttttttttttttttttttttttttttttttctcacaaaaggggggggttttttttcccggaaaaccagggcccaaaaacccaagaccggtcccaacacccaaacaagggttcgtccccccccgggttttcgggagcccttgcccccccttatgtggcttggtccccggccggggcttttttaaaggggttgcgatttgagcatttccctgcccatttcgctcggggggggtggttttatccccccctgaatgcccacccgctcccctttgaacccgtccttggggctggggtacacgattttgtttttccccccttgtttttccggggccc

SEQ ID NO: 155485 - DNA, 324 bp, Zea mays
  Clone ID: MRT4577_73385C.1
cctaaaaaaaaaaaaaaaacaaaaaaaagcataaactaaaaataactgctgtaaaaacatgggtgatatcaacacttgtgtggtcctgttcttgactggaaattgttatgttctgctttcgtgcgaccctcgcctcggggggggggggggggggtgcgtcattttcggccttgtcgttgttgtctccctgctctcctcgtcctctgtggttgctgcttgccattgttctcgctggcctcctctcttctctgtcgggtggcttttgctcgtctccctttggtgtccgtgcctggctcttttgggggcgtcctccttcttcctttt

SEQ ID NO: 155486 - DNA, 463 bp, Zea mays
  unsure (1)..(463): unsure at all n locations
  Clone ID: MRT4577_73386C.1
cggacgcgtgggctggaatggttccagaccaaatggtcagaaggctgatgaacacttgttgggtgtggcaacatgttcaagcagctcctctggcacttcaaccttggatactccattggacacaaacagctgtcatcgcagcgcagcatccacagatcaagcaaagggcacagcaatatcctgcatggcaaggctactcagtgatgattcacggcatgggaatgattttgtcggaactccccctgctgcacaaaatatctcggaacccgatcatttgcatagatatcaaccttgtggattgacaaataatcctacctggaaagctgggaaacatgcatgtaaaagtattaagatgagaaccataaggtctgttggtcatgagggcaaggacaggacangagattctaataatgatcatggctgccagaaaacaaagacaggaaagcacgaagcagcaagagat

SEQ ID NO: 155487 - DNA, 367 bp, Zea mays
  Clone ID: MRT4577_73387C.1
tttgttaaaaaaatcccttgtacattggttaggaccataataggagtttaattaccaggatagccccacgcgtccggaaggctttcggctttcgctgcagcaacacagtggcttcggatataccacaactggtcattgctactcctttagcctcgtgttgctttcatagtttcttctacccacatttttagctgcggcgttttaccatgtacatcaagcttttttttacaaggaatggtcattcaataggaaaatctgagatcatggtcttgtatttgccctcaaaaaaaaaaaaaagataaaaaaaatctttttagatgttaaaaacacaagaaaagacattattgctagattaaaaaatctataa

SEQ ID NO: 155488 - DNA, 699 bp, Zea mays
  Clone ID: MRT4577_73388C.1
ccggccggggtgacgcccggccacgacgtggggtggcacgaacgtgcacaccgaactaccgaagttcggtgagcaatccaccgcgacccgagactccttcccgctaggtgtggccacagaagcacacaatggacgccagcgagcccccagagccatgcgttgagacctcggcgacagtgaacatgtggattggcgccagcgaccaacatccctctcccggtgattctctgctcgattggtggtggcgctctggcgtgctcgggaccatggccgagacttgggattcaaggtgctaggcctcagattttatatcccggatagaggtagtaacaaccgaggaaatcttggtgtggagttgttaagatcgcatcccggtttgttgtgatcgcgcggaggggatggagctgccatgtgggtcccataggctatgttagtggcaccaagcgtgaggctgtgggtgggacccccctgtcagcgcttgatgtggatagctggtgcgggatggtcagttgggccggggtgcatatttgcagagatgggccggcgggtgtgaacgggcccaaaagcgcaggttacgaagggtgcagggtgttctgcatgacagtatgtatttgctcattattatcaattcctctatattgtgaaaatctgaaagaacatggaacctgaaactgttgtctggtggctgattttcatttt

SEQ ID NO: 155489 - DNA, 241 bp, Zea mays
  Clone ID: MRT4577_73389C.1
gcaagcctctatagtgagtcgcattatggccccttggggtggtgttgcagcaggaaatgcaaattcatatcctgcctgcggaaaccaacaggttggcaacatgacccaggacgttctcgggagtgctccggtgcatggaaactcgattcacgacaacatcaccatggactggtatgcaacagatggtagtcccaataattgggataatcagcacagagacaatgacggcatggactctgga

SEQ ID NO: 155490 - DNA, 593 bp, Zea mays
  Clone ID: MRT4577_7338C.1
acgagctcgggacaaggcacctcacgagcccttctcatccacatcagatctagcgccgcctccttcatcccgctggccggcgagctcctcagcgcgggtgcggtgagtcgcctatcctctgctctcattttcctcctttatcccgctagccggcgagctcttaagagccaggcgcggtgagttcctttccactctgctctcttcttcccctctgctctcttccgcgtggtgagcccggcgcggcgagctcttcccccacaggctcgtgaccagcagacgcatcaggatcaggctccatggacaacagctctccgacccctttctgatgcctgatgcttggtgtagtcgtgtaggtgagagagggagagagccatgctacagccggccagcatcaaggaaaagttcttgtcaacttgtacagcagttcttattgtttagccatgtagctggtgcctggtgtagccgtgtcggtggtgtagcatcctttatttttttatcaaatctacgacatactcatccacaagctattgctattataaattaatctccttattagtgaacttagcatcagttcttaaaaaaaaaaaaaaaaa

SEQ ID NO: 155491 - DNA, 1387 bp, Zea mays
  unsure (1)..(1387): unsure at all n locations
  Clone ID: MRT4577_73390C.1
cctcgagggccggcnncggggttcgttgtgtcaacaggtggaggcaaaaaaaaaactggaacacgtgacgtggctgtcagcaagtagcagcttctgtcgcgtctccccctccctgaccgagcgatccagcgagagggagcgagtagcagccgcagccggaggagctcgccgaggccgccgaagacgaccatggggttctgggcgacgacgctcatcttcgtcctcgccggcgtcgccgcatccctcttcacgctcctctgctgcaaccgcgggccctccacaaacctgttccatttgaccttggtgactacagctgtaatttgttgctggatgatgtatgcaatcgtctaccttgctcagatgaagccattgatcaaccccattctgagcggagagtgagcgctgcatctgtattgaacagaacgaaagcgagacctgctgtaccattgttcagtccgtgaactttatattcattttggccccagagttagaatgttcctgatattgcactccagcttcttgggctgtaccccagctgggtcagctggacgtttagtattatactgaacttttcagtctccatggccttatatgcattggttctcttctaccacttgtttgctaaagagctggcacctcacaagcctcttgcaaagttcttgtgcatcaaagggattgtcttcttctctttctggcagggttttgcgctcgatgttttaacccaagcaggcgtgatcaaatcccaccatttctggctggacgtggagcacatccaggaggcgatccagaacgtcctggtgatccttgagatggtggtgttctccgtcatccagcagtacgcataccacgtcgccccctacagcggcgctgacagggccaagtttgagaagaagaacgaatgaaccaggtttccaaaaagaatgaaagaaggaaaaaaactctctgctttctggtcgctcggagatggagcaccagtatttcctcacggatggacgacatacacaagttcatcgagtctcgcgagtagcgtatttggtagcgagttgtcgcgctgtaaaattacactgtccttgcgcgctgaataattttgctggctttgtcgttttggttttttgaacgttgtcgccgaggctatatagccaggactgttcgtcttgtacgagcgcgcgctctctctctctctctctctctgcggacttggcgaatccttttatgaataaaagctactgtcctgttctacaaaaaaaaaaaaaaagcggcctgatgaaataaataaataaactgccatgatttttttggtgccactcttcacccgtgattagtgtatgcaattgcatgatatacgcagtaataacatttaaatatctatgtatcgatcatgtgtgtg

SEQ ID NO: 155492 - DNA, 348 bp, Zea mays
  Clone ID: MRT4577_73391C.1
atggctgtttctggccgcgcgataagatatggatgccccagattagacagtgacagtggcaacatacgtgagactgcgggtgggacccgcctgccagtgcatgttgtgggcggctggtgcgaggtgctcattgggccaggggtgcgcactcagtgggccgaggcggcatggagttggaccgccagtgtgggttttagcattttgggctttacagctatgacatgtacagtcaagttctcagcggaggcggcgatggcgtggcaggcagcacaggatgggcggtcagatcggcgtaagcaccaccgcccgagatcctcatccgacggcaggcatcgatttgacggttag

SEQ ID NO: 155493 - DNA, 238 bp, Zea mays
  unsure (1)..(238): unsure at all n locations
  Clone ID: MRT4577_73392C.1
catcttaatccgctaccatacataatatacatcccagttccttaataataaaatatgttaggtttaaccaaaactttctcccaccctatataaatcttttcaaaactttttaaaaaccaaaaaaaaaaaaaaaacccccctttaatccttaaataccggtctaacggaattacccgggacctaaataaaaatttttttttttttttnaaaaaaaaagaaaaaaaaaaaaangggggaa

SEQ ID NO: 155494 - DNA, 498 bp, Zea mays
  Clone ID: MRT4577_73393C.1
atatttttttttttttttttttttttttaaggggcctggttacatagcctgggcgacaacgttcaaaaaaccaaaacgacaaagccagcaaaattattcagcgcgcaagcacagtgtttttacagcgcgataactcgctaccaaatacgctactcgcgagactcgatgaacttgtgtatgtcgtccatccgtgaggaaatactggggctccatctccgagagaccagaaagcagagagtttttttcttctttcattccttttggaaacctggttcattcgttcttcttctcgaacttggccctgtcagcgccgttgtacggggcgacgtggtatgcgtactgctggatgacggagaacaccaccatttcaaggatcaccaggacgttctggatcgccttctggatgggctccacgtccagccagaaatggggggatttgatcacgcctgcttgggttaaaacattgagcgcaaaaccttgccagaaagagaagaagac

SEQ ID NO: 155495 - DNA, 676 bp, Zea mays
  Clone ID: MRT4577_73394C.1
attcttgttatgcattattgtgtctaggaataatctatgcatggctcgtatggtcgtgcgattataatatttgagatagcaattgaagtgacaggagagatctggattactatggcacctcatctcagggaattaaatattactcccttgttcttgattgggtgagatgggatcttgagagacaaccacgcatggaacagagatcagttccaactcaaaactcacggtctcttgttctaaaagaagatgatcacatcaatcaaatcctcctccccttggcacgtagcttgccatgctttgttgttgtctctagtaaagtgtgtaaaatagggaacccggcactgtttgatatcgtttttatagagaagtttaaaatatagaataagatagaatagaaaatctactggagatagcatgagctgatccctttgtttttctccaggaggcaacttgatgactcatcgatctgcatatggccatctgcaattctgcatgctgctggcactggaagaagggaagtttctgtagataagcagaagataccctcgatgcaaggagatagatacggtaaaatacatgcatcaacatgattccgtgtttgcgctagctctccatttgagtctgttttcctagcatacgttttggctgcgggacagttggagacacacaagacata

SEQ ID NO: 155496 - DNA, 2334 bp, Zea mays
  Clone ID: MRT4577_73395C.1
gccggccgggtccgggcgaggggccttttaaccccagcccggccctgcgagcgagaccaccccacccattcactcgcctgcgctccctcgccgccccacccacgcacgcgtgggcgatgggcgggcttttccggtcttcccgaccgagcgatccaggcgccggcctcccttccgtcgaatcatcctcataccccgcagcatctccacgccgccacacctcgtcgcgtcgcgtccgcgaggccaggtcacccgaccagggatctgaagactaccgaccccccactaccccggcccccggggagatcgtcactgcaattagtactgactccgccaaggcgggccgggactaacccgcgaggtcgacgcggattttcttctttataccgcgggcaggcggactgggcggctgacggagccgcggagggaaccgagtggccccggcgacgcgaggccgaggcgagctaatctgacggcggcagtgacgactccaacgaccaggcgcggaggctgcactgctccagcgaaggcaccatgtcattcatgtctccattcccggggatggatctaagtaaaatggatcccgggactctgaccctccttggggcagctggttgtgtaatgctgactatgcatttcactgtgcaattggtgtcacaacatctcttctattggaaaaaccccaaggagcagaaagccatacttattattgtgctgatggctccactatacgctatctcttccttcgtgggtcttcttgatatccagggtagcaagacatttttcacattcttagatgctgttaaagaatgctatgaggcactggtgattgctaagtttatggcattgatgtacagctacttgaatatatctatcagcaagaacatagtccctgatgaaatcaaagggagggtgcttcatcattccttccctgtttctcttttcctgccccgcaatgtccgattggagcacaagacattgaagcttctgaagtattggacctggcaatttgttattgttaggccagtatgttccattctgattattgcactccagcttcttgggctgtaccccagctgggtcagctggacgtttagtattatactgaacttttcagtctccatggccttatatgcattggttctcttctaccacttgtttgctaaagagctggcacctcacaagcctcttgcaaagttcttgtgcatcaaagggattgtcttcttctctttctggcagggttttgcgctcgatgttttaacccaagcaggcgtgatcaaatcccaccatttctggctggacgtggagcacatccaggaggcgatccagaacgtcctggtgatccttgagatggtggtgttctccgtcatccagcagtacgcataccacgtcgccccctacagcggggctgacagggccaagttcgagaagaagaacgaatgaaccaggtttccaaaaggaatgaaaggaaaaaaaaactctctgctttctggtctctcggagatggagcaccagttcatcgagtctcgcgagtagcgtatttggtagcgagttatcgcgctgtaaaattacactgtgcttgcgcgctgaataattttgctggctttgtcgttttggttttttgaacgttgtcgccgaggctatgtagccaggactgttcgtcttgtacgcgcgcgctctctctctctctctgcggactttgggaatccttttatatgaataaaagctacagtcctgttctacagaggaaaaaaaaaaaaagagggagcgagtagcagccgcagccggaggagctcgccgaggccgccgaagacgaccatggggttctgggcgacgacgctcatcttcgtcctcgccggcgtcgccgcatccctcttcacgctcctctgctgcaaccgcgggccctccacaaacctgttccatttgaccttggtgactacagctgtaatttgttgctggatgatgtatgcaatcgtctaccttgctcagatgaagccattgatcaaccccattctgagcggagagtgagcgctgcatctgtattgaacagaacgaaagcgagacctgctgtaccattgttcagtccgtgaactttatattcattttggccccacctgatgaaataaataaataaactgccatgatttttttggtgccactcttcacccgtgattagtgtatgcaattgcatgatatacgcagtaataacatataaatatctatgtatcgatgatgtgcttgaattggggtgtctcgtgcgcgttcccaactgaaaaaaaaaaaaaaaaaaggcccctagggcctaatagtatctacataaaaaaaaaaaaaaaaaag

SEQ ID NO: 155497 - DNA, 482 bp, Zea mays
  Clone ID: MRT4577_73396C.1
cttcgtcgcgattgccatgacatcaaggaggcggtcgccaccctccactcttgcgtggttcacaccccgccgtccttctcacatgggccgcatctggatgctgcctctaccggctatgctctgccgaccccagatgtgagggccaccatcattgctgaggtcatctacgcctctcctgatgccatgagcacgatgcctgtgcttccctctggatcctgcttctacgatatcatcgacattgctgtcaccgggaacgtcatggccctggcttgagttgaactccctgatggtactgttcagaaaacgcaagtgcagaacattcctggcacgacaataaaatatagccctgcctggcatgctgctcttgcgttgtcgctcccttctacttcattgtgtcactcgtacactgcaaatgtgcttaacctgtgcatctcatacccatgcttgatatcctgcatccagaacgcgtctttgaagctctg

SEQ ID NO: 155498 - DNA, 643 bp, Zea mays
  Clone ID: MRT4577_73397C.1
attgggtgcggcgctcgaggcgccggccgggacgatccagaagcacgcacgtgacgtggctgtcagcaagtagcagcttctgtcgcgtctccccctccctgaccgagcgatccagcgagagggagcgagtagcagccgcagccggaggagctcgccgaggccgccgaagacgaccatggggttctgggcgacgacgctcatcttcgtcctcgccggcgtcgccgcatccctcttcacgctcctctgctgcaaccgcgggccctccacaaacctgttccatttgaccttggtgactacagctgtaatttgttgctggatgatgtatgcaatcgtctaccttgctcagatgaagccattgatcaaccccattctgagcggagagtgagcgctgcatctgtattgaacagaacgaaagcgagacctgctgtaccattgttcagtccgtgaactttatattcattttggccccacctgatgaaataaataaataaactgccatgatttttttggtgccactcttcacccgtgattagtgtatgcaattgcatgatatacgcagtaataacatataaatatctatgtatcgatcatgtgcttgaaaaaaaaaaaaaaaaaaggcccctaaaaaaaaaaaaaaaaaagc

SEQ ID NO: 155499 - DNA, 259 bp, Zea mays
  Clone ID: MRT4577_73398C.1
gctcaagggaccctggtcgccccgccgtactatggccgctccgacggcatctccacgtccagaaccgatcaagggggtcaccaaggctaccgtcaagagaggttcggctacgcccattgcccatacgccttctgaccaacaggacaccggatcgagatcaggaacttgctgggctagaagaaggcaggaagggggacatgcttgatggcgagaccatggctgcgggccgaggaggccaagggtcagctcatgcttggcg

SEQ ID NO: 155500 - DNA, 361 bp, Zea mays
  Clone ID: MRT4577_73399C.1
cggaccacacccttccgaaaaaaaaaaaaaaaaaaataaaaaattattttttaaaaaaaaaaaaaaaaaaaaaaaaaagaaaaaatggggcggccgttgtgggggtccaaggtttccttccccttccttccgacgcattactttttttatagggcaccctaattcaatttaactgcccgccgtttaccaccgccgtgcctggaaaaccccggcctttcccaaacttattcgctttgcacaaattccccttttcgcaggctggcttattaccaaaaaggcccgacccattcgcctttccaaacatttccccacccttatgtggcaattggaccccccccttgtccggccctttaagcccggg

SEQ ID NO: 155501 - DNA, 351 bp, Zea mays
  Clone ID: MRT4577_7339C.1
agcgcttaagcttgtcagggttggggccggcgccgcgtctagcctcctcaagtcctccttcgcgggctcccggctcccggccgccacgcggaccacaccggcgtccctcgtggtggccaccgaccctcgcggagccggcgctttgtccatctgcgcgtacattatttgttgtggggggacccgccctaccacctgacgtccttccggctcacccccatcaaggagtacatcttgtaccgcgagatgacccgtccctacatgactgacatgatcacctactccgacacctacgtcgtcatcatgggcaccggctacacggggctatcctgcgcgtacgagctctccaaggac

SEQ ID NO: 155502 - DNA, 542 bp, Zea mays
  unsure (1)..(542): unsure at all n locations
  Clone ID: MRT4577_733C.1
ggtctgatgatattactcactggngaaaattgcaagaacaaacatgccacctgtgcaaatgactatgcaattgagagcattcattattcctgcaactatgcctacaaagatgtggagcaaggcattactctaggagatgattattttttcactagatacccgattgtggagaagagattagcacaggctggaatcagactggcgttgatacttaatcggatctttgatggggataaagcagatgatataccactacgagtacagtaacagttgtaatgaaaaagaagcatagctattacaaggattggtccattcctatacttcaataaatttagcatgaatttgtaatgatgaagcatagaatccagagaggttattcatttctctctgcgtttgtaattataaacctctttgttttatcattttaatttgtacaggtaggtgttacactagtaaactagtgctgctcctcgaagttaaactgcagttttatgtaattcttttcctcactagttggtgcctgaatatttggcttgtctgag

SEQ ID NO: 155503 - DNA, 633 bp, Zea mays
  Clone ID: MRT4577_73400C.1
atctgaatcacagtggcgcgccctcggcaagcgctccccctcgctcccctgcggcaatctcggcctcccccgcggcaagctcgccctccccccgcgaggcaatcttggcgtcctcgttggaatctccctcccccgtggcaagctcgccctcccccgtaatggcgtgccaatgcaatctattgccccgcggcgtccacatctcgcccccaccctcgcctgcccgcgatgcctcctcctccagtcgattcgccattcccgtggtgaatcagcctcggtggcacaccccgcctcgtcctcggtggcacaccccgcccccgtccttcgttgcccccaccaccagtggctcgcttctccacgccttcgccactctcaccgtcttcgaagggcgcgcgcccggtctgcgactgggacggccgtatgggaaactttcgctcgcgcctcacagggcagcacagaactatcaccttcggcttggaggggactaccccaccgtcgtccggggccttgtgcatggtgggcaccagaaccaggagcacatctccgaccacctctggctgtggagctgcagaaccgctccacacaggtctgggtctgcgccgcgggcatctacaccatctacgagctacgagcggg

SEQ ID NO: 155504 - DNA, 337 bp, Zea mays
  unsure (1)..(337): unsure at all n locations
  Clone ID: MRT4577_73401C.1
gcacgagttacaaggcagaggggggacacgaggagagttgcgctcctcaagtcacggcagcaggccctcacttgacttcaattctgcgcagaagagcagaagtctgcggcccctccgttcctccagctccagtcccagtcccagtcccagaccatgccttgcgccgccaccgagctcgtccatggcgagggaggcacggtcaaggtaggcacaacgggcaccatcggctcgctcatgacaagggagctggactccaccaaggtggcggcgccgcagagccgcggccgcgccgcggcgccccaccgctgaggcgcaangcggccggtctcggtccgtg

SEQ ID NO: 155505 - DNA, 241 bp, Zea mays
  Clone ID: MRT4577_73402C.1
acgacaacaacttaagaagaaggggcagggacacgaatggccgggaaattgaaagacaggttacaaccccaagcaggacgggagggtcggcacagggaaaaaaaccatgcgcacaaagcattggacggggcccccacagggaacgacaacaacggggggtcacgagtcaaacatagcacgcaccaggcaggggaggagaacttgggggagcaccaacacgggcattaggtgccaccgaaca

SEQ ID NO: 155506 - DNA, 1532 bp, Zea mays
  Clone ID: MRT4577_73403C.1
gctctgcgtcgtccagagcccctccctcgcctccgcccgccgcgcccccgccccggcgcgcgcgccgccgccggccaccccgccgctctgttggccagggggcgccgtggcgccccgcgggaaggccgcggcaggcgcgggcgcgtccgcagccgcgtccgcgaggaggatcgccgcgacgctgtggcgggcacatccgccgccgcgggagcccgggaaagcgcatcgacggttggagcctagcccaaggcatctgcatactcctgatcgttgcaattactacaaagcggtccttgagggcaggacaggaactaagcctcttggcaatggcatcattcgtgaggttggagcttattctccatcacccagaattgaaatggaagtagcaacaaaatgggaccgtcgttccctgaacaaatctggcggtgctgactacgatttctgtgatcgtcatgcagcagctgctgacgaagaaatctctcaactcaaagaagagcttaggcaggcccgcaaccggattcatgagcttgaagctgagagccgatctgctaagaagaagcttgaccacttggtgaagaatctcgctgaggaaaaggcttcctggaggagcagggagcatgataaggtccgaagcatcttagatgctgttaaaggggatctgagccgagagaggaagaatcgacaaagggccgaagccatgaactcggagttgatggatgagttctctgagctgaagtcactggcaaaacgatatcttcaagactatgaaaaggaaaagaaggccagggaactgatggaggaggtgtgcgatgagttagcgaaggagattgcggacgacaaagctgaggttgaagctttgaagaaagagtcgatgaaggtaagagatgaggtggaggaagaaaggaagatgctacagatggcagaggtttggcgtgaagagagggtacagatgaagcttgttgatgctaagctgacactggacagcaagtactcacagctgtgcgagcttcagactaacctggaggccttcctcagtttccaccgaagcagcagtgtagacaaggaaacaacgagagatggtgaaaggctcagggaagcaattagctcaatgaagctccacggcaaagagttctcgtacaaaccgccgcctccttcggaggacatctttgccgtgtttgaggaactcaggcagagagaagaagtcagtgagaaggaaattggacagtgcaatggagatactcctatgagccgtgcaacaaagatccatacagtgagccctgaaactgacatctttctggggaaaacagcaaagagatatcccactcgaccttgcgccagagacgaggatgatggtgacagtggatgggagaccgtcagccacgcagaggagcaaggctctagcaattcgcccgatgggagcgaaccatcgggaaacggtttctgtggaggaaacggcgcgtcagcaagtggaaccgactgggaagaagataactgtgagaagtgcagatcaagtagcggcatcaccggtatct

SEQ ID NO: 155507 - DNA, 162 bp, Zea mays
  Clone ID: MRT4577_73404C.1
agaacattccgtggaagttttcaccataaatatcttgccgtcaaaccagcagtgttcataccaatgtatatttttacatttttttcagaaaaatgtatatatttacttcgacaatccaatacataagctattcgccctttttaataccattgtgattatttt

SEQ ID NO: 155508 - DNA, 350 bp, Zea mays
  Clone ID: MRT4577_73405C.1
caaaccaaaacggaggaaaaccccgttttattttattaaaaaggggggtaaaagggcttgaaaagcccaaatacaaagggttcccacgggggccaaaaacccaaaaaactgaaacaattctttagacccccccccaaccccttaaaagatgatttttttggggggggggggccccaaggtaagaaagcccttttgcccctgccacttccaaaaaaaatttttcctcccctgctaacctaagagaaaaggccaaacttggggtccatccatcgaatacccatttgttttgaaccttccaaattgtccaagctcccaaggaaattaaagggggggggccttttccaagaaaa

SEQ ID NO: 155509 - DNA, 494 bp, Zea mays
  Clone ID: MRT4577_73406C.1
gtaccatacaggtctgaatcgcaaagatgacgcactatgctaattgacaagcggactacaagtgctgccccctaacgatgacaatcatggtgagcggctgatagttggactaagagacagagcgtgatatcgacctctatgcggatccatggggatcataatggacggcacagacagaattttatatgctgcagggatagaccctagcgggagctccatacaaagcatgtcaagatcactcctgctctagctgatcacatcaggctctacatatgccctggatctgatcagcaagagggcatgatcctaacaccaagcccttttaatactgtgtgcttgagcaagcgccaaatcatccatgtttgcgaatctttgcctagtctactagctcggagacttgcttttcctttggaatgaacgctatgcattcactcgggggtcctcagcacatgatggtgctgatgcttagtggcgttgattgttttactatcgat

SEQ ID NO: 155510 - DNA, 742 bp, Zea mays
  Clone ID: MRT4577_73407C.1
tgggtaccctcggagccggccgggagcgcaactctgcagggcttcggatcccacaccgaggaaaggagaagagagggtcggaataatggcggccgaggagggtgccgtgatcgcgtgccacaccaaggacgagttcgacgcccgcatggccaaggccaaggagcagggcaagctggtggtcatcgacttcatggccccctggtgcagtgggtgccagatgatggccccggtgtacgcggactgcgccagcaagtacccttccgcggtcttcctcgaggtcgacgtcgacgaactgctggaacggcgagacgctcgagagctttgctaccgtcgacgaggacgagctccgggacgccgtcaggaagtacgccgccgctggcactacgacggctcctgcctcggcgtccgcctaattcaggagatgtgatgtgtagcaaatagcgcgcgcgcaccagtcgtcaataaataaataaataaataaataaataaataaataaataaataaataaaggccaacgtacgacgacaaattagtggcgcgcgcggtagtagctagcagagtatgcgccgccactgtgtcgatctgcagtttggtcgtttaaaagtgattgtagtgtgtactatgttcagctcgatgatctcggagtcgctatatacgctcgctcccgtgctggacgggttatcgatctgatgaacaagaatacaataatatgtatggatacttgtgacggggttccgcgga

SEQ ID NO: 155511 - DNA, 845 bp, Zea mays
  Clone ID: MRT4577_73408C.1
ggtgacactatagaagagctatgacgtcgcatgcacgcgtacgtaagctcggaattcggctcgagctgcaagggccccgagagaaacctagctcagtggctcagtcagcatccgaagcttcggatcccacaccgaggaaattaaaggagaagagagggtcggaataatggcggccgaggagggtgcggtgatcgcgtgccacaccaaggacgagttcgacgcccgcatggccaaggccaaggaggagggcaagctggtggtcatcgacttcatggccccctggtgcagtgggtgccagatgatggccccggtgtacgcggactgcgccagcaagtacccttccgcggtcttcctcgaggtcgacgtcgacgaactgctggaagtcgcgaagatctacggcgtccatgtgatgccgaccttctgcttcatcaggaacggcgagacgctcgagagctttgctaccgtcgacgaggacgagctccggaacgccgtcaggaagtacgccgccgccgccgccggcactacgacggctcctgcctcggcgtccgcctaatccagagacgtgatcatgtgtagcaaacagcgcgcgcgtcaccagtcgtcaataaattaaataaataaataaataaataaaggccaacttacgacgacaaattagtgacgcgcgcggtagtagctagcagagtatgcgccgccactactgtgtcgatctgcagtttggtcgttcaagtgattgtattgtgtactatgttcagctcgatgatctgggagtcgctatatacgctcgctcccgtgctggacgggttatcgatctcatgaacgagaatacaataatatgtatggat

SEQ ID NO: 155512 - DNA, 777 bp, Zea mays
  Clone ID: MRT4577_73409C.1
agcgcattccctgaaggggccccgagagaaacctatctcagtggctcagtcagcatccgaagcttcggatcccacaccgaggaaattaaaggagaagagagggtcggaataatggcggccgaggagggtgcggtgatcgcgtgccataccaaggacgagttcgacgcccgcatggccaaggccaaggaggagggcaagctggtggtcatcgacttcatggccccctggtgcagtgggtgccagatgatggccccggtgtacgcggactgcgccagcaagtacccttccgcggtcttcctcgaggtcgacgtcgacgaactgctggaagtcgcgaagatctacggcgtccatgtgatgccgaccttctgcttcatcaggaacggcgagacgctcgagagctttgctaccgtcgacgaggacgagctccgggacgccgtcaggaagtacgccgccgctggcactacgacggctcctgcctcggcgtccgcctaattcaggagatgtgatgtgtagcaaatagcgcgcgcgcaccagtcgtcaataaataaataaataaataaataaataaataaataaataaataaataaataaaggccaacgtacgacgacaaattagtggcgcgcgcggtagtagctagcagagtatgcgccgccactgtgtcgatctgcagtttggtcgtttaagagtgattgtagtgtgtactatgttcagctcgatgatctcggagtcgctatatacgctcgctcccgtgctggacgggttatcgatctgatga

SEQ ID NO: 155513 - DNA, 459 bp, Zea mays
  Clone ID: MRT4577_7340C.1
aaattgtgaaggttagaactagttgtgagatattggaggaaaccaatgagagttagttgtgctcattgtcgttgatactgaaacaaagctgaatgcttcaatctagcttgcatgattgcattatatataagcaataagtgttgtgattcttcggttgttccatgatttgttggtagagttcaagaagacatgtttctgcttcgtatttagtttcttgaggaaaaaggcagctcggatcaaattatcggatttgaaaagtaaatttgtagtcaaatcaccatgtagctagtatataatgcaaagtataaattaattaataaaaatactttgcattcatgttgagttttgtttgttgcaatttatgcttgaaatagaaaatttaactcatctctaaattagacttgaattttcaatttaaaatagaaagcaaaaaaatagaaatataagctaatataatag

SEQ ID NO: 155514 - DNA, 808 bp, Zea mays
  Clone ID: MRT4577_73410C.1
cattgggaccctcgaggccggcccgggtgcccgtgacacattgctcgaccagcgcaaactctgcaagggcttcggatcccacaccgaggaaaggagaagagagcgagggtcggaataatggcggccgaggagggtgccgtgatcgcgtgccacaccaaggacgagttcgacgcccgcatggccaaggccaaggagcagggcaagctggtggtcatcgacttcatggccccctggtgcagtgggtgccagatgatggccccggtgtacgcggactgcgccagcaagtacccttccgcggtcttcctcgaggtcgacgtcgacgaactgctggaagtcgcgaagatctacggcgtcaatgtgatgccgaccttctgcttcatcaggaacggcgagacgctcgagagctttgctaccgtcgacgagggcgagctccgggacgccgtcaggaagtacgccgccgccgccgccggcactacgacggctcctgcctcggcgtccgcctaatccagagacgtgatcatgtgtagcaaacagcgcgcgcgtcaccagtcgtcaataaattaaataaataaataaataaataaataaataaaggccaacttacgacgacaaattagtgacgcgcgcggtagtagctagcagagtatgcgccgccactactgtgtcgatctgcaggtttggtcgttcaagtgattgtattgtgtactatgttcagctcgatgatctgggagtcgctatatacgctcgctcccgtgctggacggggtatcgatctgatgaacgagatacaataatatgtatggatactg

SEQ ID NO: 155515 - DNA, 349 bp, Zea mays
  unsure (1)..(349): unsure at all n locations
  Clone ID: MRT4577_73411C.1
ccgggccggaattaattgctgggccgacgtgcttacagtcggcggccgcccttncattgggggggctttttaaaaaaaggacagccaaatgcccccacaggggcagggaacaacacacgagctcacagaactgagagctaccgcaacccacagagagaacgaaacagcgacgccatccagacgacaagcagacagaacacgagccaagcctgacgcccacggagggaccttatcgccgcaacataaacgaataacaagcagcgcgccaactccaggaggacacgaaggcatacccggcgaagaagacagagatcaggcaggtaccttcatacacgcgctcaacgcatct

SEQ ID NO: 155516 - DNA, 492 bp, Zea mays
  Clone ID: MRT4577_73412C.1
cactagaaaagcggggcttcacaacctaggtataatttaaagcccatccaggcacagaaaccaaagggtctttattcacaacaagcaaaattgccctcgttcgtccaaggacaagggtttttaaaaatgacgaaactatgttataccagctggcatactaccaccggacccattactcggactaattatcacattattaaaatattggctataaacatagaacaaggaccatcaagcacctggctaactaactaagcacatccttgagtagcttgtacctgcatgggcattcggccaccctaagactgttcgatggcggatcaccttgccggtgcccttgatgaaccacattaagggcggtaacactgtctgctgcgggctacgagaagcttttccttacacatgacggaggtgatttttagattgctaacactgaaaagagccagtacttcttacgggatacaacaggttctctcgaggaccatgtgctca

SEQ ID NO: 155517 - DNA, 743 bp, Zea mays
  Clone ID: MRT4577_73413C.1
cccacgcgtccgcccacgcgtccgcccacgcgtccgcccacgcgtccgccagataccaaggcacggaggtccatgaccatagcagcaatgacatggctgtggtgatggggctccggcgagcaattcccattacccagccacatctcccgttgaattgagagttgttgaactacaacatgcgctcaaaaacctcttagccccttcccctgagcccgaacaacgccgagggcgtgatacattggcggcgacaacctctctttctctcactacctctgacctatctgcatgcatcaagcgggatgctcatgggtttcatcaggtgaccatggtttgagggcaatggatggaggggcctcgagttttatactcccagaccaggtggataaggatttaaccggtgatcgatctccgatgattgagggagggttaggtgcgattcggatcgagatcgacttcaggtagaggaaggtcctggcgggtggggcccaatagcagaggcgtgggtgacgcgtgtgagggcagtctgacgggcgggtctcgcctggctatgacacataacaacagtcgtctgatgctgagccaagctagcagcttaagtgggtcgcacggttgtatatatggcccattaggctcagggcagaggtgcgaggctgggccgagcggtgggggaatctgcccataggaacctttctttttttattttcttatcaattccttttggatttcaatcacaaatttcaatt

SEQ ID NO: 155518 - DNA, 955 bp, Zea mays
  Clone ID: MRT4577_73414C.1
gccggaaaaaaaaaaaaaaaaaaaaaaaaaaaaaaaaaaaaaattctctgcaggggctctgcatggtctcccgagagaaacctagctcagtggcctcgaggccggtcggattggggacctcgaggccggccgggagcgcaaactctgcaagggcttcggatcccacaccgaggaaaggagaagagagcgagggtcggaataatggcggccgaggagggtgccgtgatcgcgtgccacaccaaggacgagttcgacgcccgcatggccaaggccaaggagcagggcaagctggtggtcatcgacttcatggccccctggtgcagtgggtgccagatgatggccccggtgtacgcggactgcgccagcaagtacccttccgcggtcttcctcgaggtcgacgtggacgaactgctggaagtcgcgaagatctacggcgtccatgtgatgccgaccttctgcttcatcaggaacggcgagacgctcgagagctttgctaccgtcgacgaggacgagctccgggacgccgtcaggaagtacgccgccgctggcactacgacggctcctgcctcggcgtccgcctaattcaggagatgtgatgtgtagcaaatagcgcgcgcgcaccagtcgtcaataaataaataaataaataaataaataaataaataaaggccaacgtacgacgacaaattagtggcgcgcgcggtagtagctagcagagtatgcgccgccactgtgtcgatctgcagtttggtcgtttaaaagtgattgtagtgtgtactatgttcagctcgatgatctcggagtcgctatatacgctcgctcccgtgctggacgggttatcgatctgatgaacaagaatacaataatatgtatggatacttgtgacggggttccgcggaagaaaaaaaataaataccggctgattgggtacctgcaccaaaataaaatattttaa

SEQ ID NO: 155519 - DNA, 265 bp, Zea mays
  Clone ID: MRT4577_73415C.1
ggaccaagcatttgatgggtttttattttgcggaaatccataaatcattgccgttttctacattgtagggggggctcctgagatactaatcaaaggacaattgctgacaggttaccacattgatatccttaaatctacacctcaaaaagtttctaggggccaaacaaatgaaagacaatgctcgctggagcaagataaatttttaacaaaccactaaactgccaatggggattttttattcaaaccttccaagctttcatatctc

SEQ ID NO: 155520 - DNA, 272 bp, Zea mays
  unsure (1)..(272): unsure at all n locations
  Clone ID: MRT4577_73416C.1
ccttctttttttttttttgtgtngaccgaaccaaaacacatggggaccctacgaggtgaatgacagggacaccgccctttgcagggtagggacaagaatatatttccattcatatgacaaacatgaggcgcgactcatatgttgattcggccaatattggacaaatcagtgttgagagaatgagtatcattcacatttcgaagccttcttttgatggaccctcgcaatcgttggcaccacccaaagactgcatgcagttatctgtattaaca

SEQ ID NO: 155521 - DNA, 394 bp, Zea mays
  Clone ID: MRT4577_73417C.1
ggtcgagcgccacgcgtccggtcacggcgtacggatctcgcttttgcttatcttaggctacatggaaagccctcgcgggggttaaacgggagtggtggaggtgtttccatcatccattatattagtatgagtgggacacggacaaccatcacttcgctggggactcttcaagacaaaaacgaaacacacggtgttggtgcaggtcgaacaaatcgctcaagcgcttgagccctctcggcggagctcatgcaaccgtcttcgaatatccattcatcaatgtgcaggcaacgcaagcaacttatcgtgacaaaagtagtcaaacaacctccatgagtcgtgctggtctagacaaggcattatgtagtgctccctgatatggtaataaaaagaccta

SEQ ID NO: 155522 - DNA, 616 bp, Zea mays
  unsure (1)..(616): unsure at all n locations
  Clone ID: MRT4577_73418C.1
ttcccgggnngccactgccagcagtgtgcccaccgccannnctctgctctgctgctcgcgaacgcagagcacacnngcccggcccgcctgccacagtttgccatgnngcgaccactagccacgatgggcgctgcnntgaagccctccgccaagggccgtcggcgccgtgtcggcgcccgtccacnctagcagcggcatgcgtcttcgcttgnncgcgtccggnacgtgggcgaggcgcgcgcaagaaagggcttgtcgctgtccccgtgtcccccgcgtcgtcccaccgcttggnctgggcgncccttcctcnngcggcgcctgnngcgtcgnntcgccccgaccgctttgcgctgnngcggacccgtggcgnnngcggcggnaccgcccgnngcggcgtaccagggccgcggccccagcttgctgactcnngtcgtggtgggcgccccgccactcggnngtgggtgcctgtacaancattccctgcagtcccggcggctgtaacccagctttgaaccgcatggcgcagcagnccaggcccgtggctcgctcggctctggggccttcggcgcccgccgcccgccggccggggatgggcggcccccgccccggaagc

SEQ ID NO: 155523 - DNA, 268 bp, Zea mays
  unsure (1)..(268): unsure at all n locations
  Clone ID: MRT4577_73419C.1
gttcggaagtggtggatgtgatagactataaaaaagtgtttgcatgagacagaaatttttcccgaaaggggaggaattgggccattggggagaggagaatcactcacattatcacaattcagtaggtggcggtggcggccttcgaccagggacgggaggcctgcgcggcactgtggctttctggcggtggaagcaggtggtggctgccggctcggcactgnggtggcccgggngttgngccgnccgtcggcggggggccggtctgccc

SEQ ID NO: 155524 - DNA, 693 bp, Zea mays
  Clone ID: MRT4577_7341C.1
cccctctattgccgccgccgccgctcccagctcgcgctccctcgcccagccgccgccgccgccgcctcgtcggagttcttcccacccctttcgccaacatgggtaagacacgtggtatgggagctgggcgcaagctcaagacccaccgcaggaaccagaggtgggctgacaaggcatacaagaagagccacttgggtaacgagtggaagaaacccttcgccgggtcatctcacgccaagggcattgttttggagaagattggtattgaggccaagcagcctaactctgccatccgtaagtgtgctcgtgtgcagcttgtgaagaacggaaagaagattgctgccttcgttcccaatgatggttgcctgaacttcatcgaggagaatgacgaggtgctgattgctggattcggtcgtaagggacatgctgtgggagatattcccggtgtccggttcaaggtcgtcaaggtgtctggtgtgtctctgcttgccctcttcaaagagaagaaggagaagcccaggtcttagattgccgttgcatggagtagacagtatgtcgggcctttagatgttgaaggaggagggtggttcctttgtgtttacagcacttttaagttgataacttatgatcgtgttggtgaaaactatgcctttgtcacattttgctcctgttaagggaaagtgctactgttag

SEQ ID NO: 155525 - DNA, 507 bp, Zea mays
  Clone ID: MRT4577_73420C.1
aaaaaaaaaaaaaaaaaaaaaaaaaaaaaaaaaaaaaaaaaaaaaaaaaaaaaaaaaaaaaaaaaaataaaaaataaaaaaaaaaccaaataaaagaaaaaataataaaaattttttttcttgcgtccggacccctttaaggggaattttttggttttttcttcccctttttttaaggttgaattttttttttttggggccccattttcccttttagggactttttttacattgccttgcccccttttttaaaacttgggttttggaaaacttttgcctttccccaatttatcgcctttgggcacatccctcttttttcccattttttttttaccaaaaaggcccccttttttccccttttcaaaaattttcaaaccctgagtgggaattggcccccccttatagggcccctttaattgcgggggggttggggcttcccccttggtttatttttccttttttaggggccttatcccccggttttttcgtttttttcctttctttttt

SEQ ID NO: 155526 - DNA, 555 bp, Zea mays
  unsure (1)..(555): unsure at all n locations
  Clone ID: MRT4577_73421C.1
cagacncccccatttcccacgaacagcgggagaaagaagaggcggcggaggacgacaccangggcggccaccaccagcaaggccacggccaccgcgccggagccgacgacggcgccgagcacgcgcccgacagcaacgacacggagagcgacgacagcaaacagccggcgacggcggacgacaaaaacggaggcagcagaacaggcgccgacgagcacaccacgccgccgcacaccagcggcacggacgaccaacaggggcccacggacaaggacccccccgggccagcacggcaccacgacgcgccgcgcccgccggcggaggacgccccgcacaagcacgagccgcccgccgacgcgagccacgacagccagggcaccagcggcgcgcccggagaaggggcggcggcgaagcacacgccgaaccccccggcgacacacacgccgaccgcccgccagggggagggcccgccccgcccccgcaggaagggcaggcccaaggccggccgacgacgccgacgggcacgacaaagaccaagaacacggccagaacccc

SEQ ID NO: 155527 - DNA, 342 bp, Zea mays
  Clone ID: MRT4577_73422C.1
gggcatcggctgctccggattcccttttcaccacttcttttcaacccaaaaacccccggggggggccaagctaccacctggccccggccacgccatggggtagaccaaccttgccacgctggcgtcgcagcttcgcttccccggtccgcttgcgccgccgggccgaattttcttccgttggcggccggattttcttcttcaatgggccacccaaggtggatcgcaatggaaggtggccgtgacctgcaacgcgcacgcgcgggcgcccaccacatttgcgcacgggacacccgtgcgcgcgacaagcatactgggggtaggcgccacacggacactctggag

SEQ ID NO: 155528 - DNA, 279 bp, Zea mays
  Clone ID: MRT4577_73423C.1
gggggggcgacccacacgggcacaaaaatggaaccgaacatagatttactatacgaccaccattacacaaaagggcgtgtacaaaaattatttggtcctgccaaacaaccccacactgacaccatgtaccaaggatcacagtcaaaacaacaacatcgacaagacacagcacaaactataccaccaacaataggatcacctcgtcacgacgcacctccagaaataccccaacctcatgcggtagctgcaacaacagccctcacacatcttaacaaggac

SEQ ID NO: 155529 - DNA, 284 bp, Zea mays
  Clone ID: MRT4577_73425C.1
gcgccacccgtcctctagataagaaaatggaggaagatgatatgtgcctgtggcactgaccggacacattatgctcacaagccctcttctaatcttaaaaggctaatcaggaaacggattcctgattgtctcgagagacatagatagtaaataaatctaaacagggcgatacctcttgacaaagctcgcataggctggcccagctccagctatttctaagccatgcgctttactagagaccgtttgacccgtctactggatgggtccgccagaagcagtgctat

SEQ ID NO: 155530 - DNA, 152 bp, Zea mays
  unsure (1)..(152): unsure at all n locations
  Clone ID: MRT4577_73426C.1
attaantnaanntatacgctttaattactgcacaggggctttaatcataatcaagtagccttttaaaaccccctctacttacaaagatcatattatatcctatacctttcctcatattcaactaacatactttatgacgcacattaaataac

SEQ ID NO: 155531 - DNA, 299 bp, Zea mays
  Clone ID: MRT4577_73427C.1
atgaagtatgatgttcacttatttgttattggttttttgtgcgaaaaagaccggagggcggaaaagggttcaccacgcacgtttaaaaaaagggtggattttaaaccccccaaggtttagggctaaaaattaaaacacagatttgtacggacacaaacacgggccacaggtaaatcacatggacagggggggcctccaagactagaacgggggcttaaatttcctgggggggggcccgaccttggggaacacgagggggaacttggtctcactggcgggaaaacgcttgggggtgcccc

SEQ ID NO: 155532 - DNA, 894 bp, Zea mays
  Clone ID: MRT4577_73428C.1
cctcgaggccggccgggaactaataccgccccagtcctcgtttccttacttctctctctctttccttatttccttgtttccttgagtctttccttcgtctcgtctcagtctggtactcggcgtcccgtcctatcctctttctaatcgataattcgacttttctttcgtccctctttactctgtgcttgacgcacagtgacgcctggatagcgtccttctttcacgaatacattggtgtcactcgactactcatttactgcaacggctttactacaaacgactaccacgatcactgtcatacatgccctttctcaacaacctaccgatcatgcctaaagaggcacgacccaccatgtcatactctacagcatcaacgaccgctccttaccctcaacctaacaccgcatctcaacgcaacgctgcaatctggtctacatctgacgatgagatccttctacgtgcccgtgcatcgggcctcaactggcagcctatcgccagtaggaactttcccaacaagacggcaaatgcctgccgcaaacgccatgagcgattgattgagcgccgacacgtcgacgactgggacaaccagaagctcgaactgctcgctcaggagtaccttgcctgcagaaaagaaatgtgggagatccttgcagctcgtctcggcgaacgctggaatgtcgttgaagcaaaatgtatggaaaaaggcgtcaagctcctccaaaccaccgctcgcactgcgcagcgcaaagcctcggccgaccaccacgcccaggcctattgcgtcgaagaccgaggtatttcagaccacaacagcgactccggcattggggctgtggttcggttccgagcctgatatggaggccacagacgaaattagcgacaaactttccgtct

SEQ ID NO: 155533 - DNA, 548 bp, Zea mays
  unsure (1)..(548): unsure at all n locations
  Clone ID: MRT4577_73429C.1
ctggtaacaccttaaatgctaatactcactcctgcaacaatacnagcactcgagttaagaataataggcctacaagcaaaaccttaccggccgctggcacaccggcagaactgaccagacctagcctgtctggaccatatcagcatataaaattgggctctccacccactcctggagctaaaacaacagaccctagtcttgtacgggccagcttgtcaagatccacatttactctgaaaaacatagggaacttgcaacacctgatgacgtagctgcactggttgctcatgatgcatgagcatactgaaacagcattgcttccacctacaacctccaatctaggcctccagaaaactggctagaacaggatggttcgactgttaaaatcaaccatcatgagaaccttgcacactacaatgaagtactatgatgccctaactcattagatttttatttctgactcctaggagcgacgcttacttgtagataattcacattctctttgtcaagctcattatgctttattgcgattggtaacgaatggcact

SEQ ID NO: 155534 - DNA, 200 bp, Zea mays
  Clone ID: MRT4577_7342C.1
agatatatgttttcggtttgttgtcgttccgagctgagtatagagcttctcgttaccatgttattcactgttttttgtcttgaatatctccttggaccagaatgtttgaactgcggacaccctcatgctatcggtgtttcccaggtggttgcacgctcacgattgaggcggcctttattccagcaacaaggccgaaatcg

SEQ ID NO: 155535 - DNA, 1264 bp, Zea mays
  unsure (1)..(1264): unsure at all n locations
  Clone ID: MRT4577_73430C.1
gcgccacctagggtttctacggagggggagaaatcaggaaggaggagagcgacgataaagctcgtgggtagctaacggtgtgagctcaagtaccatctccaaagtgtccccagcggctaatgggtagatcatgtccataccgacgtttgcggcatttggccgttgtcaacgtctccaaagtgtcaaagtcgttccctacgtcatttcgggtcgtcaaaatcgagcactgtcgtgttcttatccggtcccgaacaaacaaccccgcttctgccggccgttttgcaggaggcgttgcggccatggcggcttcgaagcccatcttgtatagcgcgtggatcagctcctgctccttccgagtccggatcgccctcaacctcaaaggtgtggattatgagtacagggctgtgacaaggaacgatctagattacgaaaagatcaatccaatcaagtatgttccagcattggttgatggggattttgttgtttctgactccctggcaatcatattgtatcttgaagataaatatcctcaacaccctcttttgcctcaagatctcaaaaagaaagctataaatctgcagattgcaaatatagtttgttcaagcattcaacctcttcaatgttatgctgtaattggtctgcttgatggcaccttaggctctaaccagagccttcagattgttcggaattacaccgacaagggatttaaagcaatcgaaaaacttctggaaggttgtgacagtaaatatgctactggagacgaagtccaactggcagatgtgtttcttgcgccccagatgtatgcaggcgtgacgcgcttcggaattgatatgtcaaagtaccctcttctggagaggttctacaaagcctatatggagatcccagcatttcaagtcgcggttcctgaaaaacagccggatgcgcctgcgtccccatactgaaacggaggcagcaaccatattgatattcaaattgatttggttatcttggaatcatgttgtatgtagcatgacatagaaggccacgatgtatgcctatttgtttcgtacacattctggtttgtccgaagaatttcacagtaaataaggcccgatgatttgtgtagtagtgttaatagaaaaaagaaacagaatgcatggctcctgttgtactacatatgctaaaaaaatctgcgatgccaaatgcaaatgactcctcgttggacagagatgaggcaccgaccaattcaaattaattcatatcaaaactgtaagctgnnnnaaaa

SEQ ID NO: 155536 - DNA, 250 bp, Zea mays
  unsure (1)..(250): unsure at all n locations
  Clone ID: MRT4577_73431C.1
aagaaaaacggttgtgggaaaaaacttctttcgggccgnanncaacgaaaaaacttaaaaattctgaaatgttaccaaaaaggcaagttgaacatgtcaaaacccaaaagtacctccctccagaagatgataacccttacattaataaactttactgctcacttcaaaattattaaattttttacctcaatattgagtaccctccttgtggtgacatgatgactttactcattcacaaggacatacttac

SEQ ID NO: 155537 - DNA, 453 bp, Zea mays
  Clone ID: MRT4577_73432C.1
tcgctcttttgtcaccatcaatcatcttagtggagtcaactctcatgctccagttattttatcatttatgtttctagtaatctgaaactaactatgttggagatcaccttctagattgaagatgagttgctgctgctttgcaatttcacctacttaagctcactttgcaatccctgcttggacatgtatggtgttttttctgctgatagcgttgcatgttgcctaaatataatacacatttgaatgatcttaaagttgaactatattaaacatttagattatatcttttatttgatgcgcatttgcagcgaattcgagttgcagcataccacaccctcacattgatgataatgagctatgttcagtctgtctagaaaggtcttgctctggtgctgctgaaggttgcagacatgaattctgcatcaaatgtgctctatacctctgctcaccagt

SEQ ID NO: 155538 - DNA, 1328 bp, Zea mays
  Clone ID: MRT4577_73433C.1
tggcccactatgcaaattataggcgcattgtggtcccagaaggcacggcggtggcatgattttatcatcctgacttgttcgcagtcccccctcactcgagataacaccgcggtggcacaactgatcaggagctgcttctcgtctttcctggggcctttggttgatgggcgctcctgctccgtagcaaacagaggagttgcgaatctgctggggcagagttctgatgaaaaagcacacaggcttgctgtagctccagggtttctctacatgagatcctgccggttatttccaaacaacacctttgtttgtgaagagatcttggaggtggtcattgagagagcccatgcgctagcaaatgaccgcagttctgacagacctgcccgtttgaggtcagagtgtttgccgctatcagctgcgtcatccttggtagagcagatagcatcacttgcagcgactatgctttgccacgctggcggggtgaatctgattcgtctcctctacgagcagatcatgcccaccctgctgctttcaggtggagaagctaagctcggttccggtggtatggtatgcagcataatcgaaggatacacgctagcgtacgttctcctcttctcgggcgcaaccgtctggggagtcggagaaacgtcgccagcttacactttaatatacacatccaaaagacaacgggtcctcgacaggcacctggagttcatggccagggtgatggagggtaacattgtgctgggctgtggagatgccacgtggaggtcctacgttctgtgtttcgtcaacttgctggtcagcttcgtgcccgcgtgggtccctgaagtgaagctaaatacgctgcagaaactggcatctgggcttcggagatggcacgagggcgatcttgccctctctttgcttgagctagggggatccaagaccgtgacttcagtagttgaatctcttctgcggtgagctggtgctcaactgactgtatagttttctacgacaggttggtccatatacacattataacatgttaatgatctgaaaattcagtcatcagaaagatgaacagtacagttctaccgaagcttgattattcgtattgtcagtcagctaaagagatggccagcagtttctatagtagttacatgatgatagtgtgtaattgatggaaatgtcatttactggcagttgtccatttggagtgtataaaaatcatggaataattggaagaattcagtattagaaaacagcattgcggggccggggagccaggcgtccgttaaatcggatgacccgtgcggatgtgccgtcagccttgttgcttccatttggct

SEQ ID NO: 155539 - DNA, 441 bp, Zea mays
  Clone ID: MRT4577_73434C.1
cgggggtcccccccggtggttgggtttttcccctccaaaaaaaaaggtttcaggggggttcccaaaaagggggtggtgggggttttttaaaccttttttcttagggggggacatgggcccccccgggccgaaatttttggggggccaaaatttgcaaagataagggtggggtttggctgaaatttttttcccgggtggggggggaaaatagccgtgaccggggggttttggggtttttaaggggggagccaaccctttgggccccctttttcccagggggttggggtttcaaacccgcttttttttttaattcgtgtggtgccccctttttggggtgtaccaatttttccgaaaccgggggggggtactggggggttgggggtttttaatccggtcgggggggggagtgcaacaatttttccgctctttgggggggccctt

SEQ ID NO: 155540 - DNA, 231 bp, Zea mays
  Clone ID: MRT4577_73435C.1
ggcttacttgattgctaaggaccacaacattaagtatgtcttgatatcatccttgattttaacaacatcatgagatacatagtatatcttaatgttttggtacttagcgcttaattcatctacagagcgtactgtatttccatcatcaaggccaataactgctccaagtctaattacatctagagcgtcgatgtcatacttgatctcgagcgtgctattgttatcacattc

SEQ ID NO: 155541 - DNA, 142 bp, Zea mays
  Clone ID: MRT4577_73436C.1
gggatgtgatgtgtatctcttcttcgcttgcagagagtagctaagcaaacgaagaagggatgtgatgtgtatctcttaggctagactgcttcagctagttttctgtgactgctacatgaatccatggattactgatttaaaa

SEQ ID NO: 155542 - DNA, 543 bp, Zea mays
  Clone ID: MRT4577_73437C.1
cccggccaacaggtttctaataaaaatcgaaaaaagggcccttttagggggcaaacctccgtggggaccaaacggggttggggaagggcacccatgaggacaagcgacaaaggattgggggcatcgtggtctggggcagggcatgaccccggaaatatccgaccaggggggggggcatgacccatcagttcatgcggaaaaaagaaggggggccaaccgccggggggaaccatggggggataaaggcattactggggaggggggggcggggcacttgcctttttgggggtaacagcaacagcaaaagcagttgttgaccatggctatgtcgcatgcccgcccggtattcgggccgaaaacgccggggcccccgggcgggggctaccaaaacggccgccgggtcgcccccgccaccggggctgggggccacccccgccccgggctccggaggacccccgggcgcggggggcctaatccaacccggggggcagggggtcccccaccccgggccggggttgggccggccgtgctcaggcccccggg

SEQ ID NO: 155543 - DNA, 198 bp, Zea mays
  Clone ID: MRT4577_73438C.1
cgattctgttacgatccaattctttgatagacacactgggattgaagaagtacaactagcgcatgcaacatatagccttctgtcacagctgatggttcccccatgcttgggatcaccatacaaaaagatggggctgctcatcacacagaactggctcaggcatgtctgattcgaccaatctgtacacgtggactcctg

SEQ ID NO: 155544 - DNA, 777 bp, Zea mays
  Clone ID: MRT4577_73439C.1
accgtgcgcataaaggaagtgatgtcataccttcccatcatattatttggcatctacatgagctggatttacctgcgttacttccaaaggagattagaagtaggccttaaaggggacccaagtgatgaattctcgttttcaagcttcttccctggatttttaaggcctattttggatcctattgcttctgtattccacaaacttttctgtgggcgacctgcaagacctgaaggcacaggccagacattggatgggtcacagttccctggttcaggctccactgaggcaaacaggaggagagaaaggggccagaaggcactggagcagagactggcagagaagctggctgcggtcaggaaggcggagggcacgcctccgccgaagcagcagcaggaggaggaggaggacgcggagaatgatgcttctgataaagtctgagcgactgagcccctcttgttttcagctggtggaattcgctgccaggagatcctatccttgtgtcaattttttccttgtatatttgcgcgtgccgccgcgtgagcgagacccgcagtatagtggagttgagtagcctcatggcatggcgattgtgatcaaaagaatgcagccgtgcaagaaggcaaattcgacactcatgctcgaacaaattcttgcaggatagcgagtattttttttctttttctttttaactttgcatgagcactgcatatcatttaaggagagggggaaacaagttcaatacatggttaagttataaaaaaaaaaaaaaaagcggcc

SEQ ID NO: 155545 - DNA, 337 bp, Zea mays
  unsure (1)..(337): unsure at all n locations
  Clone ID: MRT4577_7343C.1
cattgatgagctcgaagagttagaaagcacacaccttaataacgaattggatgaagcagcaagctcaggcctcgacaggagtgtattggacgatgcagcttctggagaccttgaatatatgtagatcagagcttccatttggtttttttttgtgcctgcttaaccaaagcggtctagagcaaattgaactggtaacatactctctgttctgatttgacatcctagaacccgtgtcgtcatacttccnaaaaaaaaaaaaaaaaaaaaaaaaaaaaaaaaaaaaaaaaaaaaattaaaaaaaaaataaaaaaataaattaaaaattaaaaataatttg

SEQ ID NO: 155546 - DNA, 101 bp, Zea mays
  Clone ID: MRT4577_73440C.1
atacgcgccctgtatccggccactaagcgctgtaacattggtgaacacgggctgattaaccgccacactttccatctcccgatcaaccgacattctcgcta

SEQ ID NO: 155547 - DNA, 236 bp, Zea mays
  Clone ID: MRT4577_73441C.1
atatttttttttttttttttttttttaattgggggttttttaatatttttgcggttcacaaaccacaaacctttatttaaaaaacactttctatataatacctcttccagcaaattgaactagagaaacacctgtactttacttcataataaaaaattatcgcaggacacatatgttacatttatacaactttttgctgcccaaaattaattctcaccccaaaataaagggatttt

SEQ ID NO: 155548 - DNA, 1159 bp, Zea mays
  Clone ID: MRT4577_73442C.1
gggtacctcgaggccggccgggctgatctgctttgtggcgcctatgcgcccgcagcaaccaacgaggcaacggatcgagttcctctccgaactccaactctgcgccgcaatccactcaagaaggttagccctcgtggtctcggatttggataatcctccgccgaggtatgaaacaggaggcggccaccagcatagtggtgacccaggaggacgtcctgcaccactacaaggagcctccaccccgccgcgaggacgatccgccagcactggctgcgtcgctgtcgttgccgtcgtcactgtcggaggacgatggcgacgccatgccgcagccatcttcatacgcggtcttgccgcgccgggaaggcgagctggtgtctgcggaggagctgctgctggtgccgccgctcaacttcgccatggtggaccacggcgtgtaccgctccggattcccggacgcctccaacttgccgtttcttgagacgctccgactccgctccgtcctgtgcctgtgcccggagccatacccggaggctaatctggagttcctccgtgcccacgggatcaagctcttccagttcggaatcgacggctccaagttttggacttttgatactgaaataacaggaaccatttgtgaacataccagaagatagaatccgtgaagctctagaagtcatcctagatgcaagcaaccatccggttcttattcactgcaagcgaggaaagcatcgaaccggctgtgtggttggatgctttaggaaattgcaacgctggtgtctaacttcaatatttgacgaataccagcgttttgctgctgccaaaacaagagtttctgacctacggttcatggagctatttgatgtatcgagcataaagcatttagcatttgagtcgtctgtatgatagtaacattggtgcatgataacaactcaatactggttccattacggtgtcatctttttcatttaagaaaaaaaatcatttctaaaaaaaaaaaaaaaaaaaaaaaaaaaaaaaaaaaaaaaaaaaaaaaaaaaaaaaaaataaaaaaaaagcaaaaaaaaaaaaaaagaaaaaaaaatacttagagaaaaacaacataaaagtacattaatgtgtagttattgggggggcccacacattttggacatgaaaaccc

SEQ ID NO: 155549 - DNA, 326 bp, Zea mays
  Clone ID: MRT4577_73443C.1
ctcaaacagaagataaaccggggagggggggattaaacaaacagacccccccacccccaaacatagaaacggaataaccgtggaaagcggacgacgccacatagtgacccaaaactgaagcctacagaacatagagagaactcactcgaagggcaaggaactcatgtcaaagacagtgaggcgtaaagcggaccaggcatgatctacacgaacaaagacttgccagcaagctcaagaaaggaaaaagggcacgggccaaaagaacaggaacacccaaggaggagccggggtggcacaaaatttgaacactgggactaaaaaaaaga

SEQ ID NO: 155550 - DNA, 2234 bp, Zea mays
  Clone ID: MRT4577_73444C.1
gccggccgggctccgatcatccccggtgcggcgcagcggttcctgcctcgtgcacgtctgtataaaccgacggagcgggcgcccgaggccgaggagggaggaaggcagccagtcagccagaggagcctagagccagtcccgtcccgtccatcagccgccacaccacaaacacccaccactctgctctcgcccgcttgctttctctcccccgctccagcttatggcggaggcggcgccagcagccggcggcggcatcggggacatcctcgccacgagcgatcgggacttcctcgtccgcaactccggcgagcaggtgaagatcagcagcgttgaggcgagccctgtggccatctacttctccgcctcatggtgcccgccatgcaggaggttcacgcccaagcttattgaagtatacgaaaaactggcctcacagggcaagagcttcgaggtcgtctttgcttcggccgatcgcaatgaggaagctttcaatgaatactttgcaaagatgccatggttggctgtccctttttctgacagtgaaggccgtgaggcccttgatggccggttcaaggtctctggtatcccacaccttgtcatccttgatgcaaaaactggtgaagtttacactgaagatggtgttgaattcgtgagtgagtatggcgtggaggcttaccctttcacaccagatcggatcaatgaactgaaggaacaggaaaaggcagaaaaggagaatcaaactattcaaagcgtgcttggcacatctactcgagactatctcatttcaaacaagggagacaaggtacccatctctgagcttgaggggaagtatgttggtctttgctttgtggtggatggctttccaccactcgctgaattcactgaggtgcttgctaagatctatgagaaactcaaagaagtgggagagaaatttgaagttgtagctgtatccttggacagtgaagagtcatcatttaatgagagttttgcaaagatgccttggcttgcaattcctcaaggtgacattaagtgtcagacgctggttcgttactttgagcttagttctcttccaacactagttctgattggccctgatgggaagacactgaacaacaatgtcgccgacataattgacgaccatggttttgaggcatgggagggcttccccttcagtgctgagaagctggaaattcttgctgagaaggcaaagattaaagctgcatcacagaccttggagtccattctaatcagtggtcatttagactttgtcattggaaaagatggtgcaaaggttcctgtatcagaacttgttgggaagactgtccttgtttacttctcagcaaaatggtgcccaccatgccgtgccttcctgcccacacttgtcaaggagtacaacaagatcaaagagaagaacagtgattttgagatcgtcttcatctctagtgacgaggatcagagctcattcgatgattttttctctgaaatgccatggcttgctgtaccctgggaagatgaaaggaaagcatcgctgaagaaaaccttcaagatccgtggaatcccttcacttgtcgccatcggacctactgggcagacagtcagcagggacgcaaagtcccagctgatgatccacggtgctgatgctttcccattcaccgaggagagacttgaggagctacagaagaagctggatgagatggcgaaggggtggcctcagaagctgaagcatgagctgcatgacgagcacgaacttgtcctgctgcgccgtggtacgtaccgctgtgatggttgtgacgagatgggcagcagctggtcctacaggtgcgacgagtgtgactttgacctgcaccccaagtgcgcgttgggtgaggaaaagatgagtgaggaagcccctgctgggtatgtgtgcgagggaggcgtgtgcaggaaggcctaatctgaatgctgtgaaggatgacaataatcgtgagatggctgtgctttgatgtgaggtttttcggccgttgatgtttgtgtgttaataaatagtagttgcaggagcatatgtgtgtatgcaaaactatgtgagtattgtgtcagatcaaagtaatggttttgctgcatggtatttctggtcttaatcatatgatgttgttggcgttttttgatcttattgtgttaataaatagtagttgcaggagcatatgtgtgtatgcaaaactatgtgagtattgtgtcagatcaaagtaatggttttgctg

SEQ ID NO: 155551 - DNA, 342 bp, Zea mays
  Clone ID: MRT4577_73445C.1
cccacagcgtccgaaaaaacaaacatggattaataaaaaagacaacaaaaaaaacagattagggaaacaccaaactgtcgggcggcggcgccacataacgaccgcatcgtggcccggttcgggttcggattgggcggcaaggcgaagcctgcttcgaagaaggtggacaacacatcgaccttctatgaccgtccgatgcggttccccgtcgccgtgttgcccgactacctgtacggctcgctcgtcggagactacaagttcgacccgttcggtcttaggaagcccgtggagtacctgaagttcgagttgaactctctgtaacagaacctttccaagaatgat

SEQ ID NO: 155552 - DNA, 432 bp, Zea mays
  Clone ID: MRT4577_73446C.1
attcggctcgagcccaggtccacctatctctgttttagaatcggcggcggcggcggcagcggggggctccttcccttgtcaaaatgcacccggccgcagagcacgccctcgttgctgaggagggcagatggcaggcttgaccaatatgccgatgaggccggcgcggtcagacccgcccatgccgcaccggtgccctccatcgatggcccgccttcgcccaaaaccaatggaccgtaagaagacctgcactctgctgctcagggttctcacaggggttgctggacaccaccaaatttaacagttttctgtgagagggaaagaaccaaaggatgaagcacagatttacacatggaacgatgccactctccgagagcttactgatcttgcgaaaaaggttgctcttccaacaaggaaacggaacgcgaggctttc

SEQ ID NO: 155553 - DNA, 323 bp, Zea mays
  Clone ID: MRT4577_73447C.1
cctttctttttttttttttggtcaggcaggaggaatatatactaataaggagatccaaaacacacatttgcctgtgtctagacagcgaaaactactagctaggcatatccaaatatctatttgccctagcccataggccaaaactgcttgaagtagccggtgggcgcagacgcggcgaacatcactccatgtaaacgcgcatgcagtactaatcagcattagagacatgtaaaaagatacttacacggatacgatgatagagctctgccttgcatggagagaggtgttgaccttgatactaaggggaagaggccaacaacagg

SEQ ID NO: 155554 - DNA, 377 bp, Zea mays
  Clone ID: MRT4577_73448C.1
cgcgacgcttcgggaaacccgcaatccaacagtacgccgtccatcaacggtcacatcaaaaacccccgcggaaccacttcgagcgagggcagcgtctccgccatctagcgacgtcttcggcaccaggtgactttgtcgaactggtccctcggagggcaaatgttggggcgaaggcaaagacgccacccttcgctcgaggccttcgctgcagccgctggtccgacagagacaaagcgggcagggacacccttcgcaggactcggcactttgacgaaggcctgcggcgacgtcctccttcggcgcgtcctcgttcagtcccaaggcccacgtgcgatctggcccattgtaacgggccccgcgtggccgcctctgtatta

SEQ ID NO: 155555 - DNA, 314 bp, Zea mays
  unsure (1)..(314): unsure at all n locations
  Clone ID: MRT4577_73449C.1
tttnnnnnnnnnnnaggcgggaggaggggggggcccgccgaaaccaagcaagcccggcaggagacaancgcaccaaccccccggagggggcgaccacaaacacacgggggacggagacgcagacggacgcccccaccagggccaaggcaccagccgaacacagagcaagcaaagccgggggcgaggaaaaacacggcaccaaccacacggggggacgcacagcggaacggaaccggcaagaccacgcaccccagacacacacgcaggaagaacgcgacagggaagcacgaaaacgacaaaccggcagacgacga

SEQ ID NO: 155556 - DNA, 263 bp, Zea mays
  Clone ID: MRT4577_7344C.1
attttagcttcaagtaaacatataatgcatgctatttttttcagccgactttgaatttaaagcgacttatactctccagtttgcggcgcatctattataaacaaacaaattctacatctatattcttatgccacatcatcttctacttatcaactacgagactactttcaccccacacttttctgtattatttggctatcacactaataatagttattttgtaaagacatattcagatctttacagccaacgcacacaagaac

SEQ ID NO: 155557 - DNA, 332 bp, Zea mays
  Clone ID: MRT4577_73450C.1
gaccatgaagacggggtggtgctgcacgccaagactccaccagcggagacttcaccactgctctccgacctgcttgactgccctctcctcgtcctccccgagatgcagccacgcgccaagtcattaaccaaagaccagctgctgatcaaggggggggggactccaatcatgctccccatcatactccccctccacctcatgcacactgtgcgccccctctacctccccccacctcctctccaaacacgtgcgcatcgtcctcatgcccctccacctgggggccatcaccactcacatcgaatcctctgacaccgccgcacacgccatgctac

SEQ ID NO: 155558 - DNA, 314 bp, Zea mays
  Clone ID: MRT4577_73451C.1
cctgtggcgcaacacatgtgtgagggtagcatacacacacccttgaccatgtttccacggtcatgctcgatccccctggagactgtaagcgtccttgcacccttgtacaactaccaccggttcctaaagtccatacatggtttcttggcttgcgacccaccggcgacgaacaggaactcacccggcaccagcacgacttcttacaccatgcctacgaggaggcccccagtaccatgaaggcattgatcccggtgagccggttgactggggcacactagccggtacaagcaacacggaacagtctaaacgatcct

SEQ ID NO: 155559 - DNA, 255 bp, Zea mays
  Clone ID: MRT4577_73452C.1
attctgtggacggttgtgtctgacggccataacatacaaaacacatagagtggtccggaaatgactggtccaaaacacgaggcgtgcgtctatacgcacacacggacgactagagacaacagcttgccaggtttattcatacacaatctaggcattttgtttaccgaactgaagcacgcctctcaagtagcttccgccgtgggaaagcgcataagaactccagactcgcgcattaagctgcttccacagtcggct

SEQ ID NO: 155560 - DNA, 780 bp, Zea mays
  unsure (1)..(780): unsure at all n locations
  Clone ID: MRT4577_73453C.1
cagtctaacagaattcatcacttgtatttaatttaccagccactagctaccaccgacggcttgcaattgcatgttacagagagcaacctcccaaaccttttcgatgctatcaaaaatcatgctacgaacaagaaggaacgccaaacgagcgagcgagcaatgaattacaaagatctacgctgctagtcgccgctagctagcagagggcggcgccggcgccggcgcggcgtgcacttgccaccacgagcacgacgggggcagggacagcagctagaagcgccctcgcgtggcgcctgctgtccgtcgaccttccgccggtggtctcagtcgtagacgctgagcatggcgtggcggacgtactcgtcgacgccgccccggctcccgctgtggctccaggcggcgccgcgcgccagggcgccgttgagccacgcggcttgcgcggcgagcacgccgtacaggacggcgagggcctccggcaggtggcgcgcgagcggcagccggaggctgagcggcgccgacaggttgaacgcctgcatgaggcccctcgccgccacgaacgccagcaggtggaaccccatcctatcgtcttgccgatcgaggaagatgccggatccagcaacggccgcccgtggctatatatcgtcgccccctctgcttgttggctgcagcgggaaatgttgcccggtcccgcgtgcacttgttctgccgacgggccaatcccagcttgaggccggacgcgtgggcccttcacccgcccggccgngcctcgaggtacccaat

SEQ ID NO: 155561 - DNA, 368 bp, Zea mays
  Clone ID: MRT4577_73454C.1
tttttttttttttttttttttttttttttttgggttcaaaacaactctccatataattatttttttcaaacttttttgtacaatttggtttgttgttttaatttcattacattttttttccttattattttggggcttttggggggggaacaaaaaaacgcccaaaaaagggttggtttgaacacttttaattcttcaaaggaacggggcccgaggcaccacccggccagtttatggcaggagcgcatctccggtttaaggggcaaaacagacggatctctcggggggggggaccgcccgcccctttccaaaaagcaactacgaggggtttaaccgccgcaacttaaagatacgcctcttggagctgg

SEQ ID NO: 155562 - DNA, 1486 bp, Zea mays
  Clone ID: MRT4577_73455C.1
actccatagggcgattgggatcggcgactcgggccggcgaggccggccggggtacacccgctcttccaagttaggaggggagcacccatcagccaagagctatccatacgcacagcgatgcaccagcacgagatactagccatcatgcgcctgtcgtccctcctcctcgtcgtggccgccctctcggcgcgcgccgcggcgcagcaggtgccgccggtgggcggcagcgctctgaagccggactactacagccagtcgtgcccgcgcgcggagcggatcatcgcggaggtgatgcagacgaagcagatggcgaacccgacgacggccgcgggcatgctgcgcgtcttcttccacgactgcttcgtcaccgggtgcgacgcgtcggtgctgatcgcgtccacccagttccagaagtcggagcacgacgcggagatcaaccactcgctccccggggacgccttcgacgccgtggtgcgcgccaagctggccctggagctggagtgccccggggtggtgtcctgcgccgacatcctcgcgctggcgtcgggggtgctggtcaccatgaccggcgggccccggtacccgatcccgctggggcgcaaggactcgctgtcgtcgtcgcccacggcgcccgacgtcgagctgccgcacgccaacttcaccgtggaccgcctcatccagatgttcggcgccaaggggttcacggtgcaggagctggtggcgctgtccggcgcccacacgctgggcttctcccactgcaaggagttcgccgaccgcctctacaacttccgcagccagggcgggaagccggagcagttcgaccccagcatgaacccgtcctacgccagggggctgcaggacgtgtgcagggactacctcaaggaccccaccatcgccgcgttcaacgacatcatgacgcccggcaagttcgacaacatgtacttcgtcaacctcgagcgcggcctcggcctgctcagcaccgacgaggagctgtggacggacccacgcaccaagcccctggtgcagctctatgcatccaaccccacagccttcttcgacgacttcggccgcgccatggagaagctcagcttgttcggcgtcaagaccggcgccgacggcgaggtcaggcggcgctgcgacgcctacaacagcggccccgccgtcgccgccaccatgcccaagatgtgacgacgctgcgcgtggtacgacgacgggcgcgcacgtgcttgtctgcatgcggatcgatcgacggccgagctgtctggcacgacgacggcgtgttgatcgagggcctcggctcctcctgcgacggtcacgatggtgttaagatttcgtgccgaaatgtgatatgtttcatgctcgatcaagtaatttattcctaatctgtgtgctgcgcaaaagaaagaaaaacttcgaagtgttgcgctactcgctagtatgaattaattcgtttttccctttgatcaaaaaaaaaaaaaaagcggcc

SEQ ID NO: 155563 - DNA, 134 bp, Zea mays
  Clone ID: MRT4577_73456C.1
tatttcacacccaacgtgcaacctaggcgaagtccgactccgcctccgctccttccaactcgctctgtaatctgcatcagcctcgaacgctgtcgtagctgccatggggagtggaaagttcaacgggaagccca

SEQ ID NO: 155564 - DNA, 808 bp, Zea mays
  Clone ID: MRT4577_73457C.1
actcctatgggcgattgggaccctcgaggccggccgggaggaggggaacccatcagccaagagctacgcaaacgcacagcgatgcacaagcacgagataccagccaccatgcgcctgtccctcctcctcgtcgtcgtggccgccctctcggcgcgcaccgcggcgcagctgccgctggcgggcggcggcggcggcgccctgaagccggacttctatagccagtcgtgcccgcgcgcggagcggatcattgcggaggtgttgcagacgaagcagatggcgaacccgacgacggccgcgggcctgctccgcgtcttcttccacgactgcttcgtcagcgggtgcgacgcgtcggtgctgatcgcgtccacccagttccagaagtcggagcacgacgcggagatcaaccactccctccccggggacgccttcgacgccgtggtgcgcgccaagctggccctggagctggagtgccccggggtggtgtcctgcgccgacatcctcgcactggcgtcgggcgtgctgattaccatgaccggcgggccccggtacccggttccgctggggcgcagggactcgctgtcgtcgtcgcccacggcgcccgacgtggagctgccgcacgccaacttcaccgtggaccgcctcatccagatgttcggcgccaaggggttcacggtgcaggagctggtggcgctgtccggcgcccacacgctgggcttctcccactgcaaggagttcgccgaccgcctctacacttccgcaaccagggcggaaagccggagcagttcgaccccagcatgaacccgtccta

SEQ ID NO: 155565 - DNA, 261 bp, Zea mays
  Clone ID: MRT4577_73458C.1
cccacgcgtccgtctctctcgcgctctctctctttcatcgccaccatcgcggtgaaatccgcacgcgtgcttcctgtcgattttttagctgtaactgtgagcgccatggccgtggaggctgagtccggtaaatgtcaccgaagcagtgtccgctgctccggctaaggaatgtatcaccaagcagtcatctttcctgtgaggagggcaacttcctggacgatttcaagagagctagcgtaagcagctgccgatctccgcgac

SEQ ID NO: 155566 - DNA, 300 bp, Zea mays
  Clone ID: MRT4577_73459C.1
catgtggactcccccgggcctgcaggaaattcggcacgagggcgcagtccacgccacgccgcacggcaggccgacggaatagtaccgtgccgttggcggcacgcacagcaagcagttcaggccggccttcccctcgcggctctgtccgttataatccgcacgaccgcacgcacggtgcagaagtaaggggtgggaccaccggacgacgatgcggggctcctcaggcgcgcgcatgagcgcgcaggacgcggcggaggcgattaaggtctcgtgagagggcgggtacgacctggcggggga

SEQ ID NO: 155567 - DNA, 229 bp, Zea mays
  Clone ID: MRT4577_7345C.1
ccggtgtcgtgtgatagatgtaccaacaatatatcaatcttttcgtttttaacaccggcacacaaaaacagggataagggttctttttatccagcgactaccactccacaccactgtaaatgttatcaaaactacctgaacaatggcataaatatgcagactgtaaacttttatctctaatggcaagtaaagttcaatatttgcgaataaaaaaaaataaaatgtctgt

SEQ ID NO: 155568 - DNA, 388 bp, Zea mays
  Clone ID: MRT4577_73460C.1
gatgtgcatgctcctgagtgtggcacttgacgactccaacatcatgcctggtgctgggcggattaccaacagcttcagacggctgacacatgataagttcatgggcgaaggtcgactcttgggggaactggtcgtgtctacatgcgagcttgttgagaggcgccacatacggtccatctaaagcgctagcataacggtgagcattgtgtgtcaagtgccgatgttcgtgctgatcgcagtctctgacttcttgtgagacatcgcacagctggagaacgactacagtgtggccaacgccgagatcaacaggatatgcaaggtcgtgatccttcagtcgatcatggttgggtacgacgttaactatataatgaggacgattgagaacttc

SEQ ID NO: 155569 - DNA, 382 bp, Zea mays
  Clone ID: MRT4577_73461C.1
ccaaaatctaggcaaagttgttggaaataatagggataaaatttctacctttttggaacaacacagcaaataaatctcagtcattgttcgttttaaatatttgtttttgcattgcatctaaacaaattttatgtcttttttaattgtttgaagttactttgaattcacattttagaaagcattttttaaaaagttgcattcttaaataattgtattttttgttttaatacaattctgtttcaatctaatcatattttgtacaaatttaactaaattaatttgaaaatatgtaaaacgaaatcatgttcgtttgtattagaatctcaagcgtcaaattgtcgctttgattttcaacacgaaattgtaagtttatcattatttt

SEQ ID NO: 155570 - DNA, 295 bp, Zea mays
  Clone ID: MRT4577_73462C.1
gcccccggaattgttccggtttttcaaaattttttttaatttgagaagcaatttggtttggaatttttccggccccccaattcgttacaaacaaacaagggctaaagtggtttataagccccccaaagtcaacgattcccttttggcaagccgggatgagttgtcccggtgaaccccccccccccatgaggggatcaattaaccttcgtttcacaacccattggatcggacgtacctttgccggggcaagcagaaaggtgttttccccggagacaattggggcgggggccttttt

SEQ ID NO: 155571 - DNA, 356 bp, Zea mays
  Clone ID: MRT4577_73463C.1
gggggaaaactgaagttcttttttttaaaacaaagggtgcctagctgcgactagggaaatccacagtttccaatcttgtagggctacatctaaccaagacaggggggagccagcagttgaattagcggggtcctagttatttggcacgggaatatataccccctcggcactgggcacaagttttttatgtggaactagggaagaaaaggcgaaaatgcgtttgccgttcgggttttgcacaagaagaatttattggggaccgaccttgtcaccatcaaattcacatgccgttggaagtcttggagaattggttcaaagcccttatgatggcatggggctcgagctgacccgttggg

SEQ ID NO: 155572 - DNA, 385 bp, Zea mays
  Clone ID: MRT4577_73464C.1
gttctataactttaggttttgtttataacaaaacaatttttgtgcttaaccagttacgagtagataataaggagacgtcatcaaatatttttaaaaattcaaaccaggactacaaattgtgcttctaatttcggggcaaaggtgtgactaattactgttgacggatcaaacacaatgtttgcactattcttatggcaacattaagggtcacaatttgttgtaaaccttgaattctctttttttttttctgcaaagagaattgttaaaatatcttcctttggaagaacacaatacatatagtgatgtattttctgtaattctatatcttttaaaagggcctaattgttttatggtatttttgaatccttttaaaagattttttttt

SEQ ID NO: 155573 - DNA, 148 bp, Zea mays
  Clone ID: MRT4577_73465C.1
ctgcaaaattcccgaagtagaatcgcgcgcgaaagttgaacgattacaacctctaccattcacgagttgtatgatatctacaatcagataagaaaaatttatgtctccgtggcactggcggggaacaatcacaactctctttgcatgc

SEQ ID NO: 155574 - DNA, 648 bp, Zea mays
  Clone ID: MRT4577_73466C.1
tctttaaatattaatagagctcctgcagagatctgggggggggggggggggggggtgctgccacccgtgtatggagcggacacccgcccgctacactcggtggccccacggggggtaccacgggtccggggccgggcaacgaccactagaccacaagaaggtgttatctcgaggcatacagattacgccgagcacccagcaccggttggccctcacgcgttgttgagcccttaaaaagtccgactgtacctttggctgggagctacagctgcggggctgcccgtctaagttgtagccggatctgtgcgccaactaagagggtaccaactaatccgtaactacggggtagttgccgatgcgccagaactgtcccctccgtatgaacaaggtagaaagggccatccactctctgaaccggaatgttataaacacggtaatccctacctaggagtccgtggcaacagcttagagagagttacgcgcgactggtctccttaacaatacgatagtggttcccgcttctttcgtggacttattcgctggttcatcggccgtgcgaacgcaggaggccgacttttgagaacggactccagtagcaactcggaagtttcactagggagctacctccacgttactccggaaccccag

SEQ ID NO: 155575 - DNA, 133 bp, Zea mays
  Clone ID: MRT4577_73467C.1
gcacgaggcttactagtcttcaaacagttgatctctcagataacttgctgaacggcagcttaccgatggagctctcaaaacttgacagcctgcgtttcttcaatgtctctcacaattcgctgtcagggagcct

SEQ ID NO: 155576 - DNA, 228 bp, Zea mays
  Clone ID: MRT4577_73468C.1
ggaaaacgcctgcttgattaataatgtgctagaacaaccactggggggttaagaatttaaaataatcgattgagccaaccaagtaaaccacgcaatgtaccgcttaaaaaagcaagctcacattcccgctcaagcaagcataaaaacatctggacctggacttattcgagaaaagacttaaaaacacgacggggatcagagggggggcctactgaaaaaaatgcaggg

SEQ ID NO: 155577 - DNA, 388 bp, Zea mays
  Clone ID: MRT4577_73469C.1
gtcataggctccaaagggaccagtcatatagggttaggtgcataataaacctgatcctgtagtgctttggttattaattctctctttaataaccatgagtgtagttatgtaaaaaaatgtgtagtcttggttcataacttgtacccagtagttggtgaaatagatataataattttcagtgaaatggttaaccacctgaacatagctggttaagggcccgttcgcttctacaggaataaacccggattcgttccagctcatcaaaatctatataaattagagaagtaatccggctaggaatcaatccggagctccaatccctaaaaaccgaacaggccttaaccgagattcaagtgtttaatatggtttgtctagcgaatggaaaccg

SEQ ID NO: 155578 - DNA, 419 bp, Zea mays
  Clone ID: MRT4577_7346C.1
ctaaaaaaaaaaaagagcgacacaatgagggccaagaagagaaaaaaaaacaaaaaatagggcggacacaaaaaaggagagggagggaaaaaaaaaaacaaaaaagacagaggccaaaccaaaaaaaaagaaaaaaaaagaaaaagcaaaaccaaaaacccaaaccacaaaagaaaaaacaaaaaaagcagagcactcggcaaaagaaaaaaaaaatctgaaaaagcaaatttgtagagcccccgggtagcgtaaacaaaaaacctccgtttgcttttaggaggccttatagaaggaagggacaccctaatccgcatcaggttccggaccagcctaaccataaagggaacccggcattccgccggtgaatcggaccaacaacctcagcccccaacaatagtggaagtaccactccagcc

SEQ ID NO: 155579 - DNA, 236 bp, Zea mays
  unsure (1)..(236): unsure at all n locations
  Clone ID: MRT4577_73470C.1
ctactggctcangagtgttcatgggagtcccggccgacgccgcaccccagaaccttggccggaaattttaaacccggttggcccgaggattttcgggttcttattggatcatcggtcttttggctttaatttcttttttggaccgtttggtttggaagggaccggccagggccagcagcagttgtttaccagaaaaaggaattcaggcagaaccaccgcgacacgccgttgcacct

SEQ ID NO: 155580 - DNA, 142 bp, Zea mays
  unsure (1)..(142): unsure at all n locations
  Clone ID: MRT4577_73471C.1
tcgttcatgttatgtagaggaattgttcaagtctgtttatctttcttgtnagaagggcacagcatattccttggttatggatatgtgtgttgggtaactgggcattcacgttttgtatctgtgggagcaaggtccatttttt

SEQ ID NO: 155581 - DNA, 568 bp, Zea mays
  Clone ID: MRT4577_73472C.1
aaacccccagccaaggtagatggcaatttagcaattccgcattttcttcagaagcgagggcgcagatgtcggtgaagaaattcaatttgtatgcctgcgtattaggtcatagtgtagttctccagcgccgttattttgttgtataagtcgtggtggtgggtgggtataccagagtcggttaggcgggcttgaaggtaaatataatctggttgggtatactggggaacctaaggtgggggctttggtggtaaatacattgtggggggtatactcctgtggtgttaagaaataagtaggctagtagttagtagaggaggggctggagaaattgtgtaatagtttcaactggttggagctaggtagtttagtggaggtcagttcttggcaatgtctttatttgatctttggtgatgtagataagagggtctgatctcggggtggtatatcatggaatctctgtttttttttgggtggtgatggtggtgttcaatgctattccatggattcgaactttcaattttattagctggtgtctaccagcacatgcctatgaattgtgattcaactt

SEQ ID NO: 155582 - DNA, 818 bp, Zea mays
  unsure (1)..(818): unsure at all n locations
  Clone ID: MRT4577_73473C.1
aacaacgattaacacaagagaagcaacttttctttttgagagggaggaacacaagagaagcactcaagacagaacgacacgagtagtactgatcagggaccgtccgtagtttcagtcccgctcccgcagtctggttcgtttctcttctcccccacctgtctccacaattccccataggaggagggggaggtagagaagcgcgaatggagagcaggaacgtagtggtgtgcgacaatggtaccgggtatgtgaagtgtggctttgctggtgagaacttccctacatctgtgttcccttgtgttgtcggacgaccgctacttcgctatgaggagtcacttcaggaacaagaattgacggatattgttgttggagcagcttgtgctgacttgagacatcaacttgatgtatcatatcctgttaccaatggcattgttcaaaattgggatgacatgggccatatctgggatcatgccttctacagtgagctcaaggttgatccatctgagtgtaaaatcctactgacagatccaccactcaatcccgtgaaaaaccgagaaaaaatgatcgagacaatgttcgagaaatataactttgctggggtcttcatccagatccaagcagttctttcactgtatgctcaaggcttgctaactggacttgtgatagattctggtgatggtgttactcatgtggtgcctgtagttgatggatactcttatccacatctgacanagagaatgaatgtagctggaaggcatataacatcttatcttgntgacctactctcaggnagagggtatgcgaataaatctgctgac

SEQ ID NO: 155583 - DNA, 508 bp, Zea mays
  unsure (1)..(508): unsure at all n locations
  Clone ID: MRT4577_73474C.1
ggccggggcgcgtcatacggtcgatgcgcgcggcgttccggtccttcccggccatgcaggctccgacctgccgcggcatgccgtcgctgcaccacctcccgggcctgcagggctccggcgtccggagccacttccacggcgcgatgcatgccacggggactctgtacggccaccgccgggcgcgcatcaccatcgcgctgcacgagagccccggtagcccgccgtgcgtgctgctggatgtcggcgtgcccacggccaagttcatccaggacgtgagcgcggcggggatggtgcgcgtcacgctcgagtgcgagaagcagcaccatacggtggacgtgggggcgcggaggctgctcgatgagccggtctggacggccgaggtgaacggcgagagcgtcgggcacgcgtcgcggctggaggcgacagagcgggacgactgcgtgatgcggatgctccactccacgtncatgggcgccngcgtgctgccgtccgatcggacgcgtgggtc

SEQ ID NO: 155584 - DNA, 310 bp, Zea mays
  Clone ID: MRT4577_73475C.1
aacacaaggtcgagctaatcacacttaagcgagagaacaagcgcaaatgaactaacacagtgaaaattgagagcctacgcggggaacaccacacgaacaataaaactcgacgctgcaattattatgataaaacagagaaattacacagataatgaagattgcacatgaggggggactgtcaaaattagtgagacgaccaattaccaccggttcattagacctgaactttgctcacttggaagcggagaggggattcctctctccaggattgaaggcactccggtttgaacaagagtgaccctttctacga

SEQ ID NO: 155585 - DNA, 538 bp, Zea mays
  Clone ID: MRT4577_73476C.1
ccggccgggagcccaagccatcgtcgccccaccaccgtcgcggaggagaaacgaatttcgccgccgcggtcaaatcccaagtacgccgcatccaatccttcgaagggtggtcggggacatccgttgcatctccttggatgctcccatggctgcgtcggggggaaatcgactgttggggcgcccccgattgctcgtcgtcgttcaaatccggccactagccgccattcaccgcgtggcaccctctctccatctcctcctccggttttctgcaagggatggttgatggtttaacttagccctccaccctgccatcaggttggacggttgagtggaaggatgctacctctacaggagaggaccaggaggagtgatttggtcaggctttaccatgttattcttttaccctcgttagttatttctgctgcaaaaaactatggttactacttttaaactccgaatgatgtaatcactattggtatctttaaattatggtattatgttttattgtaacaaaaaaaaaaaaaaaaaatttgcggcc

SEQ ID NO: 155586 - DNA, 336 bp, Zea mays
  Clone ID: MRT4577_73477C.1
gttcaaaaggtaggcacatatcataatttcagatgacaaaaacaagcttccatctacagcaaaccacacagcgagctaggatatcgtttttaaaaccaaaccacctcacagcaaacccaaatgagtcctaagtagctgaaattgaacatcacttgaaaagttaacaaatctacagcacgccctgaggctccgaaactaaaacaccgaaataacggctaaaaaaacagcaacctatgtccagtaccccaaagacaagcaaaacatttattagaattacaagccaacagtcctaacaagcagaaaacataatactctcgactgattcaaacaaatttt

SEQ ID NO: 155587 - DNA, 327 bp, Zea mays
  Clone ID: MRT4577_73478C.1
aggacaccacatttgtgttttatccttcattactggcgatctttgagcaaaataactatcaaccacatttggagacttgaagcccattagaatttagaaatgtgccttcttattactgggaagccacaaacatcaaacaaaaaactttattattgaactattactcataagaaatctaaaagagggcaccaccaatgatgggttgttggtagaacgcttctgggttttgtaaaacaagttggttgaatggcagcaattgttgcagttgtaagagggtgccatcttttggcgccatgtgctggttgaacggctacaactggggttgtt

SEQ ID NO: 155588 - DNA, 393 bp, Zea mays
  Clone ID: MRT4577_73479C.1
atgtgcgattacctgactgtaataggtcggcagggcgtgtcgcagcgggagcagcatgccatgcattgcagtctgagatcgtgaccacagaacacgaaattgaacacatgcttcaccaaagagcacatgtacgtcccagcaccacacataagagcagatcctcgagctgctgtcggtttcactctcactgccgtgacagtactagacgagacccgacgagaatgttatagtgcaacgagcagtacagactatgcctccatgtgccatgtgctgagggacactacataagcttcatccactacatcgggacggccacctacacagacaacgcgctggtatctaacactaatacgtgcctccatgtcttgagcttccccaagaaccccccggaga

SEQ ID NO: 155589 - DNA, 1610 bp, Zea mays
  Clone ID: MRT4577_7347C.1
cagagcaaggcaaagcgtcacaacctaaaaaaaggatgacagtggaattccctagaataaacgctcctattccagagaaatggtgaccagtggctgtggggtagcaccccgccccagtcctcaggccgccaccactcatcagattcgagatagaggacctcctggcgctgatcattattcatcgaggtaccattcccacgattatgggcctttgagcccaagcttagggagaagtccgcctcgttatgataatctcccagcagacggtggtgcctggactccagcaggctgcagtacccgggccactacagctggagcctagaggcgaccgcagtcatagttggcatgccttaacgacttgctgcccaagagaatgagcacggcgacgcagaccagcttggtgaccggagacggcgagcgcacgagcagcgcccccatgacgaaggactcgagggacagcagcgccagccgcggcctcctctccctgacgtactccgcgatcgcctcgccgaccaccttcttctcgcgcgcgttgtcgtcgtcgtcggcgtcgtccacggccgccgcccgcgccagagaccgcgcgagcacgacggcgtcctccagccccgccgagccgccctggccgatgaacgggcccatggcgtgcatggcgtcgccggcgaccgtcacggcgcccctctggaagctgcccaggacgacctcccacggcggccggtaccagaaatccgtgaccaagttgagggactccgggtccgacccgcggacgatctcgatgatctcggcggggcattctacgtcctgcagatccttcagcgcgagatctctcactcgcttcaggtccttgatgacatccgctgtgggctgtttgggcatcgtcacgaagaaatggaccagattgtccgtgatggtcagcctgccgatgaagaagcctccaacgcgcaggcgcaggaactccgtgtcgaaggagtggccgtgcggataccaggtgaagccccgtagcaccgggcgcgggatcgtcctcaccggagacagcccaaggtacctggccaccgcggagtatgtgccctcgcacccgatcaggaccttggccttcatggcagtaccgtccgccattgtcaggacggcgccgtgaccgccgccggggtccgcagcgacggcagcgacgcggcagccgaatcggatcgcgcctgcagggatgtccttggccagtgcctcgatcaggtcctttctgtttaagcatcggagctccatccttactggaaccttttcccggctcgttttgtctccctgctgccacacgtcatggtacacggtgataagctgtgcagtctctctaagctccgcggcgacgccaagctgctccaaagctcgccatccgttggcgtgcacgccgatgcccgcgccgtccgctcgcaggctcctggacttctccaacacaaggctaggaatccctttccggtgaagagcaagagcggtggctaggccgcagatgccaccgccgacgatgacgatgccatgggcctctgcctccgccatgcctactacttgcttctacttggtccgtacgtcctccgtcgtccgtccgtgggcgtctactcgatgtctcg

SEQ ID NO: 155590 - DNA, 214 bp, Zea mays
  unsure (1)..(214): unsure at all n locations
  Clone ID: MRT4577_73480C.1
accctgccaccggttcaaatcctgtcgtccctacctattaattctctcttcgctctgggcaggtgtcgggagatcggtcaccgtggggataacttgaattcgcgtgctctgtgcgggcgtgagacacgcttgcactggaaggggagggggtgttttttcgcttgggaggcgcgctgagtcctgtgtgctgcaccgcggggctcccnttcccgcc

SEQ ID NO: 155591 - DNA, 215 bp, Zea mays
  Clone ID: MRT4577_73481C.1
agaacgcatatgaacactcatgcgaacgattcgatttacgaatggtccctagataccatgaggaggtggaatctcagcatagagcagcacgcatatgatagggccaacaagatctaggagggcaacagggacgatagggatgcaaagcgatcgggataagacggcaaggtcagaagctcgcagatgagaccatgatcaagcatgtcgagacgagt

SEQ ID NO: 155592 - DNA, 627 bp, Zea mays
  Clone ID: MRT4577_73482C.1
aattcggcacgagtatgaaagggaggagaggggttgaacagattattactctcagaaactctccccttctaccctaccgttcttcctcctatatcctccaacaactactctcttgcgttgtactcggaggtactcggagctggatgcccttgctttgctgcctatcctgatctcttctcctctcaggatgtaggcagatcgagtaagatcgggctcacattttgacaagacactcaagggagcggcactgatgctataaggtgagccttgaccttattccaagtctgatcgaataagaagggatggcagagataaagattcttctcgtcctgaaaaggaaccggctcgctctggcaggagagagcctaagttttattccaagtctgcttgcataagagtctgagtcggtggcagcactcccagatgacatgaaactgattgccatagagctcgagcttatccgggcgtttctcaaggaaatcggcaggaaaggctggaaaagcgaagtgatagaaacatggatagggcaggtccgaagactggcttatgatatggaagacactgtagaccattttatttacgttgttggtacacacgatcagatgggatcatgctgggattacatga

SEQ ID NO: 155593 - DNA, 495 bp, Zea mays
  Clone ID: MRT4577_73483C.1
gtgttttttttttttttttttttttttttttttttttttttttttttttgttttttttgtttgtttttctattttttgtttttgggaaaaaaaaaaaagggggattttcctcgggcgacccaggtttgggttttttgcgccccgcaagtgttaaatgggccgagggaacccttgcctaaatggcctggggaaatgggggggcaaaagggggtaagaaaacccttatttctgggccgtagggaaaaggcctgggccccccttttacgcaacccaaatggcctggacgtttgggggctgggggtgggatcccctttggggggcccagtgtttgaaacggaattcccccccctggttccgggaacctttctcaaagcgaaatccaaatttaatttccggggggggggaaaaaaaaattttttttggggggaccctaaaattaacccaactgggggggcttttaaaaaatccggattgggaaaaccggggggataccca

SEQ ID NO: 155594 - DNA, 637 bp, Zea mays
  Clone ID: MRT4577_73484C.1
acccctgcatatgcgtgggccagctggccggcctgtgcctgcgtccataaaaggggagaggttcccaggtcgcgtgcaacacccctcatcagaatccacaccaccgagatcatcgcgttgtggggagagagcagaagggggagggagatcggtcgccgtcgtggcctcgatcatccgctgctggtgaagccttcgtggccatccggagtgcactgcgagaggctcgggagggtcgccattagcgcgtcgtgggtgattatcgactggagtgtgcggtatctgtcactggagtatcacctctatcgtagacccgctgtccgtcgtggagcaacctcccggccgcctgaatcatcgacgggcaagtgactgaggacctggaggctcagcaagtggaaactactgagcaggagctcgttgaaggagaagaacatgtggtccaggaggaggcctacaacgagtacgaacttatctaggtggcatttccgagttagcttgatcgcgccaaggaataaatatttagttcgttttattgttatcatttatttttgtaagactcttccactatgtaataatgattgtgacatttatctctatatactttgtcattatatgtgaaaaaaaaaaaaaaggcggccgc

SEQ ID NO: 155595 - DNA, 282 bp, Zea mays
  Clone ID: MRT4577_73485C.1
cggacgcgtggggtgctccatgcttgacgtttaaaaaaaaaaaaaaaaaagaaaaaaaaaggaaaaataaaaaaaaaaaaaaaaaaaaaaaaaaaaaaaaaaaaaaaaaaaaaaaaaaaaaaaaaaaaaaaaaaaaaaaaaaaaaaaaaaaaaaaaaaaaatcgctttagatattaaatacacaaaattttatatgatgctaaattcatagtcttacttatcatttaccaaaacataattatatagcatgagtagtaatattaaaactatgtgaaaaattaa

SEQ ID NO: 155596 - DNA, 1960 bp, Zea mays
  Clone ID: MRT4577_73486C.1
cccacgcgtccgtgcaactattgctgctgtcggtgaaaataaaaatagtggtcctgagtcagttgtcatgagacctacaaagtcacaattgggtgatgaaaacatgaacagcgaacacaatggttttgttggtgttagaaaagatgcagtgcaaactggcattgtatcacacaatttagatggttcaattaggagggatgggaatactgaccaggcaggcaattcacatggcccacttgtgcagggaggcaaagatcacaaggcttcagatgcatctactgatcatgagaaaggacgactgtttcaacaggcatcactgcaaaatgcaggggcaccgggctcttatgtgcccccaggtgtggtaccacatccatctggaccagataaaatgcttcctcagcatatgacgaatcatggtcatatgcatggtttctctgaaaatatccgtcctccgttgcaacaaccatatggtttgtttcattctggaacgataacaaggccatttggagagaaccagattcagatgcctatgccacagcctgggggtatcagacctggtgatggtatgattcgaccttctttggttggcccattacctggacatcatggtgcagtgttgtctccttttgatcttgaacatttgggccagccacattctctcggaatgctgaacagcaatgactttggtggtgaggggttcaatacttcaaggggtgctgcatatcccggaagacatgataatatcgaagacgatcggaaacattttccagcaccagcccttctggatggtcaaggcttgcaaagggaccctagacattttgagagagctttaggtagacctgatggtttccttgattcagtacctggaaggcctccttttccaaaccatagaagtgtaggtttgcatgagggttttccaagaaaacaaaacacaactgccagtcaccctgacgtcctgtcacatggagcagaatttgatcatcacagggctattggaatgcctaatttcagaaatccaggcccatttgctcaagggacaagtggcggtcctggtggccctcctaaacaccagcttggctctggtgacatgcatccaggtgaccctcatcttgtcgctgaatatgctcagcatggatttcctaaaactgcagcacactttggtttgggtggattcttgagaaacgggaattctggttggtgccgaatatgcatgtttaactgtgggagtgcagagaatctggatttgcatgtacaaacaagggaacatcagcaatgtgcaatggacattgtcctgaaaatgaagcaagatgttgcaaaaaggcaaaaactgaattatggagggcccaagtcattcaacaacaaaaaggtttctgggaagggccattttcgtgggaacaggcgctagtgttaactgattaaaattgatgtggttttgaaggttgctactggtgcttatggatgtgtcaatggcaatcgagaattgagatcttttcagacattctgttcatgcggttcagcgtatttgaagggaaacttgtaatggtcccaaacttttgttccatgttgatctgcagagttcacatggctatgtttacttcacgtatttttgccgaagttgttctgggattgcttaacatgctaatatccttcttctgtacgtgctgatttataactcctgtttctttcaactaggctcatgctttttctaatggcgacctaataatagaccatgctggaacttttacaaagagacttgtaattgtgtcatcagacatccataacatggtaaattttgttggaatcttttggtagggggctaatggaaacatgttgaagttactttcagtgcctgaaaaaaaaaaaaaaaaaaaaaaaaaaaaaaaaaaaaggggggcgaaaaaaaaaaaaaaaagagggagcgcttgtgaagaggattccgagtacgtactgcgtgcatgcg

SEQ ID NO: 155597 - DNA, 411 bp, Zea mays
  Clone ID: MRT4577_73487C.1
atagtgagtcgtattacacggcgtcggcggggagcagcgcccggggcctggccaagccggagaacccgttcaacaagcggcggcgggtgctgcgctactgcgccacccgctggaggcccgcgcgtccgcctcgctcgccgccgccgccgccgccgacgtaggcagcggctgtggctagcactgaagaagacatgtacgcgcacgcagcgatgaagcaggcggacggacgaattgaaatgaaaacacaccagctagcaagcatgaagatggatcctctcctgttttgggaccccttctctcgtcttcatcagcatccgacggcgtcatgcatgcatggatatatacaccgtacctagtggtaaactgatatataggttatttcgttttttcttttttttgttgtgtgtggtt

SEQ ID NO: 155598 - DNA, 540 bp, Zea mays
  Clone ID: MRT4577_73488C.1
tttttttttttttttttttttttttaacagtagaaacaattcatagcttgagcttacttccaggaggtggtatgaggattgcccttggaatgagccaagcaagctggggggaaaaaagagagagaaaaaaaaacttgcagattttacaaaagagggagtgtggtttcagctcctttcagttccttccaacattggatagttcttaccaacagctcctgatgcggtgggcgggaagtccgtgatcacaccgtcgacagagaagtctggattgtcgatgaactgcaagtactcggcagtgggatcgtagctgtagttgtagctcaagatgatatcgttggcaaacccggaggcgtacacttccaggccgagggcatgagcatccttgaccaagctgggggatggcgccaagtactggtcctttttcaggggccagatgtacgtcttgggcacaaggacgccagctgcaaactccttgatggacttcaaatctttcaggagctccccgtacgttttcttggtcgaaggctcctcgacgtcttc

SEQ ID NO: 155599 - DNA, 805 bp, Zea mays
  Clone ID: MRT4577_73489C.1
cagtcacttctcttagtaacacggcagaggacaaaagcatccttcatatcagggctgactttacattcattctcatctatgtaatactcatgcataatccactcagtgcgtctgccagagggaggccgaccctcatgaaagactaaagtcttctttgttcctagagttcgcttcttcagctttatggctcggtccttcccagttgatttccagtaaccagcgagtgttgccctgtttgacctagagccagtagggtacttcctgtcacgagaggcaaagaaatgccacttgttgtcctcgattggaagattgcactttgcaggtaaatcccatggttcatgcttatttatatcaacctctggtataagatcgtactcaattttctgtccaagtattttcctcttcaggtagtgagaaacaagttcagtatccgaaggatggaatccaaatcctggtggcaggtgcatatcacgcagtacttccattttacaatatatctctcctgagagccgggtggccgcacggccgatcgcgcctgaccggcgccgcacggaacctccaggacggcgccgccgggcgccgggcggcgaggaggagcccggagaagcacggcggaagagcaccaccgggcggtgttcggtccagcgaacgagtcaggactgggagcgattgcaccgggtggggaggaagcgtcagggctgggctggctgcccctgctggggagcggaggggagaggccgattgggtgggagcggacgaagcagccacagccagcaaggaagcgaagccccggccggcctcgagg

SEQ ID NO: 155600 - DNA, 366 bp, Zea mays
  Clone ID: MRT4577_7348C.1
ccatcactcccccgatctccgccactccaaaatgtgagcgccgccaccacctcctccggttacttccggctccggcgaccgccgcggccccctctcacttcctgcgacacctctctacctgaagcacacccaccccagacgcctcctctggactcgtgcctcgcgtcagctctcacggaggtctccgcaaacccgccacctgctagagcgccggcagcataccactcccgtggaccacgccgacggacaatcctcccgacgcacaacatgccgcacgactctaggagcatcttctaggtcttctgccagcgtcatgcgctgccggcctgtccatcatcgacagccagcagatcgtgtcccatccat

SEQ ID NO: 155601 - DNA, 1143 bp, Zea mays
  Clone ID: MRT4577_73490C.1
gggccagcccattctctcggtatgttgaacagcaatgactttggtggtgaggggttcaatacttcaaggggtgctgcatatcccggaagacatgataatatcgaagacgatcggaaacattttccagcaccagcccttctggatggtcaaggcttgcaaagggaccctagacattttgagagagctttagttagacctgatggtttccttgattcagtacctgaaaggcctccttttccaaaccatagaagtgtaggtttgcatgagggttttccaagaaaacaaaacacaactgccagtcaccctgacgtcctgtcacatggagcagaatttgatcatcacagggctattggaatgcctaatttcagaaatccaggcccatttgctcaagggacaagtggtggtcctggtgcgccccctaaaaaccagcttggctctggtaaccttcctggaaacatacaacatgcttttgcaggcccagacatccctccagctccttttaaccttggtgacatgcatccaggtgaccctcatcttgttgctgactattctcagcatggatttcctaaaactgcagcacactttggtttgggtggattctcgagaaatgggaattctggttggtgccgaatatgcatgtttaactgtgggaccgcagagaatctggatctgcatgtacaaacaagggaacatcagcaatgtgcaatggacattatcctgaaaatgaagcaagatgttgcaaagaggaaaaaactgaattatggaggccccaagtcggtcaacaacaaaaaggtttctgggaagggccattttcgtgggaataggcgctagtgttacctgattcagcttgatgtgaatttgaaggttgctactggtgcttttggacgtttcataggcaattgagagttgagatctcttcagacatcatgttcacgcggttcagagtatttgaagtggaacttgtaatgttcccaaacttttgttgccatgttgatctgcagagttcacatggctatgtttactttacgtatttttgctgaagttctgggattgcttaacatgctagtacccttcttctgtatgcgatgatttatgactactgtttgtttcaactaggctaaaaaaaaaaaaaaaaaagcggcc

SEQ ID NO: 155602 - DNA, 247 bp, Zea mays
  Clone ID: MRT4577_73491C.1
ttttaaatacttccaccaccaaaacactattaccagggggcctttattcactaattgcgcggattacaaaacacaattgctagtaccccttgttgcttcacgaaatacctgtatcatcactataatgcatgccactaatactatgcgaacctgcccgggaacgaagagaagagccacccaacatggcactcaacagcagcaaccatattgaggactacacaactttccccattgtaaactaccgccc

SEQ ID NO: 155603 - DNA, 2742 bp, Zea mays
  unsure (1)..(2742): unsure at all n locations
  Clone ID: MRT4577_73492C.1
ttcatggatgtaaggcccaatgctgggttacacaaccagcttgctagattatttattgtacttcgtattgttggatggaatgcgtttaagctgaagtcttcagtggtagaattttccgatgagagattggatgaaccgagtatccgtttgtgcatatatggtcacatcttagnnnnnnnttgccagtaaatgtgagctccatttctgcctgtttgcagaagatttgacctgaactcgtacaagtttgcgatgcaagcaaagttgtgtctagtgccctcggcgggtaaggtaccagctagcgtttagtgtcatgaagccacacccacggtatcaaatggattactggagtgcttacaaactcttagacagcagaaatcaaatggattgctggagtacaattctgtagtttagcgagagatcatcttcacttgttcnnnggccgccttttataatttttttttctttcaatgcagtggccgctccactatgtagtgtactgtacaaacatggttcagatttacaaagctaaggatagtagtaacagtctgaagctacatcttttttgttcatacgaccaacccttttcccactttttttctttttcgattttcgataggcacccgttggtagcaactagacgatcaaaagaagagagaaaaaaaattaatatgtacagcaccacaaaaaaaaagtggagataactgggaatcagtggtcgcaaaaatgtatttccagtaatcccagtgagataagctgaggaactcgatttctattccatttccaatgcaagcaaagctagcgaactactccaaggacgaagccaatgctgccactgaccactagagctacaatcaagcatgctgatgttccatgattcaaattcataggttggcattggagcggtgataatgcagcactagagcagcaactccaaccacaaaaagggcaacaaatatgtatgccctgaatccagctgatgaacatcttttgaagccctcgagataaccttggttgctgtgggcttcatgattggctgcatcagactgcttggcagaaatgacattgtttgcatttttcttctggtgctcaacatcagtcctgagatcaagacgacgaccactgttatctgtaaacttcatagtctggttgatagattctgaattactcgtaaccatcctcttaattccaacctgcattttaatcttgccagctgctagtgaaatgttagcgggaggcgcagttgctctgcgccttcgtattgtaattccggtgtcaatattttcatttgacatatccatcttgttattttcatgatctaactgcaattcggcattcggagtttcattctcaaagttgtttggaagaacatatgaaccaatccccatcatgtagtttgtctgattgttattaccttcctggccagtttgttccaaaaatatgctatcattgaactggtcagtaccaggatacaacatactgtaaagatcctcgggaagatcatctgtgaataggtagtctgtggcatctgttccatcctggatagggctagcatggcctggtctgatattcggagccatggaaccaggattctgcaaatttgatgattcagcatattgttcagtcggacacacgtcagcagaaccagtatcagctacaaggttaaatggaggtgaaggatccaacagttcttgcagccatgtttccagttcattaccaccatttggagttgttgaatcaggagtgatagctgcaggagtgatagctgcctgagcaacatcattagatagttcagcactgccaattggtgtagttgcatggttcgattcttctggacagatgactgaggcagcaacatcttctggctttacagtgctgacaactgatgtagcagcatctggttgttccagatgagagctcctgttgcccacctcattatcattatctaatgaccagtcatttcttttagtaacacggcagaggacaaaggcatccttcatatcagggctgactttacatccattctcgtcaatgtagtactcatgcataatccactcagtgcgtctgccagagggaggtcggccttcatgaaaaactaacgtcttttttgttcctagagttagcttgttcagctttatggctcggtccttcccagttgatttccagtaaccagctagtgttgccctgtttgacctagagccagtagggtacttcctgtcacgagaggcaaagaaatgccacttgttgtccttgattggaagattgcactttgcaggtaaatcccatggttcatgcttgtatatatccacctctggtataagatcatattcaattttctgaccaagtattttcctcttgagatagtgagaaacaagttctatatccgaaggatggaatccaaatcctggtggcaggtgcatatcacgcagtacttccattttacaatgtctctccggagcccaggtgcccgcacggccgatcgcgcccgaccggcgccccgcgtaaccaccaggacggcgccgccgtgcggggaagaggagcctggagggggcacagcgaagagctcgagggcggtgttcggcccagcggacgagtcaaggctgggagtggcggcactgggtgggggaagcgtcagaggtagggtggtgacgagcgagtagcaggggagggcgattgggcgagatggacgaagcagccaggaagctgtgggtgcactgcttcccgccggccggcctcgagtacccc

SEQ ID NO: 155604 - DNA, 711 bp, Zea mays
  Clone ID: MRT4577_73493C.1
agcagaaatcaaatggattgctggagtacaattctgtagttaagcgagagatcatcttcacttgttcaaaaagatgctataataaaagagaatgcagacaatgcagtggccgctccactatgtagtgtacaaacatggttcagatttacaaagctaaggatagtagtaacagtctgaagctacatcttttttgttcatacgaccaacccttttccctctttttttctttttcgattttcgataggcacccgttggtagcaactagacgatcaaaagaagagagaaaaaacttaatatgtacagcaccacaaaaaaaacaagtggagataactgggaatcagtggtcgcaaaaatgtatttccagtaatcccagtgagataagctgaggaactcgatttctattccagtccaatgcaagcaaagctggcgaactactccaaggacgaagccaatgctgccactgaccactagagctacaattaagcatgctgatgttccatgattcaaattcataggttggcattggagcggtgataatgcagcactagagcagcaactccaaccacaagaagggcaacaaatatgtatgccctgaatccagctgatgaacatcttttgaagccctcgagataaccttggttgctgtgggcttcatgattggctgcatcagactctcggcaaaaatgacacccgtgcggtttcgaggtaccc

SEQ ID NO: 155605 - DNA, 141 bp, Zea mays
  Clone ID: MRT4577_73494C.1
tacggtaccgcgtcgcatgcggacgctcattaagctctttcttataggtggtccaccttaatattacaattccacttggccccgtcggttttacacacgttcgtggacttgggaaaaaacccttggcggttacggcaacgg

SEQ ID NO: 155606 - DNA, 417 bp, Zea mays
  Clone ID: MRT4577_73495C.1
gacctatgacgcacgctgcccgcagacttgagctcggatcgagctctcccacaatctgagtttggtgatcctggtaccccagaacctgaaacatcgtcttgaagacatggaacaggctctcagcccttctgttttcaaggccatcatggagaaactggagatgtccaagttccagcccactctcctaacactaccccgcatcaaagtgacgaccagccaggatatgctctcaatcatggagaaattggaattcttcgatttttcttatgaccttaacctgtgtgggctgacagaggacccagatcttcaggtttctgcgatgcagcaccagacagtgctggaactgacagagactggggtggaggcggctgcagcctccgccatctctgtggcccgcaccctgctggtctttgaagt

SEQ ID NO: 155607 - DNA, 667 bp, Zea mays
  unsure (1)..(667): unsure at all n locations
  Clone ID: MRT4577_73496C.1
ccggccgggagacagcagtgcacccacagcttcctggctgcttcgtccatctcgcccaatcgccctcccctactactcgctccccaccaccctacctctgacgcttcccccacccagtgccgccactcccagccttgactcgtccgctgggccgaacaccgccctcgacctcttcgccgtgccccctccaggctcctcttccccgcacggcggcgccgtcctggtggttacgcggggcgccggtcgggcgcgatcggccgtgcgggcacctgggctccggagaggtgagccgatcccgtcgtcggcctcgacgtgccgtttctgttcgcctggtgctggtgccctggtcggtgtgcggtgtttttgttgggcgtttatctgttctacgcgtccctggcgctcggggtgcgactgcgcggcgtgtgcggtggtgcggccacgatggtggtggattcgcttaggacattgtaaaatggaagtactgcgtgatatgcacctgccaccaggatttggattccatccttctgatatanaacttgtttctcactatctcaagaggaaaatacttggtcagaaaattgaaaatgatcttataccanaagtggatatatacaagcatgaaccatgggatttaccttgcaggngcaatcttccaatcaaggacaac

SEQ ID NO: 155608 - DNA, 591 bp, Zea mays
  Clone ID: MRT4577_73497C.1
cattgggtacctcgaggccggccggctgtcctgtcggccagtcaggtgccttctcacatcgcaacccccgacgacagaccgctccaggctagacacgcagatctcgattcccacatcgcacaacagacgatgatggagtgcgagaacgcaccacacgcggaatggacggtgcggggccaccccctcatctactgtgctgagggaggatccgacgtggatgatcacctaccatccgctccactccagtaggatggatatgaggcggccgttcttccagcactaacacctcatcatcgagcacgacctccacctcatcaagagcatggaggaggacgaggaatgacattactaactctacaaccgcaaagacgtcaaacgaaacctcgggcccgaggactcctgcatctccttaaaagactccggctgccgttgtgtcgggtatatgggctccgaaaataagtacatatacaccatcgaagaagactgcttcgctgccaaggacgcatctggaaaggatatcaatgctcgtgagcatcacatcaagaacctcctcagaccatccaccacgttcttcttcaacaccctgtacga

SEQ ID NO: 155609 - DNA, 633 bp, Zea mays
  unsure (1)..(633): unsure at all n locations
  Clone ID: MRT4577_73498C.1
gactagcctagacagctactgcatctcgctttttcttccctctctgtccatctcgcgccgcggcgacggcggcggccagatcgtggagctccggcgacggcaggacgcagcggccgagcagctcagcaggagcaagcagcacaagtcgtgtgattttttcccccttcagtcggaggtagcacacaaggaattatgagtgccgagaacactataaatgatgttcttgccaaagaaaattccctgtctccgggagataggatgaatgcagtaggaaccaacatggaaagtattacaagagtagaactcgaccttgcatttgcctctgagaaattgctaaatttggagatgttggtgatggaaatagctcgccgagctactgagtttgagcctcttaccttggaaagtggatctgtttcttctgagactgctgaggatgccttcgagttggacaccttgtatggtattctcgatgcagaagtccaagagttagatgacatgatcagttctcttcagattgatgctaaaaatgttgaggacaaggtttatgacgaagaatctggaggcaaggttanagctaagctggatgctgctatggcttctttgaaacagatgcaggatctaattgctgatatc

SEQ ID NO: 155610 - DNA, 713 bp, Zea mays
  Clone ID: MRT4577_73499C.1
cttctgcttttctgcaggtaaggatacatacagagagccacagacagatctactacagaggctagtcatcctgcccctccaacaaagatgtcgatggtgttcacccagcacgtggtgaaggtgcctccgaaactgacgtcatcgtgcacccttcacaccgtcgcccaaaactaaggcatcgtagctgatgaggcgcttcctgtgcacgtccgagcctgccacggccttgctgctcatggaccacatgcacctctcctactcccacatcaaccatgcagctcctccgccccaatgctctcccggccaaggacgatgtgctctgcctgttcgaggggatgatggacaaacctgagcagctgagcctgatcacatcctgtcaagcaaggacaccaacgaagtgctcctcgaacatcaatgcctacatgactctgcacgaccgcgcgcacctacaccagacagcttcatgctcacccaggtcacggctcctaccacttcgtcctcttccatgaatcacctactctctggtagtcgcatctgacccccagagcatggcggcgctcttctggggtatcaccgacgacggttgcgtcaccttctccgacaacatcgacatgttcaaaggctcatgcgcaaagaacgctcgcgccgctcccgaaagggtgcttctacctccacgccctcaaaaggctcaagtgctaaaagaacccaagcac

SEQ ID NO: 155611 - DNA, 509 bp, Zea mays
  unsure (1)..(509): unsure at all n locations
  Clone ID: MRT4577_7349C.1
agaggacctcctggcgctgatcattattcatcgaggtaccattcccacgattatgggcctttgagcccaggcttatgagaccacactcagacagggagtggagaagtccgccttgttatgataatctcctagcagacggtggtgcctggaccccagcaggcagtacccgggccactacagctcgagcctagaggcgaccgcagtcatagttggcatgccttaacgacttgctgcccaagagaatgagcacggcgacgcagaccagcttggtgaccggagacggcgagcgcaccagcagcgcccccatgacgaaggactcgagggacagcagcgccagccgcggcctcctctccctgacgtactccccgatcgcctcgccgaccaccttcttctcgcgcgcgttgtcgctgtcgtccacggccgcccgcgccagagaccgcgcgagcacgacggcgtnctccagccccgccgagccgccctggccgatgaacgggcccatggcgtgcatg

SEQ ID NO: 155612 - DNA, 960 bp, Zea mays
  unsure (1)..(960): unsure at all n locations
  Clone ID: MRT4577_734C.1
gtgccgctctcggccgggccgggccgggatcagcagcattacccatcgctcgccaacgtgcagagtaaggaagcagctagctagcaggccgtccgtccactgaccggccggtcatggcgaggatccacctttacgtcgtcgccgcggcctgcgccgtcgccctcgcgctcgccgtcccggccctcgccggcgacccggacatgctccaggacgtctgcgtggctgactacgcttccccggtcaagctgaacgggttcccgtgcaaggcgaacatctcggcggacgacttcttcttcgacgggctgaggagcccgggcaacaccaacaacccggcgggctccgcggtgacggcggccaacgtggacaagttcccgggggtgaacacgctgggcgtctccatggcgcgcatcgactacgccccgggcggccagaacccgccgcacacgcacccgcgcgccaccgagatcatcttcgtcctcgagggcacgctcgaggtcggcttcctcaccaccgccaacaggctcctcagcaagaccgtcgccacgggggacgtcttcgtcttcccccgcggcctcgtccacttccagcagaacagggggcacggccccgccgccgtcgtcgccgccttcaacagccagctccagggcacgcaggccatcgccatgacgctcttcggggccacgccgcccgtgcccaccgacatcctcgccaaggcattccgggtcggcggcggggaggtcgagcacatcaaggcaaacttcgcgcccaagtagacgatgtatcgtgtcgcagcgtgcagttttcgattttgttgttcttcgttctgagacgacattgctgaccacgctagttcttgtcgttgctgctaatttgtgtggagccactgcttgtcctccaataaataacatgatcattttgcttcatgtataaaaaaaaaaaaaaaaaagcggccnnnnnnnn

SEQ ID NO: 155613 - DNA, 672 bp, Zea mays
  Clone ID: MRT4577_73500C.1
gccggccgggctgtgggtctttctggctttatcgcatttcatgccatgacggcatcgccattgcagcgctcactttaatttacacagccagcggatgccgaccctcacctccgatgccatcatcgcgtccccgaggtggggcgtcctccccttatgcggcggcggccgctcgggcggaccgcgcactcgccgcccgtcgtcgtccggcggccacggctgcgggtggccgccgctggaccgcgtggccgtctgggtcggcggcggcatcgccgcggtgttcttcgcgtccctggagcggtgctcgtgcgtcaacgtgcgcacgcacgacgacctcctcgacgacgagcggagggactcggaggcgccgctgatgatgttcgacgacggcaacggtaactcctgcgtgcagaggcgcggagccaggtggtgcggcaagggcaagggtactggtagtggagattgttagtgtacgatattaatatgtatatttgttcagaaaacgtcgttcgcccggtttaattttggctgtcgtcgccgtcttaaggcttaagctcctgcgttggtcctatttcgagtaagttttgcccttgtaatgctatttcctgctgcgtttctgtttaaattatcagtgtatggatgttgcactgtatctaagttaattcagagttacat

SEQ ID NO: 155614 - DNA, 808 bp, Zea mays
  unsure (1)..(808): unsure at all n locations
  Clone ID: MRT4577_73501C.1
ngaccgaaattaacacagcaaacaacatggtatcgagctagggtttgttgcttcctcctgctggcgccgccgccggccgtcacctgaagctccgccgcgccgtcatcctcttcctgcctgctgtcccgccgccgccggccgtcatcctcctcctacctgctgtcccgccgccgccagctgtcacctgcagctccgccgcgctgtcacccgcattccgtgcccgcgcgcgctctgcgtctgccgcgcgctgcctcctgtccgcggccgcgctgggcggtgctgccatgctgctgctcacgcggaggctctttgccaccacggattcagaagcagcggcaggaaccgcgtagtggccaccgcggaagccatcgccgtggcctgagctcggtcggggtgcgacgggtcgagctcgggagtgtacgaccgcggggagaggtggagggtagcttacttcagccacaccggctgcggtacagcacagcggagggcgaggacgtcaggcaggtcctccctggttcagccctgcagtgtttgttcatccggcggtggaagaagaagtgctgctgccgggggagtgggctgctgctacgattagtggaggtggtgctgctacagaggttggaggttctactgattgagagaagggaaggaagcctggttcgtcttagtgtttgcaggcattgatgatgatgagttcagaggagactgaagcaaaaaggttggaaagagaagctgaaaaaaagggcaatgattcatggtgacaagaaagaagaggatccactaatcacaaaaagtgagatgagaaatg

SEQ ID NO: 155615 - DNA, 439 bp, Zea mays
  unsure (1)..(439): unsure at all n locations
  Clone ID: MRT4577_73502C.1
gtggaggagggctttagcgatggtcctgttcatggctggcgccgcgctgctcgccggagctgacgcccccggcgcgcaggaggtcgtgtggagcatcatcaccggggccatggttcagagcatgctgaggacagggggcgacatctgccaccaacgtgccttcttcatcggggaaagaggtatcagttcaactataatggggggggggggtaccacaatgccatacattgtnatgtatgtgacagtggcggggagggaagcagggaagaaggtgttacagagcataataagcgagaagcttgatggttgtgaaaatatagtacgtgagattgaatacgtgtactgaagggagggaaagggcggggtgatgctgaagaattactttttatgaggaccagggagatacttatggatgccttgactgaggatgggaaaggca

SEQ ID NO: 155616 - DNA, 990 bp, Zea mays
  Clone ID: MRT4577_73503C.1
gtcttgtcttgaaccgccggggccgggggtccggcactctgcatacggtatactactatgcgctgaccaacgccgtgccactagtcagtgatcccgctgtggaaggaggtggagtactacgaggagttccagcggcggctgcgcgcgcgcgtgggccggtcccgcgccgccgccatcgtccgcggcgcgctccacgtggtgagcatcggcaccaacgacttcctggagaactattttttgttggccacggggcggttcgcgcagttcacggtgcccgagttcgaggacttcctggcggccggcgcgcgggcgttcctggcgcggatccaccgcctcggcgcgcgcagggtcaccttcgcggggctggccgccatcggctgcctgccgctggagcgcaccaccaacgccttccgcggcggcggctgcgtcgaggagtataacgacgtggccaggagctacaacgccaagctggaggccatggtgcgtggcctcagggacgagttccccaagctcagcctcgtctacatctccgtctacgacagcttcctcgacctcatcacgaacccagacaagtttgggctggagaacgtggaggaggggtgctgtgcaacaggcaagttcgagatgggcttgatgtgcaacgaggactcgccgctcacctgcgacgacgccagcaagtacctcttctgggacgccttccaccccacggagaaagtgaaccgcctcatggccaaccacacgctccaagtgtgctaccaagagggcgtcctgtaacgtagtagtagtattcaaagttatcgaaggaattaaaagaaaaaaatgaaagcacacaaaggtttgtcgtaatcacagaaaatgtactacacttgtgatttgaatgtacgtgtcctgtaacgacgacgtgtgtacattgaaattagagagacggcatcgcacctatcgattccatcgttattcatcttgctaaaatgctaaactggttcttcattc

SEQ ID NO: 155617 - DNA, 369 bp, Zea mays
  unsure (1)..(369): unsure at all n locations
  Clone ID: MRT4577_73504C.1
nnnnnnnnnaattttttttttaatattgtttgttgtaccccaaacaccacttcatcaaatcatgtatttacatagtttacatcatggagaccgcaaaaaaaaatttgctcaaaaatagtccggacagcccaagtgggcattaaataagggacctagtacttcacaacaatcccctgtcccgtctcatgcaacaaatatgccttttttcaattcaatacaaccgacctgcctttcctgaatctgcatctatcatagctgccgcacacaatgtttatacattactacgagtacacaacggaatgcccgaacgaaaaccaccaccctcgatcgagaattaactgatcccaatcatctgttcatatggggatg

SEQ ID NO: 155618 - DNA, 412 bp, Zea mays
  Clone ID: MRT4577_73506C.1
cgccgccgcttgctcctcctctccgactcctccctcgggcaccgtggtgttcttcgtggacagggcaggccggaggcgcctgatgctgatcagcctggtcggaatcgtcgtgtggctcgccgtgctcggcggcacgttcctgggcgccgcacaccacgccccacccgtcagcgacctggagacccgactgttggcgaaccagaaccagacccagacccagacgtgtcccgagttcaacccgaacgtccgctggagctgcatggactgcctcaaggccgcgtccacgtgcggcttctgtgctcaccagggagacaagcttcttccgggggcgtgcttggcgctgaacaacgcgtctcggcatgcgtgccgcgcagaccaccgggagttctacacggaagggtgccccaacaac

SEQ ID NO: 155619 - DNA, 316 bp, Zea mays
  Clone ID: MRT4577_73507C.1
ggaggcaaaaaaacccaaaacccgggataatttgggcctaaaaaaaaccgccagggggaaaaaggcaaggaggcccaccaaaaaaaaaaaacccgggtttgggagtggggcccccttaaaggccccggccaaagggccccttgcaagacagaacacccggtatgaaccggaggggccctttaaggggcgacaaaaactaactggggggtggcgaaaaattcgcattaatccaaagagatttttttaaggggggccgctgctgacttggggataataatcgtaaaaaaatccttgattgatttttggccccccccgg

SEQ ID NO: 155620 - DNA, 402 bp, Zea mays
  Clone ID: MRT4577_73508C.1
aagataacatctaggatgacgttctaactatacgacaactaatacactaacggcacatggtgtcaatactcatagcacagcggacatccgatcacgacaaacaacaacactcaaataaaccttcactgatacaaagtcctactgaatcaaccatcaaagcatccatcgcgaaaattacaacggacaaacatgaacgatacgtatgtatccacttatgagacacgacaatggaatcatatcactgttcagcttaatctgtttgtctatacatattatcctattcgacaactaccactgtacttatgatattcttcttgttagatacttggaattgactgccatactggagccatggtaaacttctaaaatggacaacacagctatatcgagtgatgctattca

SEQ ID NO: 155621 - DNA, 356 bp, Zea mays
  Clone ID: MRT4577_73509C.1
cttggttggtaagttaagggcttttcttttattaacattgaacaggttttggggatttcacgtccctgtgggaaagatcatcttaccagtttttttattggggaatacatgcattttataagggttttaattttttaaaatcactcagggcgatattgattacatgtaaataagccattaaaacatggcgttgaaaccaagggttttaatacccaagggggaagggccaaaggggccataaagccctactgaaatgcctgtgccatggttgcccaatgagagagtttttgtttatacggggatctgaatttttgatatttcgcatgggggtttttcttcaccttagggtttgaaaa

SEQ ID NO: 155622 - DNA, 340 bp, Zea mays
  unsure (1)..(340): unsure at all n locations
  Clone ID: MRT4577_7350C.1
ggccgggaaaaaaaaataaaaaaaaaaaaaaaaaaaaaaaaggccggtccccttggagcgctcgccccaacctgggggacgcntcgccccnagccgatcncagatccgtctnncaactccattaaaaaaatnnctctcctttcccccctccctantcnncaggaaaagggagaagggtaccacctccgnggtcgatcttccccctccatttacctccctccggggcgaggggtcccgatnntcgatcgaaggggcggcggagaagagaattgaggaagcgtggagcgagaagaaccacgtggcgggatctggcgggcactaccacaagtacgagggaggg

SEQ ID NO: 155623 - DNA, 2112 bp, Zea mays
  Clone ID: MRT4577_73510C.1
cattgggtacctcgaggccggccgggagggacctcaccgagcacaggtagggtttcggccaccagccatggccgactccgcgccgtccatcccgggcgtcatcgcctccctccaggcctactccacggccctctccgcctttaccgccgcatggcgtgccgtcgagacccacgcctccaccctcgactccgccctcgccgcccgcctagccggcttctcggagctcgagctgatctgctcggcgatggacggagccggcctccgcgcgtacctcaccgagcacagggacgagctcaaggatcccacgcgcgccctcgacgcagccctccaagttgcgcccgacccggggcttctggtcctctccgcggcagcgagtttctgccgcacgctgccggaggtggccaagagcgacggtagcgtcaaggcgtcctgccgcctgctcatcgccttgctcgaccggctgcgcgcgattggtgtcaagccgtcgcctgaggcgcgcgaggaggccagagctgttgcgacggactggaagcgaggcaagcggatcgggacggagacgatgtttaagcaggagacgttcgccttcttgcatctcgtgggagtgtttgggctcgtggaggatgtgggcggtaccagcgaggtgcttgatcttgtcgtgtcgatctcaggtcgtgagcgcgccgttgatgcgttcgtcgtcctgggcctggacctcgaccagcatatgccaatcctcattcagaaaatggtaaacaaaaacaaacagctagaggcagtcaaattcattcaagctcttaatatagcgcacaaatacgctttgttgcctattatgagatcgtacattgatcatgccgcagttgctggtaagatgatccgcatcaggggagatgatcttgctactcagaatgcagctgatgcaaaagagcgcacacttattggaacattgcagaagttcattaaggaacagaagctagaagaactgcccatttttgaagaagctaacaagcgaatggcacatttggatcagcaaagtgctgagagaaaaagaactgctgctgcagcggctgcggctgctcgaaaggttagtaagaacattgaggagcagcagaaaaggatacaggagctgatgcagcctgctaagagaccaaggtctgagaatgtggtgaaaggatcttcgggccagaacgtgaactttgctggaacctctactcaacagtttaagccacaacagagcattcataaagctggagtgtcaaatcagtatcaagctgctttaacccagaatgtactgccagcaatcgctcagatttcacagctagttgctgggagccatcgtccagttggcatcccaaatcaggcccttgctgttccgcctcaatatggtagtggtagtgcaaattattatggagtgacgtccaccaggccatacaggcccatcactctacctcctggacctggtgctttgaatggtccaagtgcgcaggcatcttcaagatcaaggctctattctggagatccccttgcggctgtctcccgatcatcagataagaagggatcgtcttacaagtattctttgtccagtatgtcaacttatgatcgtaaatgaggatttgttttatctgccagtggacgaacctagtgaaccttgaaagtttgggtttcagaccagagatttggtccctccgtagatgttaagtcattgtagctaacaatgggcctttttttacagtaaaggatgtgggtttgtatctagaagagattctcctacagagtctaataaatattgtaggaattctaacttataaggacaagttaggtgtaatggtgagagttatcttaccgagccaccagatcctaggtttgaagtagcctcttcctattttcattgggtcatgaatttgtagtatctgtatttgcagcggaaagcttaccttgttttatgcccaaaaaaaaaaaaaaaaagcggccgaaaaaaaaagaaaaatcgaggaagggggtaaaatgtcttgtttaaccagattagtgaatattaggatgcctatgagggataaggtaacgggtgaattctgtgtcttggtcttgtgagtaagctattgcttaaaaatgatcaac

SEQ ID NO: 155624 - DNA, 389 bp, Zea mays
  Clone ID: MRT4577_73511C.1
tgggttgacccacgcgtccgcccacgcgttcgctgacgcgtgtgcatacacattggccttatgtttaactcttggagaatttcatttatgcccatgtgaagcggggtagagcaaagctcactaatattactactgggggtgctgccttctgtgctggtggtatggctcttgtttgccaccgctgctgtgctacctttctgcttcacctgcaccttcctctgatattgagggagagtttacagaaagagggagcatataatgttggtccaaggaagcaagctaatccgaaagatatcaagtgaagcgtttgtccggtcgcttgggtggtgcgaatttctgggtgatcaaaactggaatgcggattccgcagttgaagatatcctttcttt

SEQ ID NO: 155625 - DNA, 354 bp, Zea mays
  Clone ID: MRT4577_73512C.1
cgcagaccgcgtcgagaagatgctcgccgtgctcgacaccaacatgctctgagtgaaccctgactgtggtctcaagacacgcaagtacacagacgtcaagccctgcctgaccaacatggtctctgtcaccaagctcatgcgcacccaacttgacagctcgaaatgaggtacctagatagctccatggtctgatagctcagaatgaaccagatgttttgacataatttgggtgatacccgctaggccatggaggaagtgatacgttagcctctcattggtgggatacaccattacaaagatgcgttctaagaacggagtgagagcttttctttgcgctatgaatctgggggtatg

SEQ ID NO: 155626 - DNA, 939 bp, Zea mays
  unsure (1)..(939): unsure at all n locations
  Clone ID: MRT4577_73513C.1
gtgctgctttactgatattactaaaaggtataagtaggaagactggttttgctgagttggtaaaggaccgttaacttcttatggaagcacttgtggctgagcctggagtagaagggaaagaatctaagaccccttgagaagcagttgctcaagtgttgtcttcatcgtaatttctggttaatatgggtctttgtgcggccaacaaaaaaagtcgtggcaaagttctgttccagcaaaagacagaacctcggagttaacttgcatatttgcatgccatggtaatatacataaataacgtgtgttcatcacctatcattatgttccaagcttacatttagaaattgtttgcatgtattttagaagcaagccaaatatggagatgccccaccaactgcgattgatctttttaaagaatgccattgtagcagcaagactggttttttgagcctgtaaaggaagcaattgacacaatggaatcacttgtggttggacctggagtagaagggaaagaatccaatacccctatagaagcagttgttcaagtgtttgcttcatcaaaatttcttcaaaatattggtcttgtacctgccacaaagaaaagcggcaatggtggtagatcctacacgtgtggcgaccgagcagaacttgaatcagagaagcaaaactcattagaagttagagctcagttagatgccctcaagaagaaggtagaagaatcagaacaagcaagggttaaggagttataaaagattaatgatctgcaaaaaggagcagatgagaccaatgctctccatcgtcttctctttagcctaaataagtagttggtcgattcaatctaatgtggccctgttatctcatattgctatgggccctgatttntgttgtcctttcggtactgtacattgcactctatttaatggtagtttgatgaaatatgat

SEQ ID NO: 155627 - DNA, 169 bp, Zea mays
  Clone ID: MRT4577_73514C.1
gcactcgtacgtagtctattgatcctctagaacaaccacccctttgtaaattttttttaaaaaaaatttttggggctttttttttttcttatctttatacataaatcccaaattccaatccctttatacgggtggggattaaattccggggggacaaactattctttaa

SEQ ID NO: 155628 - DNA, 545 bp, Zea mays
  Clone ID: MRT4577_73515C.1
cggccgaggtacaagctttttttttttttttttttttttattttttttttttttttttttttttttttttttttttttttttttgttggttttttttagggggcatttccggcccttggggggccgttccggggggttccgggggggggcccaagctgggggaaagcggggccatgggggttcccggggggaaattgttttcccctaaaaattccaaacaacatacaacccgggaaaaaaaaggggaaacccgggggggcccaaagggggagcaaacgcccttaagtggcgggccgctcacggcccgtttaccaggcgggaacccttgcgtgcccggggcttaaaagaaccggccaaagcccggaaaggggcggttcgcctttggggggcttttccccttccctggtaacggacgggtttgccttgggggcccgcttgcggagagcggttaaaggtccctaaagggggggacaccggttttccccagaaccgggggatacccccggaaaaaacatggcgaccaaaaggccagaaaagggccaaaa

SEQ ID NO: 155629 - DNA, 547 bp, Zea mays
  Clone ID: MRT4577_73516C.1
ggaacaaacttctttcgggaagtcctttaccacaacaatattttgatttccaatgtagagtcaatggactcaaacaagatgagagacagtttgccgttcggctctagatgaattaactcaacaatcattaggacggtggagcttcaaatatttcgcaccccttgttgatagtggtcaggctaaacggttccttagtgtataatgcgtaccatcctttacggtcgcctcctttgggagcatatgctttaacattttggatattcttgatcttgcaccactctgaaccttcttgcagggttataagtttgaagagttcttcattacagaaaacctctagctttgcagcactagtttcttccaagtactgtggaaacagttctgcggcatagtcctgcaatgtaatgctttgcagttctgttaaacccacaagtgcattcaacttggggcattggataacccaaagccttcctagtttagggagattggcgatcatctcgagatttgggttggcatggagatgcaaatcgctgaggaggagaaaggttgc

SEQ ID NO: 155630 - DNA, 284 bp, Zea mays
  Clone ID: MRT4577_73517C.1
ccaagcaagatgaagcccaacatcatctttgtactttccctgctcctcatcttggagaagcaagcagctgtgatgggacaaaaaggtggatcaaaaggccgattaccaagtgaattttcccaatttccacacaacctggacgcacagccctattccggactaaatcccaagccacaaactgaatccaaaggcagtttttctattcaatacacatatcatgtagatgccaatgatcatgaccagtcccgaaaaagtcagcaatatgatttgaatgccctacataa

SEQ ID NO: 155631 - DNA, 149 bp, Zea mays
  Clone ID: MRT4577_73518C.1
ttaaaccaaggaacctgttttataccaatggatggggtggatcttcttaatttaaagatcaccccttctataaatttacagccaaacatttttcactttgttaaccaaattccaaccaaagctttttcaaaaattataagcaccccctt

SEQ ID NO: 155632 - DNA, 391 bp, Zea mays
  Clone ID: MRT4577_73519C.1
acgcgtccgcgcacgcgtccgctcacgcgttcggccacacgtccgtgtaggagtgcgaatacgcttagttcaggccgctggcttggttgtatgtgcctttgatcagcagctagaatctggtgaacgagaagtagcttgagaccgacaacggagatctggccgacaggatatggccggacttaaggagccgatcgaagccaagtaacggctcttcgacggaaatgacattggacacaccaattacgatccatacagcacagtctgctcactcagatgagtaatgactagatctacggccacatgctcatcaatgctggcatgatattggagaataatcagacactggtagagctccgagttccagtcggagacgaccgagtaggctgcatta

SEQ ID NO: 155633 - DNA, 632 bp, Zea mays
  Clone ID: MRT4577_7351C.1
accagattgtccgtgatggtcagcctgccgatgaagaagcctccaacgcgcaggcgcaggaactccgtgtcgaaggagtggccgtgcggataccaggtgaagccccgtagcaccgggcgcgggatcgtcctcaccggagacagcccaaggtacctggccaccgcggagtatgtgccctcgcacccgatcaggacctgaaagagctcgatttcaggcagaggatatatatatatatgatactgtatgtatgaccatcgattgcatgcaagtttaaccttggccttcatggcagtaccgtccgccattgtcaggacggcgccgtgaccgccgccggggtccgcagcgacggcagcgacgcggcagccgaatcggatcgcgcctgcagggatgtccttggccagtgcctcgatcaggtcctttctgtttaagcatcggagctccatccttgcagcagcgcgcgaacaggcaatcagaaatcaacaaagaaggtttgcatacaggcactctgctaggtgctagctttgcatttgctcctggactgactggagtaagtactatacgtactgaccttactggaacctttcccggctcgtttgctccctctgccacacgtcatggtacctgaaaccgta

SEQ ID NO: 155634 - DNA, 573 bp, Zea mays
  Clone ID: MRT4577_73520C.1
gggtacctcgaggccggccgggccggggttttgcatttttgatctatcggtcatcgcattccattccattccattccatcccatcccgccagccatccatccatggagtcctcctcccacatcaccggaggggacgacgccgccggcggcgagggctgcaacagctgcgagtcgggctggacaatgtaccttgcctcgcccatgcatatgcatggccacgacgatgacgacgacgctggcggtagcgccaaccaagggagcagcgtcgacgatggctacggttacatgatcagcggcggcggcaataagaagcaggattacgacgacgacgatggcgacggcgactccctcgcttccgatgcctccaccggcccagctaaagccgccaacaagtcgccgtcgcccccgccggaacacaaacacggcaaagaagacgacgatagagggcatcgtggtggtggcggcggcaaggaggagacaaagctcgccaccagctcacgcaagaaagctgctgctgctggcaatggcaagctcatggacaaagcagcagcagcagcagcaggaggaggagag

SEQ ID NO: 155635 - DNA, 412 bp, Zea mays
  Clone ID: MRT4577_73521C.1
aaaccataaatttccattatgatcaatatatactactactccaacccctaaatacacacgcaaaatctataggggctggaccttggtgggctggcttagggtgtgccagggcccacctagaacaccctgtaggtccgcccctgatcactaccactgttcatcagcagggtatttaaatgtactgtagctaataataagttgctaaaaatttgctaattagctagctaacaaatacagtagctagctaactattagctaatttgataaaaataactaatagctgttctttaactaaatttaacaactaattattagcttcagttcaatcaaacaccccttactacgtgcagtggtcagttccttccttcagacaatgctgtcgaagtcgctcttcgattcgatgtcaatcccc

SEQ ID NO: 155636 - DNA, 689 bp, Zea mays
  Clone ID: MRT4577_73522C.1
cattgggaccctcgaggccggccgggttgctgtcgtagttagccttctataaacgttctacaagctgttgtagcaataatacttctttccttccgggtataaaccgagatggtcggttaaaaaaaaaaaaaaaaaaaaaaaaaaaaaaaaaaaaaaaaaaaaaaaaaaaaaaaaaaaaaaaaaaaaaaaaaatccccacccgcctggttacccttggcttggggtgggttttgaccatttgcaaaccctaataatggccgaatatggaactcctttttccaaaaaaaaaaaaaaaaaaaaaaaaaaaaaaaaaaaaaaaaaaaaaaaaaaaaaaaaaaaaaaaaaaaaaaaaaaaaaaaaaaaaaaaaaaaagaaaaaaaaaaaaaaaaaaggggccccccccccccccttttttttcccctttggggggggtttttgggcccttggggaaaaccggggaaaaaatttttcccggggggaaatttttttccccccccatttcccccaaaattaaagcccggaaataaaaagggaaaacccggggggccctaaggggggggcaccccccctttatttggggggggcccacgcccctttttccaggggaaaaactgggggggccccgtgtttttggggatcgccccccccggggggggggggggtttggttttggggggtttttccgtttc

SEQ ID NO: 155637 - DNA, 211 bp, Zea mays
  unsure (1)..(211): unsure at all n locations
  Clone ID: MRT4577_73524C.1
tatatacaacgcacaccnggnnanggaggggagactaaaagaagagggtgtgcggtcaaagcaacaaaaaagggccgggaggggcagacaaggccaggggcactctgtaaacggcaccaaccatcaaagcaaacaaggcacctggcacggccgatagcgccaagagcacaaaccgggcccacggccagaacaagaagaaaaaaaagggaag

SEQ ID NO: 155638 - DNA, 1080 bp, Zea mays
  Clone ID: MRT4577_73525C.1
cggtcggatgggcttcctctcctagtccttcccatgatcccatcccatatatcccagccaggtcacccagagagcgagaagctgattgcgccgcgccctagctagcgctctcggccgcatcgccggacgtctattaacccgccgccgctcgtcctcggcatgcgcggttctgctcgcctgcgagatggcgcctgcagtttccatcctctcggccaccgcctccgccaagcgaaagcgccccgccacttccgacgctgatgagctcccgcacgacgactcctccgcgccccaccagcaggtgcagggccagggccagcaaccgcggcagcagcagcagcttgagtgcccgcgctgccgctccaccaacaccaagttctgctactacaacaactacagcacggcgcagccgcgccacttctgccgcgcgtgccgccgctactggacgcacgggggcacgctgcgcgacgtccccgtcggcggcgcctcgcgccgcgccgccactggcggcggcggcggcaagcggcgcagggtctccgccgagccctcatccccgccgccgtcggtcgcggacgcgtgcctgccgtccgccttcccgttcctcagcgacggcagcttcttcccgcagctcgacctcgtcggcggcgttgcgcttgcacccccggccttctcctcctcgtggcagtcggtgctggtcccggacttgtacgacgggctcgcgccgtgggacgacggagcaacggcgggcacgtggggcgacatcggtggcctcgacctcagctggacactgccggggaactgagtgccagccgccgtcgcgcgtcttgaggggctccggttttagcagtgcggcctcgtcaggttcagttcagttcagttcctagcatgcagagctctcacaattctcctatgtcgcctccactgtttcttctcgtccttactgcgaatgaaatggtggggctgctagttagatcagtgcatcttgatctgtagctagagccagaatgtaagatctgtgcagtgatttatcgtgacaataaaattaagtttgtgtcaaaaaaaaaaaaaaaaaagcggaccccc

SEQ ID NO: 155639 - DNA, 261 bp, Zea mays
  Clone ID: MRT4577_73527C.1
gcaaaaatcctcccattttatcattcaaattgctgtttcctttttactctaccacagtttgattacaaaggttagtgtttgcaggatcttgtttaaaacccttggccttaccttggaaccgatggtgtaaccaaggtgtttaacccggccctataccctttggcttttgaccccggtgctttttttctcaaaacatccggaaattgtccgcaatatttttcccttccagaatgggcagttgtttttgaaatatttaaaccc

SEQ ID NO: 155640 - DNA, 795 bp, Zea mays
  unsure (1)..(795): unsure at all n locations
  Clone ID: MRT4577_73528C.1
atattcccttgtctttacttgccctatacttcccatactcgaatcgtgtatggtggtagctcctaaatccttcggcgggcagttaacccccaatcattgatccctcaccagcttgggggcggtttcgctccggttcttgcgcttcggctccaggccatggagcagcggaggtggctcgcagtagccgttttgatgtgcctgctggtgctttgctccgggagagaactgaagaccaaacacgtgcccatatatgacccagtgctggcccggacacttgctgaatatacttctgctgtctatactgctgaccttacccaactgtttacatggacatgtgagagatgttgtgacttaacagaggggttcgaggtgatagagctgattgttgatgtgaaaaattgcttacaggcatatgttggatttgctagagacatgaatgcagttatagttgtgttcaggggcactcaagaaaacagcattcagaactggatcgaagatttattctggaaacaacttgatctcgactacccaggcatgcctgaagcaaaggttaatgttgggttcaaggatgtgtcactcatgacatttgggcaacctcggattggcaatgctatatttgcatctaatttcaaaagatatttgccgaatgcaattcgattgatcaatgcacatgatattgtgccccatttacccccatactatcgctactttccacanaagacataccaccattctccacgagaggtatggattcattatgttggcctaggaaggctcgtatattcgattgaggaa

SEQ ID NO: 155641 - DNA, 247 bp, Zea mays
  Clone ID: MRT4577_73529C.1
agttaccaaaacgcagagggctaccgcctttagccaagcaaatacaaacatacaatagctctaggggatcagaggggagggagggagggagcaagctctattagaatacatggcaggctggacaagggtggcactaaatcatatatacagccgacggggcaacatagcagacatcatactggagcccaagcgcgcggaagaggctgaccagaggacgatcactccacagcaacccagaatcaaacaa

SEQ ID NO: 155642 - DNA, 274 bp, Zea mays
  Clone ID: MRT4577_7352C.1
ctcggaatatttgacttgtcaaagttatcagagcatttatagttctaaaatatctccccaaccaggactcaacagcagcacttctggggaagatgtaactctgtatgcttctgctcaaagtcaaagcctgcatacggaaagcggtcgagattcgtccactagcatttgtggatctgtggcttcagacactttggtggaagattacgtttcatctgaactggaaacaactaataattttgatggatcaattaaagattcacaaagatctagtgac

SEQ ID NO: 155643 - DNA, 1762 bp, Zea mays
  Clone ID: MRT4577_73531C.1
aactagcctattggttaaggacttccgagtagcacctccaagtcctgggttcgattcccctcgggagcgaattttcaggcttggttaaaaaaatcccctcccagtattatattgagaagagaccgaaacatggtcccggccgagaaaatcctcgaaccctagccctcaatcactagcaggccatcaccgcccactctgcaacgggccaacggcccagccggagggtggtgtgcaagatgtaatccgggagcggatggggcacaacaagagattttttttaaccaagccagaaattcgcccccaaggggggtacccaaccgggacctgacggcattgatccctcaccggttggaccaattgcttcccgccaatttttgccggtcctgtctccggtaagacggattccgattccgttgttttcttgccaaatccttcgcagcttgggggcggtttcgctccggttcttgcgcttcggctccaggccatggagcagcggaggtggctcgcggtagccgttttgatgtgcctgctggtgctttgctccgggagagaactgaagaccaaacatgtgcccatatatgacccagtgctggcccggacacttgctgaatatacttctgctgtctatactgctgaccttacccaactgtttacatggacatgtgagagatgttgtgacttaacagaggggttcgaggtgatagagctgattgttgatgtgaaaaattgcttacaggcatatgttggatttgctagagacatgaatgcagttatagttgtgttcaggggcactcaagaaaacagcattcagaactggatcgaagatttattctggaaacaactcgatctcgactacccaggcatgcctgaagcaaaggttcacagtggattttattctgcttaccacaacacaacaatgcgtgacagagttatgagaggtattaaaaatactaggaaactgtatggtgatattcccatcatggtcacaggacattccatgggaggagctatggcttcattttgtgcccttgatcttattgttaatgttgggttcaaggatgtgtcactcatgacatttgggcaacctcggattggcaatgctatatttgcatctaatttcaaaagatatttgccgaatgcaattcgattgatcaatgcacatgatattgtgcctcatttacccccatactatcactactttccacaaaagacataccaccattttccacgagaggtatggattcataatgttggcctaggaagcctcatatattcgattgaggaaatttgtgatgattctggagaagacccgacttgtagcaggtccgtgagtggaaacagcgtgcatgaccatgtacactatcttggcatcagcatgcatgccgagtcatggggacattgcagaattgttacggacaatagtaccctgccacagcagtataagatggatcctgatggcaatataatcttgtcgaagcagcctggcttatcagtaaatgaactacacagtgcacagtgaaaaactcaagatagcgttaataaatttcatttcttgtatgatcctctgatggactcgaaggggatatattaggacggacgaccttggctacaaaaaaaaggcagcaatcttcattctataggatgtatgtacatatgtctgtgatgttagttccaaaccttagcatctgctatctgtatatgatgttgcagtaaaatcaaacttctctttacacggaatactgttttggtctagacccccgcc

SEQ ID NO: 155644 - DNA, 417 bp, Zea mays
  Clone ID: MRT4577_73532C.1
ggggagccccgaaagaaaacccttttaccaaaaaacacgaagaccagggggcacaccggaaacttattgccccccggggggaacccggggaaaagaaccctgcccgaagtgagggggcccaatttctccccggtattgccccccaaaataaacgtggggatgaacctgcggggaaaaaacccgaaaactcccctatttgaggggggaggggaggaaaaaccgttgcggggggtgttaaaaaactttgggggggcccgtatacaaaagcaccggggcgccccccaaggggggggggggggggggcccccccccccaagatgaaacccccccctttgaaaaaaggagaccacatccctcttttttaaaaaggggggccttcaacccggagaaaagtgtccgggaaaaagatttttttgg

SEQ ID NO: 155645 - DNA, 841 bp, Zea mays
  unsure (1)..(841): unsure at all n locations
  Clone ID: MRT4577_73533C.1
aatcggtgccttcccctcttctccttggaacctctggactgagctcctctcatcagcgtgcgacgaatctccgcccgatcgaatctccagggtgataacagggatggctactggtagtgatgctggaaagtccgctgaggcagtgttggagtggcctaagcaggacaaaaagaggatgctgcatgctgtttaccgtgtgggagatctcgaccgcaccattaagtgttacacagaatgctttgggatgaagctgctgaggaaaagagatgtcccagaagagaagtacaccaatgccttccttggatatggacctgaggatactaattttgcacttgagctgacttacaattatggtgttgacaagtacgacattggagctggctttggacattttgccatcgcaaatgaggatgtgtacaagctgtctgagacaattaaatcatctgattgttgtaagatcactcgtgaacctggtcctgtcaagggagggtccactgtgattgcctttgcacaagacccagatggttacatgtttgagcttatccagaggggtccgacgcctgagcctctctgtcaagttatgcttcgtgttggtgaccttgatcgggctatcatgttctacgagaaggcccttgggatgaagcttctgaggaagaaggatgtgcctcagtataagtacactattgccatgatgggctatgctgaggaggacaagaccactgttctggagttgacatacnactatggtgtcacggaatataacaagggcaatgcacatgctcaggttgctattggcactgacgatgtgtacaagagcgctgaagcagttgagctggttacc

SEQ ID NO: 155646 - DNA, 307 bp, Zea mays
  Clone ID: MRT4577_73534C.1
ggaagggaaaccaaccaactccaagcaaaaacctggtggggtttttatttcatgaagcaacagttcgtagtccaccagggcaaagcctttttatggatcaagattgttaacagcacacacattttttttcccccacaagtttgggtttaaccagcgccagatcaaaggcggtaaaggagtgtggagccagcttgacctgcatttgtttcgggggggtgtttagttggttttttaccggcgcaaccttgtttgggttactgaaggagtttttgtccatgacgttgccaaacgggaggaccggggcggt

SEQ ID NO: 155647 - DNA, 245 bp, Zea mays
  Clone ID: MRT4577_73535C.1
tttgggggggattaatacaagaatttgggatttgccacaccaacctccaacaaccatgagtgaacacacctgtccatccatgacgaggacaacaacacccatggtgcaacccaaacataacctgctgatacgactaccgtcgacctgctggtttaaacctgaacatgctgtctcgctcctccatcattttgttcgcaatctcaattacctccgggaaatgcaaacggaccatgacataccaattt

SEQ ID NO: 155648 - DNA, 389 bp, Zea mays
  Clone ID: MRT4577_73536C.1
atgttataaagcaacacaagcaaggaaaaggggcgggtttaaattaaaggaaaactaaacacaccctaccaccattttttgacgacccatgccaccatctaataaaacaaattacaagagataataaaacaatgacctcctccaaaaaaaatgttacaaaaattctcctacataaatcattaatttcttcgaaatgaaaagcaaaaacttgaccagatccttactggtctggacccagagcgaactgctcttgatcatcatcatttttctccatttaaacacctactgacccgtacttcttttctaaaaaaaggaactggaaccggttctaaccataaagcacaccaactccatcaattgtacgaataaatttaacaccatacaccctt

SEQ ID NO: 155649 - DNA, 578 bp, Zea mays
  Clone ID: MRT4577_73537C.1
gccggccgggtccggacctgctaataatgacttcaagcgcatcttgcctcctcctctccacccacccgtgagaaggcaagtgaagccaagagaagggtatctacgatatggccgcgaacactgaacggctagcatttcgaaggccggactccatgacctacatcggataatcgacaatctgctctgggctggcaagtacactgcatcgaggaggcctccaagcccccgggcacctccccgccgaactctaatatctccattttgaagtgcacgaacgtgacgcaaaagacgcctactacaacaacaaaacccgcagagtaacgcgtcacatccagcttgctgagcgctaccaacagaagatgaccaaactgttggcaggtgtcagcaactcgagagtaagtggtatggctaacatacatcatgcatcagatcccctacaatgctgccacatgcaacgtcaacgatgacgacgacgatactgagactgcttcctgcagaaaagatccccaaaccgccttgtcgtgcaagaactagaggatgccgccttctatcggaaatcgatatcaatatgatggaaa

SEQ ID NO: 155650 - DNA, 440 bp, Zea mays
  unsure (1)..(440): unsure at all n locations
  Clone ID: MRT4577_73538C.1
accggannaaaatgtgtgaaatctcattgctatcggagctggcattcaatatgacacttgaaacctcacnaaggtggtgccggcgttcatactcgaaagatgacactttgcttgctatcacagagagagcctggcccatatattatctccacataccaccatatctcaccggtatgctacctggggaccggaatcagcaactgtgtcatacgtgcctcacggctgtaataatccaatatggagtgttgtgcacgntccatcccaactgcacctttcacgatgaagggccctgcgcaatataagcccaaagacacagaagaaagagaattgcactttctcataaccagaagccggtgaagaggaagacaggaggtgattcttttacaacacagtccactggagagattcnatgccgatgtaccgatgaaaccgctcggagc

SEQ ID NO: 155651 - DNA, 348 bp, Zea mays
  unsure (1)..(348): unsure at all n locations
  Clone ID: MRT4577_73539C.1
nacaggcattactatactanacattaatattatttccacctaatgtaacaatccggtagggtaataccaggtgggcattcttccttcaattctcttacttttttctatattaaaatataactcatttataactttacccctgtccccactgacatcactctcataaagggcttaatgatgtggaatgatgctctatacttctcttcttcataccatttacttgctcttggcagatggccatcattaaactaatcctctctgggtggttttgcttttttctgtttttgtcaagaccagctttaattatcctctatgtagattacccctttaccctttaatcaaaccttt

SEQ ID NO: 155652 - DNA, 423 bp, Zea mays
  Clone ID: MRT4577_7353C.1
tttattttttcatgcgatttatccatacttttactctcctatacataacttatgggctctcttttcagaccgatttgttggtgacccattgttccagatgctttccgcgcaggcgcgaacagcgggatggtataaaaaaaacgggggaccgttgtgtgttcccacacctgaataaaaactacgaaaaaggagtgcacgcttcttcaaaaaaaaaggggggcaagtcatccaggggctagaaagagaccaaaaaaaagccccggggaaaaaaaagacgggggaccgcctttttacaaacataaaagaaagctgcccgcgaccctcgacagcggcaggggggggcccacccacaccaggcctaaatttaatctcccccacaattaaagagggcacccgcacccccagaggggaggtgaaaactcc

SEQ ID NO: 155653 - DNA, 182 bp, Zea mays
  Clone ID: MRT4577_73540C.1
atttatcaacaagttcttgttgactcagggcataatgagttcctgagacatgctcttttgggggctggggctttaggtagaagaatttcaaggacaagaattctcagcagagctcaagattgtaagaactcaacagaagctggtaaaaacatgggagcccggaggacaggctgctgtccagg

SEQ ID NO: 155654 - DNA, 622 bp, Zea mays
  Clone ID: MRT4577_73541C.1
ccggccatgaagcaatctcctgcaaatggagcacagtgatgaaggagacgcttatccctcaaccggtcatgcgaggacactagcccacattcagtgagcctacaccttgcctcaacctgaagatcatgtaccaccctaaaatgatgaactatagtgcctgatactgatgacttacattggtcaatgacctcagaattttcaataacgtgactgtgagaaaagcttgaatttatactggactcaaaaaaaaaaaacccctccgggtccctaacatttccagtttgtgttccatacaactctcgttacttgacacgcttgatgtactcatggtactatgtgctgcctggaagaaatggcgatccagctcctcatactccaaaatgtacgacccgcaaagagaccgcttaaagtctgtccacgcctcatccgagtgagctaacatcacataagactgaggacatctcactgaccttatttccagcagctcaacctgaagagcctgatgttttacctcatccaccaaatcaccgaagagaacacccataagtattgcagggtcttgcgatctttcactttctgataaatgattttcggtcatacgattgctaggatctgcatcagc

SEQ ID NO: 155655 - DNA, 345 bp, Zea mays
  Clone ID: MRT4577_73542C.1
gctccaaacaccccagggggcggggtttattacacttattttttattaggttatggcaaatccggcccgccggtttattatctaatttaaactaaaatacaacatgtttgcactaatgttaaacctaactttatatgaattcaagtgtacacattatgcggacaccaaatgggtattgcatactatgtaacactcttcaacaagagagcatatagctcgacacgatcatatgctgttggcccttagcgagagcttgtgtggttttgttgtaccgtctacaccgagaaaatgctgaaaccatgcggggggccacctgagggtttatcttgtcaagctgaaaaacgt

SEQ ID NO: 155656 - DNA, 389 bp, Zea mays
  unsure (1)..(389): unsure at all n locations
  Clone ID: MRT4577_73543C.1
cacaaacacaccaagcgaatcgcactatcttttacctaacaacaagggttaccaagatatgtagcacctgcttgcgcttgtagcccttntagngagcgcaacagatgcgtccattattccacaatgctcactagctactagtgccattattncacagttcctgccaccagtttnnnntnagtgattanatttnntatcttatcaagnnnnnttgcaacaacaagcgcttgcggagagcgtcttacatcaaccaattgcccaactgcaacaacaatcctagncacatntgaaattacaagccatcacaacgaaacagtaacgacagtttctaccaacactgatgcacctagccatggtgaaccctgtcagctacttgcaagaacagctgc

SEQ ID NO: 155657 - DNA, 931 bp, Zea mays
  Clone ID: MRT4577_73544C.1
acgcggacgcgtgggcggacgcgtgggagcatcgctggctcatctccacgctgtgctcggtgctcaagcgcttgttccttagctctggccacaccagtctcatctccctactactcgtcgttcgacccatgcattccagtcgttacctggccgtgcgggtgcagtgcaggggcggccatgggtgcccagccgaccactaccgccttgcactcgtgctggttctccgcgtccttgctgtggagcctcagttgccgtgcctctctgctcgcccatggcgctccggccaacctcgccgaccctgtgcgtgcctcaacgccgtcgcacgccctgcttcctgctcaccgatcttccctgcgcgaccagccgaagcacctcccatggcgcgtgttcctcctcggccgcggtgcttctctgctggccgacgttcttcccagccgcggagctccctcgtgtccacgcccagccgaagtcccttccacctgtgcagcaccctgttgtgtctctcgccggtgacggcagagccgaccgtcgccagctctccatcctcgccgtcgagccgtcgttctcctctatgctcgctgcccatcgcgacattcctaatctgtcacgccgtactcgaatctcgccgattgaccctgccatccttgttccctctggttatgacagaatcagaaatcatagccgtgctcgtggctttcaagacggtaagtggattcgttattccagtcgactaaatataatatttattagactacttgaatcgtgtacggtgatttaatcggcagtcatacgtgttgctgattccttgtgttataatagttattacgttctaggtagtttgtttgggttattagtttcgagtaaattaatatcagtacggtatttaacatgtaattgacgaaaaacttggattccaaaaaaaaggaggaaa

SEQ ID NO: 155658 - DNA, 489 bp, Zea mays
  Clone ID: MRT4577_73545C.1
gctcgaattccgttgctgtcggtaatggaatgcatgcagtgactcacattgatttctcatcggctcccttatttatttatttatttatttacgtatcatctctcaattgtgtatatcatctatgcactgcctaaatccaggttagataataacaaactgattcatttccacaaactttgtgcactattgtgtgaaatatccaattcggtatctgtataaagagggcttgtactttgaatcagcatcctgcagatgcacaagccttcttgctaggtgcttggcatcagtagaaggaacactctatttggcgagattttaggcagtagttagtaaaaaatgtcttattcgccaaatctgtatgtctaataccgcttttaaaaagttgtcaaatgaagtgtttgtcttttattatatctaacctcctatttgctccatcaggcaagttgtgtagcgcccgatagggcgctgccttattctagtatctttaaa

SEQ ID NO: 155659 - DNA, 832 bp, Zea mays
  unsure (1)..(832): unsure at all n locations
  Clone ID: MRT4577_73546C.1
aaatcctttagcagagtaggagcatacatacgtctgcattctaagctggagtagagcagaagtagtatatcgccttacgggtctctgcaacaagtccgtccaccgacgagtactgatcgatctggtgcgatcggaatgggcggcctgaggagcacgcaacacgattgcggcggcggcgtcagccactcgctctcgttcctcctcggggctctcctccccaccgtgccgctcttcttcctcgcctccgaccgggtcgacgagcagctgtccagcatatcgaccttcaggttcgggaacggatcggcagctcatcagctgactcgccatgccgctagcctcccgacgatgtcggggatggtgccgacgaaaaggaggagtcattcccggggctggcggagctgctgccgagggtcgccatggacgacgggacggtgatcatcacgtcggtgaacgaggcgttcgcgcggccgggctccctgctcgacctcttccgcgggagcttccgcgacggcgaggggatcgcccacctcctcaaccacaccctcatcgtcgccgcagaccccggcgccttggccctctgcgaggccgtgcacccgcactgctacctcctccaggtcatggccgccggcgtcagctccgccaacggcttcctgaccagaagctnacctcgagctcgtctggtccaagctcaccttccagcaccgcgtcctccagctcggctacaactatctctaccccgatctggatgtgatgtggctgcgcaacccgttccggcacatcagcctctacgcggacatggncatctcaaccgaccggntcaacggcgacgctg

SEQ ID NO: 155660 - DNA, 342 bp, Zea mays
  Clone ID: MRT4577_73547C.1
acgctcaccacctcccccacctccaataatttatttattgaaacctaaacatctggaacgtttacttaacacttcccaactaccttacaatttcaaagccttcaaacatccaaacactgcttcttacagcatccacttccataagtgacacaactttaataaatacatagatgaatgccttgtccactgcccggcatatttaactttcaattgttctacgcacttgtgcttcacatacccttaccatatccaaataaataccttcaaatccatccaaatataataggaacctcattattcccttttcttttcactttaccttagaaatgctttcccaaattc

SEQ ID NO: 155661 - DNA, 669 bp, Zea mays
  Clone ID: MRT4577_73548C.1
cctcgagggagccggccggggctgacctgcctgtgcctcgcacgacaaggcacggcaccaacagaacggagcgtgcgagcgtgcgtgcatgccctccaggccacttggcatcgcggtgtgcacccgtgggagagctctcgcacccacccacacccacccatcgacgacctcctgtcggggttccgaactgaacacaggcgggcgggtccatgcagggcgccgatccagcggatagcgacgctgcctcgagccgatccaacggccccaagaccgccagcgagtagtcctcatctccgcagtggcgtgcccatcccgaattgcgcgggccggcagagctgcaactgcaactcccccctcgtctgcctatcccgacgccgacgccgacgccattttctccgcttcgcctgctcagcggcgccagccacccgtcgcgcgcgagagcttctgaagcgcgtgcgctgctggatcggctgcgacacggctgccactggcattggcgttgcgctgctgcttttatttatatacacaaaggggaatttaagcgcagcgcagcgcggttggtcaatactatacgatcaagggaagcgtaccgacgatcagacgactaattgctgcaaataaattactgactaatcgtgggcggagcaggggatgatggccacttgcgct

SEQ ID NO: 155662 - DNA, 265 bp, Zea mays
  unsure (1)..(265): unsure at all n locations
  Clone ID: MRT4577_73549C.1
atctttgcaaannncccaaccaagggtttgaactattaccaaaacctgatccatcaacattgaggggagaggcaagatccacttcaacaacatggaatgcagtttgcaatgcatcaccagcctctttcctctcaagccaataccccttattttttcaacaatggtgctattccaccttaggataccaaacaaaagcctaccaaaccttttgcttactttaacaaccccagaagattccccaaccgttccaacctcaccttttttc

SEQ ID NO: 155663 - DNA, 299 bp, Zea mays
  Clone ID: MRT4577_7354C.1
tcggcgggccgtacgccaccacggcaacggagaagaggactttcaactgcggcggctggcccgcgcggcgaccgggattggggatgggcgcacaagccgggccaaccgtccggggtggctgcaacaataccaactgattggcaagaatggggaagggacctatgggcttgtctttcttgcgcgccttaaggcgtcccaaccggcaccttgccgacgcgggccccctattggcataaagaagtttaagcagtcaaaggagggggaccgagtatcacccaacgcaatttgagagatcatgc

SEQ ID NO: 155664 - DNA, 515 bp, Zea mays
  unsure (1)..(515): unsure at all n locations
  Clone ID: MRT4577_73550C.1
cctgctgacctgcctgtgcctcgcacgacatggcacggcaccaacagaacggagcgtgcgagcgtgcgtgcatgccctccaggccacttcgcatcgcggtgtgcacccgtgggagagcgacggcgaccgcgatcgactttcccgaggccgtacgtggctggtccaagactccaaccaagtccaaggatgatgcccctgccatgccgctacctcgagtggaaggaagggaagtgtggaacgaccgatgcatccatccaccaaagctctcgcacccacccacacccacccatcgacgacctcctgtcggggttcacgtttgcgaactgaacacaggcgggcgggtccatgcagggcgccgatccagcggatagcgacgctgcctcgagccgatccaacggccccaagaccgccagcgagtagtcctcatctccgcagtggcgtgcccatcccgaattgcgcgggccggcagagcctgcactgcaactccccccccctnntctccctgtcccgccccc

SEQ ID NO: 155665 - DNA, 171 bp, Zea mays
  Clone ID: MRT4577_73551C.1
gggtcgaggccgcgtccggtgagatggcacaagccatggcgtccatgaccggcctctcgcagggcgttctgcccagcaagcgcgccgccaatagggccaaaacgggcgccgtcgtcaaggcgtccgcctaggcgcaagcgcaagcgggccgccgcgccgtgctcgggctgg

SEQ ID NO: 155666 - DNA, 831 bp, Zea mays
  Clone ID: MRT4577_73552C.1
attgggtacctcgaggccggccgggacgccggaatcaataactgcggttcgcctgctcagcttccccagccacccgtcgcgcgcgagagcttctgaagcgcgtgcgctgctggatctgctgcgacacggctgccactggcattggcgttgcgctgctgcttttatttatatacacaaaggggaatttaagcgcagcgcagcgcggttggtcaatactatacgatcaagggaagcgtaccgacgatcagacgactaattgctgcaaataaattactgactaatcgtggccggagcaggggatgatggccactcgcgctgcacgatttcgtcaataaacaacggcggaagtactgccaaatggaaaagctagtggaaacaccgaaagctctacctttgccgcgtacgcatttcctactgtcgccgggaggaagaagaaaaaaaaacctgcgcagaatcaatcgtcgagaattcggaattcacaagggccaagaagaagaatctgcgtacgccctatcaagtgctacgtgcaaaaccattcatgcatcttcttaactggccaaaaaaaaaaaagccatgtgctgcaactcccaactccaagcaaacatggcaccgtggaggacaaataatgcgagtggaggtggaaatggtctcacctttttttttttttgccctccactttgaagccactgttcttctcatcgcctgcgcgcgagaaacttcgtctcccacctacctttcccgggcacctgattcccccactgagatgcacctttcttttatgtcctttcctgagaatgcacctggtaatttctcacaagacacaccacacat

SEQ ID NO: 155667 - DNA, 2308 bp, Zea mays
  Clone ID: MRT4577_73553C.1
tgcggcgctcggccggccggtcgggagcaagatcggaacaaactcggtcgcatgcgcatcgcagcccttccacatgcgggtgggtgaggtggacgacttccgatagacggggtcgggcatggattgattggtggaggccgtgcccccgtgctcatgctcggcgaggacagttgttattattatcctccttcccttcttgtgcccttgcttggaccatatacctgaagtagcagcttcccttctccgtggaagaacaacagaagaaaagggggtaggtaatcttaggcgccggcggccgccggtccccgcgatggacacggagaccggagatacccggtctcccctgctgccgcatcaccctcccagccagacgcaggtatcctcagcgaatcagcactataacaaacccttcagctggaaggccccagccattattttggccttcgaattcttggagagcattgcttactctggtatagcactcaacctggtcgtgtaccttggaaccgtcctccatggaaccaccgcctccaatgcagcgaacgtcgatgcgtggaacggcgccacgtttcttacgccggtccttggagcctttcttgctgatacatactgggggaagtacaagaccgcagctatctccataatattctacgttgttggcctgctcataattaccacctctgccgtcataccgtccctacggcctgcctcgtgtgaaggcggttcatgcccacctgcaacagggtttcagtattttgtgctctttggttcattgtacctcatctccattggtacggggggcgtcaagtcagctttacttcccttgggagcagatcagtacaatgatgcgaacgccgaagagagtaaaagcaagcaactgttcttcagttggttcttcatggctgtcaaccttggagtgttcatctccggcactgttcttgtctggatacagcaaaatgtcgcttggtctcttggattcggcatctcctcgatatgccttgttatcgccgcagttgcctttttggttggaacaccgctttacagggttcaacttccaactgggagcccactcaagagtatagtcatggtgtttgttgcctcttataagaagagaggagtggcggttcctgctgatagcacactgttgtttgaagggaatgaatcaagcagcattgtgccgaacaaaattgaacacactgacgaattcaggtgcttagataaggctgctgtcgttgtagaggaccaagagatgaaggacagccatcgcccatggctattatgtacggtaacccaggtggaggaagtgaagattctgatccggatgcttccgatatggttcacctgtgtcttctattcggctgcaatgagccagactgctaccactttcgtccagcaggggaacgcgatgaacactaagatcgggtccttctcggtgccggcggcctccatgaactccgccgaggtgatcttcatgctcgtctgggttgtgttccaggacagcgtcgtcatcccgatagccaggaggtacacggggaacccgatggggctgacgctgctgcagcggatgggcgtcgggcggttgctggcgatcccatctctggcggccgccgcactggtggagacgtggaggctgcgcagcgtgaaggccgggcataacctgagcatcgggtggcagctcccgcagttcgtgatcctggcctgctccgacgtgttctgcggcatcgcgcagctggagttcttctacgcggaggcgcctgcgtccatgcgcagcctgtgctcggcattccagttcctggccatgtcgctggcgtactacgtgaacacgctggtggtcgcattggtggcgtccgtgaccacggcctggggcggcaagggctggctccccgctgacctcaacgacggccacctggactactacttctggctgtggacggggatcagtgtggtgaactacgtcgtgtacacggcatttgcaaggcgttatacggtcaagaaggttgtcggtcagtaaggatccagactatctgtatgatcaattactgtatcttattgtattttgcagtgtacactactccggaaccgagacttttggtgttcatttgaatgcatggtcctctgtacaagcctactagcgtactgtcttgtcttacgatttgtataacaatttcctggaaaaaggaagaggatttgtatgcatgtgtagattgggatgttgtgttagtgcctggagattggatgtttatttggctggtgcacaatctcccaatccatgatttttgataagattgacaaaaaaacatcttcaaca

SEQ ID NO: 155668 - DNA, 393 bp, Zea mays
  unsure (1)..(393): unsure at all n locations
  Clone ID: MRT4577_73554C.1
ttttccttggccgacgagcgtacctagccggcggccgcccttnnnnnggggggggtttttttagggaatgggccgttttttcccccctgagagtatgtgctttattatttttacaacaggggggctgaagttcaaaaacgctggagcagggaaaattgaaaacgagacaattagggaaattggacacatatttaaaaataaagtgggttgccctggattctagagaaatagaaactaaaaaaaaattgggcgccctttcccaaataaagaaagggaaactaggtaaaaaagaggccccaatggagcaaaaaaaaaatgggccagacaaaaacccaccaagggaaggggcacctgaccgggggaacaaaccatattaaagggtagcaaaaaaca

SEQ ID NO: 155669 - DNA, 1218 bp, Zea mays
  Clone ID: MRT4577_73555C.1
attgggtacctcgaggcggccgggaggatttcagcaggagatagcgcgggcggggaggggaaggagacaagtgaactcagagaagaactagcgcggcgggcgagcattgcaagccgagctgcaggggcccggagcggagaccggaggagggagacgtcgcttgcgatgtcaccggcagcatccgccgccgaaaccgccgtcgtcgtcgtcgtcgcaagcgtcccgagccagcagcagagcagccaccgcgccgcggcgccgtccgtcccgtcgtcctacgccgtctgggagaaggagcggtaaggcgtctgcagctttacgacgacgtcgtcgtcgtctgccacctacctactgctgctgctgctgcaaggggaagtaaaaaggaacggaaagggggaaggcatggaggtggaggcggccaagtgcgagtgctgcgggttcacggaggagtgcacgccggcgtacatcgcggcggtgcgcgcccagtacctgggccgctgggtctgcggcctctgcgccgaggcggtgggcgacgagatccggcgcgaggggaccatcaccacggccgaggcgctcgaccgccacgtcgcgttcgcgcgcgcgccgcgctcccggagggcgcccgcggaggacgacctcgtggcggccgtggcgcggctgctccgccgctgcctcgactcgccgcccgcgtcgcctgcgccgccgccacagagccggaaggtggccgcagggcccggctgccccgatggagccgacgcttgaagctgcttgcttaattggcggcaatgattggggggttggttcagctgctggtggattaattagttgtactagtacaagaataaacctccagtggcataatatgatggtacaagtgcatgtgtaggtcgccttcccggagaataattcgtgccggtatcatttgacgagagagggggcaaatcacgctccgtgtgtgatcgagcatgaagctattgttaagcatatcactcattggagtacatcaggacaaacactgttccattagttctgcatattcaggttgtaagaatattgtattggagtagtcaagtgctatcttcttgaattcaattcaatcgaagtaatttgatacgattgaaaaaaagtaggcggactaccatgtaacttgctcattgtgtttaggatatttcgtacctttttatcggtgttgggacccgaggggctaaccaaccagtg

SEQ ID NO: 155670 - DNA, 518 bp, Zea mays
  Clone ID: MRT4577_73556C.1
ccggccgggagacccgtccaagcccatcttacgtctacgaccggtgcaaggtctacaaggtatcctccggtcgaggcttctagcggccccggcggcgcctacgccgtcttcgcgggccgcgaggccagccgcgccctcaacaagatgtccaaggacgaggtcgacgtctcctgaagacctctccgggttcaccgacaaggagctctgcgacctcaccgcacatgggagatcaagtttcatgacaaggaccccgtcggcgccagactcaacgtcgacgtgtgaactcacaaggctctgactaaatgtactctggcctgcctcttgaagggctcaaagctgtgcttgtttgcttagtaggtagatagtttggtaccacaatagatctgaatggaaagacaatgcgatgtgcctgattgatatgaactacgacttgattactctgtagcgctaccacttgacatgatgtactctcgtgtgcgctttgaatgccgtgctcatccatgagaatgatcagtgat

SEQ ID NO: 155671 - DNA, 370 bp, Zea mays
  Clone ID: MRT4577_73557C.1
ctggctcgcctgcctgcaccggcccgtacttaattgctcgacccacgcgtgcgttcttttgtcatccgccgtcgccgtaggtctgaaggctaagatgtcttggcacgtgtctcttgcctcatggcgcctaagatggaatctgatcagcccgactctcgagatcaaagtgcagaagctcgtcctgaatatggtccccctggagagcgcataccgtctcacctgcgcacgaacggtgctatctcagctaagttgtcatacccccttcttatacaaggtgatggacacgtttcggacgttcggcatacggcataaccagaagatgctttggtacgtatcggtgtggtgcgagacggacatgcagctgcttgag

SEQ ID NO: 155672 - DNA, 438 bp, Zea mays
  Clone ID: MRT4577_73558C.1
cttaacgtcactgtctcacgctcactcactcccgtaaccacgtgcatatatatatatatatatatatatataactaatcgatcggtcataaacagctcacagatcgatatgccgccgtcttaattaatagtgaaagcttgcatccgaaattctgaataatgtcacacgtagccattgtctaatctggccacactaattatacggtgattaaattgaatacagaaaataattaatatccaagtgtcaagaaatcactcgctcccagctgtttcttctgtactctagctagtagctaggagtatatatttgttgatataatatacataacaagagctaatataacgatgctcgttccatctgtgtctgctgtgtgaatgtgcagttccacttcgtggggttctacaactgctggaacagtaagtagtaattcgttgcagt

SEQ ID NO: 155673 - DNA, 444 bp, Zea mays
  unsure (1)..(444): unsure at all n locations
  Clone ID: MRT4577_73559C.1
nttcgattgaagggagctctgatcaaaaccatttcaactccctcagatcctagtcttgcagtccacccacggcggcgatggcggagcccaagagccggcgggtgatcctcaaggactacgtggagggctaccccacggaggcgcacatggagctgctccccgccgcgcccgtcgacgaggccgaggagggctcggtgctggtcaagaacctctacctctcctgcgacccctacatgcgccccaagatgtcccgcccgctgcaccagtcctacaccgccgccttcgtcccgggcgccgccatcaccggttacggcgtgtcccaggtcgtccgctcctcgcgccccgggctcgccgccggcgacctcgtctggggcatgaccggatgggaggactatagtgtcatctagacgcccttcacggacatactcaccaagataaatatag

SEQ ID NO: 155674 - DNA, 560 bp, Zea mays
  Clone ID: MRT4577_7355C.1
tttttttttttttttttggcaggatagtaagtgcagatgcactttaggaatggaaaagatattatgctcacggttgctttcaaacttatatatgtcgacttcagaatttcacatacctgtgtacgtcggacggcgggggtgcggcaacttcaagcccgggagtcgggttcttccctcccggcggcggcgtgtcccgtggagagagacagcggtgacggctccgcactccaggcgcaggaggaggggctgtttttatgaaaggcggtggcgggcggaagcggggaacaggcggagctccaggccgcactgcagcaacggctgttcacgccgggattccgggcagcgcaatggcctgtatggacggcttcagcgggtggtggggctagcaggcggtagggaatgcggggatcgcgccggcagtggggacttcggggagtgcgggatcagaggagagcggcgtggggcagggagaagggcagcggtggagctcccatctggatctagacagcgctgggacctggaagagggggcagacgcagactgcagagggccgaggtgct

SEQ ID NO: 155675 - DNA, 163 bp, Zea mays
  Clone ID: MRT4577_73560C.1
gctgcggatgctgctgtatctctaagaatgtaaaagagaaggaggaggaaagtcctcgactgttcgcaccataaaccctaacctcgccggatcgaaggcaaaaatcatcctaatccggcaccctcccatgctccagctacctgcgcgagctcaaccgccctcg

SEQ ID NO: 155676 - DNA, 603 bp, Zea mays
  Clone ID: MRT4577_73561C.1
ccctcctcgagttttttttttttttttttttttttttttttttttttttttttttttttttttttttttggacggaaaaaaaggggggcctttaattgacaaaccactcgcatacaaagatattttgatagaactttttgggaacctaatgtttaacgcctgtccccatacactggatgggcagaaaaccccattaccaaacaagttgcacgtaaaagggcatggaacctgagcgtaaagctcctaagggggtcggggttgccgaaagtttggcgcccaattccttcctaaggattttcccggaccccaatttggggatggagggggggaaaaacaccttgggtacccttttgaaaaaaaccacctgtttggaaataaactccttgagggcgtcctccgcaatgtcggggtcgggggcgcgaaccacaaagggaaggggaacctcgccgggggtttcttctttttggggaacaacggccgcttcggcaatggacgggtgggcaaaaaacaaaaccttaagctcggccgggggaacctgaaaccccttgaacttgatgagctccttgacgcggccaacaaaaaaaacctcgtcgtcgtcgtcaa

SEQ ID NO: 155677 - DNA, 895 bp, Zea mays
  Clone ID: MRT4577_73562C.1
gccaccctctatgtctctacctctatatataatgcttcaacggctccgtcccgtcccaagtcctatcaacagcgtgctcgagattacagagatgccaactggtaggctgagcggcaacatcacccaggactgggagccggtggttctgcgccgtacgaagccgaaggcggccgacctcaagtcgtcgaaggcggtgaaccaggcgctgcgatcgggcgcggccgtggagacggtgcgcaagtcagcagcgggcatgaacaagcactccgctgcggtggcgcccgcgcgtaagctggacgagacgacggagcccgctgcggtggagcgggtggctgtggaggtgcgcgcggccattcagaaggcgcgcgtggccaagggatggagccaggcggagctggcgaagcgcatcaacgagcgcgcgcaggtggtgcaggactgcaggagtacgagagcggcaaggcggcgccggcccaggccgtgcttgccaagatggagcgcgctctcgaggtcaagctccgcgggaagggcgtcggcgcgccactggcggccgtcgggaagtgatctgatgtgatggacttgtgcagattgcaacgttgatagcttaacctctttttttgaatcggctggttcggatgtgcagtttgtgtttgtaggatcgtaattgggggaatgttatatgatgtgaaggacttgtttcgaagttgcgatgtttaatgttgcggatgttgagcattatttgtagccctgtatgcatgcgtatagtccgtctataagcgtggaaagtctgtcgtaggattagatcaggtggttcaaagtttttctctgtacgtgtttatccctcttaaattgcacgagttgctgaagaacactcatgaacgggtccagattttctctc

SEQ ID NO: 155678 - DNA, 481 bp, Zea mays
  Clone ID: MRT4577_73563C.1
cccacgcgtgcgctcaatgcttgcgcaaatccttggggcgcgccgccgcattgaagatggagtagcgactgggaattcatcattagctgttgcactggcccttgatgcatctggtcacttgcttgcttgtgagaggtgttgcagatccctagaagtagccaataagtactaccaacaagctgttgttgcacataagatggatgtgaagcatgcttgggctgcggattctctaagatctctcctagattgcgtagaagcttccagctatgacttcacatttgctgatgctgacaggagaatgcctcaggaatattatcaacttctactgaagctcttaagacttggtggcttaattgcattggacaatgtcctttggtatggaagggttgccgatctactggatgacgaccaaaacacgatcagtatatggtacttcgacatgaaagctttacatgacaagcgcgccatatcagtatggagc

SEQ ID NO: 155679 - DNA, 2610 bp, Zea mays
  unsure (1)..(2610): unsure at all n locations
  Clone ID: MRT4577_73564C.1
gcgtttcttgncgcgtgggttgaacccctgagaagggcgattgccttgcgagaggccgggcagccaaaacaaacccctcgcccccacgcaaaccccgataccttcgccttttccgcccgcgccgtccgtctccgtcgacggcgatggagattccggcgcaggtgcgccgctactggctgccgatactcctattcaccgccggattcctgttccaggtcctcgtcctgccccgccacttcccgcccactcactacgacgtattgggagtggagaggttcgcgtctgtcgagcgggtcgtggaggcatacgagtcgctctccaaggagtggctatctgaaacgagtcaccaaccaactgttgatattataaagatccgttatgcatatgagctgttgacaaatccagttttaaagagggactatgatctttttggactggatgagcataaggatgtccttgagagagtcaaagaacaatatcaaatggtgcactttctcaaaattgatcttccattgttaaaagactctgtagtcagtttgatcgatgatgccttcaatgtactcacacatgagtcgttcatgtctgctattagtgaagaatacccgttaatcatacttgtatattcaaaggggagtcctcggtgtgctcaatttattgagtactggaagcaaattggcactcaattggatggaattgtcagaactgctatggtagaagttggtgattcacaagtggctggttatttcgccgaaaaacggttctcgaaacggccatttttccgtaatggtgtaccaacacttgttgcataccctgctaactgcaaaagtccatcctgttacatgaggtacccaggtgggctttttgtggattctgttgttgattgggttgcaacatcagttgtaggattgcctcggatcttgtactattcaaaggagacattgggcccccaattcattgggaagagtggcaatcataaggtcaaaactatctttttctcaagtactggagagcgtgctgctccattccttcgccaagctgcccaagagtattcaagttattcatcatttggatttgtcctatggagagaagacgaatcccagatttggtggaattcgttaggggtggaatcggctccagcacttgttttcttgaaggggccaggcacaacgccttttgtacaccatggattttttagcaagtcagagttcatagagatgatggaggagcacaagcaccatgaactgcgacagctaagaagtgacacatctttggaactgggttgtgatgctagaggtcattcacgtgctggcaatgatgcagcaatttggtattgtgtaattgttgctggtcgtccaggtgcagaattaagcaagaagagacaaattttgcggaaggctcaagacaaattgttaggtgatgttgacagaagtgctgggaacgttgacaattcagtagagacatcaagtgctgcaactgccttcaaagatgataggttaacctttgtttggttagatggagaagtacaaaagcaaatttgtgccttctaccttgccactgattatactggagcctgtggccctcgagactttggagatgacaatgataaacctgaaatttttattgttcgattccaaagaaatgcaacatatgaggcactgaaagctgaaaaaaagaacaatcttgtggatgttctccagggacagcatgctgatgcgtcccagttagtggcaaggtacaagggcccagttgaaattgaagagataaataggtggatctctcagattatcaaagatggagatactagagaaattccttactttacttcaaaggtgccagatcttgtaccagaggaaacaagcaaagcatggaattctaaaagtatccgctcagcagggaaaagtctaaaagagaacatcggtttccatttccaagattacctaacccacccaatgattggttcaactttgcttatgtgcggatgtatttctatgggaatattatggttcaggaacaacacacccactcaaagtactcgacaggagaaagctcggaaagacaaggcaaagaggccccgtccgaagcttagcacgtcgctcttcggtgaaccttctgtcccagacgtcgacccaaaagatgctcgtcagtgggaaatgtcaagctcggattcagactaatgactcgcttcttacatttggacctgacgtactgcaaagacgttttaaaattaagtaaactacatagtagtgcggtggccttagttttgggaaatggaacagagtataaccgatatagtgaaaacagttggaccactgaagtaatccagttgccatctttccgatgcttcagctgccctgtgacgtgactccagggacgtatttgttgacacctgcttgaaaactgacaagcctctctattagacagagtgttaacctgtggtctcagaatggagtaaacaatggtagacagagtgttaacgtacatcatgtctgatgtaagccggcaggtattttcgtcgtgagccaaaactcggctaacgtcgtgacacggactattatttttatttttcttaaataataatcccttttcagacaaaaaaaaaaaaaaaaaaaa

SEQ ID NO: 155680 - DNA, 654 bp, Zea mays
  Clone ID: MRT4577_73565C.1
gaattctgaatgtctgatccgttgctttttgttgacaaaagataagtgagaaacaagagggctggattttttagccgcaaggagcacacactacacaccatatattggattgatagagctactaagaaagctcatttaacttacggttacaacgctgaaaatagctataggcattgaaatatattgaaacggaagttgcaacgactctagataattcaataggcagactctacatatagattactgatgggatctgaaggctccggctatgacgctccttcaatcttgagattctcaacatgggcttcagcttgtttcgtttgtctctgcacatgcatgcatggtcacttaattaagtagcaccggccggtgctagctaatcgtgctcaagagagctggtccgtcggcggcggggatgtgtagtagcgcaaaggtggcgtcgtcggcgacggcgatggcacggcaccgttcggaggtggtggggtgtggagaggcggctgtggagatttcgcatgggggacatttggatgcaggtgttccggagcatttggaggcaataatggtggagagtacaggccggcaggtggcggcgaaggttggtagctatacggaggtggtggatactggtaggtaggtggagagttgtagtggtat

SEQ ID NO: 155681 - DNA, 121 bp, Zea mays
  Clone ID: MRT4577_73566C.1
aagcctttaatccaacacttactaggatccagggatattaataccacaataactagttctacctattacactcccttacaatttagaaaacgcgtaaggtggatcccaagccatagccaag

SEQ ID NO: 155682 - DNA, 1823 bp, Zea mays
  Clone ID: MRT4577_73567C.1
ccagatttggtggaattcgttaggggtggaatcggctccagcacttgttttcttgaaggggccaggcacaacgccttttgtacaccatggaatttttagcaagtcagagttcatagagatgatggaggagcacaagcaccatggtattgttgaacagtttctgaaccaattgcactgaattgtcaagctgtgtaatattgtttaggttgcagtttccttaaatgaaacaaaacatttctttatcaccacattcactcctttactgttcttgacttcttgttaagaactgcgacagctaagaagtgacacatctttggaactgggttgtgatgctagaggtcattcacgtgctggcaatgatgcagcaatttggtattgtgtaattgttgctggtcgtccaggtgcagaattaagcaagaagagacaaattttgcggaaggctcaagacaaattgttagatgatgttgacagaagtgctgggaacgttgacaattcagtagagacatcaagtgctgcaactgccttcaaagatgataggttaacctttgtttggttagatggagaagtacaaaaggtagactgctttataatttcaaacttcactatttatctcttattatctagtcatcttcgggattggatattatccagtttggaatgttatttcttgttagttggcaggtgtagattgatttgttaggaccagctctattgctcttattatatttgtaaatacgaataacatcataagcatatattttcacagcaaatttgtgccttctaccttgccactgattatactggagcctgtggccctagagactttggagatgacaatgataaacctgaaatttttattgttcgattccaaagaaatgcaacatatgaggcactgaaagctgaaaaaaagaacaatcttgtggatgttctccagggacagcatgctgatgcgtcccagttagtggcaaggtacaagggcccagttgaaattgaagagataaataggtggatctctcagattatcaaagatggagatactagagaaattccttacttcacttcaaaggtgccagatcttgtaccagaggaaacaagcaaagcatggagttctaaaaatatccgctcagcagggaaaagtctaaaagagaacatcggtttccatttccaagattacctaacccacccaatgattggttcaactttgcttatgtgcggatgtatttctatgggaataatatggttcaggaacaacatacccactcaaagtactcgacaggagaaagctcggaaagacaaggcaaagaggccccgtccgaagcttagcacgtcgctcttcggtgaaccttctgtcccagacgtcgacccaaaagatgctcgtcagtgggaaatgtcaagctcggattcagactaatgactcgcttcttacatttggacctgacgtactgcaaagacgttttaaaattaagtaaactacatagtagtgcggtggccttagttttgggaaatggaacagagtataaccgatatagtgaaaacagttggaccactgaagtaatccagttgccatctttccgatgcttcagctgccctgtgacgtgactccagtgacgtatttgttgacacctgcttgaaaactgacaagcctctctattagacagagtgttaacctgtggtctcagaattgagtaaacaatggtagacagagtgttaacgtacatcatgtctgatgtaagcccgtattttcgtcgtgagccaaaactcggctaacgtcgtgacacggactattatttttatttttcttaaataataatcccttttcagac

SEQ ID NO: 155683 - DNA, 360 bp, Zea mays
  Clone ID: MRT4577_73568C.1
aacagcttcaagcacaggtaaccacgctagcagaagaatgccggcacaggagcctgaaagttcggttgtacaaacggaaacttgaggaaacctggttgatagtgagggacgaggccacgaagtgcgaagctgcagaagagattataaaggttttaacgaatcagaggaacgctttgtcaaacaaacttttagatggtctggaactagatggttccagtatcgtgcttaaccaacccgacaaagttcttgccacttgcaaaacccaaccgttaaacagcatcagggatcaacacaacgcagaggcagaggaagttttggatacgcgatccacagggttttccaaacacgtcgcgggggatg

SEQ ID NO: 155684 - DNA, 725 bp, Zea mays
  unsure (1)..(725): unsure at all n locations
  Clone ID: MRT4577_73569C.1
tggacgcctgcagtttccggtccggaattcccgggtcgacccacgcgtccgggaggccgtgcagcgtcgcccatactccgagcaaagaactgtggccagaggcagtcgaggttagtgaggactgcgaggcagacactttgctgtgttcaaatccaagtcaagggtacaaaaatgcagagcaataaagcctttaacttggagaagcagaatcatactccaaggaagcatcatcagcatcaccaccagcagcaccatcagcagcaacagcagcagcagcagcaacagccacccccaccaatacctgcaaatggccagcaggccagcagccagaatgaaggcttgactattgacctgaagaattttaggaaaccaggagagaagacctttacacagcgtagccgtctctttgtgggcaatcttccccctgatatcactgaggaggaaatgaggaaactatttgagaaatatggaaaagcaggcgaagttttcattcataaggataaaggctttggctttattcgcttggaaacacgaaccctagcggaaattgccaaagtggagctggacaacatgcccctccgtgggaagcagctgcgagtgcgctttgcctgtcacagtgcatcccttacagtccgcaaccttcctcaatacgtgtcgaacgaactgctggaanaagccttttctgtgttcggccaggtggagagggctgtagtcattgtggatga

SEQ ID NO: 155685 - DNA, 378 bp, Zea mays
  Clone ID: MRT4577_7356C.1
atcgggtcccacagactcatacgcatatatttttacagacacccatcagaagacacatgcacgtacaagttctaaccaccttggggaacctcaagtaaaacaacctatctatcctctaattacaacacattaactactatcattcttttataaccttcacattttatgattctgaaaacctgacaaatgcgaaaaccatcaaactgtaaatctactaatcccactccatgtataataatgccattattttgtatcaacctaaattatgactactgcgaacagataaatttatttacctgccgtatctctacaacttgcatctgcttcgcttctagttgctagatcaaaaccctcttttctacactaacggctcctaca

SEQ ID NO: 155686 - DNA, 239 bp, Zea mays
  Clone ID: MRT4577_73570C.1
aaaacgcggcaaatgtggttccccactacacaattctgggaaacacaaacccgttagttttgaaaacatgacttgtcaacaagacaacataatacagggcccccactgttaacaaaacaaaaacccattttcgggggaaccccggggcacaaggtatttttttccggggtttaaaacagcttaaaacggtacaacgggcgggaaaactttttggaaaaaccaattgggggcggtaacgg

SEQ ID NO: 155687 - DNA, 373 bp, Zea mays
  Clone ID: MRT4577_73571C.1
aaggcactagctcgactactgccgtgatgcctcgacgctctttgccgtcgtgctgtgtgacatctggctacggtgtcccataaggtgatagacactccaattagctgtgaaccctaaccacgggcctgttgcacccctgtttgtcgctggaagtaccgctcgctcgtccgggcgcccatgacctgtgatatttcacgatggctgcaagcatgcgagaaggggccgtgcgtgcactccttaaacagtgtactacccaaggtgcaagatgaaaagctacctgctgtgttttactacacaggggggtgacgtggaccagtggagcggacggacctttagtatatatactgagccagcagcgtccaaagatactggt

SEQ ID NO: 155688 - DNA, 751 bp, Zea mays
  unsure (1)..(751): unsure at all n locations
  Clone ID: MRT4577_73572C.1
acatcgcctctctctctctctctctctctctctctctctctcctctcaccgcaccgcgtcccctccctctcctgtcgcgtgcgctccgccagcaaaagcttccacataaggaccaacaagagaaaccttaatctgttcggtgccagtcaaacctcaacaacaaagtttcatgtctgatctcgacgttactctgccatctgccttcgatccttttgctgaggcaaatgctgaggatgctggtgcaggccccggcgcaaaagattatgtgcatgtgcgcatccagcagcgcaacggcaggaagagtctgaccactgtccagggcctgaagaaggagttcagctacaacaagatcctcaaggatctcaagaaggaattctgctgcaatggcacagtagtccaggatccggagctaggccaggtcattcagcttcagggtgatcagcgtaagaatgttgctactttcctagtccaggctgggattgcgaagaaggagctcatcaagatccacggcttctaagccttagccgcctccgataaatgctcgaaccgccagccagttcttctctatattgaagacataaggcatatatatactgccgcccgcttgttgaaccgtgtcttgcttgatgcaagctgtgttgtcacctgattactatgctgctgcagtaccagcatatcagtatggtttgtctaagatgttgccgactanataaaaatctgtatcgtttggctannaaaaaaaaaaagaaaa

SEQ ID NO: 155689 - DNA, 297 bp, Zea mays
  Clone ID: MRT4577_73573C.1
gatctgaaggaagcacagaggagagcccatgtccagcactacaggggtagcgagcaacttttcatacaaggccaagggcctggcttaaatagacatgcgcaaagaaaagtggcgtacactgggcatggtacattatgaaacgtgcctagggggggagaactagagctccaagtacatgccagacgtggtaagccggagagaaattggcacccaccacgtgtgaaagttctccactgaggcaggatcaaccgcatttcagcatttgggacagcctaccagagacggtggattacttgc

SEQ ID NO: 155690 - DNA, 267 bp, Zea mays
  Clone ID: MRT4577_73574C.1
ccccgctacaactgcagaggctggcggcggagagaagtcgtgatgaaatgcgaagcaggacactgagccagtggtccctgggcaccccttgaggcctccaggggccggaccccgcaaggttcctctttccagttaaagcgactttcctcgctctctggtgaagccgcgtagggcagggtccgcgggcggagctgggagccggacctgggcactcacgcctcgctcttgtctccagcgcccacctcgcgtgcccagctgcaactgcac

SEQ ID NO: 155691 - DNA, 514 bp, Zea mays
  unsure (1)..(514): unsure at all n locations
  Clone ID: MRT4577_73575C.1
cccttttgagttctgttggcctgagccaccatcacccccacctgccactgaattcgctgtaacctatcctcctgccatggaggtcgccataacccaggccgttgccgttatatagctgaccttggttgctgctgtgactagggcagtggctgcgtagtttataacatatagagagctgcgcttttcagagcgaattgtgaagtggaccagatcgaagatttggcttcgtttctagtttgctccgtttgctgtccaaagtccaactaagatgaactgactagtatagcttaactgtcttttggtctgcgtctgcctgtgtgtgtgtgtttgtttcgttcacttcttccaggcttttggggagctttcattttgtaaagaaagaaaggatgtttgctcctgcacatctttacctgtgaagtgagtttgctggagttgtaatcctggctacattatcattatgttaattatgtcctgttctctgaaaaaaaaanaanannnaaaaaannnnnnnnnn

SEQ ID NO: 155692 - DNA, 113 bp, Zea mays
  Clone ID: MRT4577_73576C.1
ggaccagaggtccattgcatcccattatgccttcaactaactcactcgaatacgccacgtactttgcaacaacttcttcgaacacaaaaacgagccatactggctcgtagtct

SEQ ID NO: 155693 - DNA, 249 bp, Zea mays
  Clone ID: MRT4577_73577C.1
gcggggcgggctcctttcggaggaggcggtccaggtatgcagcagcaggagacctagcaccgccgcatccgcagccatgggtatcgacctcattgccgctgagaggaactagaagaccaagcgcacagcgccgaagtccgacgatgattatctcaagctccttgtcaagctctaccgcttcttggtcaggaggaccatagagctcttcaatgctgtcattctcaagaggctcttcatgagcaaaaccaa

SEQ ID NO: 155694 - DNA, 584 bp, Zea mays
  unsure (1)..(584): unsure at all n locations
  Clone ID: MRT4577_73578C.1
ctggcgagatatacacctggtagcaactccttccgcatcggcgtgttcgttccccactgcctctgcttccggtcgatcgagacgaaccaccggagcaccaccagccgccgccgcgatggaggcggtgaagagcctcctgaagccgaagccgacgccgcagcagcagctccgcgagtggcagcgccgcctccgcaacgagggccgcaacatcgagcgccagatccgagacgtgcagaaggaggagaagaaggtggagaaggccatccgggacgccgccaagcgcggcgacatgggatccgccaaggcgctggccaaggagctggtgcagtcgaggaaggcggtcaaccgcctctacgagaacaaggcccagctcaactccatctccatgcacctcggcgagatcgtcgctactactagaacagtaggacatttgtccaagagcactgaagtaatgaaacttgtcaataatcttatgaaggccccagaaatagcagtcaccatgcaggaattcagtaaagagatgacaaaggncggcgtgatggaagaaatggtcaatgatgccatggattcagcactggacgatg

SEQ ID NO: 155695 - DNA, 520 bp, Zea mays
  Clone ID: MRT4577_73579C.1
ctgggagcactcctccttccccctgcctctgcttccggtggatcaatcgaggcgaaccaccggagcgccgccggagccgccgcggcgatggaggcggtgaagagcctcctgaagccgaagccgacgccgcagcagcagctgcgcgagtggcagcgccgcctccgcaacgagggccgcaacatcgagcgccagatccgagacgtgcagaaggaggagaagaaggtggagaaggccatcaaggagtccgccaggcgcggcgacatgggatccgccaaggcgctggccaaggagctggtgcagtccaggaaggccgtcaaccgcctctacgagaacaaggcccagctcaactccatctccatgcacctcggcgagatcgtcgctactaccaggacggtaggacatttgtccaagagcaccgaagtgacgaagcttgtgaacaatctgatgaaggccccagagatagctgtcaccatgcaggaattcagcaaagagatgacaaaggctggcgtgatggaggaaa

SEQ ID NO: 155696 - DNA, 255 bp, Zea mays
  unsure (1)..(255): unsure at all n locations
  Clone ID: MRT4577_7357C.1
agggccactaccagaacgggcagccaacancgccaatgccaagctagactatggaggctactgacccaccatatgccgggccagcaaaggggctctctaccactggggggcgaccaaaaaagactgaggggatgataagtaacggtggcgaggggaacctcactgacgtaccgacagcagtactcacgatgcgccgaagctgaccagcaaagctaccttcccattgcgagaatacctgatggtgcaggctataca

SEQ ID NO: 155697 - DNA, 327 bp, Zea mays
  Clone ID: MRT4577_73580C.1
ggcgcggtggttattttttttttttttgttttgacaaattggacggattttaccgaccgatttgagctgcatttcacaaacaaatattatcgatgacatctcctacatgatgactacaggaaacggaaacaaacggggatatcatgctcacactcggggggggcctgacaactttttcttttattgtcggtgtagacacctatccacactacattacaagcggggagaaaaccctatactgaatcttgaatatttgcgggttcatgtccactactagggttaatgtagccaaattcgttgtcctacgcttattcataagcacactct

SEQ ID NO: 155698 - DNA, 477 bp, Zea mays
  Clone ID: MRT4577_73581C.1
aaacagaacaccgatcatcttcatatattgaccaacaggcaaccatggtattcactactatcaggctatcccgggctactaaatttatccagggaaggatttgcatacaacaatagcctcatgaaaatacccatcaatatatcgccccgaaagaacagacaaaaaccggctggatctcctggtcacaaacaacacacacaactgaaacttaaataacccccgaattataaacacttctgactgataggagcccatgcccaaaacccattcttttagcatcccacttgaaagccacctatatatgccaaaaccggatggatggatggatggatggccattggcttcatatgaaaaaaaacaacctgaagtatacaacccggtagagggaaaaaaaaaaccccccacaaatatgctgccaaaacaaaaggggggatgcttccttgaccccaaaacctctgaaactggggaacgctccaa

SEQ ID NO: 155699 - DNA, 546 bp, Zea mays
  Clone ID: MRT4577_73582C.1
ccggccgggatcaaccctcgagaaagctcattatccgcgaaatagcctcaatcacttcccgaaatcaatcagacaaagctcctgccggcaggataacactcaaacttcaaccgcaatcatggctcaaggatacgccgtcttcattggcctcgctgtcatcgcagttctttgcgtagcatcgtggttctttgcccccaagggagaaaaccaagtactctggcgatcgtctgccatcctggcgatcgtgagctgctatctcatgtgggctatcacgttcctcgcccagctccatccccttattgcgcccagaaaaggcggcacccgcgaagagtacctcgattagtggacgcttacctataatatgcattgggggaaagaggcggatagaagggagagactgtcatgaggatggatgcgtttgtaattttaaatgttggtctttttgagactcatactgttgttgctgttttctttacggagttggaatgtctgttataccaagccaaagatgcgctctgcaaaaaaaaaaaaaaaaaacccgcggcc

SEQ ID NO: 155700 - DNA, 449 bp, Zea mays
  Clone ID: MRT4577_73583C.1
tttttttttttctttttcttctttttttctctttcccttttttttttcgggttgggtttttttttaaaaaacccaaaaatcccttttaaaaacaaaaattttcccccaaaaaaaattttctctctccctctttttttacaatatttgaaaacaacctccaatttttatccccccaaaatcttatttgaaaaatattttaaaaaatctttaggtgcccaaaacacttcccaagaacaaccttttttggcgaaaatttcccaaaaaaaacaatttttccaccaaaacaaatcttgcccccttctctacaaattgtatggcccgcgaccacccccccctaattttttggggcttgttttgttaaccctttttttttaccaaccttttttaaaatttgcctttggggaaaaactcgcctgtggaaaaaatttaatttcataccacaatttttt

SEQ ID NO: 155701 - DNA, 236 bp, Zea mays
  unsure (1)..(236): unsure at all n locations
  Clone ID: MRT4577_73584C.1
ctgcccatcaactgaaggctaaagcagtttttcacatgcacatagtgcttaatgtcactggcacagctatgacatttttgaagcccccgagcaattggcccttggagagcccaattgtgcctacctgcgttgtgagttcagtggatctgatggaaaggcaagaaggctcctcgagacccgaacgnctcagtggaagattgaaagtgtattgtgggggtatcttggggctagcattt

SEQ ID NO: 155702 - DNA, 398 bp, Zea mays
  unsure (1)..(398): unsure at all n locations
  Clone ID: MRT4577_73585C.1
catataaaatcctcagacaattaaacacaacccagtaaaagcaaccactaccaccaaccatccctgtccaatactaccctaacttccctccacccctcccaaaacagctccactcccactccaagccacaggttacccaccaactacaataatattcctgcctggggccgagacttttcntggacaaagaatgctgattcctctaccagctatatttgctaacctagtcgatccaacttcattatgtactcagacggacctgtctcacttagttgggccagaagatcccctaacctcagattgccacagcctccacctcccaaaantcaaaaacacctcattgnaanaacgnaaganaccagggccctcgtccaanaccgctgcctccacctcctaca

SEQ ID NO: 155703 - DNA, 997 bp, Zea mays
  Clone ID: MRT4577_73586C.1
gtcgaacccatcgcccatgggaggagggcacgaggagcatgagggtggcggctcaaaggccgggggctactcctccggtctcccggcgtctgagccgccgcaggagtacgggtattggacgtttcgaggccctccgggagactcactaagcactgtccttcctgatcccaccgcggtctccttccgcgacacgcgcacacgccacagcgcattcgcgtacgtcaacggacgtcgaacccatcgcccatgggaggagggcacgaggagcaggagggtggcggcgcaaaggccgggggctactcctccggtctcccgccgtcggagccgccgcacctgcagggccagccgccgcaggagtacgggtacggcacgttccagggccctcggcatcctcccgtcgggttcccgcagcctgccccgcctcccgggttcggcggcggcggcggctaccacaaccagcaacagccgtacgcgcacgcggagacgtactacgcccaggggtaccaggccgtgccaggctatggtcctgttgctgaaggaagacctgtgagaatgaggcgtctcccatgttgtggcctcggcttaggctggtgcctgttcattgctgggtttttccttgctgccattccatggtacattggggctttcgttctgatatgcgtgcgggtacatgaccaccgagagaaaccaggatatgttgcttgcacaattgctgccgttgttgctgccgttgccatattcctgggggtaactaagggaacacacgtgtggtgaattgcttccagagaaggcaatggatttatacttgtatagtatctgtgtgtattaaaagtgtggagcgacatcgagatgctcttatgacttatgttcatacatattctactttgtaatgaaattttagatgtagtaatgcaccgtctgcttcatataataagataagataccttgtgtcgtagtttcggacccgagggggtccgtgagccagatccctgtgtcc

SEQ ID NO: 155704 - DNA, 912 bp, Zea mays
  Clone ID: MRT4577_73587C.1
cattgggtacctcgaggccggccgggctcttcgcacatgcaccagtgtccttccagatcccgccgcgcgtctccttccgcgacacgctctcagtctcacgccacagctcgtcgcgttcgtcaacggtcgacccatcgcctatggaaggaaggcgcgaaccggaggcggacggcggaaaggccgggggcctcccgccgtcggagccgccgcacctgcagggccagccgccgcaggagtacgggtacggcacgttccagggccctcgacatcctcccgtcgggttcccgcagcctgccccgcctcccgggctcggcggcggcggctatcacaaccagcagcagccgtacgcgcctgcggagacgtactacgcccaggggtaccaggccgtaccaggctatggtcctgttgctgaaggaagacctgtgagaatgaggcgtctcccatgttgtggcctcggcttaggctggtgtctgttcataaccgggtttttcttggctgccattccatggttcattggagctttcgttcttatatgtgtgcgggtacatgaccaacgagagaaaccaggatacgttgcttgcacaattgctgccgttgttgctgccgttgccatcctcttgggggtaactaaaggaacgcacgtgtggtgaattgcctccagagaaggcaatcaatgtgtatttgcgttgtatatctgtgtgtgctaaaaagtgtggagcaacatccatgtgaatgtgatcttatgtccatatatattctactttgcaatgaaatttgaaatgtagtaatgtaccatctgcttcttgtaagcagcactgcatcatatataataagataccttttatttaaaaaaaaaaaaaaaaaagcggcccacgcgcaaaaaaaaaaaaaaaatataataaataatatggg

SEQ ID NO: 155705 - DNA, 418 bp, Zea mays
  Clone ID: MRT4577_73588C.1
gcggccgacctctttttttctttcttcatcttttttggtgattacggttcttttttgggggcagaaaaagaactcgcccccataaaagcctgagaaggcacaagttcccttaccggagaaaggtccatttctcactgaaacaccatcttggtctttatacgaagggacgccaaacataaaccccaatggaaatcctgtcccaacactgcccccaacaaacaaacccaggctaaattactcacgtgatgcaatacgccaagtacatgcccgatgtcacggcttacagaaccctatgaggcgctaactttggggcccaaatgagcaaaacagaacctgacaaacttttggaagccctgctcgagcagggaatcgccaagcctcttcacccccctgtggcatcgccctggaggcattggct

SEQ ID NO: 155706 - DNA, 197 bp, Zea mays
  Clone ID: MRT4577_73589C.1
tttttgatgcctgggtgcgatacaactacaagccgagggggttttttggcaagagagcccgtcaacagaccaaaaggacatataagctgacccacgcacatcaggcctatgcggacctcttggagaagaaatattaaaatgtctggcaccaagtaggggaccatgacgtaaacggtatccggagcgtgcacctccta

SEQ ID NO: 155707 - DNA, 310 bp, Zea mays
  Clone ID: MRT4577_7358C.1
aaaaaaaaaaaaaaatttattttttaaaaaaatgcggaagggcattggaaattacataaatttacgggggaaaacttaaaaaaaaggtggaagggggaacatgcttttgattcctaaaaaaaaaattttttgtttaaaattagcacatgggaaaataaacgggggggggttccagggactggagtttttaatacccgtcctcaattagaaaagccattgccaggccccaggggatgggcccctccaaatggcagtgcatgagccacacacctgggttgtcgggaacaaactggatgaccccccacccgtt

SEQ ID NO: 155708 - DNA, 843 bp, Zea mays
  Clone ID: MRT4577_73590C.1
gaggtccggccgggatgactcactaagcactgtccttcctgatcccaccgcggtctccttccgcgacacgcgcacacgccacagcgcattcgcgtacgtcaacggacgtcgaacccatcgcccatgggaggagggcacgaggagcaggagggtggcggcgcaaaggccgggggctactcctccggtctcccgccgtcggagccgccgcaggagtacgggtacggcacgttccagggccctcggcatcctcccgtcgggttcccgcagcctgccccgcctcccgggttcggcggcggcggcggctaccacaaccagcaacagccgtacgcgcacgcggagacgtactacgcccaggggtaccaggccgtgccaggctatggtcctgttgctgaaggaagacctgtgagaatgaggcgtctcccatgttgtggcctcggcttaggctggtgcctgttcattgctgggtttttccttgctgccattccatggtacattggggctttcgttctgatatgcgtgcgggtacatgaccaccgagagaaaccaggatatgttgcttgcacaattgctgccgttgttgctgccgttgccatattcctgggggtaactaagggaacacacgtgtggtgaattgcttccagagaaggcaatggatttatacttgtatagtatctgtgtgtattaaaagtgtggagcgacatcgagatgctcttatgacttatgttcatacatattctactttgtaatgaaattttagatgtagtaatgcaccgtctgcttcaataataagataagataccttgtgtcaaaaaaaaaaggaaaaaaaaaaaaaaaaaagcggcc

SEQ ID NO: 155709 - DNA, 756 bp, Zea mays
  unsure (1)..(756): unsure at all n locations
  Clone ID: MRT4577_73592C.1
tgtctantggccggagatggagtcgggctcgaggaggagcgctggcacgcgctggtgatccgtttcaacgacggagaactactgcgcgtcggagatccacctgccaacgtcgtagctgctaccggagatcactcgccagctccgcgcgaccctgtcggccgcacgcgccggagaaaaggaaggcaacgccggagatccgtcgccagcgccgtagtgctgccgcatagcactcacccgctccgcgcgaccctatcggtcgcatgccgcacgggccagagctgcagctgagatttggatacgcacgcaccggagctgcagtgtcgacgcggcggctgcaggttgtgtgcgccggagatctgcccgtcagcgccgatgactcggccggtagcacgacgtcgaaatgtagtcgggagagacgaagatggaggtggcgagtggacgaacggtgttgctgcggtgctgtgttgtccaatgtgcaggggcgattcaatttgggaactatgggtgaggtaggggaaagagaatgaccccacttgtaagagcacggtcccacttgtaagagcacgggttcataagtaagaatttaacggacggaatgtgttccgtaaggtggactctgaacagaagtttaaggtgggaggagaaaactgagtagataatttgaacaggtagaactgagtggctatattagcggagcaattgtaaaaatccctttttttaggctacagtttttcctctgaaatcagagctatgatg

SEQ ID NO: 155710 - DNA, 175 bp, Zea mays
  Clone ID: MRT4577_73593C.1
ccaccaagaacgggtgcatgggattgcaaagagattccgggacccaaccccctaaccaacggtgaatggggaaccaccctacccctacctggacaaagaaaccgacccagggtcgccccatgagggaactcccaggaaactgggacactaacggaaaccctctccagcatcccca

SEQ ID NO: 155711 - DNA, 317 bp, Zea mays
  Clone ID: MRT4577_73594C.1
cggacgcgtgggcgctcggccggaggcgttgcacctgcacgcttcagcagccgccaagcctgtcttgtgcggcaagcaccacacagacacccgatggcgctcctggtgctgcgcggctgcgccgtgccgccaggcgtccacgcggacccggcggagctccgactgatgcctccggcgctgacgccgcggcggctcgaggacgtcgtctcttctgcctaatccgagctgttcggagaggtggtgtcgttgtcccaggacagaacgcactactgtaccgctggcggtgccaacgggcacgccatcactgccgtcactga

SEQ ID NO: 155712 - DNA, 140 bp, Zea mays
  Clone ID: MRT4577_73595C.1
cacgcatctagccaggactgtcaaggacagcggacagaagactgtacaactccctgtatgtgggggaggtctgaaagctatactgctggaattggaccatcatgtgcggtgtgtgcaatgctctgggctgtgtatcgcca

SEQ ID NO: 155713 - DNA, 420 bp, Zea mays
  Clone ID: MRT4577_73596C.1
acccgggaaaccaaaaaaaacttttatttattcaaattccaggtttccccaggaccaaaaaaaaaaaaaatttttaaaaccaaggggacaaaatccaaccgcaaaaaaaaccaaaagggcaatgttgggatcggtttttttccaaaaaaaaccacccttttcaaaaaaaaaaaattcccttccaaacaaaagctaaaaactttaaagcccggaaaaaaaaagggccccccccccccaggaaaaaaaacaaacccttgatcagatatcccggaaagggccgccttgaccaaaagctaaacccctgcaaaaaaacaaaagggattccatgtccaaacccctttgtagggggcgccacaaacaaaactttgttaaaccccaacaaaaaaattttttgcaaaaagggcttgaacccccggcttt

SEQ ID NO: 155714 - DNA, 189 bp, Zea mays
  Clone ID: MRT4577_73597C.1
gatttataattagtgccgacctcaatacggtgaacttggtaagtaaaacaacaatgaatattcatcaaatccaccctacgacttacaatattacagactgagattttcacatgatttgtatatttaaaaaaccattaataccatacactataagatatcaatgaaattataaataaaatgttactccaa

SEQ ID NO: 155715 - DNA, 377 bp, Zea mays
  Clone ID: MRT4577_73598C.1
gcggcggcgacgccgacgacaggccgcgcgactccgtgaccctgtccggcctgctcaacttcatcgacgggctctggtcggcgtgcacgggcgagcggatcgtcgtcttcaccaccaaccacgtcgagaggctggacccggcgctgatccggcgcggcaggatggacatgcacatcgagatgtcctactgcaggttcgaggcgttccagacgctcgccaagaactacctggacatcgacgaccacgacctgttcgccgccgtcggggaggtactgcgggaggagaacctcacgccggccgacgtcgccgagtgcctcatggcggccaggcgcgctggctccggcgagccttccccgtgcctcgagatactgatcgat

SEQ ID NO: 155716 - DNA, 501 bp, Zea mays
  Clone ID: MRT4577_73599C.1
tcgtaaaaaaaaaaaaaaaaaaaaaaaaaaaaaaaaaaaaaaaaaaaaaaaaaaaaaaaaaaaaaaaaaaaaaaaaaaaaaaaaaaaaaaaaaaaaaaaaaaaaaaaaaaaaaaaaaaaaaaaaaaaaaaaaaaaaaaaaggggggggccctttttgggggtccaaattttcctcccccgtccttgcaagtttttggtttttttttggggccccctaatttaatttcctgggccgggtttttccaccgtggggttgggaaaacccttgggttccccaattttattcccttgggggcaattccctttttccccgggggggttattaaaaaaggggccccccccgttcccctttccaaaatttggccccccttgatgggaaattggacccccccttttcggggccttttaccccggggggggggggggtttcccccaagggtgcccttttcttttgcagggcccttagccccctttcttttctttttttcccttttttttttg

SEQ ID NO: 155717 - DNA, 606 bp, Zea mays
  Clone ID: MRT4577_7359C.1
aaacaaaaaccccgggggggaaaatgccccctttttaaaaaaaaaaaaggggcgttccaaacaaacaacaacaagggggcccgtttaacccagggcccccgggttaacaaaagggcgggcccccaaatttttgcaaacccaaaagggaaaaaccgggggccccaaaccttggggttctttaccccccagggggaccgggccccgcccccttacccggaactccggggcccccccaaacaagggggaagaaccccctaaaaacaggtttgtccctttttttccccaacccccggcccccttttttggaaaagttgggggggccgggaaaaaaaaacccccaccccccccccttgcaaaggggggcccccttttttttcctttaaaaaggacccccccccgggaggggggcgggggggggttttttcccccccccaaaaatttccccaaaacctgggggggggccccccttcccccccccttatatcgaagggggggccccggggggtggccggcttccccacaaacgggggccttgagccccccaacgggccaagcaaaaaggcttttaccgggggccaccaacccaaggaaaaacttggggggggg

SEQ ID NO: 155718 - DNA, 1272 bp, Zea mays
  unsure (1)..(1272): unsure at all n locations
  Clone ID: MRT4577_735C.1
tgggtaccnctcgggccggccgagaagctcggctgccccaagtacccggcatgcatgtgtagcagttcgcccacgctgcataaacaactctatctcaacggcgacgacgctcccaacttaacagccaggaagctggcgtcttgcttgtccttgttcttttcccacccggctaaccccgtcgtcgccgccgctttccccgtggtttcagagctccagtcggctagctaggccgcctggctaatctccctgccttctataagtacaggttcattgtgtgctgtgctctcccagctccatcactgagacaagagagcacactactactcatcactcgccaacgtgcagagatcagggaagcagcacactccatccactgaccgctcatggcgaggatccacctctacgtcgccgcggcctgcgccgtcgtcctcgcgctcgccgcccccgcccttgccggcgaccccgacatgctgcaggacgtctgcccggctgactacgcctccccggtgaagctgaacgggttcccgtgcaaggcgaacttttcggcggacgacttcttcttcgacgggctgaggaaccccggcaacaccaacaacccggcgggctccgtggtgacggcggccaacgtggagaagttcccgggcgtgaacacgctgggcgtctccatggcgcgcatcgactacgcgccgggcggccagaacccgccgcacacgcacccgcgcgccaccgagatcatcttcgtcctcgagggcacgctcgaggtcggcttcatcaccaccgccaacgcgctcttcaccaagaccgtcaccaagggcgacgtcttcgtcttcccgcgcggcctcgtccacttccagcagaacagggggcacggccccgccgccgtcgtcgccgccttcaacagccagctccagggcacgcaggccatcgccatgacgctcttcggcgccgtgccgcccgtgccctccgacatcctcgccaaggccttccgcatcagcagcggcgaggtggaccacatcaaggccaacttcgcgcccaagtagagatccaacgtctgcattcccttgattttctcaataataaatccccgcggtgtgcagttcgatttgttcgtcttcgcttggtttggttcgagacattgctgaccacgcttgttactgctaatttgtgcggaccggagggagttgcttgtgctccgataaataagataaataatcaattctatcgtcgtctgggttgctttgaaaaaaaaaaaaaaaaaaggcccctagggcc

SEQ ID NO: 155719 - DNA, 398 bp, Zea mays
  Clone ID: MRT4577_73600C.1
ccggccgggcacactccgcttcgaattctagggttttgctgctctccgaccccgagctccgaaggcgcgaggactcacgcgcgctcccgctcgagcgagaccgagctggcgaatcagaggaccgcgcacgaccacaaccccacgctcgaactagccgtggacggacggactgtacaaagatacatcatgtgaagaggcgtctgaatgaaaaccttgagaggggggggggacgccccattcctgggccagtacatcagtgggattgcacccctaactgccaactgatctgtgcctactgctctcataccgcagggcgtgagaagggcgagaggctcactgactgatacgcctatccacggccggtgtgccatcatcgtggaagatgaagactcctggct

SEQ ID NO: 155720 - DNA, 339 bp, Zea mays
  Clone ID: MRT4577_73601C.1
aagagaggagatctgttcatcgttattgctgtcacaacggtctcacaatcgctatgcatgtacttttgcatatatattccaatatgacttaaactaggggcccaacaatgtgggctaggggccataacacgggttgtcttcaacatacccgttgggtgggttcccattgatataggagatatgataggaccccgcggggatggcgatggatacagccagctacacctaagatggtacaggaactgctcgcgcttggaagattttctagctcctgagcgcgagcctgctataattctggactatagactgggcgctcagctctcggaataagactgctcc

SEQ ID NO: 155721 - DNA, 730 bp, Zea mays
  Clone ID: MRT4577_73602C.1
atcttctcttgctgtttgcctgtgcccctctccctccccccagcatgatgcccgtagcccccctcccccggtgccatggtgccctcgcctccgcccccgagcattgtccggtcccgtcccccggccctcgcccgagatcgtcgccgagcgcccacccctcattcccgtaccctcgcccaagatcgcggatctacgcccgatgtgggcgtggggctgcgtccgagatcgcggatctacgcccgatgtgccctcgcccgagatctcccctcgccggtcccgcagccgcgtcccggcggcgctcatcgtgttcgcgctcgggctggtgctctgcttcgtgcgtgacccatcgattctgtagggccttcgcttcgggccgacgcctctacagctcgtcgggatcacctgggacgatttcaagatcgggttctgtgtatctaggtggacatgataaagaagagaaagctgccagggcttacgatttagctgctctcaagtactggggaactacaacgactacaaattttccaatcagcaactatgagaaggacctagaagagatgaataatatgtcacgacaagaatatgttgtgtcacttagaaggcacgcgcggtcaaaatcaagatttcatgaaaagcagtggattttctcgtggtgcatcgatttaccaaggtgttaccagattagcagcctcattgccttatggtggaatgaactctgggtcgctctctc

SEQ ID NO: 155722 - DNA, 692 bp, Zea mays
  unsure (1)..(692): unsure at all n locations
  Clone ID: MRT4577_73603C.1
acctcggtaaatcgatgcaccacgagaaaatccactgcttttcctgaaatcttgattttgaccgcgcgttccttctaagtgacgcaacatattcttgtcgtcacatattattcatctcttccaggtccttctcatagttgctgatctaagcatgaaaaataaatcgtataatatccaaaggaagcagtgataaaggaaaaaaagtataattcttgagaagtgaactgaaatatatgcaaatactggaaaacttgtagtcgttgtggttccccagtacttgagagcagctaaattgtaagccctggtagctttctcttctttatcatgtccacctagatacacagaacccgatcttgaaatcgtcccaggtgatcccgacgagccgtagaggcgccggcccgaagcgaaggccctgcagaatcgatgggtcgcgcacgaagcagagcaccagcccgagcgcgaacacgatgagcgccgccgagatgcggctgcaggaccggcgaggggagatctcgggcgagggcacatcgggcgtagatccgcgatctcggacgcagccccacgcccacatcgggtgtagatccgcgatcttggacgagggtacgggaatgaggggtgggcgctcggcgacgatctcgggcgagggctgggggacggggccggacaatgcncgggggcggaggcgagggcac

SEQ ID NO: 155723 - DNA, 360 bp, Zea mays
  Clone ID: MRT4577_73604C.1
ggccggcgagaagaacaagatagacgccgccttctgttactgcggcgtgcagtacgcagccgtccaggtatggcgcggtacgcctaacaacccgttgtggacataggtggagctcatgaaccaaacagaaatgctttcttatatatccaccctttgtaacgtgtctccgtgaggaatgagtccatagtatctcccatcgccgattacaatgactgctccgacctttatttcttctgaactgatctgagctggactgacgtatgtaacagccatggatgcaacgaatcatggaaaaattgatgtgaaaacgaaaggttttgtgtgttctggtgcaacttaagaaagatgacggctcccccg

SEQ ID NO: 155724 - DNA, 279 bp, Zea mays
  Clone ID: MRT4577_73605C.1
tttctatttgagggaatgattccgggcctattcctcttgttggcgaggttccctacttggggcgtcttttccaatgtgttcttcagtacacggacacaaacgagaagacatgggtttgcaatgctctaaattactgctcagcaatggctgagatttttctttgcgctgtcaggtgtgatgtatatactgatcaatggggtggcttctaccgcccattctggtttatcactagagttgtaaatacactgtgttccttctactgggatataaagcgagatt

SEQ ID NO: 155725 - DNA, 204 bp, Zea mays
  Clone ID: MRT4577_73606C.1
cctcctcgacgccctatgacctcgtcatgaaagccacgaatcaccagagtgcaagcatgcgagcttctggtattcagaccatgccataacctcacatgggagaggagcagtgaccgatagcgccaccagcaggctgagagaagtgcagtttgacagatcatctacacctagtcgtggccacactgatgtttacttctgggtagc

SEQ ID NO: 155726 - DNA, 343 bp, Zea mays
  Clone ID: MRT4577_73607C.1
cgagcacatcatgtcagccagacagtttctcctacaggccatcaccacaacacacagatgcttttcattgcaactcacacacattctcctctcccccgttgtgcaactcgctctccctcactttacccgccttgttgccatggttaaccttgctcttcctcttacgctccttctccttcttatcattttgttttacctttttattccatttttctttgtgcttcttctttctcttatttatctttgttttgtttatctttctttactttcttttttgcttattttttttctctttttttttttatattgtggcggtagtttttactttctttcttcttttttt

SEQ ID NO: 155727 - DNA, 330 bp, Zea mays
  Clone ID: MRT4577_73608C.1
tcatacctagattcatatccatctagacttgctttaataaacaggctttctgactatgggaatggttcattctcaatgtagtctggcaaataaagcatcattgagaatcacgatgatctattaagagtctcatcatcactggaacgtacacatctacttgaaaattatctcatacaaagaaattattctgaacatgatacatcatatagttatacaatatctcactatatgtagagtgatcctatcatatagtataaagcctatcacatacaacgtatcaactctcacacacatatttacagctctcaagacattcactttctgttatct

SEQ ID NO: 155728 - DNA, 633 bp, Zea mays
  unsure (1)..(633): unsure at all n locations
  Clone ID: MRT4577_73609C.1
agaagaaaacgcatttatattcaacagcaggccatatgtatgtacatcagaaatagcataagagcgtatatttgatttttagttcgctcttacccttccaaaaaaaaaaaacggaacaaaaaaaaaaaggcaagcagccatatgcgtaaatctacaagccctgttgaaactgaatgaaggatggaagggctcattgcctcagctttggtattttatgtgtgctacaaaaatcttggtatggcttgaaattgtttcgccatgttacaaattgtttcctcaaacatttgtacaccttttcctcggcaggctgaatttccatggctggggtatcaaaatctatcctcactgggccgaaatcgaacaaagttgcagcttgttcaggtgaatcaggaactttggcttttccgcaaacaaatgttgtgaagaccttatcctcatatagcgttgaagacctatgcagatcatcttggttttgatcttctttctcctcctttctggtacttctacccatactgaacctatgttcaatctgaggctcataactaaaataggactttccttcatccagttcttgtgaagcaggccatccattgccgttgncagngccagcaatggatattacaggatccaggg

SEQ ID NO: 155729 - DNA, 409 bp, Zea mays
  Clone ID: MRT4577_7360C.1
tcgcgctggtgtgggccgacacctgcgcggaggagaatattcgcgtacacagagacggacgaggaggatcagatgtgactctactcgcaaaagctgatgcgagcttcgaggaagactagggatcgggcgctatttacggagttcatagagaagaacctccacctgtacgagatacagaacaccattccgctgccgatcgccgccgtcgacaactgcacactctgaggactctgcacagcgcctgcaaaagaatccatatatactcgatatgattcttgacgagtatgagaacgaggatgacgctgccctctactagatctactactttggaaccctgcacagaagggacaatgctgcttatgggtacgcatcatgctaagtttgggcccctgatggacaagttgaaccc

SEQ ID NO: 155730 - DNA, 372 bp, Zea mays
  Clone ID: MRT4577_73610C.1
cggacgcgtggtctgcaatacttccatgagtatgcatcttttgctactgttgttggggctaatgcgactactgtgatggatctttgtgggacaataggttctcaaggagttgcctttcaaacagaagctgtgtatatacactgctacatgaaaatttaccaagaacactactgcttttgtcataactaatccagactaccattctacattaattacgtcggacaaatgtgacaccattaaagtgtctaagtgttatcaccatgatgataaacagagtgccttatctgtggctgatctaacccttacgctctcaacaaatgagaacacactcacaatcggtagactgtacacagttgatctcaagacagcttc

SEQ ID NO: 155731 - DNA, 1522 bp, Zea mays
  Clone ID: MRT4577_73611C.1
aatgcaacaaaacagtgttgcttttgaggagacaactccagaaaaccatgaagcaacctcagagccatgttctgaaatccaacatgcacatcatgtggaaccagaggaaatcaatggccctgaagatggcaaagatgatgagatcaccaacatgagcagcagagaatatctagttcgagataatgctctgcagagtggaccaataatagatatacaaccagttcaggagttggaacaaattaaaacggatgaagcttctaaccagactcatgctgttatcttcaatgacctagctcaggaagatgctacagaaacaagtgaaccacaagtgactgaaacagaactaaaggacattgaagccactgaagctgaagaaatcaccaaacttgaccatgttactcattccaaggaacttgcagtagaaaatgattcaacagcagatgaaccacataagggtgaaatccatcaaactcttgaacaagatttagcacgcgtccgggacactggaacttaccatgaaaaaacaatatctacttcagaggacacagtacaagataatttgacagaagatgagccaagttttggtagtcaagaagtagatgatgcagagtcaacagaagaaactaagcaaaacatagctgagaatattgcagaagtctctgatgtggcgattgttgatgacgcaattgaacagaatgtgctacagactgaggatatcgttgaaatgcataaacaggagctggaacgagaagaaacagagagaatagaacctgttgaatcagaggaagcttctgatcagaggaatgatgcaccattcgattattcagctcgagaagataatacaaaggaaagtgagatacagcagacagaatcagcaacggaaacaaatgaaattgaacccactgaaattgaagcagttcctcgagaaagcaatacctgtgtttcagaggagccttctcaagaagatcatataaaagaaagtgaaacaagttttgacaatcaagaagtgaacatcacagaatcttcagaagtaaatgatagtcacaaagatataatatctggaggaatctctgacccaagcaacacagcttctgctggggattcatctgaaggaagcaatgtccctgaaggcgagccacctgaacaggctgtgcaggaactgggatcagaggagataaagaacactcaaattgatgaagtgaatgaaacatcccttgaaatgaatgctactgtctttcagataccaagtcaagaagaaaatccagacacaaccaaattgcatgaatcaacagaggtgagcaacattgaagccacagaaatgcacggaaacccccaccaaagtgatctggctgctcagtcagaggagcaaacaacagaaggaatatcaagtggtctgaaaccagaatcaattgaaggtaatgatactgaagccaacaaatctcaaagtacctctcaggaaaaaacaatctctgcctctgagtctgtcccagaagatgcaacgtcgacgcggccgcgaattcgg

SEQ ID NO: 155732 - DNA, 210 bp, Zea mays
  unsure (1)..(210): unsure at all n locations
  Clone ID: MRT4577_73612C.1
ttaccgtatntnaattacctnnattatatggggccaccttgnnccgacggaagcctttctattggnnaaactttacgnngccctattacggttattaaatgccnnagccggctctggccccttggcagcctccttattactactaggtatagttggccccattatagtattatccnatagcaactactaccttagcgatggattagcctc

SEQ ID NO: 155733 - DNA, 994 bp, Zea mays
  Clone ID: MRT4577_73613C.1
cattgggtacctcgaggccggcccggggaaaaagcccctaaatgttccagtgactggcctcccgactcgactctcctccccctatctctatctgcttcctgctgagctcaaaccccttccgcctccccatccaccactccatccgccgccgccgccgccgcgctgtgcaagatgaatgtggagaagctcaagaagatggctggcgctgtacgcaccggagggaagggcagcatgcgcaggaagaagaaggcagttcacaagaccacgaccacagatgacaagcggcttcagagcaccttgaaaaggatcggggggaacaccattcctggtatcgaggaggtcaacatcttcaaggacgatgttgttatccagtttcagaaccctaaagtgcaagcatccattcctgcaaatacatgggtggttagtggagtaccccagacaaaaagtctgcaagaccttctgccatcaattatcaaccaactgggtcctgataacctggacaaccttaagaagctggctgagattttccagaggcaggtacctggtgccgaagccagcgccagtgcagctgcccaggatgaggacgatgtccctgagcttgtccaaggagagacatttgaggaggctgcagagaaggagcctcaactggagcaggatgagaagaaagaatcgtaattttgttgtgaagggtcgtcggtttaattgttggcatcagccttgcgagagaccctacctgctcatctggcgtgcctctttacatgtgctccagctttgtgtcaagtgtgcttcgggttcgaaaagcattactgcattatgttttcttgaagacagtgtaggcatatattttcctcgagccatagtgagtttccgcatatgttttgctttctcggcgtccagcagcagttccatatacagaccaaatttgcaacgaaaaaaaatggaagatttttgccagaaaaaaaaaggaaaaatcttccttaaaaaaaaggggggg

SEQ ID NO: 155734 - DNA, 620 bp, Zea mays
  Clone ID: MRT4577_73614C.1
gaaaaaaaaaaatcccgtttcatttagggttggccagaacccggaaaaactttgaaccgcccgattttaacggggcccaaaaaaataccccccaaaaaggtcccacccacccacaaaaaaattttaaggggacccccggggccaattgaaaataattttgggaagaaacggggccacccagaaactggggcacattaaaaattgaaaacaaaccgtttagcccacctcctcaattttggggccagggccccccttgccggaaggggcttctttgtccatgccgccagggccgcccatgttttaacccgccccctggaacattttggaaaaaagggggttgaaaaggctttccagttctttaattttgtcctaaaactcccccccctggggaaggtggtgggggcccacccagttgagggccgggtaaagggcgccctcaattttttttttgtaatgggccggaagtttggacccaattttttcgcccttgatcgggtggcccatgttgaaggaaaatttttccagggagtttttggcccccaccttttttttgggctcctaatcctaaaacttgaacttttaaggggcctgaaccattttttggatctcctccttggaaa

SEQ ID NO: 155735 - DNA, 147 bp, Zea mays
  Clone ID: MRT4577_73615C.1
gccgggacttgaacttgcatcaatccagatcagtaacaggacaagctagagaggtcgtcgaacataacagatgaagatggcatttttcccccgagagcctggctctgtcagttgacagaagctctgcaatgcagatgccctgaccct

SEQ ID NO: 155736 - DNA, 970 bp, Zea mays
  unsure (1)..(970): unsure at all n locations
  Clone ID: MRT4577_73616C.1
ggaagacacatatataattatagagtgtatagagataaatgtcacaataaaatcagagtacttattacatagcggaagtcttacaaaataaaagatgaatatagcaggaactaaaatctatccttggcgccagaaagctgactgggagacgccacctagatcatctcgaaagcctcagtgttaggcggctcctcttcgaccacatgttcttctccttcaacgagctcctgctcagtagtctctaccagctgaacctcaggatcctctgtgacttgctcgtcatattgtttgatatcatactgcatatatgntcgacgtcaccgtgcgccgcggctagagacagcaatgaataaatatccaccaggtattactatctcatacacatacctaagtaacaaatgacctaaacagattccacgtgtttccagaggccaatctggttgggtacaagtattccaagtgtgccagaaatgaaagccattagcttcataagttctcagtcagcactacaggagatttagaggacggggtatgggacaatactgtgccatgaaacagaaccgaagcgtgcaagaacaagcaacagaataatgaggcatcacatcatgtcctctagatcattggcaagtccattgtgcatataatggattaatggtccatctaaattggtgatcttgtagcctcttgtaacaacgttcattgtgttcatgaaaaatcaaaccatgagcatcatcagaacaaaagtagtccaagctttgtcaccaatagaggatcacatgtaggtcatgtttggcccccccattttcagtttttcacaaacttaaacagaagttctgacaaacagtcaacttctgcagcagcttattagttcagctgcttctcagaatacattaaaaacagccaacaagtagaagctactttcaccagttntcagaaaccccccctccacaagcagcagctgtgccaaaca

SEQ ID NO: 155737 - DNA, 107 bp, Zea mays
  Clone ID: MRT4577_73617C.1
aatagtcatcgcgtcgaggccgcaatgaactgttcatcggtaccttcatccgtacgagtctcgctgacacatatcgtgaggagagcttgcgctcagaaccggaatat

SEQ ID NO: 155738 - DNA, 599 bp, Zea mays
  Clone ID: MRT4577_73618C.1
aaaaatcccttctacattcctccctcaccacacctcaccacttaccaaacctagcaacaagccccaccatccgcttcgtatgaaagccaaacaaaagcaatagaatcgcttacagcgtgtgagatacgcgcatgtggacgtaatatgcgcgggggacattgctgctgctatccccgagctcgccggcgtcctgctccttcccggacttcacctcgaaccagaacccgctgatctctcgcggggacgcgtgtccatatgcccctgactacgggggcttgctgacaatgtccatgtatcccacgtccggttccaggattcaataccggcacgagtacgtgtccccgacgagcaacatgtcactgacgctgatgtcgtgatactccgccgcgagcagaaccaacaactacctaacaatctatgccggcacgtacataaagatcgaattccatctccgtcctccgctccaacacgagctccataccctgaacaccaactggcttcagctaccaaaagcccctctcagatgataagtatggactccgtctacactcctccggcaatgaaaacgactaatgcattctcaggaaccgcatacacac

SEQ ID NO: 155739 - DNA, 1494 bp, Zea mays
  Clone ID: MRT4577_73619C.1
gaccatgagattcatgatcgaatgaaggacatgttttggtctccagacaaatttgtgagggcaccaggagggtcttcatccaatgttgctctagctttagcagcgattggtggaagggttgcattcatgggaaaattaggtgatgatgactacggtcaaagtttgctgtatcacttaaacatcaatggagttcaaactcgagcagtttatatggacccttcagcaccaactgctgtgtctttgatgaaggtcagaaccgaaggaagtctgaagacaaactgtgttaaaccttgtgctgaggatcgtttcctgccgtctgatatcaacccggcagttctaaaagaggctaagatgttttactataattcttcagctttgcttgagcccactacagagtcatcattgttgaaagctattgatgtttcaaagaaatttggtggtacaatattctttgaccttaatcttccacttccactatggtcatccagcaaggaaaccaagtcactcattaaggaggcatgggaagctgccaatatcattgaagtcacaaaacaagaacttgagttcctttgcggcatcaaaccttctgagaaatttgacacaaatgataatgataagtccaaattcacacactatagttcagaagttattatgaaattgtggcacagtaatctcaaggtcctctttgtgacaaatggtacctccaagattcactattacacagaaacacacaatggctgggtccgtggtacagaagatgcaccgatcactcctttcaccggtgatatgtcacaatctggcgatgccattgttgcagccctcatgaggatgctggtaattaaccctcacctgatcacagacaaggtttacttgcacaaggcagtcaaacatgctattaaatgtggtgtcatcgaccagtgggtgctcgcgcgagaacggggcttccttcccaaagagagagcagatccaaccggcgagcagtacgaagtgaggtccatcacagagagggaataccgcacgcttcctgatgccatgcaatcagaaaactcgtcaaccagtgaacttgcttatgtggagtgaaaggacaggccattggtgtctgtacactggattcctctatttatttatggaaactgactggtgctgcagttggtattcagaagaattagtttaaacatgcagattttaggtttgtcgagtgtaggttaatagcccccaaagtaagactaacatattgataacatagagacaatgcaaatgtggctgatgccaggaatttttcctacaatgcaatatttgttcattcttgatttctctgcaacaccactatcaattgtgggatggaggtcatttgatcttatcggttatgcaccaaatgttattatcatatatccagtgtatcaaaaatatattacatgactgaactcaccagtctgtttccttttcaggtaaaagaattttttcctcaaaaaaaaaaaaaaaaaacccgcggcc

SEQ ID NO: 155740 - DNA, 497 bp, Zea mays
  Clone ID: MRT4577_7361C.1
cgtacggtccatgtcgcggggccagaagcctacgcgcagtcgtgagagaccatcccgccacggcagcaagcgagggtggcctagccagccaaaccggggccagcccacgccgccagggggacgggacgggaaggaaaccgaggcaagcggcggcagcggcagcggcagcggtagcagcagcgcagggcgcacgcgcttctcgtttcgtgtcgccaggggaaggaggaggagcgagtgggttgggggatcggctggcggccgagggtccgggagctgcgggcggcatggggagggacgagatgctacggcgtagcctcgtggcgctggcggcggccgtggcgctcacggggctggccacggcgtcgctgcgcaaggcggcggtcacgtacggcttcggcatcctcgccatcgccggcgtcctgctcccggactgggagttcttcgaccgcgactactcccagtggctaacccccatgctcgcctcccgccgcacggcc

SEQ ID NO: 155741 - DNA, 363 bp, Zea mays
  Clone ID: MRT4577_73620C.1
acacgcgtccggggctggcatcgctgccctcttgtccctgacctttctgcactgatctttccttggcgtggcttccattcacgttttccttcttcctctccgtgtttccctcttactcctcaaatgtagctctaactgtaacataatgttccttaaatagatataaattgtcatcaaaaaaaaaaaaaaaaaaaaaaaaaaaaaaaaaaaaaaaaaaaaaaaaaaaaaaaaaaaaaaaaaaaaaaaaaaaaaaaaaaaaaaaaaaaaaaaaaaaaaaaaaaaaaaaaagggggggccccccaaaaggttcaaagcttacttacccttgaatgcaagttcaaagcccttcaaaaggtgccccaa

SEQ ID NO: 155742 - DNA, 717 bp, Zea mays
  Clone ID: MRT4577_73621C.1
attgggtacctcgaggccggccgggatgaatcgtctgcgtctcctctcctctgctctatgatcatatgatcgacgctcacgtacatgcagcttacgctgctctacatgctgctgtctatcaccactcggacgcctcgctgccacagattgcctgcgcttctagggtgaatcacaatgacgcgtcaccttcctctgagaatgcacaggcacagacaattatcaatcttcaaagactcctatttctgacgaccctgactcctctcatcctgacagacacatacaagagtatactctttgcgttgcttaatcgacatccccaatcctgcagctgaatctgagaagccttatggcctgatccttcctgacggacatgatatcatacggcatctcaggtctactacctccgtctgcgtcctcctccgagctagtccattaagaatgactacggtgcactgttctatctttacagacttgggctcactctcctcttcatagcccatgtcctactatgaggcccatatacgacttcatgacggaatacacatccgcgagtacaatgcaaccagtgcagcaactaagaatgttgctacttgggaatttcactacgacaatccaaataagaagaccgctgtcataatctcttctcctgacgctgccctgcttttctgcttagaaccgtactcactgtatcgaccaatgaaatgattcatacctgca

SEQ ID NO: 155743 - DNA, 615 bp, Zea mays
  Clone ID: MRT4577_73622C.1
aacatagtgttgttagcctggatgggattgattttgtcagatgtgaggttgtcgggcagagtttcatgcttcaccagatccggaagatggttggccttgctgtagcagtgatgaggaactgtgcacctgagtcaatctatgatgttgcctttcgcaaggatatcagacttaatgtgcctaccgcacctgaggttggactgcacctcgatgaatgcatgtttacctcgtataactcaaaatggatggatacacatgaggcagtttcaattgaaccctatgctgaggaggctgaagagtttaagatcaagtacatcttccctcatattgctgcaatggaacacaaggagggagctgtagcactctggttgcactcattgaacagcaggaactatccagatttccgctacgtggagactgctggatctgaggcaaaggttggggctgaagttgagaatatggaagaagcacaaatgccaagtaataatataagcgagtaacttcttgcaattaacatgcaagaccgatggatatttctgattgtcctgttcacctggagagttgaaacattgcttggaataaagactcgagagaaagggttgctgcttttgtcctatg

SEQ ID NO: 155744 - DNA, 307 bp, Zea mays
  Clone ID: MRT4577_73623C.1
gagcgcccaacattaaccaattttgttgactctctttagttcacaagaacgaacacggcgttacaagtctaagggtacaaaaatatcagccagaacaaacacgggcatgtttacacagcaggtgctgggcaaaaatatgaacatcgttttgggtggatgtgaggcatagacctcttgggcacggagggggatccctccctgttgtataggggccgggggggcatccttgtcgggggcccccgaaagattccgttctcggagcaccggggggggtccatctctgaggagggtcttgaccgtttcgtaa

SEQ ID NO: 155745 - DNA, 251 bp, Zea mays
  unsure (1)..(251): unsure at all n locations
  Clone ID: MRT4577_73624C.1
actcctatagggcgattggtgngcctacccgcnccgggatcccatagtgacagtccccttgcgtcgtccccttccctcgcctcgcgttaggtagcctgcttctctacccccacatctccctccggttctcgccatgggcgccggcgccaacaaccacgaggagtcgagccccctcatcccagctgcggttgccgcccccgcggacgagaagcccccgcaggctccggcgccggccgccgccaatcactatg

SEQ ID NO: 155746 - DNA, 248 bp, Zea mays
  Clone ID: MRT4577_73625C.1
tttcggtaggcacaggtgtaaaaaggggagatttcagaagacgggcgaaacaactgatgggggaagatacctggggtgagaagatgagaaagaaatgatgctgagggacctagtgaaatcaatgaaactcttgagtcttgcttaggctcgcaaacaagaagtggggaggcttgggaatctaggatatgacatatatgaaaggtttatctaagaagaaagaaacagagataatatatatatagacagat

SEQ ID NO: 155747 - DNA, 318 bp, Zea mays
  Clone ID: MRT4577_73626C.1
tttttgtgccccagccgcagtacgtggaggagagggcttccagagcggagctggagcctcagccactcatgtagcccccgccgcccaaggagatgaggttctcgatggacctgtcggctaccgggctggaccacccgccgatgccaacgctccctccccatgcctgggaacaactacggggcggccctgctgttcaagatcatcctcgatcgggagacggaggagatcccgggcttcgggttggtcaccttctacaccgaggaggcgatgcggaaccccatctggggcctgaactgcaaggggtactacgggcgcaac

SEQ ID NO: 155748 - DNA, 461 bp, Zea mays
  Clone ID: MRT4577_73627C.1
gaaagatgttaaccgtatctgtttattcttcatatgatacagcatggctatgcccagttctcattctggatcggagtcatattgatggcaacttccttgcccctaggtgccccataggcaagcttaacagacacatgacatcttgcaagctgcaattgttgttgagtgtgattatatgtaggctttgcatttgtatgcatgcttaagaaaggtatctgacataagaaaaaaattgaaaatataataatcaaaataagcatctaatgggaaatggatgttgggttgcttatgatattgtataaaaagggtgtgaagggaaatggatgttgggttgcttatctgtgaagattgtacagaaggttgttccatacacacagctaattttagtatcttgcaggatcctctggtgactaaaggtgcacgcttggtttccggtgtggggactgatgtctgggaacatg

SEQ ID NO: 155749 - DNA, 195 bp, Zea mays
  Clone ID: MRT4577_73628C.1
tcgcgatctagaactagcgccgcggaggcggctggctgggctcgcgggagagtctattatttccatcggcaccatcacggcagggcggcgcgcggcgcgcggccagcgggtttacagaccctttgtctctctcgctcgcttcacgctcgcgaccgctctcctgcgcccgtccgcggcgagcggtcggacccttcg

SEQ ID NO: 155750 - DNA, 398 bp, Zea mays
  Clone ID: MRT4577_73629C.1
catgattagtgtctgcatatcttcatcgcgtggtgagaccgagaaacaaccagacgccaaggaaacgatcaggctgccttgaatgtgtctggtctgcttcgagctacgatagcgcaaaggatacagatctattcactgtctatacactgtgaaaacgaattaaaacggaatacatcggaccaacattgtaccatcattatatatctattcactatcttttcactaataaaaaaggcccctagggccgccctcgctccacaaccactgtataccccgggctgcccccattctacatcaatcctatctataccttatacctcccggcgacctccaggacccaacccgccctatattcaccctaattacacgcgcactatgcgcgctcactgaccaccgct

SEQ ID NO: 155751 - DNA, 278 bp, Zea mays
  Clone ID: MRT4577_7362C.1
gcagcctacccaaaatgaatctactggtgctgatatggaagtgaagcctgaaccaaccgctcgccagccgagatggactggccgttagtggaactaacataacattttcacttttcatacaatagcatggccaacgcttgcgctgagccacgtgtctcctagcacatctgaaagtagaatcagattatggtcaaactgtctatcatacacatgaacgtgtcaacttactatttttttgacaccaggaagaagcagaacaacattaagctctatgtgcg

SEQ ID NO: 155752 - DNA, 998 bp, Zea mays
  Clone ID: MRT4577_73630C.1
gatgcatcaagactcttagcatgaactccaagtatctggtctcaggagggactgatgaggccttgcgtttttacaatcttgaaaccaagaaggaggaaggaatgttattacatcacgaaggttctattacttgcagtgctttgcacgagaacaagtacattttttctggtggtgatgatggggaggttgcaatttggcgcacctatgatatggaacttgtgggtacgctgggtggacacagtttagcaattaacagcctttctgtccatccttctggaaaacttgctttgacttgttctcgcgatagatcgcttatgttgtgggatcttagttctggtagagccgctttcaatcaaaagctctcctatgaagcggagattattcagtggagtccatcggccaatgtgtacgctgtttgtgcttatcacacaataagaatatttagttcgcaaggaggaaagctgcacgaatttgaagaacctggattgaaacacatcttagctttcaccttccttacagacacggtatttgcatcggcaggagaaagcaaggtcatcaccatttgggatctcgaatctgagagcaaagtgttaacaactttgggtggattcgaaaacagagtaaaaggacttgcggcagtacaaagaggagcatctcacaaatatccttatcttatcagcataagctccgacgaatctctttcggtttgggatttggacgtttcaaccacgcaacctctagttcgaactactctagcaggaagactcgtctgcgtaagcggcgctatggtaggtggatcttcaaaagatacgcctaaaaagaaacccaagagaaagaggttggcaagcgaaagacaagaacaagactctgatgccattgtggaattatcttccgaaccagaacaacctagaaagaagagaaaagcaaacaataacagcaataacaacaagaacaacaataacaacaataacaccaataacaataaccaactcccagcc

SEQ ID NO: 155753 - DNA, 820 bp, Zea mays
  Clone ID: MRT4577_73631C.1
gaggaatggtgctaaagatgaccagaaccggaaatgtaatgggactgatgatgtaggcagcaagacgaatgctcagataactccaagtagccaatcaaagcacgtaggcaggaggaatggagctttaaaccacaagaacaactctggcaggttgatgcatcgtatgcaacctgaagcagctgagactgctattgattgtggtaatctcttgcctcgaaatgcaaatggacagatgcgacacaacagcgggcgcggtggagacatggatgaggaggaaaggatgatggacaagcttttgatgcactacagcaagaaaggttcggatctgaccaacaatgaaacacatacagatgctgcgcagaaggtttccttgcatcccacgggtagagctatctcgctaccacctgaatctgttggcccgagcaaaggtgcgaaggttcctgctcgatgcacatcacttcagccggaaggtcctaggagtgcgcatgttcacccaaaaatgccagacttcgatgaattggctgctcgggtcaaggctctgaggaaggcttgaggtggcataacatgatctctggtttgtgtacacgttctttcagctgaagagttgatccttggttgacagttccctgcaagacacaaccacacagagtcgtggtttgatgtgcagttcctattagagttcctattagagattaagcagatttgtgtatgagtttacttttttttttgtctgttagacgttttttacagtgctcttgttataggttttacttcaaaccaggtgtttgtctagaataggagcaccggtttcagttaacac

SEQ ID NO: 155754 - DNA, 175 bp, Zea mays
  Clone ID: MRT4577_73632C.1
gtcacacgcgcacgaacacgtgatcaatacaccaacgacttccaattaacataggggtgcgacacgggtcttctttaagcccttatctttttcatatactaacaaattacctcacacggaacatacaaagaaatataccttggatgatcgctttctcccgatgatactacattat

SEQ ID NO: 155755 - DNA, 430 bp, Zea mays
  Clone ID: MRT4577_73633C.1
gcaagcaagcaccagggggatcatatcatattttttttatccatgagaggggaagagtcattttttaaagcaagcaaaataaaatccttgtttcaaagaagaaaaggggtagcttttggggcttcgatttgggggcaaaaaataaaaatacgattgcccattggattgagaagcaccaccacaatttgggacccccagcgctcaaggggacttgctttcaatgggggagccactgggggcagcagcattagcattgacattagcagcagcattattgttaccattgccattggggcttgggctacgggcaaccctaagactcgggcttccctcacctttaggacttgggctccgctcacctccaagacttggggttcgcttaccttcaggacttcgggttcgttcattggccgcaagggttgggttacta

SEQ ID NO: 155756 - DNA, 303 bp, Zea mays
  Clone ID: MRT4577_73634C.1
aatttcggcccaaggaggagggcatatgcaaagctgcaagcacacccatatccaatcacgccagctgcgacaaggtgtgttttatctggatcggccaacaacgccaggcacctagacagagcaggctagtggagcgcaggaaagagagccaagacgatccaagtgacacacacttagtgaagttaacagcgacgaaagcctgctgatttagcagaagatataaacgccaagcccaatctgcccgctgctgaaacgctaccacctagcggagatgtacgtcggaccgctacacagtcatgaacc

SEQ ID NO: 155757 - DNA, 200 bp, Zea mays
  Clone ID: MRT4577_73635C.1
gggggccaatggaaccccgcattttgatttccgggggcatactgggtagcatacaagagaatcaccatgggatttttggacaaccaagatcggggggggaacaactaaagttggggggggggggtaattctctggggaaggggccctgggcaatcttggtgacaaattattaccctctcctaaaggttttaaaagggggg

SEQ ID NO: 155758 - DNA, 485 bp, Zea mays
  Clone ID: MRT4577_73636C.1
cattgggtacctcgaggccggccgggaatcccttcaaacctctaatcccaagtatccaaactagccctgagggggaactatgggtgttcccctccccagattccaaaccagatcttggggcgattgtgaagacggggtgactgcagcgggggtggcgccgggggatggggctggagctggagctggagctggagccggagctggagctggagctggagcggtgggcggtactgcggggcgggatggctggcgggtggcggctgagggaggtcggcggcccaaggcgagcgagcggcggcggaacgccgcacgggagtgcgggcgtttcatttcaggcagtattcagacatccttggctatagatgttaggcctgttgtctgatctgtatcggaaattctcgtacgtggttttcctagcactttcttctttgaatatgacagcaccattagatgaggaccataaaaaaaaaaaaaaaaaagcggcc

SEQ ID NO: 155759 - DNA, 307 bp, Zea mays
  Clone ID: MRT4577_73637C.1
gaaaacacccaaaactacacaagctttggacatggtccaacccacagcagtgccaacagcaccttcctcagtcaaaactactgcaccagatcatgtcagcttgcccccgcccccattacctgctaaccagcagagtgttgctcaactttctgccccgttttcatctggcttgtctaatgtgggatcgaccatggaccctcctactatttcagcaaatccaccacaatcagcacaagcaaaaggataccttatccatcagatgccttcatcagctcctcagccatctcaacatccaaatatggcccta

SEQ ID NO: 155760 - DNA, 414 bp, Zea mays
  Clone ID: MRT4577_73638C.1
gaaggtttcacatttgttgtggctgatccatataacgaagctcttgaagttgatgtcatcgactgggatcaggttgggaaccatgaaaagatgggaatgaccatgatcacacttatcgaactcgcaccaggtgacactaaagttacaactcttaacgtgcgtagcaccatggacccaaatgaggtagagaatgagacatcacatggtgagcttactctacagctcatatacatccctttcaatgtcgatgatatagataaatacgatacagctagtgctgatgtgctagcgagcgctccagatggtactccagctggtgatgccgtgcttcatgtgactgttcatgacgcccacgatcatgaggggaaagatcatccaaacccatatgcagcaagtactttcaatggcgaagac

SEQ ID NO: 155761 - DNA, 396 bp, Zea mays
  Clone ID: MRT4577_73639C.1
gcaggtacgcctgcaggtatctcgctgccgggattcccggcgcgagcgacgcgtccgtccacacacgccgagctcagcttaccttcacttcagctgcaatcaaaatcttgaccagagcgagagctagctagagggccgtgaaaatgccgatcaataggatcgtcctggggagcctccacgagagtgtaccaccggtcgcccttaaggcaggtgtcgctaaggtcatctgcaccctcatctttatcttcgccagccagggctgcgtcatggccttcagcaaggtgaccggcaggggcccgacaaccccggcaggcctgatcgtggtggcagtggcgcacgcgttcgctctgatcgcggcgaggtctatatgcacgaacatcttcggcgtgcacgtga

SEQ ID NO: 155762 - DNA, 965 bp, Zea mays
  Clone ID: MRT4577_7363C.1
ctcgggtcgacccagcgtccgcctacgcgcagtcgcagagagaccatcccgccacggcagcagccgaagcgagcctagccagccaaaccggggccaggccaggccgccagggggacgggacgggaaggaaaccgaggcaggcggcggcggcggcagcagcagcagtgcagggcgcacgcgcttctcgtttcgtgtccccaggggaaggaggaggagcgagagggttggggggtcggctggcggccgagggtccgggagctccgggcggcatggggagggacgagatgctacggcgtagcctcgtggcgctggcggcggccgtggcgctcacggggctggccacggcgtcgctgcgcaaggcggcggtcacgtacggcttcggcatcctcgccatcgccggcgtcctgctcccggactgggagttcttcgaccgcgactactcccagtggctaacccccatgcccgcctcccgccgcacggccgccgccgcggctgccgaccgggagcacgacgtttggaaattcaagccgtatcctctccgggtggccatgctgacgacgatctacggcttcggtctttacaagtggtggatgtacgtatctagctagtgtgggtcgtccactcgtcctctccccccttgccgttcctcattgtgagcagatgcgatagatggagtatattgcctggctaatatgctgctgatagcctgatatgaagaaccaccctcaagacaggttgatgtatgtaatgtaacgagcgggtttttgtgatgcgcaaacgccacgccactcattcttatctggaaacatgaatctaggttttattctttctccccctttgtcactccttcggtcttccttgttccatcatcatagcttcccaagggctacatgaacatgaatcttacagtttgcacatctttttttttaaaaaaaaaaaaaaagggcggccgccaccgcggtgga

SEQ ID NO: 155763 - DNA, 413 bp, Zea mays
  Clone ID: MRT4577_73640C.1
tctaaatcatgttagaggtgcatactcatttgaggatttaagaacattgggtgacatcacatgctcaactttcagagaagcatgcgaaaaaagaggactcatagaggttgacatgtcacttgatgactgcttgagtgaggctgcaacctttcaaatgccaactgctctgcgaaggttatttgcaacaattcttgtattttgtgaggccactaatgtacgtggactgtgggacaaacacaatgactcaatgtctgaagattataaccgagacaatcctaaatcgacatgcgtacaacaaatggtccttaaagacattcgggagttggttcggtcgatggggaaggatatcaaatcttatgatcttcctgagattaatgatacaggtgaattttgcaatgatataatgagagagc

SEQ ID NO: 155764 - DNA, 232 bp, Zea mays
  Clone ID: MRT4577_73641C.1
gtagctgctatagttaacgttagtaacggaggactagcagcatctgtctctgatgctataatggatctctcaatcatcctctactgattcggagctctcatgagcgacaccatatcctggcagggtgcgctgactgctgtgatcacaaacggatatgacggtgtccttgtgagcatgctaaagacaggagataccgtaagctgcgccacgcctcggttacggaacacacaga

SEQ ID NO: 155765 - DNA, 840 bp, Zea mays
  Clone ID: MRT4577_73642C.1
aatcgaatttaggtgacactatagaagagctatgacgtcgcatgcacgcgtacgtaagctcggaattcggctcgaggagtactggcaccgctctagccccagatcaaagctcgggagaagagggagaggaggtagtgcaacataaatcccgagtcccaccaaatcgcaagccctagcagcttccggtctgcgtctgcaacgccgcggccttgagtgcgagagcgcgcgtgggggatgaggcgggtggcgccggcgatgatcgccgccagcagcgctgctggcggcgaggagacggcggtggtggagaagacgctgctcaacggggacgtctaccgcggcgcgttctccggcggctcgccgcacgggaagggcaggtacgtgtgggccgacggctgcatgtacgaggggaactggcggcggggcaaggcgtccgggaagggccgcttctcgtggccgtcgggcgccacgttcgaggggcagttccgcaggggccgcatcgacgggcagggcgtgttcgtcggcccagacggcgccacctaccgcggcgcgtgggtggcggaccgccgccacggcctgggcaacaagacctacgccgacggggactgctacgagggccagtggcgccgcaacctccaggacggccacggccggtacgtctgggccaacggcaaccagtacatcggggagtggcgcgccggggtgctctccggccgcggcgcgcttatctgtgccaatggcagccgctacgacggcgtctgggagaacggcgtgcccaaggggtcaggggtcttcacgtggcccaccggcggctcctggcctgggagctgcgtagacctgccg

SEQ ID NO: 155766 - DNA, 315 bp, Zea mays
  Clone ID: MRT4577_73643C.1
acaaaatcatgccaatttaatgaggactagcaatggagttacacattcatgccaattcattgaagtatagacgacgtactggacaaacgcttggcatagctaggcttacttttattagagctgtcactggactcgaagcggtatatcatccgatttacatgcaccgaagatcggagacacaaccgacgtcaatctgatatcagcctgcgcatacctattatacacaagcgggtacctactgaaaaaataactatcttctaaagtgatgtcttgctccacatatatgcaggcgtagtcgcaggaataatggatgct

SEQ ID NO: 155767 - DNA, 818 bp, Zea mays
  Clone ID: MRT4577_73644C.1
atccataaatgaagaccatataaattctcttattcaactgaacagaccggtaaggacacacaatctgttagcaaacagaagagatgtttgatatttcagtgcgacgttaacaacaggctctcaattatgtctaagcaacattatcttatcctgaaaggttgcatcatatggcacaacaagcatttcccatcacatgaagcaagagacatgagttgaaaccctaattaaaaaccaaaatgccattttttaagcacggacctccaagcaacaagaccatacgatacaaatgactccacaagacctacaaatctcgagcatcatcagaacagtttgcagacaggcaggcaggcagctaccaccgccacctccaccatgtgccccaccgtgtcgcttccctctcgttggccatcatgggctcctgcctctcctccgaggcccccgccaccggcgatggcccagcggcgtggcgaaagaggcaccacgggagccaggagggcgcggccggcggaggtgggaagaagctgcccggaggagcgggggagatgacggaggatgagctcgcgtgggtcctcgagaggttgtgcggcaaaggcgctagcgcggtggcgagcctccacacgcagcaggaccggaagggcaccaaccaggacgccatggtcgtgtgggagggaggggggactgcagagggagcggatgctggacgaggaggggatggactggggcagcggtcatgcggaggggatagacggcgagaggatggggcggatgcggcatgcagatgacccgtgcgcggctcgcggatgggacagatggggtgg

SEQ ID NO: 155768 - DNA, 2306 bp, Zea mays
  Clone ID: MRT4577_73645C.1
gcctaattaaaaaccaaaatgccatttttttaagcacgggcctccaagcaacaagaccatacgatacaaatgactccactagacctgcaaatctcgaacatcatcagaacagtttgcagacagacaggcaggcagcggcagttaccaccgccacctccaccctgtgctccaccgtgtcgcttccctcccgttggccgtcatgggctcctgcctctcctccgaggcccccgccgccggcgatggcccagcggcgtggcggaagaggcgccacgggagccgggagggcgcggccgccggcgccggcgccgccggcggcggtgggaagaagctgcccggaggagcgggggagatgacggaggacgagctcgcgcgggtccccgggaggttgtgcggcaaaggcgccagcgcggtggcgtgcctccacacgcagcagggccggaagggcaccaaccaggacgccatggtcgtgtgggagagttttaattcaagcgacagcatcttctgtggtgtgtttgatggccatgggccatacggtcattttgttgcaaagaaagttagagattcacttcctgtcaagttgcgcacacaatggcaaactagtgctaatgggggctctagtcctcatcaaaatggaagcatcaactccgaagaaacagggtctattgttgacgatgaatggggtgatggtgatgacactgaaaagctccctgagatgtttcttccactgaagcaatcttacctaaaagctttcaaattgatggacaaggaactcaagctgcatcccacagttgactgtttctgcagtggatctacggcagtaacattggtgaaacagggattggaccttgtaatcggaaatcttggggactcaagagcaattatggggacaagagacgcctctaacaatctaactgctctgcaactcacagttgatttgaagcctaaccttcccagggaagctgcgaggatacaacaatgtaaaggacgggtctttgctcttcaggatgagccagaagttgccagggtatggttgccaaataatgactctcctggattggcaatggcaagagccttcggggacttctgccttaaagattatggtttaatatctgttccagagatatcatatcgccgccttaccgaaaaggatgaatttataatactagccaccgatggggtatgggatgttctctcaaataaggaggctgtcgacatagtagcatcagccccatctcgtgcgacggcagccagggcccttgttgactgtgctgtcaggtcatggaggttgaagttcccaacatccaagagcgatgactgtgctgttgtctgcttattcttgggtcacgagaagtcggccgactcggttcaagggagtgaacccaatgtggagacagcagaacccaccgtggaggtttccagttccacacaggattccagtgcaggggttgacgaagacattgcagatgctggcatgcatgtatctagtgcagtgcacatttccgaggccacgctgcagcactccaccacgttaagggaggtcgacgagattgtaccggtcgacgaacctacagcctcgaaggagcctggaaggtgcgggtctgctcgcagcctggcagattgcatatcgacaaacgaggaagaggaatggtccgcgctcgaaggcgtgacacgggtgaattccctcctgaacctccctagactactgtcgggcgacaagcgatcgaccagctggaggaagcggcggtgaccggtgaggaagctctcctacaattctttgccgagttcaggtgggggttcatgcagaggcgcggctcaacccagtactggcattttcggccaggcgcgtgcaaaatcctttagtctctgggaatttgttatagctgatttttaggcttccccagattgttttgccggcaggcgcgggcgtttcagattgcttcttcattcttgtgcctttgccgggaggtgttcccagaaccattcttgggcttctctgtgtccgtttgtgcataaggaagtttttgttctgtgagaagcttcttttgtaaaacatgcagtgcctcctgatgttggatgggatgggatgctcgcctgcctcccgaggctgtcttaaaacatgcagttctttttttttggttgtcctgtgaaatccagactattctcaaccctctgatttggctgccagtcttgattgttgcatcgccttcgaatgtaaaggattgtgtcacatgatcaaatggggtgtaaatttcaaatgttcctatagaaaaaaaccatttatgaaaaaaaaaaaaaaaaaagcggcc

SEQ ID NO: 155769 - DNA, 198 bp, Zea mays
  unsure (1)..(198): unsure at all n locations
  Clone ID: MRT4577_73646C.1
agttgtatgttataatatggacatgagcnnggggcagttctacccttgttcttgtagggcatggaagcaacttactcgctcgatgagttatagacaattctgcgtaaaaaaaaaaaaaaaaaaataaaaaaaaaattttaaaaaaaaaaaaaaaaaaaaatataaaaaaaatataataaaggccaacaattggtgggc

SEQ ID NO: 155770 - DNA, 2511 bp, Zea mays
  Clone ID: MRT4577_73647C.1
attacttacttacagtccatttgatgtacatatcttccatgtgatgatcccacgcgtccgcccacgcgtccgcgggagaattatctcctgctagcaatccagttttaaagctttcaacattgcgagaactttcaatcatgagtccaaaaagcccacctgtttcaatgcgcttcattcctgaacaaaatgacaaaggagcgctgacagaagatactcatggattttctgatcttttgtcccagcaaccatcaagatgtttgatcttgcggaccaatggggagctttctgtgcttgacatggacgatggacatgaacacactctcacaaattcaattgaactcttttgggtcacctgttcccagtttgaagagaagggtagtcttatcaaagaggtttcatggcttgactatggtcatcagggtatgcaggtgtggtacccatcacatggagcaggtccttttaagcaagaggattttttgcagctggatccggagcttgagtttgatcgcgaggtgtatcctcttggtcttcttccaaacgttggtgtggttgttggtgtttcccagaggatgtccttctcaactgcggagtttccatgctttgagccttcacctcaagcccaaacaatattgcattgtttattacgacatctccttcagagggacaagattgatgaagctttgcgcttggcaaatttgtcagcagaaaaacctcacttctctcactgtttagagtggcttctgtttacagtatttgatgcagatatatcaaggccaagtgcttcaaaaaatcaggcttcacaaaaagttgattctcccaagaaatctcttcttgagaaaacttgtgacctgctacggaactttcctgaatatatggatgttgtagtcagtgttgctaggaaaactgatggtcgacactgggctgatcttttctctacagctggacgatccacagagatgtttgaggaatgcttccaacagaggtggtacaggactgctgcttgctacatactggtcattgctaagctggagggccctgcagtcagtcagtattgtgcactccgtttgctacaagctacacttgatgagtctttgtatgagcttgcaggggagttggttcgcttcttactaagatctggaagagattttgagaatgccacttcagactctgagaagctatctccaagatttctaggctattttctgttccgttcaccttataagcggcaatcttctgatttgaaaagtaactcaatgaaagaacttagtccacatattgcttctgttatgaacattctagagcgccatgctagctatttgatgtctggcaaggagctttctaaactcgtcgcttttgtcaaggggactcaatttgatcttgtggaatatctacaacgagaaaggcaagggtctgctcgtctagagaattttgcttctgcactcgaactgattggacaaaagctccaaatggatacactgcaaagtcgacttgatgcagagttccttctagctcatatgtgttcagtcaagtttaaggaatggatcgtggtgctagctactttattgcggcgtgcagaggttttggtggatctctttaggcatgatttgcgattgtggaaagcatatagcattactctacagtcacatgatgtattcacagaatatcttgaccttcttaatatcttggaggagcagctttcatctgtctctgatcttacattgcaaaatggaccattgtcatgaatgctggacaatgacactgattgaaaaaacagctgaatacggcgttttaaccttgagttaattaacacatacagtttgatgagatctgcggtggggccaggaatctgatgtaaatagattattcagggtttttttcccctttgagcaacaccccggaggcgctatggcagctatttgtgcagtgatcagctaagcacctattgttgtattatttgtttgttgcagcagagttgaatgtgcattcttcgccttacggaggaggaatttatacagtggatggggttgccttcccctgccctttggcaggttagtaaagtgtgccctagaggaaagtggcatgtttgagagcaatgagattggagggggctaaaatcccctttgttatttaaaattaaatagaagaggaatttagcctctcggatcccctcaattcccctgtatcccaaacaaacccttgaagtgttttctacagctttaggaaatgtggtttacttctatggtaggtacatgggcaaccaatgtatatacatttatttttacagcatcctggcccgttcatccacaacgtgttgcacatgtctagcctctccattgcaagggcgtacagatatgtatataaaaatctacacaatgcatgcgcatgcaccggagtgtatctgtatcgaccatgaaaggtttggtacaagtctgaaaaagtatacattgttgtcaaaaaaaaaaaaaaaaaaaaaaaaaaaaaaaaaaaaaaaaaaaaaaaaaactcgagaaa

SEQ ID NO: 155771 - DNA, 244 bp, Zea mays
  Clone ID: MRT4577_73648C.1
ctttgacgcgtctcgactctatcactggaggggggaagtcgagcgctcaccaaaccttatttgtgcgtgtgtcttcttgtttaaaaaaggggatgacctattaatgacagattacctcctgagacgaactgacgtgtgtatgatagaggatacatggccagactatcactactagaaatagagggggggggggaggcccatctacaggatgcatacttacctactcgtttttacgacctattct

SEQ ID NO: 155772 - DNA, 497 bp, Zea mays
  unsure (1)..(497): unsure at all n locations
  Clone ID: MRT4577_73649C.1
gtaccctncgagggcctggccggnngccggtcgaaagcacgacgacaaaacctcgaacgccaccgtcacgctcacgccttcgcccgaacttctccagttcttccggggagacgagaaaggaaccgaggatctcgttcctttggcgcagcgggcagcagaggcctcgccgagggagatggccggccggcgcgagtcgcccctgatgcgcggggcggggcggggcctccgctgtctcgggggtcccgcatcgccgcggcggtagtggtcggcgtcgcactcggctgcctgtgcgcgtttctctaccccgccggcctcttcccccgtgcccccgactccgccagccattggccccgccaggtacaatacccgcgtttccgcttcttttgatcctgctctgttcgttgggggagggcaggagatctgaaggtttggacggcgaccagtgagcattccttgtgtgcagcgacgcagtgtggttgtttaccagcccttatccg

SEQ ID NO: 155773 - DNA, 344 bp, Zea mays
  unsure (1)..(344): unsure at all n locations
  Clone ID: MRT4577_7364C.1
tgatctgatctgctcttctccccgtctttcctcctctcccggtctttcctcctctccccttnccgtccagcgcgtccccacgagganacaaccccgnggtatggggatcgtggaggaggagaggggttatcgtgctggcgtacggtttcgagaccgaccagatcgtgtggaagtacctggtgtcgaacctcgttgttgattatcgtgttgtgttcttcgacaccatgggtgtcggacccaccaaaccggactaattcgacttctcacgctaccccccgctcgagggctacgcgttcgacctcctcgccatcctccaggagctaggcgtccgatcctgtatctac

SEQ ID NO: 155774 - DNA, 342 bp, Zea mays
  unsure (1)..(342): unsure at all n locations
  Clone ID: MRT4577_73650C.1
cccacgcgtccgtccacgcgtncgtggacgcgtgggcggacgcgtgggttgtgacctgctacggaactttcctgaatatatggatgttgtagtcagtgttgctaggaaaactgatggtcgacactgggctgatcttttctctacagctggacgatccacagagatgtttgaggaatgcttccaacagaggtggtacaggactgctgcttgctacatactggtcattgctaagctggagggccctgcagtcagccaatattgtgcactgcgtttgctacaagctacacttgatgagtctttgtatgagcttgctggggagatggttcgctttttgctaagatc

SEQ ID NO: 155775 - DNA, 1396 bp, Zea mays
  Clone ID: MRT4577_73651C.1
gcgccatgctagctatttgatgtctggcaaggagctttctaaactcgtcgcttttgtcaaggggactcaatttgatcttgtggaatatctacaacgagaaaggcaagggtctgctcgtctggagaattttgcttctgcactcgaactgattggacaaaagctccaaatggatacactgcaaagccgacttgatgcagagttccttctagctcatatgtgttcagtcaagtttaaggaatggatcgtggtgctagctactttgttgcggcgtacagaggttttggtggatctctttcagcatgatttgcgattgtggaaagcatatagcattactctacagtcacatgatgtattcagggaatatcttgaccttcttaatatcttggaggaacagctttcgtctgtctctgatcttacattgcagaatggaccattgtcatgaatgctggacggtgacactgattgaaaaaaacaactgaatacggcgttttagccttgagttaattaacacatacggcgggaccaggaatctgatgtaaatagattattcagggtgtttttctctttgagcaacaccccgaggtgctatggcagttttttgtacagtgatcagctaagcacctattgttgtatcattagtttgttgcagcggagttgagtctgcattcttcgccttactgtaaatatgtgctgcgcccttaacattgtaagccatataccattctgagcagcaagttcttttctctgttccatagaatcgtgtttaaagctagaagcctagaacatgtagatagtcttcacctgatgtttgtagactccgagatattattaaaactgacactatgatttcttaattggatttttttccgatggctgaccaacaagttgttttctccgttccatagaatcgtgttaagagctagaagtctagaacatgtagattgtcctcacctgatgtttgtagactacgagatattattaaaactggcactatgaggttctccttaattgcattttttacatgtcatactgatgtttttactctgggcaattaatggaaataccctaacctgcaggaggaggaatttatacagtggatggggttgccttcccctgccctttggcaggttagtaaagcgtgccctagaggaaagtggcatatttgagagcaaggagattggagggggctgaaatcccctttgttatttaaaaattgaatagaagaggaatttagcctctccgatcccctcaattcccctgtatcccaaacaaacccttgaagtgttttttacagcttcaggaaatcccctcaattcccctgtatcccaaacaaacccttgaagtgttttttacagctttaggaaatgtggtttacttctatggtagttacatgggc

SEQ ID NO: 155776 - DNA, 160 bp, Zea mays
  Clone ID: MRT4577_73652C.1
ttttcacagacacaagagccgctgatgtgttgtatttatttagcgtcatcacacatgagagggactcacactcctcgtctcatggaagatacaagaacggaaggactagactcataacatggcatggattcactcatgcatggaagctccatttcactcc

SEQ ID NO: 155777 - DNA, 324 bp, Zea mays
  Clone ID: MRT4577_73653C.1
atggctgctggcggccaaggggagagcaggggcaccggcatgctcccagggagctcggccatggctgctgcgcctggaaaaatggaggccacgccatggctgctgaaggggctggagcagagagcgtcggccatgggggggctgcggcggccatggagctctgcccctgcgcaagggaaatcaggggaaagggggcgcgcctgtgggggccctgctcccacgctggcgtgcggctgcattccagggagccgagtggaggacgccaggaggtgcttcggcacgttggagaagaagggcgccctgcaggggcagcacgccgactga

SEQ ID NO: 155778 - DNA, 716 bp, Zea mays
  Clone ID: MRT4577_73655C.1
ttttttttttttttttttcgaaaaacatgactaattaagattcaacaaggcatgcacgccacctatggtgtaataaggtccctgatcagtagatcaccatcgttcatcgtctctctgcgcactctacgccgccgctgctactaggtgtcgccgtcgacatactccacttcggcgggagcaggtgccggtgccggtgcatcgtcgccgctgcactcaacattgaacccgaagagcctgaagctcctcgcccccgagggtgccactgccacctcgatgtcatggccggcgatggtggcggacgccaccgttgcacccccattattcatggccgcggttccgataactatcggcctcggccacgccggcacggtggcagcgtcgccgaagctgatatcgacgtcgcggcgccggcgctggcagtggcggtactcgatgaagtatcggccgccgccgctgcgggagaaggtgacggtgtcccccgcggcaagtcgtgcggcgcggacgaagcggctccaccccttggtcatgacatagctctggctgctcccccagtaggagtagcggaactgccacagcgccccgccgcggtcctggaagcacagctgcgtcgacccggcgccggccgccgggaagaaccgctccgcgtgctgctttggcaccaccagccggttgagcttgcctacgtcgctcggggtcagcaccttgtcgaacatgtg

SEQ ID NO: 155779 - DNA, 426 bp, Zea mays
  Clone ID: MRT4577_73656C.1
gcgcgcgcacgcgctggctgtgcccgtgctcgtcaagaagatgttccgcgtgtccgacatggccacggatttcgccgtgtcggcgctctggcgcctctgccgcgcgggcgacgccgccgccgccgcgtgccgcgccgaggcgctccgcgtgggagcgttccagaagctgctgctgctgctgcaggtcggctgcggcggcgtcaccaaggagcgcgccagcgagctgctcaagatgctcaacggctccaaaggcagcgtcgagtgcgtcgagaccgtcgacttcaagggactcaagaggccattttgatcggccgagggacgaaacgagatttctttttttttttgtgaagatttggttcgacgtttagatcagatgtgtggatagttgatacatacagatacaggctgcttaattagttttaggag

SEQ ID NO: 155780 - DNA, 275 bp, Zea mays
  unsure (1)..(275): unsure at all n locations
  Clone ID: MRT4577_73657C.1
tccggggnaagggnagcttcgnaggcggctccgccgcgngcgcgtcggtccggtgcgggcttgagctcaatgggcacnngggcccttgggnngcgcgaacgcncnnctaacgtgggnntcggggcgnnggcggcgagcagnaggctgccnnggttgctagcttgttattctgtacttatnnaggcgttcagttcataacttcggcacacggggagcttcgctgccactgtgcttttcaaccaagcgcgatgaccaagggggtgaatcaacggttc

SEQ ID NO: 155781 - DNA, 636 bp, Zea mays
  Clone ID: MRT4577_73658C.1
ccggccgggaaccgagactccgagtgcgaaccaagcttaccccagcagacagatgcgaagtggtagtcggagcaggaggaagagcgagcagcacgatgtcgaggcaggcgtacgtggatgaccacctgctgtgcgatcatcaaaggccagcacctcatcgccgccgacatcgtggggcactacgggggggtgtgggtacagtccgagaactttccccagatacagcctgaggaggttgctgggatgataaaggactttgatgaacctggaactcttgcaccaactggtctttttgttggaggtaccaagcgcatggtgatcccaggcgaacccggcgttgtcatccaaagaaagaagggctctggaggcattactatcaagaaaactgggctgtgcttgattatcggcgtctatgatgagccaatgactgcagtgcaatgctatctggtggtggagaggctcgtcgattacctgatcgaacagggcttgtaagtttggcataatgctattctggtcattgggcacttaagtttgcacctcatttggcctctgtaatatgtgggcttgtgcatgtgcttggcgtattgcatgcagaggataatttatcttcacgttggcttggtgacaatgtaggga

SEQ ID NO: 155782 - DNA, 348 bp, Zea mays
  Clone ID: MRT4577_73659C.1
agggggaaggagagcggcagcagccgcccgcaagcagtggtaacaacgcagagtacggggtatcgttataaaaaaatggttaaacatacacatcatcgcaaactacatcaatatactgtcaggatgcataaataaatgagagttatcaaactaaaatcaactgcaaggtgttggtgactgtatgagtataaattaatgcataagttatatatacaatgctgcataaaataaagtatccgagatcatataactagatataatttccccgcaataattcgtgaacttgattaaaaaaaaaaaaaaaaaaaaaaaaaaaaaaaaaagtactctgcgttgttaccactgctt

SEQ ID NO: 155783 - DNA, 640 bp, Zea mays
  unsure (1)..(640): unsure at all n locations
  Clone ID: MRT4577_7365C.1
ggtaccctcgnaggtcggccggggaacaggccaaagcgcagcagatcagcccatggccggnggaagctgtgttgcacgattcaatacacgacgatcatagacacaaacagtgacaactgggctgcggacagccatctacttcaccgagcgcgatccagcgcctactgcccaccatgcactacaacacgctgatggacaccatgaagggggagctgcacgcgcactgggggaccgtggacgacgtcagcgacgcgatgcgtgcggtgcccgcgcgcgcgtggacgcccctcggcgccatgaaggacgactactcgctggcgtgcgacactgcgcgtctcagcaaagtcaacatccgttgtcatccacaccaaggctgtggcaccacggcgctgctggcgctggttgtggcagatcaacaccaacctgagccacgcacaacgccgacgccgaccgccgcgtccgcatcgtgcactacaacataaagcacttgcgcagcgccgggctcctggacaccgaacatgtgcaaggcgcacccgttcaagtgggacgctccagagacgtttgcgaggtgaagctctagaagatgcatccgtgcacaggagcgaagggacctcagatagctgaatgcagatgcacgctg

SEQ ID NO: 155784 - DNA, 325 bp, Zea mays
  Clone ID: MRT4577_73660C.1
aacatattatttttgtgtaacggttttatcatatggtttctccacacctgtttacacaaatatcttattccacaagatattggcagccataggctggaaatggaaaaatccacccccccggacaagatggggcttcctttagagaaacccccaaaaaaaaagaacacaggtgacaggctctatgccccccaaaaaaaaacatgcgaagaaccaacaaggaaaccctcggagggtgtgattatagagatgcaggggaatctcaagggtgcaaacaagccccctttatgggcccaccagaccggtgacactggaaatccccatcctc

SEQ ID NO: 155785 - DNA, 356 bp, Zea mays
  Clone ID: MRT4577_73661C.1
ttgtacaccactgttgatcacatacattgtatttgcattttgtttgatggttattttatcaatgaaattgtttctatttgtaaattaaaattaggagaatttggaaaataccaccacaagggccaccttagttgtaaactaccgtaagtgtttctatgacatttggtgacaacgcctacatgtcatcctcacatgatcacatcatatgggcatatggtgttttctacatatgagcatctttgtgatggaatcctcttaatttgaaatttctttttcttgtaagcatttatttgttacattcttactcccactcttttctttgttttcttaaacagtaagcgcatgaaaactcattt

SEQ ID NO: 155786 - DNA, 313 bp, Zea mays
  Clone ID: MRT4577_73662C.1
gggaagaaaaaaacccccgtttaatgttttgttttaaccccagatgacatcctttaaaaaaagaattggaataatttcctaaaaaaaagcccaaaaaccagcccaaatttaaattcggggtttaaagctgggggaaagaaaaagttccaaataccgatgcactgtttttagggggacttgacgtactcctgaactatgttaaggccctcaaatttttggccatagtccttggcgacaacacaggggcaacccaaaacctttttgggtttggcctaaaaataaattttggaaagcccaaaccattcgccaaaag

SEQ ID NO: 155787 - DNA, 910 bp, Zea mays
  unsure (1)..(910): unsure at all n locations
  Clone ID: MRT4577_73663C.1
ttgggtacctcgaggccgaatgcggcacgaggcaaaatttcaaatcgaagtcttcctacacccagcgacgaaaaggctgcgacaattcgaatcaaaaatccatccgagtcgaatcgagccagcggaaaccccgcggccgatctcctgtgctctcaccgcccgcctcccccgattctgcagcccctcgctgcgaatctggacgcgatttcgaggctagggtttgggaggctccggatcgcgagcccgtgcggaggcaagggtttggattcgggggttgctgctgcatgtcgggggtgctggattgagctactccgcgccggcttgtgatggtggtgaccggcggtggaagacgagtagacggcggcggtgagtagggtttgttgactgagttggggtcgagggcgcgccggccatggtgcggcttctcgggctgcggagcctgagcttcggcccggaggactcgccgcgggagatcccctccactgccgacgtggccccgcccgttggcagcagcggttggctcgtgcgcttcttcgactccgccttcttctgcgagtggattgccgtcagctacctctacaagcacgaccatgctggagtgcgcgactacctctgcaaccgcatgtacacgctcccgctgccggggctcgaggcctacctcttccaggtctgctacatgctcgtccacaagcccagcccttccctcgaccgcttcgtcatcgacacctgcgccaagtcgctccgcatcgctctcaaggtgcactggttcctcgctgcagagcttgagctggaggatgatgacgatctcgatgggatcgatatggtgcangagcagtgccaggatgcagcgaccgtgcagggcgagtggccaccgctggtccggccttcacttccatcccctgttgccagt

SEQ ID NO: 155788 - DNA, 386 bp, Zea mays
  Clone ID: MRT4577_73664C.1
ctcgatctgaactaccagggcactgagtttccccacttcagtttgtatcagcgagtgctagagactggtgaaccaacaaacaacctaggattttcagatccgtgcattagaactggccgcacttcattccaaacaaccagatctactagtggaggcaagagagaaagaggaaacccgcctctggttcatggtcgagatgcatctagaggtattcgtggaggaagggggtggtccataggtttcggaggtgggagtggtcgtggtggtatctctgttcctgttgaatctttggaggatgaagcagaagctgaatctgaagctcgttcagttgtggatggaggaactgattttgtacaacaagcagccatgcttgtaagaatgagaaa

SEQ ID NO: 155789 - DNA, 1140 bp, Zea mays
  Clone ID: MRT4577_73665C.1
atggatggccatcacagcttacgtgattttctctcccaagccggctcatcctctgcaccgaggaacctccccatccccatccacgaagtgccggaggacaacgagttcgacctcttctccccaacccacttgattcattcctcatcgatgaacaactctgctcaccggattcggatggatcaactcgatctgaaccaccagggcactgagtttccccacttcagttcgtatcagcaagttctagagaccggtgaaccaacaaacaacctaggattttcagattcgtgcattagaattggccgcactccattccaaacaaccagatctactactggaggcatgagaggaagaggaaacatgcctctagttcgtggtcgagatgcatctagaggtattcgtggaggaagggggaggtccagaggtttccgaggtaggagtggtcgtggtggtatctctgttcctgttgaacatttggaggatgaagcagaaactgaatccgaagctcgttcagctgtggtaagtcaaagtggtctaggtagaagaactgatggtacaattgtagcctcagagtccttttggaagattcacactgagaaacgtactgaatgcaggaagttccagtatggggttcccacatatatggaccacttagctgagatgttccatggcattgttgttgatgggtctaattcttgtatccctggtgatgctcatggacgccaacaagaaatatgtgatgaagaacaaggagaagttgaatctggggaaagatttcttaactcttctactcctagtagtggtcgcaaaaggtgtagtagcacaacagacacagctagtagcccacctaaaaaactcaaaccgactatgtctaagatgtttgaaggattaattacagaaatgcaaacagcaagaaatgaggacactgaagtatttaaccaaattaaaaactaccagttagaaaaagattcatcagacatggatgacttttctatctgtttgagcttggcagaggaaagtggagctgataaagattcaaatgaatactacatgggaaccaagttgtttaaagacaagtttaacagagccaccttccatcgttttgacactccacaacaaaggatgaagtggctgcagagatga

SEQ ID NO: 155790 - DNA, 365 bp, Zea mays
  Clone ID: MRT4577_73666C.1
gagaaccgctagggacgttcagttgtacatggggacgattgtgtctttgaacgcctaactactgagtataagagagaggtttacgaggtgtaggcctatggcgcggacaccatggctgactaggataactgagttggttgcacacacacatatctatgcgataagtttgctagccacgaatcttacttttgatgaaaggaacacactgttgtggtgctcttgctgaccattatgagcctttgatcgccaatgttcatcaacatgaaactccaaacaaggcatctgttattcctagagaatgaatgcacttgctgatacataccttagcttttagacagcggaggagaagaaacaactttagggat

SEQ ID NO: 155791 - DNA, 561 bp, Zea mays
  Clone ID: MRT4577_73667C.1
gcgttcgccccgcgtccgcccacgcgtccgcgctgttcgacaacctgctgaggagaatcgctgagttcctggtggttctgcagatgttcctgatggcctcctgctggcccacgcccttggacgagtacgagcacgaggaggaggaggaagtcgtgcaggagacggaagtgaggagaagaaaccagatcggaactgtgaacggataatccttcgagatatacgctgatccttttcgttgtccagtccaatgaaaaatcgaaccttgcagtgttggactagggactcaaaaactgaagttctattccaaaagttaccgatgtcttgaatcataacttgcttttttactaggaatcagtatttgaccgaatacagtgttttatgatcaaggtgatcacacttgtttgtatatgttctaaaatatccaggattgactaaatactcataactaaactaatttgagccttagtgtattaacggagggtatatttatcttcttgtatatatgtactactattgtgattattcttacttgtgatgttgttattaaacgttgttttttta

SEQ ID NO: 155792 - DNA, 273 bp, Zea mays
  Clone ID: MRT4577_73668C.1
tggagatgcacgcagttgactacgataatgtttgcaatgcagccaaggacgagaaggggggcaacgcagagcgtggtgagtgacaagggagctgcatgcagcatccaccatcatgattcgcagagtagggaagaaggaaattggagaccgacagagcactggccgcacagaaggctaggagccctatggagacagcccagaccttgccgcagcgccagacatacgtaaattggcgtcagatagagacttgctgaagagatcgacgcgctcaat

SEQ ID NO: 155793 - DNA, 471 bp, Zea mays
  Clone ID: MRT4577_73669C.1
catatttgcttctcgccgccgccgccggtgagggaggaaggaaggaaggaaggaagcatggggatcccactgggtgttgacgggttggagtcagtgatgagctgcgctcacgttccgccgctccgccgccgacgccagccgcctccaggacggcctcctcgtcttcatgttcttcatctcgattcccatacgtagtctgaataccaatcgtactagtagtaattccagtattattactagtagcatcagcaatcttctcttgtaaacaaacgtacgccgctcgtgctcgcggttgcgttcgcgcggacggaggggtcctcttcttctgctgctgctccgtctgaatcttcttcttcttctcgccggttgacggtcgcgacggcggccatggatcccaacagcttcaaaaccggaggtcttctgcttccaaccatcgagaggcgctgcgctttgcctccatctgtgatcgtg

SEQ ID NO: 155794 - DNA, 605 bp, Zea mays
  Clone ID: MRT4577_7366C.1
ccggccgggaccacagtctcaaattcacctaaccggaaagacatctgaacgtctattctgcgttcttgatcacgggattgaccacagagaactatccgctcaacacttgccacctatcatagccaaaccctcctcattacacttctcttcttgagccaacatcatgcctgctcttccgttctccaccaactcctctccttcttcttcacccaagacatctcctagcccgccgtcaatagttctcagtcccgcatcgggcacgtcaaaacaactgtacagatcgagcgaggatgcagcgtcagcatatcgaagacgctacgctcaatatcttgcagctacgttcaatatgagcctccaggctgctatggcggaggcagatgctcaacttggaggagtcccgcgcagaggatcagatgtctccgaagccgaagtcctgagggaaagctgatgatggggtcgcccaaaggcttgatgacttatgacttgcattgggatgggttacgggcttgggcatacgcataaagcgagggtctcggcgtatgtctggtagtaatcaaaggtctcatcggtctgtgaaaaaaaaaaaaaaaaaagcggccctcgag

SEQ ID NO: 155795 - DNA, 332 bp, Zea mays
  Clone ID: MRT4577_73670C.1
agaacctctaaaatttcccccactcgccaggcgcagcagtacctgtagtcatggacgccagcggagcccgaagcaaggggaaaaagggtgcagtcgcgcgcaaggcactcggacgcagcaagaaatcaatgacgctgtccggtatggccgggctgcagttccacggaagacgcatcaggcgctacctgaagaaggggcggtactcgcagagagtgggcactgccagaccagtatacatctgctgcttcctgaactacctttccagcgacggtctcgagttatcacgcaacacttcaagagacaacatgaatacgcgagttatgccgcgccac

SEQ ID NO: 155796 - DNA, 272 bp, Zea mays
  Clone ID: MRT4577_73671C.1
cccgggccgacccacgcgttcggtaacacctaaataagaatttccattctcctttatcttatgcatgaaggttcctgttgcactgtgatgattaaatgcctcatcgattacttcaaatgttcgttctctaataaatccaatttgtacaagcatgttatggctgtacattatcagtgtcgtccttttttgttccaattctctgtgtgtttcaagatgttttcttactatcacgttaattacaatcattatatatctatctctcattttcacac

SEQ ID NO: 155797 - DNA, 897 bp, Zea mays
  unsure (1)..(897): unsure at all n locations
  Clone ID: MRT4577_73672C.1
gtcttcccggcctccggctctggagcagagcaggtggcagcactagcacggccacgtgcggcatgaaggggcaccagcaccagcagcagtcgtcgtctccgctgctgccgatgccgccgcccagcaagcgccgctgtagcgcgctggcggcggccgtgccggcgctcgtcgtctgctccacgctgctcccgctcgtctacctcctcgccctgcaccgccccgccgggtatggatcggacgaccgcgccgcggtggtcatcagcaccgtaagcttccccactctccccgtgcacattttttttgtttaaaattaaattacacctcctcctcctcctcctcctctcggaaaatcagtagagtctcagcttctgaaatccagacgtcgtacttgttctcgggtgttgctttgcttaccaggagctcgccggcctcggggcgcgtggcagccggcatctggagaacgggggcgccatgaagcacaagctgctcaaggatgtttccaaaaaggtgtctggatctgatggggtttccgctgagagatctactagatcgaggtttagccaggatcatgctgccaaatcaaaagcaaagctcaagggcgctttctctttacttggactgaacaatgataccttcaaaggacctcgtacctccaaaaggtttcagttgaaggacctgtcctggagatcaaaggatactactgtcaatgggaaagagaccatgatcaagagacagtgcatgaggagaataccaagtcctgtgacatgaatatgngagttactgcctctggtctacgaacacagggaagtaaatgaggatgcccattgtcagaagcctaaagatncaacttttatggncagagctcattatcctagcatttgcaaattgagcacatga

SEQ ID NO: 155798 - DNA, 254 bp, Zea mays
  Clone ID: MRT4577_73673C.1
attacgggattgcgcacatgaacattgatgcactgactatagcgaaacggtgaacaccagtgcagtgaacatatggaagccaaaaatatagaaccaggcaaagacgaaaagagacagacacatccgtggaactgggcaaagaaactgacaaaataacgcgctcatagcaaggaagaaccactctgaaaggcaacgatcaagacacgtaagatcccaaaggcagagaactactgaaattgtgggggaaccagttg

SEQ ID NO: 155799 - DNA, 660 bp, Zea mays
  unsure (1)..(660): unsure at all n locations
  Clone ID: MRT4577_73674C.1
cggtcgcgtgggtgactatctaacgccacccctagcaaaagggaagcccttgccctcatcatcttttatcacattgggtaagcactcttctcatatcctggcccaccttgcatgcccccctagttccccatcaccctgctactatcgcatgaatacaaacaacgtattgggttgaagcatcaggaagtattagaaacatgttggtgattaaatccttctattttttaaaaccacaatttcatggtagttcccgatatgcatatcacaacatttcgcagtatccttccatgtcgaatatgggtacaacagcctacctcacgtatcagtgaaacctagattttcatcactcttagctcttgctcaaggcagatagagaaggaagaataaatagagttaaagtatgtccaagtgctccaagtgtttaccatcttttatttactcatggttctttgatcctcgttggtgcaaatggacaaaacgctttgcagctaaaaagaattcttagtttgtacgagcaatgctcgagccaaatgatcaataaaagtcaggtctctttttcagtcaacacacaaaaatagaaatgtaacaaagtagtgcgggctctagccgagcttggctcgaangccattgtgttgccagtcctattattgatgtaatccc

SEQ ID NO: 155800 - DNA, 692 bp, Zea mays
  unsure (1)..(692): unsure at all n locations
  Clone ID: MRT4577_73675C.1
aattcggcacgaggcgcatatagtcccaactgagaaaccaggtagtcggggaaattttgcttcgcatgttggcaacgcttctggaaaaaaaccaggccctgcaagagaagagaaatcaagaagtgttaggatgtcacctgtgaagcatgagccagttttttcttcaccgagtcaggataaagtgcatgctagacaccagttaatggggagaaatctgatccagggtcggttgagactcctgtcattggtaacaaaatgagcctgcttgatggcaaatcctctgctcaagtaaaaatgccggcatgctctgaggtgaagaaacttcatagtacttctaaaccattgcaagtaacatctgggaaatcccattcccgaaactatcctgcttcagaaaagatcgccttggtgcccaagtcagaagaaacaaaggctaaatctaaaccagctacatctgttgagcataaggtggccaccactttgtcaactgaacggactgngaagcgggaccacctgaaagaggaangatcaagttctgttgataaagcagcttattctgaacctaaccctgactcggccaagtcaataaaacatcttattgcagctgcccaagcaaggaggaaccttatggcttctgctcttgcaaaatttgatggggtcttcgactgatnatagtgctattacctctacatcat

SEQ ID NO: 155801 - DNA, 737 bp, Zea mays
  Clone ID: MRT4577_73676C.1
gataaccccttcttcctcgtcgttgccctaggcttcttatcctctccagccatggcgaacgccggcgatcccgcctccctccccccctccgcctctcccttctcatccacccgcgcgctcgagtcggtccccttctcctctgggaacccccgcatcgaggagacccgcggcgtcgtcctcctccaccccgacccacccaccgctgccgcggccgcctcctcctcgtcatctcatcttccggcagagaggaagccgcaggtgttcgtacctgcggtgcccaaccacatgacctacgcggacttctgccgcttctgcggctccttcgtcccccacatgctcgagatgcgcatcgtcaggattgatggagcggaggaccagtatagcgttctcataaagtttggcactctgagctccaccgatagcttctacaagcacttcaatggaaagcagttctcatcactggagggtgatgtttctcgtatacgttttgtggaagacgtgcactacactcaattgatcgagcatgcccatagctcgattacgagctcagctgagcagcctacttgcccagtgtgtctagagcgacttgaccaagatcctggaggcattcttactacaatatgcaaccattctttccactgttcatgcatatcaaaatggacagactcttcctggccagtttgtaggtattggtcagcagcaacctgagaaatcaatgggttccgtttggggaactt

SEQ ID NO: 155802 - DNA, 351 bp, Zea mays
  Clone ID: MRT4577_73677C.1
gagctcattagtcggcggccgccctttctttttttttttactgacaccttttgttgccggggacaccgtctctcttgaaagagtcccactattggctgcatgtgcaacgcgctacacgaacactgtaatttcatgcctcaaaactgacatcataacgcatggtaaagcggactccccagcccggtgtaaaattatgaagtttcaagagtgcacgaagacacagtgcatgccactctggcctgatggggaaccatcctaatcatacatgcgtctgatcactatactgaccaatggttgatcttgatttgctataagcactccttcaaggtaagacagatgatgcgcatggca

SEQ ID NO: 155803 - DNA, 325 bp, Zea mays
  unsure (1)..(325): unsure at all n locations
  Clone ID: MRT4577_73678C.1
gggacgccaagccccagggtccgaccggaggaccgacccaaaatgatagnccggcctattgcatgctcaccgccgtgtcgctctcctctcccgcttccagacccgcgccttcgcgccgccgccgccgcctcctccttcgttccgccgcgccgcgcggcagtcggacttggtcgtgcgcgcggcgttcgcatcttccaagtcccctgccacggcggaggcggggggggggaagaagagggagaccgggattacccagccgaagtccgtgtcgtcggcgctgcaagcaatcgtgggcgaccacggtattttccggaccgaggtcctt

SEQ ID NO: 155804 - DNA, 240 bp, Zea mays
  Clone ID: MRT4577_73679C.1
gggaagcaacccctgaccactgtagttggtccaaagacgactgaaacaagtggaactgtcaaaaggttgtggcagcgcagtgctgcaactgcatcaaaaagtggtacggctgttgtgacaccattgcaaagcagtgtggttgtctccacgccgttccaaagcaacgtagctgtgaaaaagacatggcaaagaagtgtaactccagaacaccagctagagagtaatatgtctagccataag

SEQ ID NO: 155805 - DNA, 244 bp, Zea mays
  Clone ID: MRT4577_7367C.1
gctcggcggccggcctcctcttctcttcatccacacgctggtcatagagatgcggctgcagatgcgaaggcggcggcggtctcggagtctacgtgctcggaagcgcaagcgtgtaggagcaatgggcagcggacaagaaggagaaggcgctcgcggacatgaagaagccgctcgagagccgcaagatcatcttcgcccgcgccaagcagtacgccgaggagtaccacgcccaggagaatgagtc

SEQ ID NO: 155806 - DNA, 578 bp, Zea mays
  unsure (1)..(578): unsure at all n locations
  Clone ID: MRT4577_73680C.1
gcgttctacgcttctcgcccagncgcgtgactggtccatgcacccgcagctcctcctccctgggcacgtactccgcaccacctgcgcgtttcttccatgatctccttgaggtcgagcttcgagctcgccgagctctgccctcttccatggcgcccaacccgctgcgccgtgaccccccagtcctctcccatggcggcgcgcccatcctctgctccctcctcccggatctcgcgcgcccctggtttgcccgtgctgctcgtgtcgaacccctctattgtatgcgtgaagttctctgctcgccacggcgcgtcgagctcccacgccaaatcattttctagctcgccgtgacgctcggcgtcctgcctgctttgctcacccacgtcggctactcggtggtgctctaactcatcagctgccgttgtcctatccacgtcagcacgcgaccgtggtcgtgttcgttgagtttgccaacgctatgttgccgattcgactgtcgtcactggtgtgtgcttcgctgcgtgctcgccgagtgttgtcggttgtacctcagcactcgtgcttgccgctggctcgcgttg

SEQ ID NO: 155807 - DNA, 597 bp, Zea mays
  Clone ID: MRT4577_73681C.1
ccggccgggaccacacctctacctcttcgatgtggagctgacttttacatcgcctttcgtgaagtctgggttgattatcctcaactccgctgcgctagcactccataggcaccgtggttgacttataccagatagaaaacgacgcgcacgacgagacagaggaatcatcgtatcgagctgctacgtctggcgggcgtcttatccggcggcaccggcagcgcggtcggatcatgcaagggtaggggtgttctacaagtacctgaatcagagaaaagataacaaggagactgaacgatcatgacacgatggccaccaacgataccaactttcgttctggacaacatatctcaggagggcaagtgtgagttccactatgactacaatgcttgtgagaagctctacgaatataacaaagcagcctacgtccacaacgatgtctagatcgagtgcaaggggaaagaaaatctactgcgcgagtccatggatttcaggaattgctgacacaccgggggataggtatgatgaaggaaacacgttgcacatggacatgaggatccagacgaatgaggccacactgcgggagatgtgatatgaaag

SEQ ID NO: 155808 - DNA, 479 bp, Zea mays
  Clone ID: MRT4577_73682C.1
gcgttcgtccagcgtacgtgtcttcggctcgtctgtcctggggaggagacgttgccggtatagcgattcttgtaggattgggaagcatcgccggcggtaccccgtttggacacagcatgggggagtgcatgtggatccacatcggggagggcgttatccaggtcggaaacgcgtgctgggagctggactgctctggaacatgggattcaagataatggtcaaatgcccggtgggaagaccattgggggaggtgatgatgctttgaacaccttcttgagtgagactggtgctgggaagtacgtcacccgggctgtttgtgttgaccatggacccactgtcatcgatgaggtgaggactggcacttatcgtcagctggttccatcctgcgcagcttgatcattggccatgaggatgctggccacaactagggtcgtggccactacaccgttgggaaggcgattgtttaactgtgccttgat

SEQ ID NO: 155809 - DNA, 1535 bp, Zea mays
  Clone ID: MRT4577_73683C.1
cttcggtcattcattgcaagtaccggtccggaattcccgggtcgacccacgcgtctaggatgacatgaagctagtcatggagatgaaggcagaggctttgaagactataatccaagctggtggtcctaatgatgagggtgttttgttgactatgagcactttaactgatgatggtgtaatggctgtcaaaaatgctgcatgcgagaggcttcttgaacagagggtggatgtaaagatgaagtcaaaaaagatgatggattgcttgaatagatttcatgttgctctgccaaagcctcgtgacaacaaggagaggcctgtttgcatccctctggctgttctggaagctagggctaatgctgctgcaaaggaaaagaagcttgagaaggacattgagaatgagaatggaggtgctggggtctattctgcaagtctcaagaaacattatattttggccaatgatgaatggaaggaggatattcttccagagatactggatggtcacaatgttgccgattttctggatccagatatccttgtaaggtgtgaagagttggaaagggaggaagggcttcgtctggaagaacaagctgcagaagatgctttccagattgatggtcatgaactaactcaggaacagaaggagattttggctcagattaggaagaagaaggcattacttatccaagaacatagaatgaagaagagaactgcagaaagccgtcctattgtccctagaaagtttgacaaagataggaaattcacaactgataggatgggacgccagctttcatccatgggtatggatcctagtgctgccatgaatagaattcgcagtcagtctaggggtcgcaagcgtgagaggtcagtgagcagagctgcagcggatggtgacggtatggagatagatggccagcaaagcaacaagaaattgcgtcggacatcaaggtctaggtctaggtctaggtcacgtgctcctgaggaagtccttcctggagaaggattcaaggactctgagcagaagaaaaaggctatcaagaaagcaaaggccgctactaggaacaggaacaaggaagctcgtcgtggagaggctgaccgtgttattcccactttaaaaccaaagcatttgttttctgggaaacgcactcttggaaagacaagcaggcgataagctcagtacctcactggatctggtagtaaaggactggtgcaattttggtgtgagcaatttgatgaaacgggagcttttatgtctagcacttatgtatgctacttatttatgaaatgtcttgctgttgctgtatcatggtcctctttaagacagttttactagtttatacatgtattacttcgaattggttgggttactatatattagctttctggtgtttgattctcttaatggtacgaagttattcaactctcctacttaaaaatgtttgtaatgcatctgttggatctcaccatcggttcttccctccgcagctttgaggcaggaacttctcataatgattagttgcttaatgatttggttcttt

SEQ ID NO: 155810 - DNA, 232 bp, Zea mays
  unsure (1)..(232): unsure at all n locations
  Clone ID: MRT4577_73684C.1
tttttttttttttttttataaactgtgtttggtttttttttagtttagttttttttaatttngaaacatctctaaatttaacatttttacactagaatcacggagcgacaggagtaaaacggtaagagtaggcttatgcataacaaagggcggcagttaacaccagatttacaaactcaagctgtttgctttctaaggacccagtggagtggatacaatttttttttttttg

SEQ ID NO: 155811 - DNA, 329 bp, Zea mays
  Clone ID: MRT4577_73685C.1
tgctactattgtgtgttttgctagttaagtcccaatgtgtcaacgacaatgaggagggtttcttcagtgcccgtggtcatcgacccctttacaatatgatcagaagagtctctcagcctgatgcctgccccaccgcccatcagtggaggtggctatcgggctcgtccagccaaagcagctgccactcaaaagaaagtaggaaagaagagcccctgatgctggaggctgtcttcacgctgtcccagacctttgtgtgttgtgtcctacaggatgtcagttgcaagaggctttgctacaacaggaaaggccaatcagatatagtgttgatg

SEQ ID NO: 155812 - DNA, 672 bp, Zea mays
  Clone ID: MRT4577_73686C.1
cggacgcgtgggcggacgcgtgggcgccgccagccgcccccgccgcgacgtctagccacagcagcaccgtcgagtcctggagcggcggcagcggcggcggcgcgcccgtcgggatcctccgcgccccggccgccgaggaggactgccgcagctactgcggctcctcctcgtcggcgctctgcgaggacggcgcgtcgggcccgggctgtggcgacgagaccgccgcgccgccgcggtgctccccgcttccgttcgacctgaacgtgccggaccccgcggccgacgagatggactggcgctgcgacacgctgctgcacctgtagccgcgaacgcgaagcgagcactcagcaaaactgctgctatcgtgctatgtctccatagaaattgatagcttaaattttttctctccaccgcttctttagtcccactctctctcttttaccactgccaagattcggtaatacttatttgtgatagtgtgaataactgatcatgtaatccgtggagggaacctgttcgttctgttctcgcaaaccttcctgcttcctgctgtgtagtgtatctgtaacagcaccatgtatgtgaccacggcctcttgtcttgctgtaattctcaagatgatggaatcaagagacgcctttggttctttttaaaaaaaaaaaaaccaacccc

SEQ ID NO: 155813 - DNA, 523 bp, Zea mays
  Clone ID: MRT4577_73687C.1
gaatcataaacgaaccatattatatttttcttagtatattgaattattgaatacaattatacctctgccttggcaaagattggttcccgaatgatgcgattgcaaaaaccagaatctgtgaacagtaagggaatactgttcactatttataggcacaggacacagcctatgagaaattacaattatgccctttacatttactattggcttatagaaaaatctatgaggactgaacagccttttcccttttaagtcggttcccttttctgcgatttagccgaagctccctttcgcacagcttcggagcgacgacaacccttgtcacgatcaagctcctcattgtatctgcttttaccatgaatccgaagataccaaaatttaggcagcaccggacgccgaccgcggatgtgagcggcttcacgacgaagcgcgatcttcgacgaagaattgcccacgccacaccgccttccacgcccaatcgccggtagggaatggatgcacggttgcccccacaaacgtccct

SEQ ID NO: 155814 - DNA, 588 bp, Zea mays
  Clone ID: MRT4577_73688C.1
gggtaccccgggccctccctcgagttttttttttttttttttttttttttttttttttttttttttttttttttttttttttttttttttttttttttaaacatagggtacctggtttttcccaaaaaaaacaaaggggggccaaaggacaaacaacccaaccccaaccttagggggggattttttttttaacggttttttccaaataaaaaaaacccccgagggcctaaaaaaagcccccaagggttggggccaaaacccagggccctccataaaacccgaaggccccccccccttttttttttatgaaataatccccccaagccccgcggggcccccacccccaaacatattggggggaaaatatattggtaaggcccaggggcaatctcccggatagacttgaagggcaacccgacccccaaattccttaaggattttgttttccctaacccctgtttggggaaaaagccccccccattttttttaatctctcggccgccctttgggcagggccataaggccgaggcccataagggggggggtttccaccaaaggccacaagggggcaaatcataatacccccgt

SEQ ID NO: 155815 - DNA, 291 bp, Zea mays
  unsure (1)..(291): unsure at all n locations
  Clone ID: MRT4577_73689C.1
ggggcacaaacccaaaaaacctgctgctatggggaagccctgtatgccagaaatggtggccttcctcaactgtctggccttaaacacacacaacaactacttgtgtctcaagcctaaagatctttccgattgtatgctctcaacctcagactggggggggggggagcccantctacaccatcatttaccatgttcatcgacttgcccgactcaagtccctctttgcgctgtttgagatcattacctcatcctgctttatgccttgttcctgtccggtctgccgctccatac

SEQ ID NO: 155816 - DNA, 520 bp, Zea mays
  Clone ID: MRT4577_7368C.1
atttattaacgtaaaataatatatttttctcttattgttggcgttggcttgtatgtactttgtacctgcttttcttttttgaaagtagtaagcaagtatacataaagcaactctgaattacacaggaaaaccggacccgtgggctgacccatgggcggacgcgtgggccacagctcacacaggcgcacagatcctattggcggctcctatgacttcatcgcccttcttcttttacgtagcccttctccttttctcgacgccttggatcggcgggtaactccttactgcactttcgagccttcaccgatccgcctacggcactatgaagggaccctgcctctactcctacatatacaagaaggccaaggaaaaactcaatacggactacacttaccaccagaagctgaccatatccaccgacagcaactctgggactggcgccagacttgcacagaatggaaataaaggagggctttattctcttgcagctaactaagttaacaagttcaagaataccatt

SEQ ID NO: 155817 - DNA, 656 bp, Zea mays
  Clone ID: MRT4577_73690C.1
ggtaccggcgcccttcctcgagtttttttttttttttttttttttttttttttttttttttttttttttttttttttttttttttttttttttttttttttttttttttttttgggaaaaaacttttttaaaggggttttttccttgcccccggtttttccaaaaggactttttccccccccccctttagggggctttcctccccccccccgaaggttaaaccctttttgaagggcaaaatccttttccccccttttttcccgttttttgcaaccccccgggggggaaaaaaaaccccctcctggaaaatttcccattttgaaatcggccgggcctccccctccctggggggggcccaagggggggggggtttgaatggaaaaccttggggggcaaaccccccccccaaataaggggtttgaagttgtcccctcagttgcccccttccctccttgaaaaaatttagttttgttgtttcctttcccaaaggggggggggggccccttggttgccccccaaattaaaggccctttgcccactttgggacctttagggacccaggggttttttttgtggccaaacttggggggggttttggcccccttgtttcccttgggggggcctcaaaggaaacctttcggggggggggccccaaa

SEQ ID NO: 155818 - DNA, 286 bp, Zea mays
  Clone ID: MRT4577_73691C.1
tttaaatcctgtaacgtcaactgtagagacatgaattaatattggccggggtgtagatccaacagaaggctattaaacaaaagataacactggattataagaaaaggggtgagatcctacaccatggtaacttgccgttgaaactgcaccaagcagtacaactgcatctacttgtgatagctaatgggttggtggactggacaagctgattcaggcgagtatttacaaagattgggcctacattgaggagctacgacatcagatgaatctatgagcggctcctaaa

SEQ ID NO: 155819 - DNA, 139 bp, Zea mays
  Clone ID: MRT4577_73692C.1
ctaaaagggacggggggtgaacatcaaatttccagcagatccataacgtacaaacacacgcacacaaaatgacccgtttttatttcaagaaattcaaagaagtttctgaattgaaagctaaagcgcttgtatacatccc

SEQ ID NO: 155820 - DNA, 312 bp, Zea mays
  unsure (1)..(312): unsure at all n locations
  Clone ID: MRT4577_73693C.1
tattccttggtctacgagctttcttgtttgcggccgcccctnntttttttttttttttttttaactaatatagttttcttagaccttggccctactgggacgcgtgagtaatgcatgaaagcatgaacttgctcataaccaccactgcgcggttagagtgaataaactcgtacgtttatggacagcgatgaaattatcagggtggacaccgccttttcggctcggttttgtcagcagggttgccaggtacgttgtaaaaaattatggcacaagataatgtgcggcttgtgcatttgacttaccggggttctt

SEQ ID NO: 155821 - DNA, 321 bp, Zea mays
  unsure (1)..(321): unsure at all n locations
  Clone ID: MRT4577_73694C.1
ccgcgagatctgnngnacgtcttncatgagggggntctatntggcangaaggncgacaacctggccaagcnccccaagcttgacgcgcccaacctggaggtgattaaccccatgctgagcttcaagcccgaggagtatgacaggcacaccttctcctcggcgcctactactggtaccccncctgcgatggccttgtgcacctccacntgctcctcaccccgccgccagaggcccgcgccccnncccccaacaccncccccaacccgccgccccgcccccttggccctgcccccccgccagacccccccacccgaccccacc

SEQ ID NO: 155822 - DNA, 324 bp, Zea mays
  Clone ID: MRT4577_73695C.1
ggtgactatatgctatgagactggctgactgtcgcgcgaaaagagagtgtttttggtgtgctatcatgacactgaacggagggctcatcaaggacaagccccgatcgcgcggagatggccacagcgagagccgatgccgcaccggcggcggcgctggcggtcgtcatgctgatggcgctcctgacgccagccctgcgtggcgtcgaccgtagcgagttcccgacagcgttactcttctgcgcctcttcggccgcttaccagattgaacgcgcgtatgtggaggacaaacctgtgctctccaactgagatctggtgacccacaca

SEQ ID NO: 155823 - DNA, 516 bp, Zea mays
  Clone ID: MRT4577_73696C.1
actcgataatggtgccctcataccggcatgtgtttcctagaaataatcaatatattggttgagatttatctcgataaaaaaaaaaaaaaaaaaaaaaaaaaaaaaaaaaaaaaaaaaaaaaaaaaaaaaaaaaaaaaaaaaaaaaaaaaaaaaaaaaaaaaaaaaaaaacccaaaaaaaaaaaaaaaaaaaaaaaaaaaaggttccccttggcccgaaaccccctaagggggaatttttgaaaattcccaacacctggggggccgttaaaaaataatttaaagggcccaaatcccccctaaagggggccgaaaaaaaataaagggcccccgttttaaaaacctgggaagggaaaaaacctggggttccccaaattaaaccccttggaaaaaaacccccttttcccaaggggggaaaaaacaaaaaagcccccacccaaccccctttccaaaaattgcccaaccctaaagggaaaaggaccccccctttaaggggccaataaaccccgggggggggg

SEQ ID NO: 155824 - DNA, 331 bp, Zea mays
  Clone ID: MRT4577_73697C.1
cggagggaagcggctaacggcgccctccggaacagtgccacttttggaggcattgccaccagggcccaaaactttggtaggaaccggggaagtgttccctccaagaaacaaaactcgaccaaacctgatgggatcttaagggccggaaggggcctcgcgcaccctttcaaagaagataaacaaagggtttttgaaaccgggcaccgtggaaccggagccatggaacctggggggccccacaaaataacgggattcccctaccagagccaccaggaacgggaaatccggttcttccccacgcccaaggggaggaaaaaagggctcccactta

SEQ ID NO: 155825 - DNA, 419 bp, Zea mays
  unsure (1)..(419): unsure at all n locations
  Clone ID: MRT4577_73698C.1
agcanggcanncaggcngacggncagaagcccggngacaagaccanngggggaggngangangcnnncaacaccnncnncagngagacgggngcngggaagcacgngccccgngcggggnnngnngaccnngaacccacgggcancgangaggngagaacnggcaccnaccgccagcncnnccacccngagcagcncancagggggaaggaggangcagccaacaacnnngcccgnggncacnacaccannggcaaggagaaagnngaccngngccnngancgcancaggaagcnggccgacaacggcacnggncnccagggcnnccccgncnncaacgcngnnggnggaggaacgggcncnggccngggnnccccccnccnagagcgccgggcgggggacnacggcaagaaanccaag

SEQ ID NO: 155826 - DNA, 474 bp, Zea mays
  Clone ID: MRT4577_73699C.1
ttttttttttttttttttttttttttttttttttttttttttttttttttttttttttttttttttttcccaaaaggggaacatagttttttaaacaaacaaaaaaaccgggccccgggggttgaaaaccggggccttggcctttttaaaacaaaagccggcccatgggttattaaaagggtaacaaaaaaggggcccccaaaaaaaaccgggggcccccccccccccggggaaaaaaaaagggggggcaaaaaaaagaaaagggggggggaaaatttccaaaccggggccaaaataaaaacttccggcccttaaaaacccttggggcaccctttttggcttacccaaaatttaaaggagttccccgggccctaatttttaggggggggaaccccaggggaagggccgccaaacattttttaaacttggcaaccaaaggttttttgccttttggaaggaccctaaacctttggg

SEQ ID NO: 155827 - DNA, 907 bp, Zea mays
  Clone ID: MRT4577_7369C.1
ggcaccacggacctacagcgcggcgacccgggtgctgctcgtccggcggctccacgcggcgggcttggtcgtgcgcatgcttgacatggtgatgattgctttttctctgaattcaacaaggcgcttcgtgcatctatcagtgcacgtgtgcattatccttgcttcctagagatgacttgccattgccactgtccaaagaagctagccactgtccaaagaagctacacgcctgactgaaagcctgctgtagtgctcgcgcgcataggcctgcaccgttaggtcgcctgatgagtgatgacagatgccaagccatcaccagtcgattcatacggatacacacgcacggcactaccgtaccgtcgtcatctccttgtcgttgctctggtccgcaggtggtcatggcgctgctggcgaccggcgccgcggcggcggcgtcgatggccgagctaggcaggaacggcaacgcgcgcgcgcggtggaacccggtgtgcgacaggttcggctccttctgccgccgcggcggccccgcgctggcgtcgtcgttcgtcggcgtcgcgctcatgctggcgctcaacctgctctcagccgcgtccggtgccgggtgctagctccgcgggccagtgagtggcccgtgccgtcccagacagctctgtactcatgtggggcccgtgggggagctgaatcgcggcgtgaaactggagttctgccggtgcacgtttggtgtagaattatttgcatttcttcaacatgtgagtttgcagtgggtttcttggttctcacaaacaatacacatgaaaatgacccatgtcacacctctgcgtctgaatgtaacacaaacaacaaagtttttttacccgtcaataagcaaaaggtgtcgtggtgtagttggttatcacgtcagtctccc

SEQ ID NO: 155828 - DNA, 1163 bp, Zea mays
  Clone ID: MRT4577_736C.1
gaggtcggccggggtccttgttcttttccacccggctacccccgtcgtcgccgccgctttccccgtggtttcagagctcaagtcggctagctaggccgcctggctaatctccctgccttctataagcattgggtacctcggggcccggccgggagctccatcactgacacaagagagcacgctactactcatcactcgccaacgtgcagagatcagggaggcggcacactccatccactgaccgctcatggcgaaggtccacctctacgtcgccgcggcctgcgccgtcgtcctcgcgctcgccgccccggccctcgccggcgaccccgacatgctgcaggacgtctgcccggctgactacgcctccccggtgaagctgaacgggttcgcgtgcaaggcgaacttttcggcggacgacttcttcttcgacgggctgaggaacccgggcaacaccaacaacccggcgggctccgtggtgacggcggccaacgtggagaagttcccgggcgtgaacacgctgggcgtctccatggcgcgcatcgactacgcgccgggcggccagaacccgccgcacacgcacccgcgcgccaccgagatcatcttcgtcctcgagggcacgctcgaggtcggcttcatcaccaccgccaacgcgctcttcaccaagaccgtcaccaagggcgacgtcttcgtcttcccgcgcggcctcgtccacttccagcagaacagggggcacggccccgccgccgtcgtcgccgccttcaacagccagctccagggcacgcaggccatcgccatgacgctcttcggcgccgtgccgcccgtgccctccgacatcctcgccaaggccttccgcatcagcagcggcgaggtggaccacatcaaggccaacttcgcgcccaagtagagatccaacgacgtctgcattcccttgattttatcaataataaatccccgcggtgtgcagttcgattcgttcgtcttcggttggtatggttcgagacattgctgaccacgcttgttactgctaatttgtgcggaccggaggagttgcttgtgctccgataaataagataaataatcaattctaacaaaaaaaaaaaaaaaaaaagggccctaaaaaaaaaaaaaaaaaaaaaaagaaaaaaaaaaaaaaaaaagcggcc

SEQ ID NO: 155829 - DNA, 463 bp, Zea mays
  Clone ID: MRT4577_73700C.1
tttttttttttttttttgtgagtatctgtagcaccatgaaattaattttgggtctacagctagggagacacatatttagtacattaattttgggtctacagctagccagctagggagacacatatttagtacatttacatggctcaattaatttgcttgtaatagattaaacgtataagcctttaaacgtaagctagggaggtggagctgtgtaacaaacggtccagtaatgtggactgaaaaccgattggagctggctgtgctcttgctaataaattaaagaagctggtagctggaacctgaattgtacagtacataataactggatatatatactgtcttcaggaaagttcttctctcaatccaggacagttcttctcgctcgccgaccttctctcgtgtcctcgttcggcttggattcaccgtcatggggaagaaaaaatagccacgccctcatcaaata

SEQ ID NO: 155830 - DNA, 595 bp, Zea mays
  Clone ID: MRT4577_73701C.1
cccctcggattttttcttttttttttttttttttttttttttttttttttttttttttttttttttttttttttggggcccaagtcaaatgcttgtttttcctaaacgaactagtttcacagttcaacaaaattattacagggaacatttaaacgaactactagcatgggtcaatcacccaaagctttgggggaacttgctttggggggctttcagcatcaaacagctgtttcacattgccaatcagccagcccctgccccagcagttaaaactaacagggcccagttcagggcaactcaactgacctaactttttggaggcttcgcttgccttttgaaaagccctcctttttaccggaaacctttgcaaaacatggaaatccccctcgagctagggcgagtccccttgggtctcaacaacgatacttttttgaacttccccttggaaaatttgccaaaccctggtttggcctctttttcaaaaaacttcactaccaggttgcccccccggcgaaaaacgccctccttggcaaactcaggctcaggggagctcaaatacttctctaggggatcactggaattagaatcttttaac

SEQ ID NO: 155831 - DNA, 341 bp, Zea mays
  Clone ID: MRT4577_73702C.1
cagggggtccagttcatttttttttgtaaacacacgaccccaatctaccacatagaaaaccctgaccggcagcaaggggtgccatcacggagagcgacccgatgaaccggggccccaaaaaaggagagatggacgggagccacctgcacaaggagaagggcatggtggtgcaagccaaacagaaccgcggagaaggatcgagggctccacacctgcacatacaccaggtgggggtcgatgtctttgcaaaggacgcgtccggcgtctcctgttagctttgggaggaggccaccccacgttgaaaggccaggagttagcggatccttcactgaagcgcccac

SEQ ID NO: 155832 - DNA, 513 bp, Zea mays
  Clone ID: MRT4577_73703C.1
aggaggagaagaagaagaagtattcacaaccacttcgaaattctttacacaccaaccggatgatgtaccaagttgcacttgctggctagcgattacattacaatactgtaagttttttaaaccaaagcaagaaggtgggggggagttctccacaagaaaatcttcagattcccaagtagcttcgtctttagaatgtttgttccattgcaccttataaaacttgattgttctccttcgagtgatgcgatccttctaatctaatactcgaattggatattctgaataagtcagatccggttcgagattggcctctgagacatccatagcttgctctggcactcgaagacatttcttcaattgtgatacatggcacacgttatgaactgcggacatatgctctggcaactgaaggcgataagctactggtccacactgttgaataattccgaagggaccaatatagcgaggtgcgagttttcctttgacgccaaagcgattaacacctttcattag

SEQ ID NO: 155833 - DNA, 463 bp, Zea mays
  Clone ID: MRT4577_73704C.1
ggctgctgcagcttcgacatgctgaccgacccaaaccgagcgcgaggctggacggagctcgacatggctctctcatcgttgctcggtggcggatcgtgcatctacttacgcgacagctctgaccgatggcgtcgctcggagccatgcagatgggcgtattaccagcctgatccggccgtaacggacgtccagaccccataagactcaccaaactgctaccgaggataaccaccgaggagctgcgagctccatggaccgaacactttccagccacagcgactcttggcaatggcgctaacctcaccggggtttatctctacaaaggccgatgacgtctctcttgcattgagcagcacccgctaggctacatggacgaaaactagagcatccgtgaccacaaggtcctgcgcctggacgggacactccaaccccacgaggacgcttgatagaaagagaactgcta

SEQ ID NO: 155834 - DNA, 359 bp, Zea mays
  Clone ID: MRT4577_73705C.1
caggcaaaatggaggttgcgacggcgacggaggcgtcggcgccggcggcgagcggcggggcgagcaggcggggccacccgttcccctggctcgacgtggccatctcggagccctactacttcctccacctcatcgctttcttctcctacttcgcggcccgcaccacggcgccctcggccgaggacgaccccgagctccacagccgccttatccgacgggagatccaggcggtgctcgtgttcctggtgctcttcacagtgaagattgtgaaggaggaacactgggaaacattcatcgctgactcattgctctacgcaaagggcctcttgttggctggtacttttggtatcgattattgg

SEQ ID NO: 155835 - DNA, 346 bp, Zea mays
  Clone ID: MRT4577_73706C.1
acttcgcattgggtgaaaaacctagccagcactcctcccgtcccctgcagccatcgccgccagtgcgctcccgtcaccctctcctcccattcctctcccgtcaccaagctcgccgccgtcgctgctctcccatcatccgccgtcggtggtgcaggacgccgctcgcgtcgtgggattcggcagcaggaggaggagcacccgcacctcgtcagccgccgccgatgcgaggagggagaccgtggatggagatcacgcggtccgccgccgccgtgggatgaggagcaccagaggatctactttcctcttggcaccaaatccaagtacacaacccctcccgccgccgctt

SEQ ID NO: 155836 - DNA, 559 bp, Zea mays
  unsure (1)..(559): unsure at all n locations
  Clone ID: MRT4577_73707C.1
cggccgcgtgggcggncgcgtggggactagttctaggatcgcgagcgccgcccttttttttttttttttttttttttttttttttttttttttttttttttttttttttttttttttttttttttttttttgggggggccttgggggtttttcgtttttttgcccgtgcgtgcgccggggggtctcttttttattgccccctcttttcaaaacactgggcttcttttttcacccctgngtctgggaaaaacgccgggttttcccaattttttgccttggaaaacactccccttttcccactttttgtcttttcgaaaaattccccttttagcaccttttccaaaaccggtgaagcccgtatcgggcatgggtccccccctttggccgcgcctaataggcaatgggtgtgggggtttcccgccccgttaaccctgcactttgggggggtttctcgcccgcggacctttatattttccatttttttttcgccccgttttttgggttttttcccttagttttttaaaaggggcgcccttttatggcccccaatttttttttt

SEQ ID NO: 155837 - DNA, 415 bp, Zea mays
  Clone ID: MRT4577_73708C.1
tccgggtcgacccacgacgtccgaaaaaaaaaaaaaaaaaaaaaaaaaaaaaaaaaaaaaaaaagaaaagggcggaagcactataggttctaagtttacgtacacgcgaagggcggcctcccaacacgtctgaaacctaaattcaacttccaggcaatgtccttcctcttccatcgtggcgactgagttcactcttccggccgtcgttttaaacgctttgaaccggaaaacccttgcggtagccgacgttatcccccttgcgccaaatcccctttccctcacctgcagttacgcagcctgggcccgcaccggtacccctcccgaacatttgcacaacccgaatggggagtggaacctaccctgaacctgaccattacacgtgccagatcccgagctcccgcccatttcgcccgct

SEQ ID NO: 155838 - DNA, 405 bp, Zea mays
  Clone ID: MRT4577_73709C.1
gtgtttttgaactgatatcatcatcttggctgttttcttcagtgttttcttggtttgtcggtgttctatctgatatgaagatcaaacttgttttatctggatgcaaacaaataattggtgttttgagttgatatcttgcctcgagatcatgtttgtttagttgtcttggatattgttactttatcttcataatttaccgctgtcatttgtccttctcatattgatgttaggtagttccagttggttttgattccttttgtttccatccaaacattgtctcctaacttctcatatggttttggtaggatattctggacttggcaaaatatgcatctgtacctgtcataaatggtctcactgactataaccatccatgccaaataatggctgatgcacttactatgc

SEQ ID NO: 155839 - DNA, 317 bp, Zea mays
  Clone ID: MRT4577_7370C.1
gtcttgccgcgtcggaagctctgggtgcgtctcgagcttcaccattcacccgtgacacaccacggcccgaccatgcgcacaaaatggcagcgcaggtgaggttcctgtgcggtggtgttcatcccagcttcgcccgcgacgggacctgggttgggcacgacgccatgggttcggaggacaaagaggtcgcggctaggtcctttatgtagaggtgggcggaggtaatcagtcggccaaactgaccccgagttccccggcggccggtgagcgagcgagtcgcgcgaggtgagaagaagacccagccacaggcgctcacc

SEQ ID NO: 155840 - DNA, 133 bp, Zea mays
  Clone ID: MRT4577_73710C.1
aaagaaattgacgccttagaatccagagtggaatcaattcagcgagtgttagcatatttgaaagttcagttgtatgcaaaattcgggagcaacataaaccttgaagctgatgaaagttaaacattttataata

SEQ ID NO: 155841 - DNA, 301 bp, Zea mays
  Clone ID: MRT4577_73711C.1
acacaactcggtttaatctcttattgattcgaaccaaatcccggtgacaacgccttaaccaaaacattacaagtgccaatttgctaatatgctcaggggctacatgagaaaattgtatctaagcacctagcacgccctggtcggaggcttaagattgagccgagatccaattgtacagccttaccgaaacgtgctacatgtagtgcgacttgacataactctgcacatatgttaaggccatcagattcgttaccggagtgattgacacgacacaggagctgcctacatccttaattgcctt

SEQ ID NO: 155842 - DNA, 185 bp, Zea mays
  Clone ID: MRT4577_73712C.1
atccgcaattcccccgcgcccgagacgaaaccccgcgccaggagtacgtttgttcttttatcgatcttatcgatctggcgagggaggagaatgtctcacatggccagctggctgagcaggccgaaaggtcatgaagagatggttgagtatatggagaaggtggctaagactgtagcagtggaaga

SEQ ID NO: 155843 - DNA, 1468 bp, Zea mays
  Clone ID: MRT4577_73713C.1
ttgggaccctcgcgtccggccgcattgggcccctcgaggccggccgggatcgcaaatcctcgctcgggcaagaagagccaactgaaaagtattcatccaagaacaccaccccacccgctccaagcacaagtttcgtcttgaagagagccgccaccaccaatggcttgttacaacactgcatctttagcggcgactctgctggcgttcgcgctgacgtttcaggcctgcctcgccgggaggaggctcaccgcgctggtgcaggagccggccataaccatgaggtaccacaagggcgcgctcctgtcgggccccatcgccgtcaacttcatctggtacggcgacttctcggcgccgcagcgggcggcgatcaccgacttcgtctcgtcgctgacggcggcggcggccccggccgcggcgcagccggagccgtcggtggccacgtggttcaagacggcgcgcaagtactacgccagctccaaggtgccgttcccggcgctgcgcctcggctcccacgccgtcgaccggaactgctccctcgggaagcgcctgacggagagggacctgctcaggctcgccgccaggggagccccgagccgcgccatcaacctggtgctgacggccgccgacgtggccgtggacgggttctgcgagtcccggtgcggcacgcacggcgcgtccccgcggtcccgctccggccggttcgcgtacgcgtgggtcggcaacccggcgtcgcagtgccccgggcagtgcgcgtggccgttccaccagcccgtgtacggcccgcaggcggcgccgctcaccccgcccaacggcgacgttggggtcgacggcatggtcatctcgctggcgtccatgctcgtcggcacggtcaccaacccgttcggcaacgggttctactaccaggagggctcggccgacgcgccgctggaggccgccacggcgtgcgccggcgtgtacggcaagggcgcgtaccccggctacgcgggctcgctgctggtagaccaggccagcggggccagcttcaatgccaacggggcccacgggaggaagtacctggtcccggcgctcgtcgacctggacacgtcgtcgtgcgccaccttggtttagatctcgctggtcgtaatcagtgttttgtggtggcgggtgctgtgcgtggagagtgttccacgcggctgacgtttctagtagtgtagtgacctgtgaccatggtggattctttcatctgttcaatgaaaaaaaaacaaatattttcacgcccaaaaaaaaaaaaaaaaaaaaaaaaaaaaaaaaaaaaaaaaaaaaaaaaaaaaaaaaaaaaaaaaaaaaaaaaaaaaaaaaaaaaaaaaaaaaaaaaaaaaaaaaaaaaaaaaaaaaaaaaaaaaaaaaaaagggggcggcgccttttaaaagaaccaaatttaacttccgggtctttgcaaaaaaaaaattttttttttggggccccaaa

SEQ ID NO: 155844 - DNA, 811 bp, Zea mays
  Clone ID: MRT4577_73714C.1
gggtatgaatgcagacaatcattgattcaaatatatcacgatttcttttctggggtaaatcacttgaagggttaagctacatagtataaacatgattggagatatttgacagaacaatgaatcaagctttctccattgagcctcaggcaactacttccaactttgaggcaactacttccaactttgacgccattcagatattatctacttcattggattttgcagccccctgaatctggccctcgccggacatttccataggcagaaagttcaacaagatccaagtcccgtcctgaaaccctacagtatgcactcttctgtatgagctcagatttggatatctcagtcttgttgcctttagatcgattcaccgtagcctgcaaaacttggcaattctccaatgtgctcttcccgcccttggagtaggggacgatgtggtcgtagtcgtggcaaaggcagccggggcaacccacgagcttgcggaagacgatgttgccgagcgcatcgcggcgccacctctccgggtcacgtccgggcacccgctccgccttctcccagcactgctgtttcaccgcataggagaagctccggggctccgacgcggacggcggcggcgccgtcagcagcagctcgtccaggtcggtggcaactgcggcagcggcggcggttgtggagtcgaacgagcgtggggaactcgggcgagccgtggcgccgaaggattgcggcggcggttgccggtcacttcggcgccggcgcatcggcttccgtcccaccattgctctttggtagtcgccgatgagatcccggccgg

SEQ ID NO: 155845 - DNA, 1027 bp, Zea mays
  Clone ID: MRT4577_73715C.1
cgggtgactcgatcggccgcgcgcgatgtctgcgacgcagccgtggaggtcgctgctctgctgcgcggcggcgggatacgacgacgccgacgagccgccgccgtcgtcgcgggggcagaggaagggccggagcaggagggaccgggaccgggagcggctccagctgctgctgctgccgtcgtcctcgtcggcggcgtcgcgggtgtcgctgtcgagcctggggggttcgtcggggacgctgacgcccgaggacctgtccctgacgctgtcgggctccagcctgcacgccttcacctgcgccgagctgagggcgacgcgacccacgtaacaacgcgcgtcatggggaccaacgggtacgcggcgccagagtacatcatgacggggcacctcaccgccaagagcgacgtctacagcttcggggtagtgctgctggagctcctgacgggccgtcggtccgtcgatcggtctcggcggcccagggagcagagcctggtggactgggccagaccctacctcaagaagcccgacaagctctaccgggtcatggatccagccatggagtgccagtactcgtgccaaggggccggacgcgccgctatggtggcgtacaagtgcctgagccagaaccccaagtccaggcccaccatgagggaggtggtccaggccctggagcccgtcctggacatgaacgactaccttcaaataggctcgtttgtgttcaccgtcgtggtggaagacagcaacgacgacgacagccaaggcaagatggtcgacgtgacgatagagacgacggtggaggagaagcgccagagccaccaggaccggcaccggcagaagttccccaactcgcttgtcaatgccgacgtggtgctgcaccgggacggcgacctggggaagcacattgccgcgctgcggcggcaccggaggacgtccagctacgtcaaggagagaggggcgtagaagcgtagcatatagccttcagggtgaattggcaggcatggcgcgtactagtgtttaggagagaatc

SEQ ID NO: 155846 - DNA, 861 bp, Zea mays
  Clone ID: MRT4577_73716C.1
ctaagaggcgtttcgaattaaagtcaatctaagaggctgactctaaaccgaacaaaaggagtgaagtaggacccacacggagaaaaaaaatctaaggggtatactggcatctgcatccccatcccacccaccttccatcctcccggctcttgtccttgatggcacgaagccgggccatctccttccaaaagaaaacgtcaacaccactccaacccacgccactttgactttgaccgttgactcgccgacgtcactccagcgttcttaaggcccgccacacactctctctcctccctcgtctctgaacagcactggcaccttgctagccatggacgcggccatcgccgggcagcaggcgaggcgccggatccagccgccggaaccactcgtgatggccgggacgccgccaacgcccgcagcgttccggtgtccgatctcgcttgaggtgatgcggtcgccagtcagcctccccaccggcgccacgtacgaccgcgcgtccatacagcgttggctggactccggccaccgcacctgcccggccacgcggctgccgctggcgtccaccgacctggttcccaacctgctgctgcgccgcctcatccacctgcacgcggccacgctgccgccttccccgtcgcccgaggaggtgctgtcgcagctggccgccgcagacggggagcccgcggccgcggagaaggccgtgcggtcgctggcggccaagatcgcgccggagaaagggaagcgggcctcggtcgcgtccgcggtgtccgccgatctcgactccgcggtgccggcgctcctctcgttcgccaagggcggggcgggcgccgacgcgcgcgtggacgcggtgagggtccttgc

SEQ ID NO: 155847 - DNA, 1738 bp, Zea mays
  Clone ID: MRT4577_73717C.1
agcagctctctccgactccttcgatcccttccctcctctcgccgccggccgattcacttcttccatcattcgattaagcaagcaaggcaaggcgcatttccctcgggtgactcgatcggcccgcgcgcgatgtctgcgacgcagccgtggaggtcgcttttctgctgcgcggcggcgggatacgacgacgccgacgagccgccgccgtcgtcgcgggggcagaggaagggccggagcaggagggaccgggaccgggagcggctccagctgctgctgctgccgtcgtcctcgtcggcggcgtcgcgggtgtcgctgtcgagcctggggggttcgtcggggacgctgacgcccgaggacctgtccctgacgctgtcgggctccagcctgcacgccttcacctgcgccgagctgagggccgccaccgcgggcttctcccgcgccaactacctcggctgcggcggcttcggccccgtctaccggggccgcgtcgccgccggcctccgcccgggcctcgacgcgcagccggtggccgtcaagtacctcgacctcgactgcggcgcgcaggggcacaaggagtggctggctgaggtgttcttcctcgggcagctgaggcacaagaacctggtgaagctcatcggctactgctacgaggccgagcaccggatgctggtgtacgagttcatgagcttcgggagcctggagaaccacctgttcaaaagtaccaacggcgccctcccatggatgacgaggatgaagatcgccgtcggcgcggccaagggcctcgccttcctccacgacgccgacccgccggtgatctaccgcgacttcaaggcttccaacatcctgctcgactcggactacaacaccaagctgtcggactttgggctcgccaaggacgggcctcagggcgacgcgacccacgtgacgacacgcgtcatggggaccaacgggtacgcggcgcccgagtacatcatgacggggcacctcaccgccaagagcgacgtctacagcttcggggtagtgctgctggagctcctgacgggccgtcggtccgtcgaccggtctcggcggcccagggagcagagcctggtggactgggccagaccctacctcaagaagcccgacaagctctaccgggtcatggatccagccatggagtgccagtactcgtgccaaggggccggacgcgccgctatggtggcgtacaagtgcctgagccagaaccccaagtccaggcccaccatgagggaggtggtccaggccctggagcccgtcctggacatgaacgactaccttcaaataggctcgtttgtgttcaccgtcgtggtggaagacagcaacgacgacgacagccaaggcaagatggtcgacgtgacgatagagacgacggtggaggagaagcgccagagccaccaggaccggcaccggcagaagttccccaactcgcttgtcaatgccgacgtggtgctgcaccgggacggcgacctggggaagcacattgccgcgctgcggcggcaccggaggacgtccagctacgtcaaggagagaggggcgtagaagcgtagcatatagccttcagggtgaattggcaggcatggcgcgtactagtgtttaggagagaatcaacaaaagaaaaatattaatgtgtacatataattaagctagatcatagatgggtgtggcacaacaaggcatacacaaccatgcctcatttggtttggtggccaaaaaattgttc

SEQ ID NO: 155848 - DNA, 212 bp, Zea mays
  Clone ID: MRT4577_73718C.1
ctctctcgctgctccgatggcccgacgaagcaaacagatggaatcgaccggcggcaaggccccccggaagtagctggctactaaggttgcgcgcaagtcgcccccggccaccggcggcgagaagaagccccaccgcttccgtcccggccccgccgcgctccgcgagatccgccagcaccacaatagcactgagctgatcttccgcaaagctc

SEQ ID NO: 155849 - DNA, 194 bp, Zea mays
  Clone ID: MRT4577_73719C.1
ggcgaagtgtgcgtttttacgaaccggaaaaccaccaattctgcgaagaacgctgcaaacaaaatgcaaaaaaacgggtgacactattgacaccgtgattgacatggaggggggcatgcatagacgcgcccacctaatttgatatattatccgtaggatgcaacatcggcatactgtattttgtgaaacgaagg

SEQ ID NO: 155850 - DNA, 367 bp, Zea mays
  Clone ID: MRT4577_7371C.1
gtcgcacagcgacgtggacgtctgtctcgagatggagaccggcgcctagagcgcggtcgaggttcttgtgagactagcagacgtgttgagggccgacggtttcgagaacgtggaggcaatcaccggtgctagagttccgatcgtaaggatgtcggacccgggaagtggtttctcctgcgacatatgcattaacaaccttgtcgtaggagtccatattaggcttctagacgattacgcacatatagataacctgtacttcaactgtgcatcactgcagtatggccgggccaaacaaagaggcttgtacgaggagttccgtgggactcttttcagctacatgtatgtttttaattgcattaacttcttt

SEQ ID NO: 155851 - DNA, 226 bp, Zea mays
  Clone ID: MRT4577_73720C.1
tttttttttttttttttttttttttttttttttttttttttttttttttttttttttttttttttttttttttatttttttttttttttttttttggctcccatgcatgtgattggccagcttaattcggtttgggcccactgactggccggacccggtacaaaagcgtttggcgcccgcgaggggcgtccccaagcaaccctacccaacccaacggggacctact

SEQ ID NO: 155852 - DNA, 461 bp, Zea mays
  unsure (1)..(461): unsure at all n locations
  Clone ID: MRT4577_73721C.1
attctctatggtgcgccaggtaccggaaagacgcttctcgcaaaggccgtcgccaaccagaccagcgcaactttcctgcgtattgtgggtagtgagttgattcanaagtaccttggagacggacccaggctagtgcgacagctcttccagaccgccgccgagaacgcgccttccattgtcttcatcgacgaaatcgacgctattggtaccaagcgttacgagtcaacatctggtggtgagcgcgagattcagcgaactatgttggagctactcaaccagctggacggtttcgatgaccgtggagacgtcaaggtcatcatggccaccaacaagatcgagacgctcgaccctgcccttatccgtcctggtcgtattgaccgaaagattctcttcgagaaccccgaccaaaccaccaagaagaagatctttactctccacacttncaagatgtcactcaacga

SEQ ID NO: 155853 - DNA, 331 bp, Zea mays
  Clone ID: MRT4577_73722C.1
acctcctattccgctacaagcccaattctcgcgttcctcgcatacacgcgcagcggtggatctgagaccaactaagaatacgtaggacaatcggagcattcacaagcttaacgaacttggattgtgtccaaggctacgacggtcgccgcgccaggctagtcaaccatctgctcatcactcctaactgcggatcctactgctggcgctgacgtctacgtcagtactgaactccgtctcggcctgcccggaggaagccctcatgcggccaaggctgccaagacgggcttcgacgacaccatcgacctcagtctcaacctgccgcacgccggca

SEQ ID NO: 155854 - DNA, 1536 bp, Zea mays
  Clone ID: MRT4577_73723C.1
agagtcgagccgagcaataccccattaccgtcttctcagaccctgcttcgctgccgcgagctccgatcggcaatcgtttctccgttcaagatgaccatcatcatcgagcagcctcagtttgatgcggcggcggagaggaaggtcgccggcgacccggcggagctcgtgctcgacggcggcttcaccgtgccggactccaacgccttcggccacaccttcagggactacgacgcggagtcggagcggaagaagacggtggaggagttctacagcgtgaaccacatcaaccagacgtacgagtttgtgcagcggatgcgggacgcatacgggcggctggacaagacggagatgagcatctgggagtgcatcgagctgctcaacgagttcatcgacgacagtgaccccgacctggacatgccgcagatcgagcacctcctccaaaccgtcgaggccatccgcaaggactaccccgacgaggactggctccacctcactggcctcatccatgatctgggcaaggtgctgctgcatcccagcttcggggagcttcctcagtgggcagtcgtaggtgacaccttccccgtcggctgcgcgttcgacgaatgcaacgtccactccaagtacttcaaggagaaccctgactaccacaacccagagttcaacaccaagttcggggcctactccgaggggtgcgggctggacaaggtgctcatgtcatggggccatgacgactacatgtacctggtggccaaggagaacaagtgcacccttccttccgcggggctgttcatcatcagataccactcgttctacccactgcacaagcatggagcctacacgcacctgatggacgatgaggacaaggagaacctcaagtggctgcatgtgttcaacaagtatgacctgtacagcaagagcaacagcaggatcgacgtggaggaggtgaagccctactacatgtccctaatcgacaagtacttcccggccaagctaagatggtgagaaggggcggcctggcctggacctggatgatagatggaaccccaaggccccaccaagagctgtcgttccaagtgtccatgtaccatatacatatctctactactctataagactctattgtagaccatccgtgcaccgcggttctgccactctctgttccgcccaccaccggtcgtatgacaggtgggtcccatgtgtcagtccatcacgcttccgtccgaccgtcatccagatttccgtgatacagccgtctccacgacgagattggcgacgtcctccctgcgcccgcagcccccccccccggctgccgcacgcatgcccctgcttcactcacgcccggctcctccctcttcgctcgactccccacacggtcgtcggtcgtcgctcctccttgagtagaactagtatatagactacgaatacagtatgtgtgccatgtacggtcattttttacagagttgagaagagtacccatgccgtttcgaataaaagttgcctgcgtttgttccgaaaaaaaaaaaaaaaaaagcggcc

SEQ ID NO: 155855 - DNA, 427 bp, Zea mays
  Clone ID: MRT4577_73724C.1
tgcttgattaagcttaatctaacgaaacatccgactctaagctcgacatcgaccctacagttatataggacccctcgagcctacgtcagatccatcgtataacatacccaacccttaacactcagacaccataatacctacttagtacgaaatcgccgcgtcgaccctccgaatcacacactacgccacaagtaaccaaaaaactcctctcatccgaacgcgtcagaccgattacattcaggttcccgcccttcctaaaatcaaaccgattcacaacgcgcgataaagggagcatcgtctaattgacccacggcgccccgagtcaaacacacgcgtttcgcccagcatcgacctaagcacaagccattcgaccagcgaattttagattaacttttagcagaacttcgcctaccaggagtacgggaac

SEQ ID NO: 155856 - DNA, 1480 bp, Zea mays
  Clone ID: MRT4577_73725C.1
gcaagctaccccgccggctgacagccggggccagggccgggtcggacctctctgtattgtccttgggttcctcgaggccggccgggaaccaaagccgccaccgttgccgtagccgtgttcttggactctgttacgtgctgccattttgccaaggctagccccctcctcctcttcttcctcttcttcttttcgcgacgatcagagaagaagatgacgatcaccattgaacagccccagctcgatgcggtggcggagaggaaagtccccggcggaggtgaccccgcggagctggtgctcgacgccggcttcgtcgtgccggacgccaacgccttcggcaataccttcagggactacgacgcggagtcggagcggaagcagacggtagaggagttctaccgggtgaaccacgtgaggcagacgcacgagttcgtggcgcggatgcgggcggagtacgggcggctggacaagacggagatgggcatctgggagtgcatcgagctgctgaacgagttcatcgacgacagcgacccggacctggacatgccccagatcgagcacctgctgcagaccgccgaggccatccgcaaggactaccccgacgaggactggctccacctcaccggactcatccacgacctgggcaaggtgctgctgcacccaagcttcggggagctccctcagtgggctgtcgtcggtgacaccttccccgtcggctgcgcatacgacgagtgcaacgtccacttcaagtacttcaaggagaaccccgactaccacaacccgaagctcaacaccaagttgggggtctactcggagggctgcggcctcaacaaggtgctcatgtcatggggccacgacgactacatgtacctggtggccaaggagaacaagtgcacccttccttccgcggggctgttcatcatcagataccactcgttctaccccctgcacaagcatggagcctacacacacctgatggacgatgaggacaaggagaacctcaagtggctgcatgtgttcaagtaagacaagacagcaccagatcaattggttgcgcatacttgatatatatggacgagacgtggacactttatagatgagtatatataattaacaactggcgttcgttggctgtctcttttcccctcttgttgcagcaagtatgacctgtacagcaagagcaacagcaggatcgacgtggaggaggtgaagccctactacatgtccctaatcgacaagtacttcccggccaagctaagatggtgagaaggggcggcctggcctggacctggatggatggaaccccaaggccccaaaaagagctgtcgctccaagtgtccatgtaccatatacatatatatagactacgaatacagtatgtgtgccatgtacggtcattttttttacagagttgagaggagtacccatgccgtttcgaataaaagttgcctgcgtttgttcctttccaaaaaacccccccccc

SEQ ID NO: 155857 - DNA, 237 bp, Zea mays
  Clone ID: MRT4577_73726C.1
ccaatcacctcccttcctctccactcctcccccgcagcaagagagatccagccagatccgtccagttccatggccaccgccggcaacgccccccgctcccgcaagcgcgtcgaggccaccgtcctcaagcgcgcgcgcgacgggagcgccttcacccgctgcgaggcgtgcaacaaggacgtagccatcgtcctcatcgacctgcacagctgcagcctcgactccaagatacgcctc

SEQ ID NO: 155858 - DNA, 399 bp, Zea mays
  Clone ID: MRT4577_73727C.1
gcttctgatccgctttagctatggtgttgcccgcagacctagcctactgacaatattatacgcaagtggacatgaagggcgaggtacccgtcgtcgtgtctgatgatgaaggtaacgggctgagcgtgtcgtgcgcggacgcagaggaagcctctactgcatctgtctcggctgaacagatcgacatggaggcgtacgctgtgcagtactcggggaggacccgcatggtgcgcatactttttgtcgccaaccggtagcggcgtggatgcgatgcaactcgaggcgctgcgggtggctcactactagatcaagcgcgttgaggacgtgcagctgcaacgtgacgtctttaccaagattggcggtcgatctaaaggatccaagcttacttacacgtgcatg

SEQ ID NO: 155859 - DNA, 595 bp, Zea mays
  Clone ID: MRT4577_73728C.1
gatccaaagaatttttttcgaccggcacgaccggcacgaccggcacgacgggtcttccaggtaaggatttagatgtataccttgcgtgaccagggcattctttgtaatatcctgttttcctttcttaggaacttgcggacgtgagcaccgccaagttgctgtttctccgccatgagagcgatgtctgggattcgatgtggtcccagcgagctgtgcttaccgaggccaatgagcgccgaggtggcggaccttcggctgctctgcgatgagttgaggtcggaggcggtgtcagcacgagcggaggctttgtcggcctgggagctggtggcttccaggccaaggagatgcgactgcggcaactggagcttggccaggctatcggtgaacgggaccaatctcggagctaagctgccgaggccgtgagccgggctgaggcccttagaggtcagctggctgaggctacggagcggctagccgaggcatccgttcgggccgaaggaatgttttgcccgcttgtgactttgtttttgtctccattcttctccttgcgtctgaagaatgttgtcctgctgtctgcagggtttgagacggctct

SEQ ID NO: 155860 - DNA, 375 bp, Zea mays
  Clone ID: MRT4577_73729C.1
gtacaccaatttcatttttaaccctgtaaacccaaagccatgccccagggggggtttcagttgggatccatagcacaaagttttacaattaggacaaaatttatggaccccctaacaattggggggcaaacatggggcaaatgaatcattcttcccttattcgccttagctgatgtctcaaggggtggtttagaacaagggtttgattattgagcaacattactccacgagttaaggtcttcaccgtgtcaaaagcttccacgccaagaaaatggaaatgctcccgagtcccgggcaggttttcgcccaaccaagggccaaataaaggtgcttttacttggatatgaaagcatctttgccaggtccaacaccaat

SEQ ID NO: 155861 - DNA, 514 bp, Zea mays
  Clone ID: MRT4577_7372C.1
aaaaatcgatggagatagatgtgctgagttcttaacatcaagcagcgcaaagatcattgacaagtaagaacctatagagttaatggggagggcgacgccggtggcggtggcggcagacgacgacggccagaagacgtcgtggccggaggtggtggggtgggtgacgctgaacgcggcgctgcagatcagcagcgacaggcccgacgtgtcgacggacttctacagtgagaccaccccgctgccgaccgactacgaccccaaccgtgtcatcatcgtcgccgacgaccggaacgtcgtcgtccggactccggtcatcggctagatcgtgcccccgccgtatcatcaggctgcagcttttcccgataatagcgacaagaacaactactgctttatgttttgtttctttactgctgggttctcatgtatgggatgggaaagagaaggtcactatatatagtgctgttcatcgttgaacatgcacgtatattcaatcctcgtataagaaatccgtgtt

SEQ ID NO: 155862 - DNA, 413 bp, Zea mays
  unsure (1)..(413): unsure at all n locations
  Clone ID: MRT4577_73730C.1
gtggttgttggtttttttttttttaaaattttttttttttttttttttttgaccacccaattcaatgctcccgtttcttcaacaaaccattaggtaaaaaatggcgatgtctaatattcacaaacattttttaactgcctaaccctacacctggtttgtttgggggtttcaaccctnnnacctacaangttttcacaaatctacataaaaaccannaaaaaaaccctattccttatnaanaacacccaaanaatacaaaaacacancaattcttcctaccaaaccctttnnactacaaatactaaactaacacccccacataattctattctnnaacctattncctaaatcattactatcaacacntaaccttcccattnncctcacaaccanaaacacccccctatatcaat

SEQ ID NO: 155863 - DNA, 525 bp, Zea mays
  Clone ID: MRT4577_73731C.1
ggaaaaaaaatgaagaaccttcggctaagggttctaacaacagctggggaaattcgttcttttacatctacattaacatgggggggggggctttaacccttcgataactgggctgggaatcccccaaaagcccactggatcgcctaaacatttggcagaattttgggtgatcccatcataacctaggcccggaagaagaacctgacaatctgggtgaaaaactttggggtggccctcaagcttgggcctgcccctgatctactggggattctctgggagaggcgatggaatggcaaactttgaatgaaaacaacccctggccccgggagagatgctgttagctggttatcacccccaaaaactgcttttttaagctgggtagggctcttcaactggaagttaaggggggccgacatagccacaatacaagcagcatcaacagtaatcacctttttaggagcaaggattttctgcatgactggtccaccccaacaagaaaagccatcccctggcccctaagttttt

SEQ ID NO: 155864 - DNA, 569 bp, Zea mays
  Clone ID: MRT4577_73732C.1
gatcccactctccacttgcaggtgggaatgaccagatccttccccctacctactcagggctgaccggctagtccgcgaccacgtcgaagatgataatgaggccgtgctgctctacggtgcaggacggggatggggaacaacaagacactgatgaaccgcgacctgctacagcctagcagtgacaaaatgatagcagagcttgctttcgaaatgtgacgatactgctccaggctaatgctaacgacacatgtcgacctcaagaggaactcactcatatgcatcaccctatgaaagacaccgactctgaagacgagctcatggagctccaaacacactactgacaaggaccataactagatcatacgcagccggcgagctccttcattatatgacaaatcgttggtgggaggctgaccaggcaggaggtgatcagcatgatccactatgcatgcgacagtggctatggccacatatgcacgatgagtgggtaatggaaatgatagcccagtgagccacagatccataatctgaaggcagaggagattatgcattgcatattagtcaagatg

SEQ ID NO: 155865 - DNA, 541 bp, Zea mays
  Clone ID: MRT4577_73733C.1
gggggggggtttttttttttttttttttttttttttttttttttttttttttttttttttttttttttttttttttggtattctttgtccgttccctgttattccttcccgtttcccctttgctttttttttttcccccttttcttgggggggggtgggggggtccccatgggcaatgcttttcccttccccattccgcacaacctaccccccgcccccctaaattgtaaaccctggggtgccttgtgaggcccccggcccccattaagggcgctgccctaaatggccggtttccagtcggcaaacctgtttcccctgcggaatccatgcgtcccccccccctccgggaaaggcccaacgccctttgggggccgggttggttttttttttccccggggggaccggcttcacccgttggcccttcaacccctggtcttgggtgagtcgcctgacccggtaaacgttggtttgccccgtccccccaatttcccccctgcgggggcaaaaccgccgtgggtttggccttaactgccctactttt

SEQ ID NO: 155866 - DNA, 296 bp, Zea mays
  Clone ID: MRT4577_73734C.1
ctgctagctactgcttaccgacgatgcctcctccagcacgaggaccctgctgcggccgtgccacgtgtccagcgtctgcacggcaaggtcgttgatgaagcccaggtacttcttgagagcgtcgacggagagcggcgcgcccaggacccgccgcagccgcctctcctcgccgccggggccggggagcgggctggtggggcccagcacctgcttccccgtgtagaagaggttgaggctcgcgcacgccgtccttgcccgacgacagcaggagcttggcggcgtccctccccgtcatg

SEQ ID NO: 155867 - DNA, 413 bp, Zea mays
  Clone ID: MRT4577_73735C.1
attcggctcgagtgctttggctccactatctactgatgggacaagcataggtgccagtacgggggtgaagtatcttggagaagagggtgaaaatacacctgttgctggtgctgcatctattagctctccctgggatctgctggcgaccagcaaattgatttcacgcaagctagtgcaacgatgttatgacatacctcttgcgttcggtctaaaggatactctgaactacatcaatcagtcttggcacgacttgcaaactgtgaagctattacattgcgacactctatccaggaattctacacgcatgccactagtgtacgagcacactactagacaccggacacagtataccgcaagtgcagcagtgcatattatactcggaatgtgacagttacactgctttgcttaacagc

SEQ ID NO: 155868 - DNA, 485 bp, Zea mays
  unsure (1)..(485): unsure at all n locations
  Clone ID: MRT4577_73736C.1
gccgcaagcgcatcatacagcagtgcatctgcgccgcgaaccgccgctccagtccaatcaatggacggacacttcccatgatctcgtcgcccacctcctcttccgccgccgccgccgcggcaatgccgactccctcccgcctcctcttccccgtcctggtcctcctcgccgcgtcggccggggcggccacggccgccaccgtgagcgacgacgtgctcgcgctggtcgtcctcaagtcgggcctcttcgacccggcgggccgcctcgcgccctggtccgaggacgccgaccgcgcctgcgcctggccgggggtctcctgcgactcgcgcacgggccgcgtcgccgcgctcgacctccccgccgtgtcgatcgcgggccgccttccgcgggccgcgctggttcgtcttgacgcgctcgtctcggtcgcgctcccggggaaccggctnttcggcacgctccctgacgcgctggcccctcggcttcgt

SEQ ID NO: 155869 - DNA, 438 bp, Zea mays
  Clone ID: MRT4577_73737C.1
gtaggaccaatgacagcgcacagggcgaatggcaccatgccacaacgtaacacacactgcaggtgagagaggcacatgagcaccatgatttggagctgattgcacggacattagcccaggagttactgtttcctgatgtgctatatacgagctctcataatgacacatatgtcttagtatgctatctgtgaagtcatgatactgataaacacagtgactgatatacgcctgccgttggatggacattactacctggtacatcgtggacaagggtgattggcgcagatcagagcaaatgatccaaagctgaagttcgactcgtgtgcggatacgatctgatatacggtgaccaagctttctgaaccgatactagatctttacattcaaacttatgaagcgttccatatctacttaaacaagctgaagttacacttccat

SEQ ID NO: 155870 - DNA, 674 bp, Zea mays
  Clone ID: MRT4577_73738C.1
cctcgaggccggccgggacctgcatgcaaccatctaccagcgactcggcgagcgagagaagacacacgcagctagctaggagcagcagcaagagcggagatggcggactccatgatctcctcgtcagctctggtggtggagcctcagggtctgccgcccactcggacgccgtgcctcctacttcgccgttggctgctccaagaagaagatcgagacctacaagccctactggattgggggtggcctgaccggctacgtcgacgccaacgggagaaagggcaaggccaatggcgtgtaccagtttcccaactagtacggcgcgaacgtctacagatacaggccaatctacaacgagagatgactggtctccctccggcgacgtctacgctggcggaaccactgtgcttctgatctgggacgttaccctctctgcgatcctccgcggcggcaccctcctcatctactagaccagtgccctctcctggctaacgatatccaatgcatgagcttcttgcgattctccatgaaatatcagggagtgtgtctataatctagccaccatggatgatgctcaagctctcgtatgtaacaataatcatcgctactcttcatgtacataatcttgatgctctctgtatataccgctgacccagacaaaaagcgcgcctggagct

SEQ ID NO: 155871 - DNA, 240 bp, Zea mays
  Clone ID: MRT4577_73739C.1
ttcacagaaacacaattcattttttgcaaaagcacaacggcaaaattatttgagagatcaggtgtctttttgaatgagcgcacaagatgacatttagggcacaaacctgcgaggaaaaaaaaagaaagagagaggttatatcttgcgaacatatgccggcgtacacaatggatacacccaacggaggaggggcgactttttaataataaaaattaaaaaagtcgctaccgacttttccga

SEQ ID NO: 155872 - DNA, 285 bp, Zea mays
  Clone ID: MRT4577_7373C.1
gctcaatcgacatagagaggcccaactactccaacttgaatcgccttgtgcctcaggtgatctcatcgctgacagcgtctatagaggtgacgatgtccgagctcaatgtggatgagaacgagttccagaccaacctggtaccttacccgaggatccacatcatgctcacatcctacgcaccggggatctcttctaaaaaggccttcaacgagcagctgtatgtggcggagatcaccagcagcgcgttcgagccggcttccatgagggatcagtacgaaccacagc

SEQ ID NO: 155873 - DNA, 274 bp, Zea mays
  Clone ID: MRT4577_73740C.1
ccgaattcggctcgagcattattctttcacttttcgatcaacttgtggctatagagtcgtcggtgataattgtgggcacgaggggtgtcagaaaccgctgccttcatgagggggctgaaatacccttcccatactccacgccttgcctggacacaatctctagacctactaccgtagctaatacgtagataccggtgccatacctgtgtagatacttgactcttactccacaagtgatggctgttcccgacatatatataccgaccctttcacg

SEQ ID NO: 155874 - DNA, 852 bp, Zea mays
  Clone ID: MRT4577_73741C.1
atggaatctctcttgctctctctctctctcctaggaaactttcgtgttgtcgcttgcctcgccgcctccggccagaatgcctccatcccagcaccactgcccgcaaccccggccgccaggccgcgcccaacccggccctcgtccagagctggcagcgttgtcaaaagattctgcttaaaaaaagatcacacatttcagatttcaggaaccaaattgcagttgtacatggcttggatcttcttctttggagttatctttttcacagctttccttaatttcctaggtggggacagtgttgaaacaacctctgctgcacattccaccggtggcacaagttcattcacaggaggcactggtacaatttcaagtgaggaagatggaatgctaacaagctgctatgaggaagaatccacacttagttcgggctgctcagcaaatgcctcaggctcttttggaaaccactttttagtcatgcatcttgatgtaccaaaatgtttatattccccttatctcagtgtgcacgacgacagacacctttcagagttctggaaggctcctgtgttctgcaacgccgtgccctgcgcggacgcgccgacaatacacattgcgatgacgatggaaaccacatacctgtggggctccttcaccagcgtcttcttcgtgctctgccacaccacctatttggagtttgttgccttccacttcatcgccttctcgcctccacggcgcgtcgccggcttagtcccagcaagtggcgacaatctacgagaaaagaaaggtgcaagatcagggaaacttgggcatgaagaattagcggcctccatcaagcagcagagcgtagaagcccagtag

SEQ ID NO: 155875 - DNA, 262 bp, Zea mays
  Clone ID: MRT4577_73742C.1
ccggttggaccaacgacgccggcgatgtttggggcgaggagcgcaccaccacagcggggaccgcttcacccacagcagcgacccccacccaggcccccgccacggccagcagaaagacaagccaagtataaaagaccgcacgagcacagcggaatggaacgaggaacccaccccgaccatcacaaacatgacgaacccgggcaagaccgaacgcattgaccaagacacgcccaccaaggacaacagcaagggcaacgccaaa

SEQ ID NO: 155876 - DNA, 271 bp, Zea mays
  unsure (1)..(271): unsure at all n locations
  Clone ID: MRT4577_73743C.1
tgtcacactttatcctacgcaagcacactgntctgaactgggagagaagaataccatcgcgcgacgggattacaatattagggagtagagcacntactgttggccataaagacggcacaagaatggtgaccttataagagctatgatgatgcttcctccaaaaaagataccaccatctctgcacacgcatatactgactgtgctgaatgatacaatggtgcgccaaactgctatcgacgttaaatgtgtgctgctgatgtactacaagaac

SEQ ID NO: 155877 - DNA, 227 bp, Zea mays
  Clone ID: MRT4577_73744C.1
gagcacacgctgtagcttcttctatgtcgttcagtcctactactgatacatgatatttgggaaatctcctctatacatctgtctctatgtatatatgccataatgcaaccatgacgacgcacaggaggatgtgtggtatgaccaagaatatatgcatggacataataaagttttggttttaatgaatctatcggccgcttgctgtctaaaaaaaaaaaaaaaaataa

SEQ ID NO: 155878 - DNA, 321 bp, Zea mays
  Clone ID: MRT4577_73745C.1
tctagagtgagtcgtattactgtgatcgtaacggagcacgcccatgtggtcccggcagctcccggccgtcctccaaagtcacaagatcctcaccgtgatgcacatctacatggtagatcgccacgggttcagttcatggcatcaacaggcgctaaatgaaagcgacagggtcatcgagatcccgtacgacctattcctctccgtctacgttgcgctacagctcgacttcatcaatcacagccataatactgtcatcctagaatggtacctcgtcatcttacgtcattcgcataagcattcacccaacataatgttcgaaga

SEQ ID NO: 155879 - DNA, 335 bp, Zea mays
  Clone ID: MRT4577_73746C.1
aatcagacatataattagctgttctaggaaagcattagcactgcctacgaggtctgcatgcagtgatgcacattccactttgacaaaaaacacttcaaacagatttggcaattgcattgcacatcgacgacgacattcatgggcatcccagctttggctacaagcaaaagatcgccactcgaaggactcccacgccattatatacccctcgtcgctcccgccgcggcgcgccgactagggcgacttgaggaacctgggattgccctgcctggccgccggcggcacggacttcctggcgcttccgacgacggaggtgtttgttcccccccatggac

SEQ ID NO: 155880 - DNA, 772 bp, Zea mays
  Clone ID: MRT4577_73747C.1
ctggaagtgggtacgagttcaagagtgaaatcaagggaggggcagtgcccaaagaatatgtaccaggagtgatgaaagggttggaagagagcttacccaacggtgtcctcgccggttacccagttgtggacttccggggccgtgctggttgatggctcgtatcatgatgtcgactcaagcgtcctagcgttccaaattgcagccagaggagccttccgtgaggggatgaggaaagccggtccaaggcttctcgagcctataatgagagttgaagtgataactcctgaagagcacctgggcgatgttatcggtgatctgaactctagaagaggacaggttaacagcttcggggataagcctggtgggctcaaggtggtcgatgcttttgtgccactcgctgagatgttccagtacgtcagcaccctccgggggatgaccaaggggcgagcgtcctacacgatgcagctggccaagtttgacgtcgtcccgcagcacatccagaaccagctctccacggcaaaagcagaggaagctgctgcttagttttttcgcttccccgtagatatatccatacagtacagcgtccgcagagcaggttgataggaagcgcgtcaaggtgtatccgtgtacgtagctttgtagcgtcttgaacttgaaccccgtcacggggcattatttgccgttgattttggacctgtagtggacagtgaaattatatggcttcgttttcttgctcctcaaaaaaaaaaaaaaaaaaagcggccctagggcc

SEQ ID NO: 155881 - DNA, 270 bp, Zea mays
  Clone ID: MRT4577_73748C.1
ctcactgttaactatcaagttgactaacgcttgttccgacagagttgtatcacttgagtgctccaataacaaatgttatcgacgatgacttatgcaagccatatcacggtatattattgactgtctggaatatctctttactatgcgctcttcattgttatagcatattgcacagatgttgatctaatgtattgccaccagacaaatcagctatgcaattgcattcagatcgcgtgcgacctgaaccgcgtgagcgcgtactgcgccacg

SEQ ID NO: 155882 - DNA, 735 bp, Zea mays
  Clone ID: MRT4577_73749C.1
tcctccgtcgtctccacctctcgtctcgcctgccaataaatccaagccacaaccgccgctgtctgcccgtcaataagtttttctccgccattttccccgtcctccgcgagaagcgcctcgaggtccccgtgtgcggctagctagatcggtggcgcctcccctccctcctcccccgcggaaggcgctcgcccccttcattcccggaaccgattctcgcaagggattcctcgctgctcggctcttcttgaggcatgcagagccagatcgtgtgccatgggtgcaggagcgttctactctaccccagaggggcccccagcgtgtgctgcgccgtgtgccacgccgtcaccagcgcgccgcctccaggaatggagatggctcagcttatatgcgtcggctgtcgaactttattgatgtatactcgcaatgcaactactgtcagatgctcatgttgtgatacagtcaaccttgccagaccagcaccgccagtgaatagtatagctcatgtgaactgtggccagtgccagacggtgttaatgtatccatacggagcatcttctgtcaaatgtgctatctgcaattttattacgaacatcggaatgaacaccgtgagacctttgccacctacaatgcatgcaccaaacggaattttcatatagtgtcccatcgacctctgcgccatccgctcaatcgcagaatgtaacggtggtcgtcgaaaacccaatgacagtagatgac

SEQ ID NO: 155883 - DNA, 195 bp, Zea mays
  Clone ID: MRT4577_7374C.1
ggggccccccctttttttttttttgaagtggtccagcgctagaccgggccgggcaagaccaaggcccaaagcacagggccctagaggcagccagcgtggcctagggaggatctcggaggagcggcgataatacaccacagacaccagaaggggcctgcccgggccccgtaaagcccaccgagggcccagggccgg

SEQ ID NO: 155884 - DNA, 581 bp, Zea mays
  Clone ID: MRT4577_73750C.1
taggctagtagtaagctacaatggcctcagcattggcacagttcgagatgcattttattttaatgatgacctgtggtaacaaagcagaacacgcggggacttccggcaaacatccgatggtcagctaataactgaaattgatggcaaacaaattggcactgtccacagcaaatatctctgcagaaccttcttcgatatgtatattggtgacccccctgtttcagttgagaccaaacacggcattgcgcaaaatgtggctggactcatgagaagatgctaggaaaacagggaaaccaaaccgaagaactcggaactatttcctccatctatacaaggagagatgtacatagaaaggaagccaggagaggattgattgtatttttagtggtagacagcgactttgtatgctgtaattaacaggcagaaggtttcgacagacaggcctggcatccttagcaaatgcctcctatgcttctcatatggtatggcattttgccatttcctggttcgctgggggcactgtatcatgagcatatccaagagcttctcagaagtctcccctaaattatgttttttttttg

SEQ ID NO: 155885 - DNA, 689 bp, Zea mays
  Clone ID: MRT4577_73751C.1
gccggccgggtcgggatgctttctcagaggtggattggcttctcctccccctccggttcgtgttcatggtctgtttcctgggccagagggaagagatggctcgatccgacgttgagtaccgttgcttcattggcgtgcctctgctgttccagcgatgaccactccctgaataacgtcttctgcacgtacggtcgaagtcctcgagacaaatatcatccctgtatcggtggacaaagaagtcccacgtgttctgtttcgtcacctatcatccacgtgaagacagcggatgtcgcaggcgcacatacgagtggcactgatacgtgcaaaggatattcatacatttctgtagagcactcatcctgcctaacagagagcgacatgtccccagtcgtgcggctcgttgtgatgctgtgagttgtgcgtcatacgagaggaaggtgcgacagagatcgtagactgttctatcggttgccggcggccgcatcctactcccgtgttcgtgcaggctacctttactgcgcctcaaacgacggtgtcaagcgtgaggtcgactacggcaacatacgagatgcactggacgaactgatcggaggcgtccgttgagggctagatatctgggtcgtcactgataccgtgtctcctctaaacaagaagggacttgtcctagactgtgaacatattaggcccat

SEQ ID NO: 155886 - DNA, 360 bp, Zea mays
  Clone ID: MRT4577_73752C.1
attacgagcagttactatttcagctggaatacaacaacaatggcaacatttctagcaatccttggattcacggttcttcctgttggaacataaattagcaaaatgtttgatgcgaacacaaggttgacttgtcccttgtggttcgagttgatgatgagtgattgtcaatgggtagcactctagggtagtcagtggactgactagagtgagattatgtttgtgcaaccatgtcggtcgacttgtggtgtgcaggtgtggagcacaagaacggtggtcgatggctgaggtgaaggtcatgcgggctcgtgctgatggactgggagcgatgaaaggagcatgctggatcttgactgatggatc

SEQ ID NO: 155887 - DNA, 195 bp, Zea mays
  Clone ID: MRT4577_73753C.1
gcttcatggaccctttttaagtaaacaaacaaccatgtgaaatacacagcaaccatcctttggaacaatttcctttgtgtgggcatctaggattatgcatttcaagtccggttctcagaaatcaaatccgattcccccaggggaagacaattaaccgcacctttaacttttaccaacgtaatttttttgtatggc

SEQ ID NO: 155888 - DNA, 553 bp, Zea mays
  Clone ID: MRT4577_73754C.1
aaagcgaaacgagcattttaaacccaagtcggacggattccggacaaaaatgtccgtgaacaacccggttcatcaccgggcttaggaagtatgacactggcaccggttcctccctacctgcacacacgaccgagcaggacccgcttatcagcgtgcacatgcgatgacgtcttgctgttgcgcctgcacgtcctgcactctgcacaagactaggcacacccgggccaaacctacgggcaggaccgcagccatcacaccatgaggctcatgacactccacgatgtccggcatgaccctggccttcttcaactcgatcatgacggcgggcaacaccccgtggtagatcctgtagtattggagctccgactaggcccgttgcccagggccctgagaccatggggtccgtcaccacggcggaggcgccgtgcatcatcaggagcgggaccgagaccccctggaagttcggctccaggaacgaccccacgcagatgatctccttgcccgtgctcacgaggttggtgcccgtgaacacgaactggacccgctatttcgc

SEQ ID NO: 155889 - DNA, 650 bp, Zea mays
  Clone ID: MRT4577_73755C.1
tacgaaaactgggccggccgtcctgctcgtcggcttctggctggcccctgcatccgcccagtgtgtgtgacctcagggaatcgattcgttcatccaagtgaaggcaaccagactccaggatggagttcaaagccggcgttttcaccgtggcaatgctagccatcgtcgtgctctccacaccagcgcccgcaccggcggcgccgcaccacgtggacctcgcggacctcctcagcgtggccgggccgttccacacgttcctggactacctgcaacctcacccaggaccagctcaggtcgctgctgctgtgccacgcgctgcccaagtactactcgctggccgagttcgaccggctgagcgcgctcggcccggtggccgccctcgccggctcgcagtacacgctgaacctcacctacgacatgggcaccgtccgcgtgaagtccatgtggtccgaccccaagatcagcagcagcgtgtactccacccgccccgtcgcggtgtacgaggtcggcaaggttctcctgccgatgcagatcttcaagagcgaccccccgctggcgcctgcccccgctccggcaccggatgccaaggcatccgacgtccctcccagcccggcgtcggggaaatcatcagcgagtgcgaaggcgaaaga

SEQ ID NO: 155890 - DNA, 273 bp, Zea mays
  Clone ID: MRT4577_73756C.1
gaatagtcattcagaggtgtagtgactacagcacaggaacaagatgagtgttcatctgaatatatgcttagcaaagcgagaattggtatggaaagatcattgtgtttcttttcttttttgttttttgggtgaggaagaggagtttattattcacgtatgctaatcaaggtttaacatatgctgtaaaaagaggattgtattcatttactactcagtgtacgtaaaaccttgttttcataaggatagatgctaatgcagcgagatgttctcatc

SEQ ID NO: 155891 - DNA, 260 bp, Zea mays
  Clone ID: MRT4577_73757C.1
ctcacactctccaaaccctatcgggactacacactagctctatcgctatctccccaagattgtcgagcgccgatcccgagcacagagaagaggaggaggctcccgccgttgcgacgacgaggacaccggagctcacgccgctccaatcgtcaagctcgaggagtgtgctgtcaccaccggcgaggaggacgaagatgcaatcctggatctcaaatcgaagctttaccagttcgacaaggactggaaccagtggaaggagc

SEQ ID NO: 155892 - DNA, 927 bp, Zea mays
  Clone ID: MRT4577_73758C.1
gccggccgggtcgggaactcccccggccgtcctgctcgccggcttctggctggcccctgcatccgcccagtgtgtgtgacctcagggaatcgattcgttcatccaagtgaaggcaaccagactccaggatggagttcaaagccggcgttttcaccgtggcaatgctagccatcgtcgtgcccaaggactcggcgttcgcggcgctgaagcagaccacgttcgccaacctcacccaggaccagctcaggtcgctgctgctgtgccacgcgctgcccaagtactactcgctggccgagttcgaccggctgagcgcgctcggcccggtggccaccctcgccggctcgcagtacacgctgaacctcacctacgacatgggcaccgtccgcgtgaagtccatgtggtccgaccccaaaatcagcagcagcgtgtactccacccgccccgtcgcggtgtacgaggtcggcaaggttctcctgccgatgcagatcttcaagagcgaccccccgctggcgcctgcccccgctccggcaccggatgccaaggcatccgacgtcgctcccagcccggcgtcggggaaatcatcagcgagtgcgaaggcgaaggagaaggcgggagaaaagagctcgtcgtgccgagccggcgtgtcgtcgcccattacttggcgatcgctgtctccggcggcctggtgctcttgtggtgaggatcgacgagttcgtcctcaccgtgtgtccgtgtcgaaggagcaagtacgttctagatgcgagggccccccgtgtttaatttatatatgggtgtttatggattcattcttttggacatatggtaggccatttgtgtttaggactgagctgttgttgagtgtttgcgtcatatgcttctatgattaaaaaaaaaaaaaaaaaagcagaaagtatttcaatatatacc

SEQ ID NO: 155893 - DNA, 1436 bp, Zea mays
  Clone ID: MRT4577_73759C.1
ctctggccgagaaataggtaaaaaccctattagggaaaaaataaaaaaaaaaaaaaaaaaaaaaaaaaaaaaaaaaaaaaactcatccgtacccgagcactgcacagcacagcacagcacagcacaccacctttagtatatagcaatagcacactcggccccccggctctggaactcccccggccgtcctgctcgccggcttctggctggcccctgcatccgcccagtgtgtgtgacctcagggaatcgattcgttcatccaagtgaaggcaaccagactccaggatggagttcaaagccggcgttttcaccgtggcaatgctagccatcgtcgtgctctccacaccagcagccccgcagaagcccaagagccctcccgctccgcgatccccagtcgtcctggcgccggcgccagcgcccgcaccggcggcgccgcaccacgtggacctcgcggacctcctcagcgtggccgggccgttccacacgttcctggactacctgcagaagaccggcgtcatcgagaccttccagagccaggcgaacgacacgaagcggggcggcatcaccgtcttcgtgcccaaggactcggcgttcgcggcgctgaagcagaccacgttcgccaacctcacccaggaccagctcaggtcgctgctgctgtgccacgcgctgcccaagtactactcgctggccgagttcgaccggctgagcgcgctcggcccggtggccaccctcgccggctcgcagtacacgctgaacctcacctacgacatgggcaccgtccgcgtgaagtccatgtggtccgaccccaagatcagcagcagcgtgtactccacccgccccgtcgcggtgtacgaggtcggcaaggttctcctgccgatgcagatcttcaagagcgaccccccgctggcgcctgcccccgctccggcaccggatgccaaggcatccgacgtcgctcccagcccggcgtcggggaaatcatcagcgagtgcgaaggcgaaggagaaggcgggagagaagagctcgtcgtgccgagccggtgtcgtcgcccattacttggcgatcgctgtctccggcggcctggtgctcttgtggtgaggatcgacgagttcgtcctcaccgtgtgtccgtgtcgaaggagcaagtacggggttcagcttagggccccccgtgtttaatttatatatgggtgtttatggattcattcttttggacatatggtaggccatttgtgtttaggactgagctgttgttgagtgtttgcgtcatatgcttctactaggtgtatgcccgtgcgttgctacgggaccaacatgtattgctaagatacattaagataagaaaacactataataaaatatattgatatacgaataaaaaaaaaaaaagtgattactactactgattcgtgtgcagaaagtaattcatacttgccggcc

SEQ ID NO: 155894 - DNA, 233 bp, Zea mays
  Clone ID: MRT4577_7375C.1
cccaaacccatcatcttcattaaatctggctgcaaaaatgcaatatctaaattgagatcttccactcgcaaaaaacgactatcctgaaaccaaaggaaatgagatcgggattcctaagcggattccgatgccacattgaccagaaattatgacgcaaaaatgtccatatgtgaattgcaagtatttgcttgcctatcacgcctatccacaagccaaaggaaatgagatcggaa

SEQ ID NO: 155895 - DNA, 566 bp, Zea mays
  unsure (1)..(566): unsure at all n locations
  Clone ID: MRT4577_73760C.1
ggtctcaagcaagagctatatatgttattttcccatgcaacatgcagcttgcacaaggggaagtacgcactcaacttttacccacctagaaaagaaaggctaaatataatgaaaactaacaactttagaaacaggtagctagctagccgactaatcagccaccgacttccttgcttgaacggattagcttggtctggatcagctgctggacacgctagctacaacaggtaataatccatgggggcggcgtccagcaagctggcgctctggacaggacggtggaagtgggtgtcgtcgtcaaacagccacgactcgatcgcagacagcggcatcatcagctggaacggcgcggccggcggcttcgtctcgtactcgaacaccgggccaccagcggggtgagcgcctcncggagcgcgcggcgcgccaggttgatgtccgtctgcagcctcctctcccactgccccttggagttggacggcggcggcctgtgcgccggcggcttggccgccccgtcgccgtcgccgtcgccgctgccggcctgcagcttgcgcttgaggtgcgtgttc

SEQ ID NO: 155896 - DNA, 409 bp, Zea mays
  Clone ID: MRT4577_73761C.1
gccggccgggccgggcccctatgcagttcgctggctcttgcctcatgcccacgcaacctaccgtcccgacggccgtcgagccccatcgagcgctcgacatcccgccgcccacccgtggttcgccgaggttgtccacattgcaaccactgctcaggagaagatgaagccccagtggaggagttctaggagtcccaagattacgatgacttctaggcgtgggttagcggtaaacccccagttggctgcttgtgaaggtcatatttagctacgtttcatttttgcactttgatatatgttaatgactatgtggatgtctcgggcatcatgatgttatcaactattatctctttatgttgctattcgagcaatgtgtgatgatgtccaaaaaaaaaaaaaaaaaaggccccta

SEQ ID NO: 155897 - DNA, 346 bp, Zea mays
  unsure (1)..(346): unsure at all n locations
  Clone ID: MRT4577_73762C.1
aactcggaccatgatctctctaaaaattttacaaataaatatctgggccagggagggggtatacagcgggggggctgaaagacatgctcgatcgacgtgacagcggaggggggcgagccgccggcggtccacctgtactnnccgtggagcaaaaccgactcttagccagggccctcggtccagagctggcgcgcctacgggagcacgctcttggccactgggccacgggtgcgcgaccgcctcacgagtcactcattccaggccggtgaggcggggacgctgctcgcccagagcgagaaccccctccggcggatcctggcgggggtggaactcatctacctcggat

SEQ ID NO: 155898 - DNA, 417 bp, Zea mays
  unsure (1)..(417): unsure at all n locations
  Clone ID: MRT4577_73763C.1
cgggtccggctaaagtacacatgacgctgcattacaatggggcggagcgagactcgctgctgtcatttacacaggtctgctggtaatgaactcggagcaatgattaaactggctaacacctgataattaattaaaccgactgttaaaacccaagccacgattcttggtctgacacagggacggaagtaggggcgccgttggcaaaccggcggagcgagcgagcgaacgagagatcacatgacggagcaggcgttggggttctcgtcgttgaacatctgaggcgcgtggaggggggcggggccgtacccgtaggctgtcgggggcggntaatggacaccggcgttggcgtaaaagccggcgtggttaggcggnggagcggcgccgtagtagccgccgggagccggcgggtacggtatg

SEQ ID NO: 155899 - DNA, 1164 bp, Zea mays
  Clone ID: MRT4577_73764C.1
gtggacgccggaggaggacctcgtcctcgtctcctacatccaggaccacggccccggcaactggcgcgccgtccccaccagaaccgggctgatgcggtgcagcaagagctgccggcttcggtggaccaactacctccggccgggcatcaggcgcggcaacttcacggagcaggaggagaagctcatcgtccacctccaggccctcctcggcaacaggtgggcggccatcgcgtcgtacctgccggagcggacggacaatgacgtcaagaactactggaacacgcacctcaagcgcaagctgcaggccggcggcggcgacggcgacggcgacggggcggccaagccgccggcgcacaggccgccgccgtccaactccaaggggcagtgggagaggaggctgcagacggacatcaacctggcgcgccgcgcgctccgcgaggcgctcaccccgctcggcgacctcaagccgcagccgcagccgcagcgcgacggcgctggcgtgggcatcgtcggcggtgacagcccggcggcctcgagcttgtcgtcgcagtgctccccgccgccagcgcctgccgccttggggacgtacgttctcaccgcggacaacgtctcccggatgctggacggatgggccggcttgaacgggaagcgccgcggcggggctccgggcacgcccggcggcgccgagaccgcgtccaccgggtcctcctcggaggtgtcgtacggcggtggcaccgccgtcgtcgcgccggccgctggtggcccggtgttcgagtacgagacgaagccgccggccgcgccgttccagctgatgatgccgctgtctgcgatcgagtcgtggctgttcgacgacgacacccacttccaccgtcctgtccagagcgccagcttgctggacgccgcccccatggattattacctgttgtagctagcgtgtccagcagctgatccagaccaagctaatccgttcaagcaaggaagtcggtggctgattagtcggctagctagctacctgtttctaaagttgttagttttcattatatttagccttttcttttctaggtgggtaaaagttgagtgcgtacttccccttgtgcaagctgcatgttgcatgggaaaataacatatatagctcttgcttgagacccaaaaaaaaattaccac

SEQ ID NO: 155900 - DNA, 1849 bp, Zea mays
  Clone ID: MRT4577_73765C.1
aattcggccggaccaccttggacccctgtcctcaacctcaagccgccacgcaccaccaacacacgcgcgctggcttcttcaacctcggttgctcgctcgcaacaagacacggatcgtcagagcaagagctctggtgacctgacgattctgctcttgttctcgtacggcgccggtgcctagcgtctgtagcctttttgtgtgtgtgttttttcgcccatatctctccccaccaccaccaccaacctagctcagccgcagttcacccgcgtcaccgcacgagtacacgagcaatccgcaagcgataacctgcaagctgaggggccagctgttttgctcacggagaaagaggttctagctagtcgttcatcaacacggacacaccatggtgaggccgccgtgctgcgacaaggagggcgtcaagaaggggccgtggacgccggaggaggacctcgtcctcgtctcctacatccaggaccacggccccggcaactggcgcgccgtccccaccagaaccgggctgatgcggtgcagcaagagctgccggcttcggtggaccaactacctccggccgggcatcaggcgcggcaacttcacggagcaggaggagaagctcatcgtccacctccaggccctcctcggcaacaggtgggcggccatcgcgtcgtacctgccggagcggacggacaatgacgtcaagaactactggaacacgcacctcaagcgcaagctgcaggccggcggcggcgacggcgacggcgacggggcggccaagccgccggcgcacaggccgccgtcgtccaactccaagggccagtgggagaggaggctgcagacggacatcaacctggcgcgccgcgcgctccgcgaggcgctcaccccgctcggcgacctcaagccgcagccgcagccgcagcgcgccggcgctggcgtgggcacgggcggcggtgacagcccggcgccttcgagctcgtcgtcgcagtcctccccggcgccagcggccttcgccgccgccgccgcggggccgtacgttctcaccgcggagaacatctcgcggatgctggacgggtgggctggccggaaggtccgcggcggcgggaccccgggcacccccggcggtgccgagagcgcgtccacgggatcctcggacgcgtcggaggtgtcgtacggtggcgccgccgtcgcatcggccgcgccggcgcccgcttgtggtgggccggtcttcgaatacgaggcgaagccgggcgtgccgacgtcccatcagcagatgccgctgtcggcgatcgagtcgtggctgttcgacgacgacagccacttgcaccatgctgtccagagcgccagcttgctcgatgccgcccccatggattaccccttctagctctagtgtgtccaatcgatcaagctcaagctaatcccttcaagcgaggagtgtgattacagcgctgtctcctaaagaaaactacacagatcctgcagtacgacgtcggtggctgattaatcgatcggctaggtagctgattcagatcggtcgcttgatcaggttgtttacgtgggatctgcgtagttttcatttagattccaaagaacataagtagaaccacacttatgatataaccacaactatgacgacgacggagtatgttcttgggcctttttttttactgttttctagccttttctcccaagtaaagcttgggggtacgtagtagatccgcttgtgcaagttgcatgttgtgtggaaaaataattgactccagtaatcctatgtcacatacatgtcataaattgtatcgctatctctaacatagcagatattttaagttcccaaaaaaaaaaaaaaaaaaggccccta

SEQ ID NO: 155901 - DNA, 610 bp, Zea mays
  Clone ID: MRT4577_73766C.1
cattcttcattgtttatgaccaacgaattcaacagtaacgactggtcccatagacaaaatcatgttagcaggatacaccctcagcatggaaatgcactgaaaagctccaccaaaaatttcatgcagaggccaagcattggttgcagggagactcaatatgggtttccagctaaagaatccaagttaggagcaagtctcaatcattctacaggtccaagagaaaaaacttgtggaaaattaactggcggttttgataagacagcacaacagctttatttggacagagacctatccaatgctcttaacagcagtgaatcaatacgttgtgagacgagatcaatttcctcttctgaaccgacaactccaaagtctttaaaaggcaattatacttcagagtctggtgaatcaacagatattacaataggagctcttcccatgcagaaaagaagattgcaggatttagttcgaactgatgatgccagtgaaactatttctgggcgatcatcacctttgtctgagtcatcgacaactgaattaattgctggacatagtacagattcatctattgagggaaccatggctgtcaagggctctgtaactttagaacaca

SEQ ID NO: 155902 - DNA, 367 bp, Zea mays
  Clone ID: MRT4577_73767C.1
agggcccgtgacaagttatcctgcatgaacgaaccccaaataatgacattggtaacttaaaaggaaacccctggtggagggttcttgtggggatcaaacgaaaaatttacccagctgtacccgtaattttttacctaccccgatggaggtttggaattaagatacttcgggtcgacaaacatacatgtggctggacaaacaagcttgtgacttggaggactaccttaactctgccggatggaaggttttggaccgattctctaagggacacatgaatatttttgggtccaccacccccgaggggttcctgaacagaatgtttagggcaggacgggctggcccatatgtcaacgaaggtagggtgggt

SEQ ID NO: 155903 - DNA, 124 bp, Zea mays
  Clone ID: MRT4577_73768C.1
gattgacgacgttggcaatagggtgtcatgggtcgctgtggccggtccatcatcgcaggtggacgcgatgggggagtcggaactggacgatactgggtcaaaggctagttctaacagcaatgtc

SEQ ID NO: 155904 - DNA, 438 bp, Zea mays
  Clone ID: MRT4577_73769C.1
cgaagcacgatggactcggttatttcttaaaattgggaagaatataatggatatggtgagattacattttcaggcaaactatatatatatagtatttagagccctgagctctctctaactattggaagacccgaccagcaaaccactatgtgcgcggaccgcaccgtactgaccatgtgcgcagactttttggctcactgtaccacctacttaattataactacgtgttatgctcaattgtggtttacacacttttttggtatgcgcatgttgtacacaagtttacgcttattttgtcatactgtctgaaagcacttcctgtactatcatataaaatcgaccgcgactactgctttgcccgaaaggactacggtttcagcggcagcggctgccgagccccattccccgatctgaagcacctcaaaccacggctctgcc

SEQ ID NO: 155905 - DNA, 201 bp, Zea mays
  Clone ID: MRT4577_7376C.1
cctctacatgtgttcatgcatgcatgcgcgcacgtattccaaaggtccttcgtgacaaagcacgtctcttacgcatgcaacttgcaacctcacgaaagcctacctcagcgcgcgcggaaacgacacaccctttccatgaccatgagtccatgaccataactgcactgcatggatggttgcacatccttctggcatcaaaga

SEQ ID NO: 155906 - DNA, 295 bp, Zea mays
  Clone ID: MRT4577_73770C.1
tcatccccgcctccgccagctttcccgtggccgggacgccacccccctctcttgtatttcccctcgcattaatggccgctccctcgctatcccctttggcgtgtagattcatattgcccccttccggcttaaccctcaagatttcttccttgatgctccttctttccgcttgggcgggcgcgggaccttccggttccggtttcccgggcctcgggccttggcctcatatatatatacacccgcccggccggcccctttgtataccccctaacatgctcggctcggttcccggatt

SEQ ID NO: 155907 - DNA, 363 bp, Zea mays
  Clone ID: MRT4577_73771C.1
attcggctcgaggaatgtacgaagcggcacatgttagagtgaatggtgaagaaatacttgacaatattctcattcacaccaagagacagcttcaatgtattgtagacgatctcgaaccaacactgcaagaagaagtgagatatgcattggagacacctcttttcagaagactcaacagagtacaggccagacaattcatctcaacatacgagaaaagcactacgcgtaacaatatgctcctggagttctcaaagttagacttcaacatcttgctcaccctatactgtgaggagctaaaagatcttacgatgtggtggaaagagttccaagcacaggctaacacggcaatctatgcacgagata

SEQ ID NO: 155908 - DNA, 1731 bp, Zea mays
  Clone ID: MRT4577_73772C.1
gctgtcggccctgccttctcgtcagaaaccacgcccccgaatcccgagcgcgtcgacccgccgaaaaccatctgtttgccgggtctgaaaatcgtcgcagctgctttggcagccagatctcaatcatgtttcaccaactcacttgcagctgtgatttggtttcggtttttgggactgtctgtctgcagctctacagctggttccatcttgcatgcatggtgccaagaatatgaccaagatgctgcttctgcctctctctctctctctctcagctgctagtggcatcctgacaagcaagcagctggcatcttcttcttagtccagtctttttctctctaccttttcttttaatcttttttttctggtgacgcgtgacaagcaagcagctggcatcttgaaatcgttatcgcagctatttcattgcgtttgtaattcctactaagacaatagaaaagaatagaaaaagaaacaagtaaataatgtgccctgccgttccccccacccacctcaaccgcagggctgcgacgccgccgtcctgatcgcgtccaagaacaacgacgccgagaaggacgcgccggacaacgagtcgctcgccggcgacggcttcgacaccatcaaccgggtcaaggcggccgtcgagaagaggtgccccggcgtggtgtcctgcgccgacatcatcgcgctcgccgccagagacgtcgtctacctggtaaccgccgtcaccacccccttcatgtctcgagtcagtcagtcagtcccgtcgtcgtccctcgaccagctggtgacgtatcggtattcggtggtgacgaactggcaatgcaggcggatggcccctactggcgcgtcgagctcggccgtctggacgggctcgattccagggccagcgacgtcaaggggaagctgccggacccggacatgcacgtcaaggacctcacgccggtgttccagcggaacggcttcacggaggtggacatggtcgcgctctccggcgcgcacaccgtcggcttcgcgcactgcagccgcttcaccgacaggctctacagctacggcggcgcgcggacggacccgtcgttcaaccccgcctacgcgtaccagctcaagcaggcgtgccccatagacgtcggccccaccatcgccgtcaacatggaccccgtcagccccatcaggttcgacaacgcctactacgccaacctccaggacgggctggggctcttcacctccgaccaggtgctctacgccgacgaggcgaccaggcccatcgtcgacatgttcgccgccagccagaaggacttcttcgatgctttcgtcgccgccatgctcaagctggggaggctaggggtgaagacggggaaggacggagagatcagaagagtctgcactgccttcaaccattagtagaggcctctcctgcgtgcagcagcgtttgtaatccagattatctcaagctcatgctgtttggagttcgatcgagatgcgtatactgagattgatgattgatcatttttctttttcttcttttttgttgcatacacttgccaaagcttgaaggtgttctttctcctctgtttcttcccttttttttccttttcttctttaataacctttttaccttactttttttgggtgcaatttttgtacagactgaagagtgtaataccatgaacaacttgaagatttttaattgaaaaaggttaatctgactaaaaaaaaaaaaaaaaaactggagactag

SEQ ID NO: 155909 - DNA, 886 bp, Zea mays
  Clone ID: MRT4577_73773C.1
ttcctactaagattgggtacaagaatccggaaagaaacagtaaataatgtgccctgccgttccccccacctccacccacctcaaccgcagggctgcgacgccgccgtcctgatcgcgtccaagaacaacgacgccgagaaggacgcgccggacaacgagtcgctcgccggcgacggcttcgacaccatcaaccgggtcaaggcggccgtcgagaagaggtgccccggcgtggtgtcctgcgccgacatcatcgcgctcgccgccagagacgtcgtctacctggcggatggcccctactggcgcgtcgagctcggccgtctggacgggctcgattccagggccagcgacgtcaaggggaagctgccggacccggacatgcacgtcaaggacctcacgccggtgttccagcggaacggcttcacggaggtggacatggtcgcgctctccggcgcgcacaccgtcggcttcgcgcactgcagccgcttcaccgacaggctctacagctacggcggcgcgcggacggacccgtcgttcaaccccgcctacgcgtaccagctcaagcaggcgtgccccatagacgtcggccccaccatcgccgtcaacatggaccccgtcagccccatcaggttcgacaacgcctactacgccaacctccaggacgggctggggctcttcacctccgaccaggtgctctacgccgacgaggcgaccaggcccatcgtcgacatgttcgccgccagccagaaggacttcttcgatgctttcgtcgccgccatgctcaagctggggaggctaggggtgaagacggggaaggacggagagatcagaagagtctgcactgccttcaacattagtagaggcctctcctgcgtgcagcagcgtttgt

SEQ ID NO: 155910 - DNA, 235 bp, Zea mays
  unsure (1)..(235): unsure at all n locations
  Clone ID: MRT4577_73774C.1
tnnttnntataaggacacatttttccacttccattttggaggggaaacccccctaaaaataaggggttcagggttttacaggggtggtatgggaaacacacacatgctttccatcacaacttttctttacatacaattggtaaacggaagaatatgaacccctccggggcccggggcccataaagaaaaaattaccggtggttgatctttaaaaacgggaggggcgggcccaaag

SEQ ID NO: 155911 - DNA, 2168 bp, Zea mays
  Clone ID: MRT4577_73775C.1
atgagcgaaaattctatatataccctcagtccctgttcctggggccctctccaagctagcagcacgagttgtcgaacacttgcctgctcttgagctcaagctatcatcagctgcgtcttgtgcacagcaacagcttcccaaccgcgcgcaactgtaccagcgaaactaccaactgccatatggaggcccagaacgtggaggttgctgccctggtgaagaagatcgcggacctccacgccgacatcaccaagctgccgtcgctgagcccgtcccccgacgtcaacgcgctattcaccagcctcgtcatggcctgcgtcccaccgagcactgtcgacgtgaccaagctcagcccggactcccagaggatgcgggaggagctcattcgcctctgctccgacgccgagggccacctcgaggcgcactacgctgacatgctggccgccttcgacaacccgctcgaccatctcggccgcttcccatactttagcaactacatcaacctgagcaagctggaatacgacctcttggtccgctacatcccgggtctcgcgccttcccgcgtcgccttcgtcgggtcaggccccttgccgttcagctcgctcgtgctcgccgcccgccacctgcccaacacgacgttcgacaactacgaccggtgcgccgccgccaacgaccgtgcgcggaagctggtccgcgcggacaaggacctgaacgcgcgcatgtccttccacacggtggacgtagccaacctgacggatgacctcggcaagtacgacgtcgtcttccttgccgcgctcgtcggcatggcggccgaggacaaggccaaggtggtcgcgcaccttggcaggcacatggcggacggagcggctctcgtcgtgcggagcgcgcacggggctcgcgggttcctatacccgatcgtggatcccgaggacatccgtcgtggcgggtttgacgttctgacggtgtaccacccggacgatgaggtgatcaactctgtcatcatcgcgcgcaagatcgacgcccatgcaaacacggaggtttctgccctggtgcagaagataaccggcctccacgccgccatcaacaagctgccatcgctgagcccatcccccgacgtcgacgcgctgttcacccgagctcgtcatggcctgcgtcccaccgagccccgtcgacgtgaccaagctcggcacggacgcgcagaggatgcgggaggagctcatccgcctctgctccgatgccgagggccaccttgaggcgcactatgccgacatgctcgccgccttcgacaacccgcttgaccatctcggtcgcttcccttacttcaacaactacgtcaacctgagcaagttggagtacgacctcctggtccgctatgtcccgggcatcgcaccttccagaatcgccttcgtcgggtccgaccccctgccgttcagctcgctcgtgctcgcctcccgccacctgccgaacgtgatgttcgacaactacgaccggtgcgccgctgccaacgaccgtgcacgaaagctggtccgcgcggacgagggcctgcgcaagcaaatgttcttccacaccgccgacgtcgccaacctcacggacgagctccgcaagtacgacgtggtcttcctggccgcgctcgtcggcatggcggccgaggacaaggccaaggtggttgcgcaccttggcaggcacatggcggatggagcggctctcgtcgtgcggagcgcccacggggctcgagggttcctgtacccgatcgtcgatcctgaggacatccgtcgcggcggcttcgacgtgcttgccgtgtaccacccggacgacgaagtcattaactccgtcatcgtcgcgcgcaagatcaacgcccacgtgaaggggcttcaggatggacacgcgcatgcgcgcggtgcggtgccgatagtgagcccgccatgcaagtgctgcaagatggaggcgaacacgctccaccaaaagagggaggagatggcgacggcgtaggtgtccatctgatgcatggaacttttgaggacccgcgccacgtggtaacaataattacgaatcgctgtttcaatctctcgtgtaactgttgttgtcatgccttgtgtgtaagtttttaataatgacgtgattttcctatgtgatgatatatgcaagttttgccaccactttttatgtgacgt

SEQ ID NO: 155912 - DNA, 385 bp, Zea mays
  unsure (1)..(385): unsure at all n locations
  Clone ID: MRT4577_73776C.1
tgtttaagctcatgttgctgtccaaatgtgcatcttgaggaataccgcncncggctctctctctgccttccgccctggctggccnccctctttncccggcctgcgtgggttgccctcctcttcctcgcnccgnctgccccccttgttcggggggggggggtgtgttgcttcgcccgtcttnnccccgggctgcccccngccgcctcgccggccttgcgtcgtccggcccgccgcggccggggccccccccccccccccgccgcgggtgcggcgcctcccccctccccccggntccccgcgcgtgcnnccccgcccccccccttccttccccccggggggcgtctgctcggccnccctccccccccgccctcccccctgctccggg

SEQ ID NO: 155913 - DNA, 269 bp, Zea mays
  unsure (1)..(269): unsure at all n locations
  Clone ID: MRT4577_73777C.1
gtgttttttttttttttttttttttttttttgggttttttttttttttttttnattaaaaaagatttatttccccaaaacaaccattcatactccttttttggagggttgcacttgggtttagcctaatttggttgcaaagctcgggggaggaggggtgcccataaacattctttaataattcttaaatgagacaaaggggggggggatggtnggccttcatttacatcaaaagccccaagaaattttatatcggggttccatttttac

SEQ ID NO: 155914 - DNA, 315 bp, Zea mays
  unsure (1)..(315): unsure at all n locations
  Clone ID: MRT4577_73778C.1
cctcatttctccatccccttcccgccgcattttctataccgtcgccgaaaaaaatntttggcgtgattttttaccaacgtaggggtgctaaacccntnttaaattcccacacccaccaccgtaatgtcccctcccttttcctttccttctactttttcaagctcatcttttacctaaattactttttcaccgacttaattcacaaccccttccttttcacccctttcttcaatttcactttcctccacccattcagttacaatcaccatatattattctttttctcatcctttctcatttacactttccattttt

SEQ ID NO: 155915 - DNA, 885 bp, Zea mays
  Clone ID: MRT4577_73779C.1
gcgtgccataaaaggagcggatacagttcatcgtctatctgtgcatccattcagacgtatccagcggggtgcggtgcgggtgcacctcgacgccggccatcgcgttcggcgcctccgtggcctgctggtacgagcacctcagccgcaccgtcagcatcgtgctctgcaagcaccaccgcctctgggagctcgccttccgcgtcttcaccctctacagggtacggacgtacctgatggacggcttcttctgccacacgcacatcgcgtcgtggcacaccctccacaacatcatctgcggcagcgcgggcaagatcgacgggtggctcgaggtggtcagggaccagctcgcctgcgacgtcaccgtctaccacggcagcgacgacgagctcctccccgtgcagtgcagccacgcggtcaaggccaaggtcccgcgcgcccaggtcagggtcatcgacggcaaggaccacgtcaccatcgtcgtcggacgccagaaggacctggccagggagctggaggagatatgggacaggagacggtgaggttgctgggtgggtggtttataggatgaacgaagccacagcctgcaaaaggatgtgtcttattacgaaagaagaaaatgggtgccaacacgcgacaacgagtttcctaatggaggctacaggaacgaaatataagggcaaaagggttcgagagagagagagatgtgaagagtacttaattacatttaccctttttttatgtcttggacttgttctcaggttttcatattgaaggccgagaaaatttcttgcccggcctgtgtgtaattatgatataaatgattagtcgtttcagactttcagttgtaatccctgaacagaatgtgacatgaaccggtttgtggtg

SEQ ID NO: 155916 - DNA, 887 bp, Zea mays
  Clone ID: MRT4577_7377C.1
aggacatctactgctccctcgacctcaccggcgcgcgcccacgcgtccgggcggcggaggaggacggcgacaaggacaagaaggacggcggcggccccagcaagcccggcgagaagaaggacaccagcagcaaggtgacgctgtcgggcctgctcaacttcatcgacgggctgtggtcggcgtgcggcggcgagcggatcatcgtgttcaccaccaaccacgtcaagaagctggacccggcgctcatccgcagagggcgcatggacaaacacatcgagatgtcctactgcggcttcgaggcgttcaagttcctggccaagacgtacctcgacgtggactcgcaccctctgttcgacgccgtcggcgagctactccgggaggtggacatgacgccggccgacgtcgccgagaacctcacgcccaagagcctcgacgacgggccggactcgtgcctcgcggacttggtgaaggcgctggaagaggccaagaaggctagcggagccggagaggatgaagaggaccagcaatatgagccatgaggaggaaaagctctagattattcagttcattattactgccagtttgtcgttagtcggtaactctgctgatttgtctgctgtgctacagtagtgcagaggctaatgataaaagttacccctagaataaattaattagctaggggtttgtgtttgtctaaatttatcttatcctagagaagagaagccccgttcttttttttctataaataagtctagataagacagtttttttccataaaagctgttagttcccctcgccacatgagagaatcggtaaacctcaaaatactaactcttttaaactttttatgatggattgaattcaaactaataaaaaaaaaaagaacg

SEQ ID NO: 155917 - DNA, 449 bp, Zea mays
  Clone ID: MRT4577_73780C.1
aaagaggacaaaaaggggctgctaccggtccgtattcccgagattcgatctattttaatacactaataacccaatgccaagtgtaacttaacctggggtggcggataaaaaatcacacataacataacaatctattaacgtattggcatgacaacaacatttgctatgcaactctgaatggcctaactcatcactcaacaacaaattaacatggattttcacttcgatcaatatcccacataacaccacaaaaaaagctaacccatctaacgtcgcaacgtcaggtaaagttcatcaccagtctcaaatgcttctgactgaattaatcaaatccactaatgcatatgagcatgaaatctgcaacaagctctttatacaaaatactatctaatttttacagtaatatttacaatccatccacatatttcaccagacacactgaataattt

SEQ ID NO: 155918 - DNA, 281 bp, Zea mays
  Clone ID: MRT4577_73781C.1
cagaggcgtccgcagcgacacggtcctcaacgtcgcggtgtgcatcgcgcgcaacaactagcgcgactagttccagcacttgatcaaggacatgagcgtcaacaacgacgtcaggtaccaggaatggtacctggccttcaggctcgtcaacagggtcaccggcgaggccatcaggcattcccagggggagggccacctggtcaagatggtggcctacaaccccggttaccagctctagtcggtgctctggacggtcagccacgacttcggctacgtcttca

SEQ ID NO: 155919 - DNA, 1027 bp, Zea mays
  Clone ID: MRT4577_73782C.1
ccccgcgcgtttttttttttttttttttccagcaaggcaaacctgcatgcattaggtatacgaagcactctcttatggcattagcggtggcggctgtttttttttttttttttttagccaaaaacttggaagaaacatacatgtaccagacatactagataaaatgtacagacgaggtgactgacaaacgcatacacgactagagtcatggatgatgatggatctcggacgatacgtactaagcagtgacagaaattacaagctagcatgcacaaggtactacttactaactagtagtagatgagagagattcccgtttgtcaacttaatctgcagcatgtgttttgtcccactagtcccaaccaagcagtcccaggctcccagctcccaacgccaaccaagatgacgagggctcgtacttggccgccggagcgagctgcagctacctcctcctcatggcttgcccttgtgctgtgtgtagatgtagtcgaggtgcgcgttctggagcagccgtctctgcatgcaaccgtcgtcctcgtcgtcgtccgcctcgcacgccactgcaccctcctccacctccgccgccatcatctcatctccggagatggacagctcgtcgccgttgcccacgccaccttcctgcagcgccaggccgccgtatgcagcggcagcggcagccgtgacgccagtttctcggtgaaccaactgagctgggacaggagaaggcggcaggaggcgagccgctgctgagtagtggaagaaacagacgaggaggaggagcagggcagcagccgcgagcggcaagggcatgctgcagctgcgccgcctcatctctgccgccgtgccgggccggttgatgaactgctgaaaactagtgctgctgctgcgctagctgtcgaaggacgagagagagagagggggggctgtgtacgagttggatggagttcgtagtgagcgagcgagtgctggatggctgatgattgatgcctcagttggtgccgcctgcccggcccggccggactcgagg

SEQ ID NO: 155920 - DNA, 353 bp, Zea mays
  Clone ID: MRT4577_73783C.1
cccacgcgtccgaaaaaaaaaaaaatatataaaaaaaaaaaaaaataaaaaaaaaaaaaggaaaaataataagaaaaaaatagcctaaacaaaaaaaaaaaaaaataaataaaaaaaaatgagtaaatatatatagaaaggtcggctcctttcatggttcagacgtttatcaacttcgtttctggggtcttcattcttatttcgcgcaccctaatttgagtaagttgtccccttttaaaaaccttgcgtaatgtaaaaaatttgggtacccctagtttttccctttaggcacaaatcccttttcttgaattgccctaatctttgcacggcccataaatgtcggctttttaaaa

SEQ ID NO: 155921 - DNA, 973 bp, Zea mays
  Clone ID: MRT4577_73784C.1
cattgggtaccaactgaggcatccatcatcagccatccagcactcgctcgctcactacgaactccatccaactcgtacacagcccccctctctctctttcgtccttcgacagctagcgcagcagcagcactagttttcagcagttcatcaaccggcccggcacggcggcagagatgaggcggcgcagcggcagcatgcccttgccgctcgcggctgctgccctgctcctcctcctcgtctgtttcttccactgctcagcagcggctcgcctcctgccgccttctcctgtcccagctcagctggttcaccgagaaactggcgtcggcggcctggcgctgcaggaaggtggcgtgggcaacggcgacgagctgtccatctccggagatgagatgatggcggcggaggtggaggagggtgcagtggcgtgcgaggcggacgacgacgaggacgacggttgcatgcagagacggctgctccagaacgcgcacctcgactacatctacacacagcacaagggcaagccatgaggaggaggtagctgcagctcgctccggcggccaagacgagccctcgtcatcttggttggcgttgggagctgggagcctgggactgcttggttgggactagtgggacaaaacacatgctgcagattaagttgacaaacgggaatctctctcatctactactagttagtaagtagtaccttgtgcatgctagcttgtaatttctgtcactgcttagtacgtatcgtccgagatccatcatcatccatgactctagtcgtgtatgcgtttgtcagtcacctcgtctgtacattttatctagtatgtctggtacatgtatgtttcttccaagtttttggcttgatatcctctctctctctctctctctctgtctaatgccataagagagtgcttcgtatacctaatgcatgcaggtttgccttgctctatccctgcagcttggtttaact

SEQ ID NO: 155922 - DNA, 330 bp, Zea mays
  Clone ID: MRT4577_73785C.1
gacacaaaattctagcagaactgtagaaaacctcaggcttgttgggctacagacaaagaaggaaaacaagcatgaggcccttcctcctgttgggctgtatttgggcctcaacctcacgtggtaggcttcctgggctaacacaaacctcgtccctggccacaattatcagggcagaagcatcctccgtcggagttggaaattctattcgtaggcactttgagcaatttcgtcaaactgggcaaactcaggtatcatcctcatcctgatgcaaggtgactttctcaagcatagcactactctttttggaggagattcaaataaaggcatatt

SEQ ID NO: 155923 - DNA, 749 bp, Zea mays
  Clone ID: MRT4577_73786C.1
gtaccctcggagccgtccgggttttagccttttcgatgaagaggggaagagcatactaccaggaaactttgagcggcactggggaatcttctccttcgatggacaagccaaataccccctgaatcttgggctgggaaattcagtactgaagaatgccaaagaggttccgtaccttccatcacgttggtgtgtcgcaaaccctgctcgggatcttgacagtgtttcagatcacatgaagcttgcgtgtagcatggcggattgtacgactctgtactacggaggttcatgctatggcatcggggagaaaggcaatgtttcatatgctttcaacagctactatcagcagcagaagcaggacccaaagagttgtgattttggtgggcttgggatgataacataccttgacccatctatgggcgaatgccgctttcttgttggtgttgatgatagcaagagctctgcagtcgcctcttgtggcggtggatgctgcggggtctgctgtggactctgggttttagctttgtgggtgctcacgtaccttagaatgatgggttccgcttgattctcaaattgatatgcctttgtgccaatgtttagaaagattgtacaattgacttctaggtctaggaaggaatggactgcactgtcgccacatgagattaggaaaccaggatttatatatataatttaatttattgttgaagagattaggaaaccaggatttatatatataatttaatttattgttg

SEQ ID NO: 155924 - DNA, 1891 bp, Zea mays
  unsure (1)..(1891): unsure at all n locations
  Clone ID: MRT4577_73787C.1
gcgttcggccctgnataactaaccttaggcaaaaagttaggcaaagtgtggcaactgaggtaatgaaccaaactaccttaagactgactactctttattgatgaagcagcatcaaggacgcctgattgttttaagcttggaggccgttgaaagtcctcgtgagagcagttcgtttattccaacttttagttttaatccctcttcacattctggttctcctttccacgagattgttggatatacaactgaggaattttctagtaacagcatgtgcagcagtcctgatgagtttagctgcaaccagatccaagctgaacaaatgacagggcaattgagatcattgactcaatatatattgaatggcgcagttcttgctctgtgtccctatctagatcgttatgtgttggcagctgctggtaatatgatttatgtatttggtttcacaaatgaaaatccccacagaataaaaaagtgtgctgttggtaggacacgatttacaataacttgcctgaagacatttgcatcacgaattgctgttggtgattgtcgtgatggtgttctcttctattcttataatgagagtcataggaagttggaattggtctattctgatcctgctcatagattggtgggtgatattgctcttttaaattgtgaaactgctgtggtatcagatcgacgtgggagcatatctgtattatcatgcaccagattggaagtttcagaaagtccacagaagaacttagccgtgaattgttcattttatatgggtgaaacagccatgagcattcagaaggctgcattcaggtatcggcttccaattgatgatgatactgacccggtgcttgagacagtttacaactgtatcgtggcaagtaccatgttggggagtctctttgttatgattccactttcaagtgaggagcatcagcttttgcaagatgtccaagaaaaactctcagtacacccattaactgcaccggtcctgggaaatgatcatgcagagttccgtcagcgtggtaccccttcggtagtgcctcccattcttgacggtgatatgcttgtgcaattcttggagctcaccggtgaacaacagcaagccatccttactcatgctttgccagggaaggggcaacataggcccctctcggttttccaggttttgcaaacattagagcgcgtccattacgctcttaactgaggctttcttcaatcacagttactacaaggtttggatattagagctggttgaccttcattgtttgagatgccgtcagagctgaggttttagtgaccttcgcaatctagacggccgattccaagtctgccatgatatttatcagaacgtttgattgatgatgcaactggagcttgatactgggaagtctcatggtggcgagtatcccgtggaggcaccagattcgtcgaacctcctgtgtatatacagtcggccgcttttggtagactgttgtatggcgcattctgcatagaaacgaatattctttccgtttgtttcaatagataatgtaatgtttcttacgtcagctggtcggatgctcaacgagaaataagggaaacaatgaattgcattggccgtcctgctctatcacatgccattactgattagggatgaatgcatgcaccagctgccgcagcgatgatcttgccgcggcagctcctggtcagggctcctggtcagggacggcgcccacggggacgcagcgagcggtgatgtctggcagtgagttggttgcgattctcggcaaggtagaaacgtagagcagcttggggctttcatattgtgctaacagggaggctacgaggcttttgattgtggcctgtgactcctaanaactaaaaggcanaccaaaagtctgcttttcaaagcagt

SEQ ID NO: 155925 - DNA, 355 bp, Zea mays
  Clone ID: MRT4577_73788C.1
ctcgagccgattaaaagggcctgtttggtttgtggctaaatgtgccacactttgcctaaggttagtcgttcgaattgaataactaaccttaggcaaaaaagttaggcaaagtgtggcaactgaggtaatgaaccaaacataccttaagactgactactctttattgatgaagcagcatcaagggacgcctgattgttttaagcttggaggccgttgaaagtcctcgtgagagcagttcgtttattccaacttttagttttaatccctcttcacattctggttctcctttccacgagattgttggatatacaactgaggaattttctagtaacagcatgtgcagcagtcctgatga

SEQ ID NO: 155926 - DNA, 159 bp, Zea mays
  Clone ID: MRT4577_73789C.1
cggacgcatgggatgaagcacaccctggagatcatccacctgctcactgacgccggtgctatccaggtggtggtggacgccattatcaacagtttaccacgtgagtatgccacccgtattggtacacctggtattgcttgaacgcgaccttttacattt

SEQ ID NO: 155927 - DNA, 2336 bp, Zea mays
  Clone ID: MRT4577_7378C.1
gacggctcaacctttgcatcagtttccatcggaacagatttttcctcagtatcttgtggtccattttcagctgcatgagcagcctcagcggtatcagcgcttttaggctcctgcatattcacatcagatgcaacagcaggatcacttggtgcatcatctgtgtccatcttcatagtatcatttggagcttcatttgcagatgaaaactggaacttccacatcatcctccagcattattgctgaatcaactgtaacggccccactgaacattgagtgtttgatggatgagaaggatgtgcggggttttattaaaagggaggagtttgaacagatcagtgcctcggtgctggaacgcgtgaaagggccactggaaaaggccttggctgaagctgggttgactactgaaaatgtgcactttgttgaggttgtcggatctggttctcgtgttccggctataatcaagataattactgatttttttgggaaggaaccaagacgtaccatgaatgcaagcgagtgtgttgcgcgaggatgcgctcttcaatgtgctattctcagccccactttcaaagtgcgagaattccaggtcaatgatgggtttcctttctcaattgcattgtcatggaatggagactcccagaatgcaccccaacaaacccttgtattccaaaaggggaatgcaattcctagcactaaagctcttaccatctttaaatccagcacatttgaagttgatgttttgtatgtcgacccagataactcacaaattccacaaaaaataagcacttacacaattggccctttccaaacctccaacggagagaaggccaaactgaaagtgaaagtgcgtctcaacatccatgggaccgttacagttgattcggtgataatgctggaggaggatgtggaagttccagtctcatctgcaaatgaagctccaaacgatactatgaagatggacacagatgatgtgccaagtgatcctgctgctggatctgatgtgactatgcaggagcagcctcctgcagctggaaatggagcacaagataatgaggaaaagtctgtttcgatggaaactgatgcaaaggttgagccgtcaaaaaagaaagttaagaaaactactgttccggtccatgagttggtctatggggccttggctgcagctgacctgcagaaggctgtagagaaagagtatgagatggctcttcaagacagagtaatggaagaaacaaaggagaagaagaatgctgttgaagcttatgtgtatgacatgcgtaacaagctatatgacaagtacagtgattttgtcacacctgaggacaaggaaggtttgatcggtaaacttcaggaggttgaagactggctctatgaagatggcgaggatgaaactaagggggtttatattgctaagctagaagaacttaaaaaagttggtgatcctattgagctgcgcttcaaagaatgggagattagaagttctgctgttagccaactggtatactgcataaaaagcttcagagaagctgcacagtctaccgaccagaagtttgaacacatagacatgtcagaaaagcaaaaggtcattagcgagtgttcggaagcagagacttggctaatggagaaaaggcagcagcaggatgctctgccaaagcatgctaatccggtcctccttgctgctgaccttaagaagaaagctgaaacacttgacaggttctgcaagccgatcatgacgaaaccgaagccagttcctaagccacagactccgcctccggcagaaacccaagctcctgagcctcagacaccggagcagcagcgatcaaatggcgaaagcacaaccagcgagggagctgcagaggagcctccagccgagcagatggagacagacaaacctgagggagccacagatccctcggcttagctttgcaggtgatggaacatttgtgtgattgaccttatacttggttgggggtgaactaagcaagatggttgttcgccacatttgagaatgtgtgttgggacgttttttcgttatttctgtttcttgacggaggtggttggatggttgaaggatgagagcagtagggtacacttcgtaaatggcgattccgaatttttcgtgtttgtttaatactttgattgtaaaaggtctacttgtttttttttgttgctggagaagcatcaggatccgcacatttcgttcgaattaacataagttaagattaattatttatccaaaaaaaaaaaaaaaaaaaaaaaaaaaaaaaaaaaaaaaaaaaaaaaaaaaaaaaactcgggggcaccccccccccccccaccccccaaccacaccccccacc

SEQ ID NO: 155928 - DNA, 687 bp, Zea mays
  Clone ID: MRT4577_73790C.1
ccgattccaagtctgccatgatatttatcagaacgtttgattgatgatgcaactggagcttgatactgggaagtctcatggtggcgagtatcccgtggaggcaccagattcgtcgaacctcctgtgtatatacagtcggccgcttttggtagactgttgtatggcgcattctgcatagaaacgaatattctttccgtttgtttcaatagataatgtaatgtttcttaaaaaaaaaaaaaaaaacattgccagggaaggggcaacataggcccctctcggttttccaggttttgcaaacattagagcgcgtccattacgctcttaactgaggctttcttcaatcacagttactacaaggtttggatattagagctggtcgaccttcattgtttgagatgccgtcagagctgaggttttagtgaccttcgcaatctagacggccgattccaagtctgccatgatatttatcagaacgtttgattgatgatgcaactggagcttgatactgggaagtctcatggtggcgagtatcccgtggaggcaccagattcgtcgaacctcctgtgtatatacagtcggccgcttttggtagactgttgtatggcgcattctgcatagaaacgaatattctttccgtttgtttcaatagataatgtaatgtttcttaaaaaaaaaaaaaaaacattg

SEQ ID NO: 155929 - DNA, 883 bp, Zea mays
  Clone ID: MRT4577_73791C.1
attggtacctcgagccggcgggatgttggtatcaactgaggaattttctagtaacagcatgtgcagcagtcctgatgagtttagctgcaaccagatccaagctgaacaaatgacagggcaattgagatcattgactcaatatatattgaatggcgcagttcttgctctgtgtccctatctagatcgttatgtgttggcagctgctggtaatatgatttatgtatttggtttcacaaatgaaaatccccacagaataaaaaagtgtgctgttggtaggacacgatttacaataacttgcctgaagacatttgcatcacgaattgctgttggtgattgtcgtgatggtgttctcttctattcttataatgagagtcataggaagttggaattggtctattctgatcctgctcatagattggtgggtgatattgctcttttaaattgtgaaactgctgtggtatcagatcgacgtgggagcatatctgtattatcatgcaccagattggaagtttcagaaagtccacagaagaacttagccgtgaattgttcattttatatgggtgaaacagccatgagcattcagaaggcaagtattttgttgttccatagattgttaatttattgatgtgcattcactacaccttgcctttttgcatttgtcccttctaaaaatttcaaactacaccgcttccatggttcatgtgaccatgtctgagacattcgttaactcatgcttatgatttattgtaggctgcattcaggtatcggcttccaattgatgatgatactgacccggtgcttgagacagtttacaactgtatcgtggcaagtacccatgttggggagtctctttgttatgattccactttcagtgaggagcatc

SEQ ID NO: 155930 - DNA, 210 bp, Zea mays
  Clone ID: MRT4577_73792C.1
ttagactagagcggatagcgggtcagccatggccaccgccgtcgcgtctagcctgctcaagtcctccttcgtgagctcccgggtcccggccgccacgcggaccaaaccggcagacctagtggagggcaccggcccgcgcggggccagagtgggggcccatttgcgcgggggggtgcatggtcttctacaaccggccctacgacctgactg

SEQ ID NO: 155931 - DNA, 217 bp, Zea mays
  Clone ID: MRT4577_73793C.1
tcgtccaatcgtgccgaatcccattccagttgaaccttacactcaacccaaaggcgactcttgatgagggcggtgatgacaaaaaccaacgccgtcaccaaaactatttagagggatctggagggaacctcctgcgttgggcggatggtttaatcaacttgaagccattttaatttagaaagctttgtgagggacatcctgcacgagttcaggaata

SEQ ID NO: 155932 - DNA, 453 bp, Zea mays
  Clone ID: MRT4577_73794C.1
gcgtgagctgggatcctatagtgcggtcgacctatgcgtctgcagaagtgcatttcttatttatttgcgaattttgttgggtagactgtttagttacttgagagcccgtgtacaatatgccgggcgaggattaaatttcaagcaataaatgtctgtgtgcctgaattgcaactaaggttttggtttgcaaatggaatggatggacatggttgggaagcctaagagaaactaacaaacatatttgctataaagtttaaaacctgagatctggcgttatatatgcatctgcttggcataccttgcggactgtaacttcaaaattgggatgcttctggcctggttgttaatttaggaggctggttctaatttcactcgcatgttttgtttgcaggatttgagaaggacatgcccaagcttggggaccgagaagcatgcgttggagcaagaagccta

SEQ ID NO: 155933 - DNA, 182 bp, Zea mays
  Clone ID: MRT4577_73795C.1
tcggctcgaggtataattcctaaatcatggtggtgaagatgatctgtcccgaggttttgtggtgttattagagtttcctgacgacgaaaatatggcgaagaatgtttgggatgtaatggataatgaaccgtgtgcatgatgatgtaaaaaatgagaaataaattgcagggaattatattcgc

SEQ ID NO: 155934 - DNA, 1275 bp, Zea mays
  Clone ID: MRT4577_73796C.1
atggactgctgcacacaacttgtgggactccaaactatgttgcaccagaggtaatgctagaagagtacataaaatgaaccgataatgcatattataattactgctcgttaggaatgcaatcatttaaatatttatatcaactttgttataggtccttgaagatcaaggctacgatggagcaatggctgatctgtggtcatgtggagttatcctgtttgttctgctagcaaggtatttgccgcgttgaggattctaatctcatgactttgtataagaaaatatcaaatgcagaatttacatttccaccatggacatcttttcctgccaagagagaataacaatcccagaaatattagaggatgagtggttcaaaaagggctacaagcgcccagaatttgatgaacaatatgacaccacattggatgatgtggatgccgtcttcaatgattcagaagagcaccatgtgacagaaaagaaagaagaagaaccagtagctctgaacgcatttgaactgatttcgatgtcagcgggcctaaaccttggaaatttatttgactcagagcaggagttcaaaagagaaacaaggtttacatcaaaatgtccccccaaagaaattgtccgcaagatcgaggaagctgcaaaacctctaggatttgatgttcagaagaaaaattacaagttgaggctcgaaaaggtaaaggcagggaggaagggaaacctcaacgttgctactgagatactgcaagttgcgccctctctccacatggtagaagtccgaaaagcaaagggtgacactctggaatttcataagttctacaagaacctttccaagaccttgaaggacgtcgtctggaaatccgacgatcttcaaacgcaacatgcttcttagcagaacctcagagaggaggaatggcaaactattttgtgcaccatcctttcaagcaaactattctgcatgtaacggtgggtgcccaggaaattgcgctggtgctccaccatcgttgtatatgctgcgtcttgagttgcttgctgtagctgaagggaagttcattcagtaggttttgagtatgagttttgtatatccgtatatgcctatgactatgagccgtgctggaacactatgatcagaaactgcgaaatggagcccagaatgttcttgccaaaaaaaaaaaaaaaaaaagcggccggccgacgccgtcatcgacgccgaggccaggagaaggaaatggctcgaaagactacccggaggggacgagcacttacgaggccccaatc

SEQ ID NO: 155935 - DNA, 493 bp, Zea mays
  Clone ID: MRT4577_73797C.1
gcggggaaatggaaaggaataatatatagggaaaaaggatgtttggaaaaaaaaaaaaaaaaaaaaaaaaaaaaaaaaaaaaaaaaaaaaaaaaaaaaaaagaataaaaaaaaaaaaaaaaaaaaaaaaaaaaaaaaaaaaaaaaaaaaaaaaaaaaaaaaaaaaaaaattttttttaaaaccctccccggccgcccccccggcaaggccccgggtttttcccaaacccccccccataagtcccataaagggccttcaaccccccttttggccaaccctttgggcaaaaaaaagccctggggggaggcgtttaaaaaaacccgttgccccaattccaacaacaatcctgggcccttttacccttacaacccttccaaacaaaattagacaaacatttggccccccctttgccccacctaccccaaggaaaccccgtttctaacttgcaaaagaaatggtttgcttccaccccaattctttgggaaaaccaggc

SEQ ID NO: 155936 - DNA, 645 bp, Zea mays
  Clone ID: MRT4577_73798C.1
ctgggattggaaggtccacttgggcaaggataaggcttcacgcccctccaacagacgacttgctgctctacgctatcgcagcctgtctgcggcaggggaggaagctgataatcgagaagtacagtagcatggatgagatactgcgggagtgtaatagcatggccgggcagctagatgtctggaagctcctagatgatgcacaccacttggttgtcgaccttcatcacagaatctgatgcgacggcttccctcagttatgtttggtagagtatgcagacatgaaccacttttccgaggtgtatttagtaatctgttgtgtactgttcatcacccggaattatgggcatatatctagagaaccgtgtggcttcaagtgaggacgaagttgtctccacttcggttaagctgataaaccattggatagcacaatggtttatgcaagccatccatagtttaacttgatgtaaaatttcgtttttttgcttccagtatctgtcctaggcgaaaacatcattttccatcaagccttttatagcaaaatttaaagttcccagattttggggtgtaatgcggagtaatatatgatggattcaaagtctttgctgcgtcattgcacacaccaaaaaaaaaaaaaaaaaagcggcc

SEQ ID NO: 155937 - DNA, 846 bp, Zea mays
  unsure (1)..(846): unsure at all n locations
  Clone ID: MRT4577_73799C.1
attattccttcgtcccccacctctcgctctatctccatctccatcccgcctcctcctcctcctcatgctgctgcggccactgccactataatagcccagctagctagaggccacccatcaagctgcccattccctcgtgacagcgcagctgcctgcctgctccgaggcgccacccagctcttcctcgccccagcagccgtttctcgagatccttttcactttcaccaccagggtacatagaccgcatctgcggtgctctgcgctcctcagactcgacttgttggttcatccatccagctgccgccggagcccggaggtcgatcagctacctatctgaccgagcgtggaagctcccggaccggacattccattttccgttccgaagggggggtgagaaggcggggaatgagtacaaccaaggtgaagagacgtgtgggcaagtatgagctcggccggacacggtcaccggcgaggccgtggccattaagatcctggacaaggagaaggtcctcaagcacaagatggttgagcagatcaagcgggagatctcgacgatgaagctgatcaagcaccctaacgtcgtccgcatatacgaggtgatgggaagtaaaacaaagatctacattgtgttagaattcgctaccggtggcgagctctttgatacaattgttaaccatggtcgaatgagggaagacgaggcaaggaggtacttccaacagttaatcaatgcagttgattattgccatagcaggggtgtgtaccaccgggatttaaaaccctgaaatttgctgcttgnatcatatgngaacctgaangtctctgactttgngctcagcgcgctatctc

SEQ ID NO: 155938 - DNA, 2101 bp, Zea mays
  unsure (1)..(2101): unsure at all n locations
  Clone ID: MRT4577_7379C.1
gcagaaaaaaaattttacccctacccttacaataaaaaacacgaaaattttggaatagccatttaccttggttttacggaccatcatcaataaagatatcgagcgtgtggggcacaaaaacgtgagaaagtgtaccccactgctcttatccttcaaacacccaaccacctcccttgtcaaggacaagaaacagaataccttgaatgtcccaacacacatcctcaaatcaaatgtggcgaacctctcgcttagttcactcccccctaccgactataacagcaggtgaacagggtcaatcacacaaatgtttgatcactggcaaagctaagccgagggatctgtggctccctcaggtttgtctgtctccatctgctcggctcgaggctcctctgcggctccctcgctggctgtgctttcgccacctgattgctgctgctctggtgtctgaggctcaggagcttggttttctgccacaggcggagtctgtggcttaggagctggcttcggtttcgtcatgatcggcttgcagaacctgtcaagtgtttcagctttcttcttaaggtcagcagcaaggagtaccggattagcatgctttggcagagcatcctgctgctgctttttctctattagccaagtctctgcttccgaacactcattaatgacctttcgcttttctgacatgtctatgtgttcaaacttctggtcggtagactgtgcagcttctctgaagctattgatgcagtataccagttggctaacagcagaacttctaatctcccattccttgaagcgcagctcaataggatcaccaacttttttaagttcttctagcttagcaatataaacccccttagtttcatcctcgccatcttcatagagccagtcttcaacctcctgaagcttagcaatcaaaccttccttgtcctcagacgtgacaaaatcactgtacttgtcatatagcttgttacgcatgtcatacacataagcttcaacagcattcttcttctcctttgtttcttccattactctgtcttgaagagccatctcatactctttctctacagccttctgcaggtcagccgcagccaaggccccatagaccaactcatggaccggaacagtaattttcttaactttcttttttgacggctcaacctttgcatcagtttccatcggaacagatttttcctcagtatcttgtggtccattttcagctgcatgagcagcctcagcggtatcagcgcttttaggctcctgcatattcacatcagatgcaacagcaggatcacttggtgcatcatctgtgtccatcttcatagtatcatttggagcttcatttgcagatgaaactggaacttccacatcatcctccagcattattgctgaatcaactgtaacggtcccatggatgttgagacgcactttcactttcagtttggccttctctcctttggaggtttggaaagggccaattgtgtatgtgcttattttttgtggaatttgtaagccgtttgggtcgacatacaaaacatcaacttcaaatgtactggatttaaagaaggtaagaactttagtgctaggaattgcattcccctttgggaatacaagggtttgttggggggtgttctgggagtctccattccatgacaatgcaattgagaaaggaaacccatcattaacctggaattctcgcactttgaaagtggggctgagaatagcacactgaagagcacatcctcgcgcaacacactcacttgcattcatggttcgtcttggctccttcccaaaaaaatcagttattatcttgattatagccggaacacgagaaccagatccaacaacctcaacaaagtgcacattttcagtagtcaacccagcttcagccaaggccttttcncagtggtcctttcacgcgttccagcaccgaggcactgatctgttcgaaccggacgcgtggaataaaaccccgcacatccttctcatccatcaaacactcaatgttcagtggggcctctgggttggcgctcagtaccttcttaagtttctcacatgccacacgcaacctaatgcatgcacgcgcattctggtacacatcaatctt

SEQ ID NO: 155939 - DNA, 134 bp, Zea mays
  Clone ID: MRT4577_737C.1
aagctaaaccatacattaggatttaaattattacatatcatcgggtttttgcaaaagtgcatattgtcgagtgcagggaataaactaacgatgtaaatgggggtggggaacctgcccatactcctagctcctcc

SEQ ID NO: 155940 - DNA, 871 bp, Zea mays
  Clone ID: MRT4577_73800C.1
aggtgacactatagaagagctatgacgtcgcatgcacgcgtacgtaagctcggaattcggctcgagcgacgatgaagctgatcaagcaccctaacggggtccgcatatacgaggtgatgggaagtaaaacaaagatctacattgtgttagaattcgctaccgctggcgagctctttgatacaattgttaaccatggtcgaatgagggaagacgaggcaaggaggtacttccaacagttaatcaatgcagttgattattgtcatagcaggggtgtgtaccaccgggatttaaaacctgaaaatttgctgcttgattcatatggtaacctgaaggtctctgactttgggctcagcgcgctatctcagcaaatcaaggatgatggactgctgcacacaacttgtgggactccaaactatgttgcaccagaggtccttgaagatcaaggctacgatggagcaatggctgatctgtggtcatgtggagttatcctgtttgttctgctagcaggatatcaaatgcagaatttacatttccaccatggacatcttttcctgccaagaggttgttaacaagaatccttgatccaaatccaatgacgagaataacaatcccagaaatattagaggatgagtggttcaaaaagggctacaagcgcccagaatttgatgaacaatatgacaccacattggatgatgtggatgccgtcttcaatgattcagaagagcaccatgtgacagaaaagaaagaagaagaaccagtagctctgaacgcattcgaactgattttcgatgtcagcgggcctaaaccttggaaacttatttgactcagagcaggagttcaaaagagaaacaagtttacatcaaaagtcccc

SEQ ID NO: 155941 - DNA, 221 bp, Zea mays
  Clone ID: MRT4577_73801C.1
atttatcataatttaatccactacaatttaaaactgaattttcttatgtaaatgaagtgtttactaaaaccttgtcttctactaaataaagagatatgacatagaaaaaacgtcatgtctctttttaatgttgtcactatgtaatgcctattatttatacataatatatactccctccattctagaatagtattcgatttagctcttgatttttatgttta

SEQ ID NO: 155942 - DNA, 504 bp, Zea mays
  Clone ID: MRT4577_73802C.1
ggccaaggagtcgtcgccgccgtcgaccagcgtctcgccgacccagcagcagtcccggagtacgatagagggaggcgagatgacggtcgcctcgtccgtcaggctcgccggcggcaatctgacggtatgcgggcggacggtgctgtccggggtgccggacgcggtggtggccacgtcggcggcgacggagggagcggtccacgggatcttcctcggcgccgacttcgccgagccggccgcccggcacgtcgtctccctcggcgacctgagggacgttcggttcatggcgtgcttccggttcaagctatggtggatggcgcagcggatgggggagaaaggcagcgacgtcccgcgcgagacccagttcctgctcgtcgagtccaggggcgtcggcgacgaggacgcggcgtacgtcgtgttcctcccgctcgtggagggcgcgttccgggccagcatccaaggcggtgccggcgacgcgctggagctctgcgtcgagagcgggga

SEQ ID NO: 155943 - DNA, 232 bp, Zea mays
  Clone ID: MRT4577_73803C.1
cgcgtccactaaaaatccacaaaactcccagatcgttggggaggtcgacccagatcagcgtctggttcaccagggagagtcgtctggctcactccccctgccccaggtcttgacggctcccatcagattggatgttgttcagcaggtccactagtccgaggctaaccatgagagacagccatacgccttcggcgaaaaccctggtcaccaaacctctgcaggatcatggggt

SEQ ID NO: 155944 - DNA, 512 bp, Zea mays
  Clone ID: MRT4577_73804C.1
agacacatgagcactgattaaaacagtaattgaatgaacacagagttcttttgaatgaaattgcagtaaataagggctaaaatgataaattcatatgcccaatctatgaaaatagtccatgctctttgggggtgggacagcacggcccatcaaagtgagcccattaaagctggcagttagggttttctaaccctaaccgctcacatcccgccggcgacggcctaggtgctggccccggcctaggcgcggcggaacggggcacccccgaggcacaggcgctcggcccctggctgcgcccagcagcgcgcgggcgaagccccccggcggctcgacgcgggcgcgcccccctgcggcgacgcagcggccatggcccccggcggcacggcgcagcgcgggcgttgctcctcggccagcgcgcgcaggcaggccccccatcggccagggcgcgacccccggcctcggccccggtggtggcgcggcccccgcagggcgcgagcgcggcctcccggcac

SEQ ID NO: 155945 - DNA, 2039 bp, Zea mays
  Clone ID: MRT4577_73805C.1
tggaaatccattcattccttcgtcccccacctctcgctctatctccatctccatcccgcctcctcctcctcctcatgctgctgcggccactgccactataatagcccagctagctagaggccacccatcaagctgcccattccctcgtgacagcgcagctgcctgcctgctccgaggcgccacccagctcttcctcgccccagcagccgtttctcgagatccttttcactttcaccaccagggtacatagaccgcatctgcggtgctctgcgctcctcagactcgacttgttggttcatccatccagctgccgccggagcccggaggtcgatcagctacctatctgaccgagcgtggaagctcccggaccggacattccattttccgttccgaagggggggtgagaaggcggggaatgagtacaaccaaggtgaagagacgtgtgggcaagtatgagctcggccggaccataggcgagggcaccttcgcgaaggtcaggttcgcgagggacacggtcaccggcgaggccgtggccattaagatcctggacaaggagaaggtcctcaagcacaagatggttgagcagatcaagcgggagatctcgacgatgaagctgatcaagcaccctaacgtcgtccgcatatacgaggtgatgggaagtaaaacaaagatctacattgtgttagaattcgctaccggtggcgagctctttgatacaattgttaaccatggtcgaatgagggaagacgaggcaaggaggtacttccaacagttaatcaatgcagttgattattgccatagcaggggtgtgtaccaccgggatttaaaacctgaaaatttgctgcttgattcatatggaaacctgaaggtctctgactttgggctcagcgcgctatctcagcaaatcaaggatgatggactgctgcacacaacttgtgggactccaaactatgttgcaccagaggtccttgaagatcaaggctacgatggagcaatggctgatctgtggtcatgtggagttatcctgtttgttctgctagcagggtatttgccgtttgaggactctaatctcatgactttgtataagaaaatatcaaatgcagaatttacatttccaccatggacatcttttcctgccaagaggttgttaacaagaatccttgatccaaatccaatgacgagaataacaatcccagaaatattagaggatgagtggttcaaaaagggctacaagcgcccagaatttgatgaacaatatgacaccacattggatgatgtggatgccgtcttcaatgattcagaagagcaccatgtgacagaaaagaaagaagaagaaccagtagctctgaacgcattcgaactgatttcgatgtcagcgggcctaaaccttggaaacttatttgactcagagcaggagttcaaaagagaaacaaggtttacatcaaaatgtccccccaaagaaattgtccgcaagatcgaggaagctgcaaaacctctaggatttgatgttcagaagaaaaattacaagttgaggctcgaaaaggtaaaggcagggaggaagggaaacctcaacgttgctactgagatactgcaagttgcaccctctctccacatggtagaagtccgaaaagcaaagggtgacactctggaatttcataagttctacaagaacctttccaagaccttgaaggacgtcgtctggaaatccgacgatcttcaaacgcaacatgcttcttagcagaacctcagagaggaggaatggcaaactattttgtgcaccatcctttcaagcaaactattctgcatgtaacggtgggtgcccaggaaattgcgctggtgctccaccatcgttgtatatgctgcgtcttgagttgcttgctgtagctgaagggaagttcattcagtaggttttgagtatgagttttgtatatccgtatatgcctatgactatgagccgtgctggaacactatgatcagaaactgcgaaatggagcccagaatgttcttgccatcttgctccagttctcagcaccgggctt

SEQ ID NO: 155946 - DNA, 729 bp, Zea mays
  Clone ID: MRT4577_73806C.1
cattgggtacctcgaggccggccctaactccaacctacccagcctcggccagccacctccccgtcgctctcacgctcttcgtgcccgccgcctcccctcttcccctccacctcactcctcccgtctgacgcacatggcctccatcgccggatcttccgctctctccttcgccatgcctgtcaaggcaatcaactcaaattctctagccttctccccggtgaggaagggccaagaaggatacggtggacaaggtttgtgaaattgtgaagaagcagcttgctcttcctgaccacactgaagtttgtggtgaatcgaaattctctgaacttggtgcggattcgctggacacggttgagattgtgatgggccttgaggagcacttcgacattagcgtggaggagtccagcgcgcagacaattgccaccgttgaagacgccgctgacctcattgacaagcttgttgctgtgaaggcataggccgcatctcttctatcattgtcttaccactctaggtttctatggtctgaagacttgtgattttctccgcactgctgttgctattcccgtgtcgtaataatacgagatgttttaagcggctgaacacacggtggtgtaatctgttactggtaaggtgcattgttgtatgaattgtttctcacccagaagaaccagaccatcggggattctagcatcatatatagtgttcaaaaaaaaaaaaaaaaaagcggcc

SEQ ID NO: 155947 - DNA, 289 bp, Zea mays
  Clone ID: MRT4577_73807C.1
ggccattaaagggtgacccaattgggttttgggcaaattaagggggggtgttttacaaaagtcatccaaaaaaaccaggggggttaaaacttaaaaaggttagggggggccaaaattgagttttttgtttaagggggtttggtaaaaatgaacaattgggtttttgaagagaataattacatttggtacagccataaaataattttaactgactccttgttttttaaactccaggaccgccaaaaaaaagcttgggctggggggggaaaaatccattgattggattatg

SEQ ID NO: 155948 - DNA, 641 bp, Zea mays
  Clone ID: MRT4577_73808C.1
gccggccgggtctgggaacctacccagcctcggccagccacctccccgtcgctctcacgctcttcgtgcccgccgcctcccctcttcccctccacctcactcctcccgtctgacgcacatggcctccatcgccggatcttccgctctctccttcgccatgcctgtcaaggcaatcaactcaaattctctagccttctccccggtgaggaagggtaacacattcctccgcctgcaaccagtgcctatgagatctgtttcctgcgctgccaagaaggatacggtggacaaggtttgtgaaattgtgaagaagcagcttgctcttcctgaccacactgaagtttgtggtgaatcgaaattctctgaacttggtgcggattcgctggacacggttgagattgtgatgggccttgaggagcacttcgacattagcgtggaggagtccagcgcgcagacaattgccaccgttgaagacgccgctgttgctattcccgtgtcgtaataatacgagatgttttaagcggctgaacacacggtggtgtaatctgttactggtaaggtgcattgttgtatgaattgtttctcacccagaagaaccagaccatcggggattctaacaaaaaaaaaaaaaaaaaaggccccta

SEQ ID NO: 155949 - DNA, 2416 bp, Zea mays
  Clone ID: MRT4577_73809C.1
ccggccgggattccttcgtcccccacctctcgctctatctccatctcctccctccctcccgcctcctcctcctcctcatgctgctgctgccactgccactataatagcccagctagctagaggccacccatcaaaagctgcccattccctcgtgacagcgcagctgcctgcctgctccgaggcgccacccagctcttcctcgccccagcagccgcttcccgagatccttttcactttcaccaccaggttacatagaccgcatctgcggtgctctgcgctcctcggactcgacttgttggttcatccatccagctgccgccggacgtcgatcagctacctatcttgaaaccacaggaccgagcgtggaagctcccggaccggacattccattttccgttccgaagcgggggtgagaaggcggggaatgagtacaaccaaggtgaagagacgtgtgggcaagtatgagctcggccggaccataggcgagggcaccttcgcgaaggtcaggttcgcgagggacacggtcaccggcgaggccgtggccattaagatcctggacaaggagaaggtcctcaagcacaagatggttgagcagatcaagcgggagatctcgacgatgaagctgatcaagcaccctaacgtcgtccgcatatacgaggtgatgggaagtaaaacaaaggtctacattgtgttagaattcgctactggtggcgagctctttgatacaattgttaaccatggtcgaatgagggaagacgaggcaaggaggtacttccaacagttaatcaatgcagttgattattgccattgcaggggtgtgtaccaccgggatttaaaacctgaaaatttgctgcttgattcatatggaaacctgaaggtctctgactttgggctcagcgcgctatctcagcaaatcaaggatgatggactgctgcacacaacttgtgggactccaaactatgttgcaccagaggtccttgaagatcaaggctacgatggagcaatggctgatctgtggtcatgtggagttatcctgtttgttctgctagcagggtatttgccgtttgaggattctaatctcatgactttgtataagaaaatatcaaatgcagaatttacatttccaccatggacatcttttcctgccaagaggttgttaacaagaatccttgatccaaatccaatgacgagaataacaatcccagaaatattagaggatgagtggttcaaaaagggctacaagcgcccagaatttgatgaacaatatgacaccacattggatgatgtggatgccgtcttcaatgattcagaagagcaccatgtgacagaaaagaaagaagaagaaccagtagctctgaacgcattcgaactgatttcgatgtcagcgggcctaaaccttggaaacttatttgactcagagcaggagttcaaaagagaaacaaggtttacatcaaaatgtccccccaaagaaattgtccgcaagatcgaggaagctgcaaaacctctaggatttgatgttcagaagaaaaattacaaggtacctacatgtagcgctagtaacttaatatttgaatattttcttgaggcatgacttctcgaaacgaatacaaactttggatacatctttctgcatgctaaaagttctctttttcatttgtgtaatcagttgaggctcgaaaaggtaaaggcagggaggaagggaaacctcaacgttgctactgaggtcatgcttaacgttttccctaactgcaatatttttttgtaacttcttctgcctaacatttattattcatattgattcagatactgcaagttgcgccctctctccacatggtagaagtccgaaaagcaaagggtgacactctggaatttcataaggtaactatggggcatgcaaagatcatgcccataaagaaacatatgtattcatgtactgtccataagctgatcaaccagcagtttgaattcactaattcatagtttattttgctctttcagcatcttttgtttgaacagtatttacttaaatgtgtgagctataattatctgcagttttacaagaacctttccaagaccttgaaggacgtcgtctggaaatccgacgatcttcaaacgcaacatgcttcttagcagaacctcagagaggaggaatggcaaactattttgtgcaccatcctttcaagcaaactattctgcatgtaacggtgggtgcccaggaaattgcgctggtgctccaccatcgttgtatatgctgcgtcttgagttgcttgctgtagctgaagggaagttcattcagtaggttttgagtatgagttttgtatatccgtatatgcctatgactatgagccgggctggaacactatgatcagaaaatgccaactggagcccagaatgttcttgcctaaaaaaggaggga

SEQ ID NO: 155950 - DNA, 898 bp, Zea mays
  unsure (1)..(898): unsure at all n locations
  Clone ID: MRT4577_7380C.1
ttgggtacctcgaggccggccggggaagtcacccaggaggatgtgcaggagcgggcattacgtcgcttgctacgtttgtagttatggatgatgagagtgcaaatgtggatcctgcaaggtcggaggcagtgatgcagaatgggggcattcgaatgttgctggaccttgcaaggtgctcaagggagagcgcacaatctgaagcagcaaaagctattgccaacttgtcagtgaataccaaggttgccaaggcagttgcagatgaaggcggcattacaatactcattaatttagccaagtcgatgaataggcttgttgccgaagaagctgctggtggcctttggaatctctctgtaggcgaggaccacaaggcggctattgcagtatctggtggcattaaggccctggtcgatctaatatttcgttggcctgctggaactgatggagttcttgaacgtgctgctggcgcgcttgcaaacctggctgctgatgacaagtgtagcttggaagttgcaaaggctggtggtgtccatgctttggttacacttgctagatcatgtaaacttgatggtgtcctagaacaggctgcaagaggtctggctaacttagctgcacatggggacaacaatgacaacaatgctgctgtaggtcaggaagcaggggctctggaggcactggtgcaactaacaagttctcaaaacgagggtgtaagacaagaagctgctggtgctttgtggaacctgtcatttgatgacagaaaccgtgaagccattgctgcagtgggtggcgttgaagctttggttgccctagtgcaacaatgtttgaatgcttcagaaggtcttcangagagagctgctggtgcattgtggggattatctgtttcagaagctaatagcattgc

SEQ ID NO: 155951 - DNA, 1735 bp, Zea mays
  Clone ID: MRT4577_73810C.1
aggccggccgggccgggcgaacgactctcggcaacggatatctcggctctcgcatcgatgaagaacgtagcaaaatgcgatacctggtgtgaattgcagaatcccgcgaaccatcgagtttttgaacgcaagttgcgcccgaagccttctggcggagggcacgtctgcctgggcgtcacgaactccaacctacccagcctcggccagccacctccccgtcgctctcacgctcttcgtgcccgccgcctcccctcttcccctccacctcactcctcccgtctgacgcacatggcctccatcgccggatcttccgctctctccttcgccatgcctgtcaaggcaatcaactcaaattctctagccttctccccggtgaggaagggtaacacattcctccgcctgcaaccagtgcctatgagatctgtttcctgcgctgccaagaaggatacggtggacaaggtttgtgaaattgtgaagaagcagcttgctcttcctgaccacactgaagtttgtggtgaatcgaaattctctgaacttggtgcggattcgctggacacggttgagattgtgatgggccttgaggaacacttcgacattagcgtggaggagtccagcgcgcagacaattgccaccgttgaagacgccgctgacctcattgacaagcttgttgctgtgaaggcataggccgcatctcttctatcattgtcttaccactctaggtttctatggtctgaagacttgtgattttctccgcactgctgttgctattcccgtgtcgtaataatacgagatgttttaagcggctgaacacacggtggtgtaatctgttactggtaaggtgcattgttgtatgaattgtttctcacccaaaaaaaaaaaaaaaaaaaaaaaaaaagcagtagcagctccagcatcttctagcttcttcattcatgggattcggtctctactaggattaggggtgcttcatttcatccgatccccaacgacttgacctgattctgatctcgacgacgatgcggaagcgggatctgggcatcctgctgctcgccgccttcgccatcttcttctccctccaccacgaaggcgacttctccttccgggagtcctggtaccacctcaccgacgaggacttccccatcaagtacgaggccgaccgcctgcccccgccgctcgtcgccgatctcaacggcgacggcaagcccgaggtcctcctccccacccacgacgccaagatccaggttctccagccgccccacgcccgccacctcaacgatgactccgccttccaggaggcccgtgtcatggccgacatctctctcctccccgacaacgtccgcctcgcctcggggaggcgccccatcgccatggccgtcggcaacgtcgaccgctcctacagacctggcgaggtcaggaagcaggtgctcgtcgtcgtcacctccggatggtcagtcatgtgcttcgaccataacctcaagaagctgtgggagcacaacctccaggacgatttccctcatgccgcccaccaccgcgaggtcgcaatctccataaccaattatactctcaagcatggagatgcaggcctcgtcatcgttggaggaaggatggagatgcagcatcattcagcagatctcttcgatgaatttatgataccagaacacaacatggatgatcgccgtcgaagcgccagtgagaaacagggctctgaggctggcaatgcagacctgcgccattt

SEQ ID NO: 155952 - DNA, 157 bp, Zea mays
  Clone ID: MRT4577_73811C.1
acaaccaaacagtttcttgttttggggaacggggccggttcccggttgtttattttagggccaggccgctgggtacccattttttggtttggcccacaatttttttgaaacaaacattttcctcaaaaaaaaggttccggtttttaaaataaacccg

SEQ ID NO: 155953 - DNA, 439 bp, Zea mays
  unsure (1)..(439): unsure at all n locations
  Clone ID: MRT4577_73812C.1
cgtgggctaggggaacagcccgtcgcgaaacgagagcaaaaccgactgaagcttcgcccgagccgaggcggcgcgagctcagcagcgagccgtgagtgagcacgtcgttgtactcttctcccagccacttcctcgcctatcggtgggggggcggcggagcannaacggctggcgtgagctctacaagctctcgccctgcgggcgaacgcgtcgtgtctctagcgctgcaactcgttcgctcgnccttaagggctaacgacggtcgctcccagtgctcctgtggctcggaggcggnggtgtgtcttccaggccggttgtgatgactgaccagttcctccgcaccgttgcgccccagcatcctcggcgggaagtgcatttcctttcctgcgcccttgggaagcctcatcctcggccgggtcttggacccccccttattggc

SEQ ID NO: 155954 - DNA, 127 bp, Zea mays
  Clone ID: MRT4577_73813C.1
aaacacactgaacccaataatccgatcccacataaacttttctctttgtccgttcgatcgatcgctgccgagtcgtatgtcatacaccatcatcacccataaccattgtctgcaacctgtcttattt

SEQ ID NO: 155955 - DNA, 427 bp, Zea mays
  Clone ID: MRT4577_73814C.1
agcgcacgcatactattattttatatatgtacacaaacaccgttatatgtcggtttttttacgaacacacacaatactccattatgggtgcggcgcgcgcacgcagaacgtgatcgatcgagtggccacgcggtgcacacgcagatgcgtgcgcgcactgcatgcacccgggctctgtgcctatacttggcagccgggtcgcgggggaggaacgggcgctggacaatgacggtgcccggggggtggtatcttagacgaggaaaacgccgcggttgttggggcaaaccacgcgcgcgcagccgatgcgggtggacctgggccacaccaggggcgtgggggggccggacacctatgacggggttggaggtggtgctgctcacgtggagcggctgttaaagggccccccaacgggggggggcgggggccc

SEQ ID NO: 155956 - DNA, 246 bp, Zea mays
  Clone ID: MRT4577_73815C.1
aaaaagaataagaaatagaacaaaatttgattgataccgcataaaaagattctatcataagtacgagttaatactataataaggaagatcttataaagatacttaaatgagagttgactgtccttgaggttccaacattacgactgcaaatacctgaacgataccgatcttaacaggtatgctaaatttaataatgtggccagcttattaaaacgtgaagaagggaaaacctttgggttttccaaa

SEQ ID NO: 155957 - DNA, 136 bp, Zea mays
  Clone ID: MRT4577_73816C.1
gatgtgtcgacagtccgttccgtaccgctctgcagtgcgggtgctttctacagcgtatgcgacacgaagaggggactggatacagcaagctcctcctcctctaggcctcgcctcgtccgtgccagatctatctgtc

SEQ ID NO: 155958 - DNA, 341 bp, Zea mays
  Clone ID: MRT4577_73817C.1
cctttataatttattttcttcttttttttttttttgggtgggttttttttttttttgggcccggcccaaaaaacgacataaaaaaaaaaacaaaataaacgccccctgcaagggaagtcaacgtaaacaccggggggctttggggctgtcccaaaacgaaaaaacaaagcgtgttccccccagaaatgtgggccttggggggaaaaaaaagtgctggggctctcaacgcccgggggaaaaatgggggggtgaacttggtttgcgaaagagttaaggaactgggcgtgaatgggtcaagttcccctccagcccaaaagcaagccctttttttgcacacgggc

SEQ ID NO: 155959 - DNA, 966 bp, Zea mays
  unsure (1)..(966): unsure at all n locations
  Clone ID: MRT4577_73818C.1
cggcccggatgtcagtctgacttgcgaactccttccctctcctccttcccccagtcaggagtcccagatcgtgaagccagctacttttactctggttcccccgaggccggccggggcaattcagccccgcgccgcgcgtcgatcctatcctccagtctgattccagctccgcctccgcctccacctccacctcccctctcgatccctcgctattaatacatcccggcggttcactcccgatctccatccctcccagccaggcctgcctcctcgatcctcggacgaaacgcgccgccttctttcttcgtcccagtctcgcctcctgccctttttaggtcgcccggatctcgctctcgtcgtcgtcgtcgtcgcgcgcgcgcgcgcgcttcttgtttctgtcggcgccgccgcggtgctgggaaggcggctccttttcgcggccacgacccacaacacgcccctcgtgatcctataccttcttcttggaaaaagttgccgccgcgatgaacgcgctcgccgccaccacccgcaacttccggcgggcatcgaagctgctcggcctcgactccaagctcgagcagagcctgctcatcccgttccgggagatcaaggtggaatgcaccatccccaaagacgatggcagcttggcgacgttcgtggggttccgcgtgcagcatgacaacgcccgcgggccgatgaaaggcggcatccgctatcacaatgaggttgatccagatgaagtaaatgcccttgctcaactcatgacatggaagacagctgttgctgcagtcccatatggtggagcaaagggagggatcgggtgctctcctggtgaactaagtagaagtgagttggagcggttgacacgagtatttacccaaaaaattcatgatcttatcggaacgcatacagatgtccctgctcctgacacgnngaccaatgcacaaaccatggcatggatgctgg

SEQ ID NO: 155960 - DNA, 1303 bp, Zea mays
  Clone ID: MRT4577_73819C.1
cctacgcggagcttatgttcttatatgactactagctagaagttagagcctagatgatggctgcttctgttggcgtgaaagctcgagtgctcctaaatggtcgtcgtattagctgatacgacatctacccgatgcaatagataatattgtttacacgcgtgagtccaaaattgttggctttgggtcggagcagttaatgcgagaagtgtattttatcacttctgagtgcaaccttttttttattatttttccgagcttctgcctcttgcatatgttgtagattctcgccgagaagggagtagtagtattacctgatatctatgctaattcaggtggtgtggtcgttagctactttaattgagtgggttcagaacattcaaggtttcatgtgggccgaggagaaagtggacgatgaactagaaaaggacatgagcagtgctttttaacacatgaaggccatgtgcaaatctttggtgctgctgcctcctctagtgacattggaaacgcgccgccttctaaaatcgtctcattctcgcctcctaacctttttaggtcgcccggatctcgctctcgtcgtcgtcgtcgcgcgcgcgcttgcgcttcttgtttctgtcggcgccgccgcggtgctgggaaggcggctccttttcgcggccacaacccacaacacgcccctcgtgatcctataccttcttcttcttggaaaaagttgccgccgcgatgaacgcgctcgccgccaccacccgcaacttccggcgggcatcgaagctgctcggcctcgactccaagctcgagcagagtctgctcatcccgttccgggagatcaaggtggaatgcaccatccccaaagacgacggcagcttggcgacgttcgtggggttccgcgtgcagcatgacaacgcccgcgggccgatgaaaggcggcatccgctatcacaatgaggttgatccagatgaagtaaatgcccttgctcaactcatgacatggaagacagctgttgcagcagtcccatatggtggagcaaagggagggatcgggtgctctcctggtgaactaagtagaagtgagttggagcggttgacacgagtatttacccagaaaattcatgatcttatcggaacgcatacagatgtccctgctcctgacatggggaccaatgcacaagtaggcctaacaatgcttttgatttttttttctatgctcagctatcttgtttttcattggtaccttttatgcaattgtgacagaccatggcatggatgctggatgagtactcgaaatttcatggtcactccccagcagt

SEQ ID NO: 155961 - DNA, 381 bp, Zea mays
  Clone ID: MRT4577_7381C.1
aacacgcatccgctaacgcgtccgcccacgcgtccgccgtcactcaatacagcacaggcagctcgatagagagagagagacatagatgtcgtggttcgggcaccaccatcgcgagcagccggctcccccggcgtcgggccgcaagcaggtgttcaagatgttctgctgcgcgaacgagaactactgcctggccgtccgcgacggcgccgtcgtgctggccccggtcaataccaaggacgaccaggagcactggtataaggacatgcgcttcagcaatcgggtccaggacgacgaaggcataccggcgttcgcgctcgtctgcagtgccacggggctcgcactcaagcattccctcagccagtcccacgcggtcaagctcgc

SEQ ID NO: 155962 - DNA, 428 bp, Zea mays
  Clone ID: MRT4577_73820C.1
agaaaggaaaaaaccaatttaatttttaaccttttttttttagaaaaaacaaaacccatggggggaaaaaaccacccccggaaaaaaagggaggggtttcccaaaaaattctcaatggggccccctaaaaactgaaaacccccgcacaaaaaaaacctccccccgggaattttggtaaaaactctcaaccccccctaaattacccaaggacaggaaaattccgttttacttttacaaacggaaggaattgggggggtttttttttgaccccgggggaatagaaccctttccgggaaaaaaaaattttttgaaattgcccccctttttaaagcccccaaccggagttggggggggggaacaaaaaaaactttgccacaggaaaaccttgaaggttgatggccccaaaaaaaaaaggcctggaaactttt

SEQ ID NO: 155963 - DNA, 1997 bp, Zea mays
  Clone ID: MRT4577_73821C.1
aggagagacagccagcctgggatgggcgggcgactcggcgtaggaggaagaactctccctcggcgcagtggcggcctctcccacaacttttcctaattcaattcgacctcccttccctatccggcatcagcgcgcaccaccactaactagcgaatcccgtttggtcatcaagaagtacggctgtctccaatcgaagttccagtcccactccaacgtcggaagagagagcacatgtctgacttgcgaactccttccctctcctccttcccccaggtcaggagtcccagatcgtgaagccagctattttactctactccccctcaccacgagtcgcaattcagccccgcgccgcgcgtcgatcctatcctccagtctgattccagctccgcctccgcctccacctccacctcccctctcgatccctcgctattaatacatcccggcggttcactcccgatctccatccctcccagccaggcctgcctcctcgatcctcggacgaaacgcgccgccttctttcttcgtcccagtctcgcctcctgccctttttaggtcgcccggatctcgctctcgtcgtcgtcgtcgcgcgcgcgcttgcgcttcttgtttctgtcggcgccgccgcggtgctgggaaggcggctccttttcgcggccacaacccacaacacgcccctcgtgatcctataccttcttcttcttggaaaaagttgccgccgcgatgaacgcgctcgccgccaccacccgcaacttccggcgggcatcgaagctgctcggcctcgactccaagctcgagcagagtctgctcatcccgttccgggagatcaaggtggaatgcaccatccccaaagacgacggcagcttggcgacgttcgtggggttccgcgtgcagcatgacaacgcccgcgggccgatgaaaggcggcatccgctatcacaatgaggttgatccagatgaagtaaatgcccttgctcaactcatgacatggaagacagctgttgcagcagtcccatatggtggagcaaagggagggatcgggtgctctcctggtgaactaagtagaagtgagttggagcggttgacacgagtatttacccagaaaattcatgatcttatcggaacgcatacagatgtccctgctcctgacatggggaccaatgcacaaaccatggcatggatgctggatgagtactcgaaatttcatggtcactccccagcagtcgtcactgggaagccaatagatcttggcggatcactgggcagggatgcagcaacagggcgaggcgtaatgtatgctaccgaggccgaagctgctaaccatccaaatgagccagatgcagatgagattcttgccaagaagggggtagtagtattacctgatatctatgctaattcaggtggcgtggtcgttagctactttgaatgggtgcagaacattcaaggtttcatgtgggatgaggagaaagttaatgatgaactagaaaagtacatgagcagtgcttttcaacacttgaaggccatgtgcaagtctctggattgcgaccttaggatgggggccttcaccttaggagttaacagagttgctcgtgccaccctcttgagaggctgggaggcatgagaccattgaccacgcattacagattcgacaggcgcattcaataattcgtgtccaacaacgttggaggatcagtgtatacggtaaaattcatcagaaacggccggcttggaatgagcccgttgaagggtgttgtgcttgttgatcctgagttaccaatggttggttcaccagttcttggtgatgaaaattttatttaaaccattttattgtattttagaaagctaatttggcctcgacagagttactgtaccttttcatttttaatgaaattctggtctggggtttgaagttcccagatgtaaatgatttgcaaaaaaaaaaaaaaaaaaagccccttgggccagttatcattcacataaaaaaaaaaaaaaaaagcggcc

SEQ ID NO: 155964 - DNA, 475 bp, Zea mays
  unsure (1)..(475): unsure at all n locations
  Clone ID: MRT4577_73822C.1
ttattatcctatatccannnnggcacaaacagggtccaccggggggaagggggccaacaaaaaaacgggaccggccaacccaaggcaacgggaaaaaaaaaacacacaggcatctggcagaaaaaaaaaacccacggacgaccaccctctccaacccaaaaaacaaggaagtggcaaagcaaacccgggaagctaagtggccggggacaaaatggggggcgaagccccagccctggtggtagacggggccaccaagggggccagggagggtcccgagcggccccttgccggggacaagggccggaacaaaaaacccaaacagggaaaacagggggagggggccggcctggacccccttcacctggagcccggcaaaggccccggggcccccgcccagcccgagggggccaaaccggccgccagggaacaggggtgaaacaacctccccaaggggcccgccggaaaaacggaagcc

SEQ ID NO: 155965 - DNA, 2272 bp, Zea mays
  Clone ID: MRT4577_73823C.1
ccctatgttcctacgtgtccgcctatgtggcgatgagagcccagtcgaggagttatagccctctcgaacaacttctcctaattgcattcgatctcccttccctatccggcatcagcgcgcaccaccactagcgaatcccgtttggtcatcaagaagacgtactactgtctccaatcgaagttccagtcccactccaacatcggagagagagcacatgtcagtctgacttgcgaactccttccctctcctccttcccccaggtcaggagtcccagatcgtgaagccagctattttactctactcccccctcaccacgagtcggaattcagccccgcgccgcgcgtcgatcttatcctccagtctgattccagctccgcccccgcctccacctcccctctctctcgatccctcgctattaatacatcccggcggttcactcccgatctccatccctcccggccgggcctgcctcctcgatcctcggacgaaacgcgccgccttctttcttcgtcccagcctcgcctcctgccctttttaggtcgcccggatctcgctctcgtcgtcgtcgtcgcgcgcgcgcgcgcgcttcttgtttctgtcggcgccgccgcggtgctgggaaggcggctccttttcgcggccacaacccacaacacgtcctcgtgatcctagtaccttcttcttggaaaaagttgccgccgcgatgaacgcgctcgccgccaccacccgcaacttccggcgggcatcgaagctgctcggcctcgactccaagctcgagcagagcctgctcatcccgttccgggagatcaaggtggaatgcaccatccccaaagacgacggcagcttggcgacgttcgtggggttccgcgtgcagcatgataacgcccgcgggccgatgaaaggcggcatccgctatcacaatgaggttgatccagatgaagtaaatgcccttgctcaactcatgacatggaagacagctgttgcagcagtgccatatggtggagcaaaggggagggatcgggtgctctcctggtgagctaagtagaagtgagttggagcggtggacacgagtatttacccagaaaattcatgatcttatcggaacgcatacagatgtccctgctcctgacatggggaccaatgcacaaaccatggcatggatgctggatgagtactcgaaatttcatggtcactccccagcagtcgtcactgggaagccaatagatcttggcggatcactgggcagggatgcagcaacagggcgaggcgtaatgtatgctaccgaggccctactcgctgaatatggaaaatgcattttctggatcaacttttgtgatccaaggttttggcaatgttggttcatgggctgctcgacttattcacgagaaaggtggtaagattattgcaattggggatgtgacaggttcaattagaaaatgggcggtgttacagataccttctgtggtaaggctggtaaagacatacctgctttggaaaagcataggagtggaggtcatgcgatgttagacttcgttggtacggcagttttgtgttcaactgggttgttggtccttaactgtagtggttaacaccgttgctccttcggtcgtgttgttaacatggataatgcaagatacgtgaaggccaaattagtaatcggagctgctaattctccaactgatccagaggcaggtgagattctcgctatatacggggtaatagtactacgtcgttagcttcttaatatgggtgcagaagattctaggttttatgtatgccgaggaaaaagtaaacgatgaactagaaaagtacatgagcagtgcttttcaacacatgaaggccatgtgcaagtctctggattgcgaccttaggatgggggccttcaccttaggagttaacagggttgctcgtgccaccctcttgagaggctgggaggcatgagaccattgaccgcgcattacagattcgacaggtgcattcaataattcgtgtccaacaacgttggagcattagtgtctgatacgggaaaattcatcagaaacgaccggcttggaatgagcccgttgaaataacagtctgggtgttgtgcttgttgatcctgagttaccaatggttggttcaccagttcttggtgatgattagtgaaaattttatttaaaccgttttattgtattttagaaagcttatttggcctcgacagagttactgtaccttttcatttttaatgaaattctggtctggggtttgaagttcccagatgtaaatgatttgc

SEQ ID NO: 155966 - DNA, 521 bp, Zea mays
  Clone ID: MRT4577_73824C.1
ggggggggggggggtttttttttttttttttttttttttttttttttttttttttttttttttttttttttttttttttttttttttttttttttttttttttttttttttgggggggggggtttatccccaaggggcaaaaattaaaacgggggggggggggggggtttcataaaaaattacttaaaacgacgggtttgggaatttatgatccaagacaaaaaaaaggggggcacacctcctttttggttttttacccgaaatttttttttggacaggaaaacatttgttaacactttttttgaccactggaaaaccggtcggggggttttttttaaaccttaaaggcgggggggattccaaaaggtttctttaaaaatgggggggaacgttttcttactggttgttggaaaaacctgggggagggcgcaaacgtggtttttttgggggaacttttaaccgttcaccaaaatggggggaatgttttgaaaaaccagccttttggactggtggacgggacc

SEQ ID NO: 155967 - DNA, 175 bp, Zea mays
  Clone ID: MRT4577_73825C.1
tcgaaacgaggcatgtattgattcttcagatcatacatcaagctgtacaagcccatttacctaattcataaaagatgccacttgccgtattgaaaggcattagggtcaacgcgccggaaggtaaattgaccttaccatgtcccaagaatgcacaagcctaggaaggattgaccct

SEQ ID NO: 155968 - DNA, 256 bp, Zea mays
  unsure (1)..(256): unsure at all n locations
  Clone ID: MRT4577_73826C.1
cnttcttttttttttttttttttttttttttttgtgtttgggtttttttttttttggttttgttggagcttagtcctgacataaaaacaatttaatcatggggatcctttatttggagcgctcacgtgacaccacatttataattagcttggattgaaactggggggacgcacattcacttttttataacaaaaaagacgactagcatatctgggacggtgaccaatcattcaaagtccccatgcaaagttttttt

SEQ ID NO: 155969 - DNA, 232 bp, Zea mays
  Clone ID: MRT4577_73827C.1
tcttgccaacggccaagtcctgtccttctcccttgattggttcggatcgtcgttgcgggccaggtgctggatccgaagcggctggccccagccatgagacaatagcatgctcggcgtcctggacggccttcccgaggaggtcaagatgcggatggccgtaatgatctaccagcttcagatcctcgactgacatgagaatggacaattcgctggaggtgaaggtcttcacgga

SEQ ID NO: 155970 - DNA, 147 bp, Zea mays
  Clone ID: MRT4577_73828C.1
ctcaaccaacaacacagggatcgcttgacttcctaatgagagagcttatctaattgtaatctcacaacacctgatttcacacaaatcattacacctatcttccagatcaatattcttgatcaaaatcttacatgaaatccaattaac

SEQ ID NO: 155971 - DNA, 2117 bp, Zea mays
  Clone ID: MRT4577_73829C.1
caggccggccgggctttgatttcatctccgctcactttctttctgttcgattttgacgcctgcagattgcaaaaacgggactgctaagcaagctaagatttcaatggcatattccttcatacataggccattgagcgacgaggcacgccgcgtcagcacccccttggtggtcacttgcaatgaccagagacgggaggtctccgttgcccagaacatcgctaacaaggaaattgaccgcaccgtaccgaacacgcaggtgctaggtccaaagtctcaacagcaggacgtcttcaaccatgctgttgtgccacttgtcagtgaggttttggacggttataattgcacaatatttgcatatggccagactggaactggcaaaacatacacaatggaaggaggagggggcaaagcactagtgcagtttttattatatatattcacatgctacacatgtttctgaattctgatgcagttagtttgctgcttcaactgacgccataactctactccattcctgtagaatgatgacctcccgactgatgtcggtgtcattccaagtgctgttaagcgcatatttgacatcctcgaggcacagagtgcagagtacaacatgaaggtttcttttcttgagctgtacaatgcggagctcactgatcttctagctctacaatgagattgcaagaacgggactgctaagcaagctaagatttcaatggcctattccttcatacataggccattgaaccggaagattttgtcggtattcggtaactataggatcatgtggttgttggtcaagttggaccaattatgctggctcatttgttggatgttttgacaagtcgattctagcttccttatgatctatgttagatttggtaatgcataccagttagtaaagcatttatgatgtacattgttatacatagagctttacatcacaaaaattatcagtttccctcagttacgatatgcatttagtatttatcgtattttgaaaattaataacctattatactatgataggcttgacttcatgtttatctaaataacttagtgcgatgatgcttgaaaacgtatcttccattttgccagatcaatgaataaaaggattattcatatcaatgtccatgcaccttctcagaaaatccttttgtgatgttggtgttggtttcctggacctgtactagtacatatgctaagtcatccacaaatctgacccagaattgtaccgttctttttatagccatgtttggtacttgtttgagtgctccatagttcgcaagtttgttttgttatgatgtattttgacatttgaatctcatacatgcttaggaactactgatttgaatttatgggctaacagttccagcatttcaaatagaaagtatgctatatcaaataagttgatgatacttttggtactggagaatgaagctagactgcatttgatattagaagtctgtttgtctgattgtagttgattataaagaagctagagctgatattagaagtctgatattagaagtatgtttgtctgattgcagttgattataaagaagctagagcttccagtcaagtttgatattagaagtcttcttttgcttttacattttgtttttttatgatcttgatcttagaagcagggttttggtaccagcttaactaattttctgaagttttatgttcttactttaattataactagatgattgcaataagatatcatgaggcgcgccgaggagaacagggacctcctctccgcctcctccttcgacaggcagctgctgcggaaggaggtggtgaggagggtcaaggccgcggtggcgggacgtgagtgaagtgagctttgtcgagcctatatgtggaggtcggtcgtgaagctgggactaggacaagggcgagctgaaggctagaagctgtaaatgcacccttcaagagtcttcataggccaagtctctacgtaggtgttgacaaaaaggaaaattcatgacaatgcgtttatatgagattgtccaatatcgaaaccaagaatacatgggggacaactgtattcgatttttgtttctctttcgtggagtattactgaaatatatgcttccaatgttgaagtttcc

SEQ ID NO: 155972 - DNA, 219 bp, Zea mays
  Clone ID: MRT4577_7382C.1
ggttcccccagtttgtctcattgtgcaactgtgctctcacccgctccccgagtgtttgggtccacctgtcagcccagccgcgtgacagtgcccaacaacagaattatttgttctttgtaactcccagcttcatccactgacatagggttgcactgaatgctgtattgctttgttgaatttcattttcttaatgcagaatatataaatatattacaatat

SEQ ID NO: 155973 - DNA, 340 bp, Zea mays
  Clone ID: MRT4577_73830C.1
gatcccgggtcgacccgcctccgcccacgcgtccctgactctggctgcgcttggtaaaacggacttccgttccatgctagcgcgctatctcatcggcctgcactccaccttcccgaaaaatcttaccctttgtgtttctctgtctgtctggcaatctatcgatctccatgacgacttccccgccgcgcacacacctgctcgccatggcactagcgctggcattcacctgcatgctgctcgtcaggtcctcggacaccaccacactctgctgctccgcttacaggtgcaaccctgccacggacaggacgttcagaccctatagcgtctgtgttgtgctatc

SEQ ID NO: 155974 - DNA, 239 bp, Zea mays
  Clone ID: MRT4577_73831C.1
catactcgtgccgtatcaggagatccttgggctaaccgggccagaattggacacgtcagacatgagtccaatggacttattactgtaccttcattactgaacaccgtaagactgagactcgactgtaggcgagatatgcatggggcggttacaccgatggtggagcgtgagggacttgtcctactacatcaggagcaccgtatagactgcatacacggtttttgggcgcgctgaagtga

SEQ ID NO: 155975 - DNA, 1379 bp, Zea mays
  unsure (1)..(1379): unsure at all n locations
  Clone ID: MRT4577_73832C.1
gcacgaggcgaacgtgcgaactgcgaaccaagcaaagaactccaaattccacgccgatccgcccccaccactactccaccgcgcgcctcccctcccgaatcccgatccatctccatccagccgccgccggcatccgcgagaggccatggacgtgagcaggaagaagaagtgggtggcctgggcggtggcggccgccatcttcgtcgtcctcatgctcgtcacgcccgccatcccgcaggacgaagcctaccacgacttcgcggaccagcgcacccttttcttagggattcccaacaccttgaatgtgatctcaaacatccctttcttctttgttggcgtcacggggctcatcctgtgccacttcaacaactatttcaggctaagctcgcagggggagctctggagttggacgctgttctttgctggtgtcacggctgttggatttggttcttcctattatcatctcaacccgaatgacgccaccctagtttgggacagactgccaatgacgattgctttcacttctgtcatggctatattcattattgaaagggttgatgatagagcaggggcaaaatcccttgcaccacttgtgattgcgggtgccttgagcatcatgtattggagacactttgatgatcttcgcccgtacgcagtagttcagtttgttccatgcattgctttacctgtgatggctatagtaattccaccgatgtatacacattcaagctactggttgtgggcagcaggattttacctccttgctaaagtggaagaggctgctgacaaaactatctacaattggactcatcagattgttagtggtcatactcttaagcatctatgtgctgcgatggtaccggttttcctggctctcatgctagctaaaaggactaccgaaccagaaaggataagcttgctccagaagtggaagaccagttgggttgcggtgagagagaggcgtttcaaagatagcagtacagttgatgtggattgcggctacgctgttgtttcaagtatatctgaacagtaaattgtcatgcatctaattaacatgcacgttgtttcaagtattagcatgcatgctgcgcatgtgtatgagagaagatccctgtgaagtattaagaaaccaacctacctagttgagtttgctggtcggagttagctgtgcctgtgggtgacatatcttgtacatagcagaaagcaatacaagtaacggaagcatgtattacaagatttgcgtatatcatttcaatttttttccttgaaaaaaaaaaaaaaaaaaaaaactaacataaaaaagatctagaacaaanaaaaaaaanaaannnnaaaaaaaaaaaaaaaaaaaaaaannactttgctttgttaccactgct

SEQ ID NO: 155976 - DNA, 280 bp, Zea mays
  Clone ID: MRT4577_73833C.1
gcccactacagcaaggaggaccaggcggcgggacacgcccagagaccaaaacccaacgagccgcgccaccaagccgcgccacgccgacgacgacgacgaaacacgccgcgccggaaaggaccagcgccgaggcgcgcaggggggacggagaacaaagaccaacgagccaccgaaaaacgaaggcgggagggacaagaagcacgacgcaggaaagacaagaggacccgcaaaagcgcccaaccgaccgagggcccaaaaaaaacccaaaaaaacccaggaa

SEQ ID NO: 155977 - DNA, 230 bp, Zea mays
  Clone ID: MRT4577_73834C.1
ttttgtgcgccaggacgtatattttttcagtaaaaatatacgtccgggcgcacaaaacggccgcgggggccgccccgggaaaggctgcacggttacctgcgggcgcccgcgcatgccctaatggtgggatggtgtaaggcaaggcgaatccaggggctagggtgtgacatggggggagccgggcaaagcccagccagtccccaactcaatggacctggagcccatgccca

SEQ ID NO: 155978 - DNA, 384 bp, Zea mays
  unsure (1)..(384): unsure at all n locations
  Clone ID: MRT4577_73835C.1
agcacgcgtccgnaaaacatgctcccgacctctcactcctttatacgacgagttctcataccgcgacggggggggagacccggtgtctagaaggtacccctacccgcagacctcgcttgtccacatcattgcagcttcgaacaccaccacgggtggcaaccggtctagcaacaagccttaagacatcgacggattggtggactgttcgtgaagcagcccgaccagtgctggcaccagcacagcttcaggaaaggggcagacgtcggctccgaagctaccatacaagcaatactgtttccagggggacttcagagaggggagcgatccggataagctgtctgagagcgtcttggacagcctgcagaaagcactgcgcgcctaaaa

SEQ ID NO: 155979 - DNA, 852 bp, Zea mays
  Clone ID: MRT4577_73836C.1
cattgggtccctcgaggccggccggggatcaccctatattccactgacaaacgaagctctcctcgtcgcactcgcgcctgctcgagagctccgatccaacaagaccctctcgcaagtcgcaccaccgcagctagcaccgtcgtcgctacgcggatgctgtcttctcaccgcgagagcctgctgccctacgcgccggggcggcgggccgcggtgctgctcgaccaccggcggtaccgcccgaacgtcgaggtggcgcccagctgcccgcgctgcgactcgcccaacaccaagttctgctactacaacaactacagcctcagccagccccgctacttctgcaagggctgccgccgctactggaccaagggtgggtccctccgcaacgtgcccgtcggcggcgggtgccggaagaaccgcagcaggggcaagccggtccgagccgtggccgtcgattccgtggcgcccagcagcggtggcgcggcggcgttcacgcaccgggcgtcgtcgtcgtcgtcgtcgtcgtcgccccgccacgctgcggccggacatgctactggaaggcatgctcggcagcccaggcgggctgtgccagctgacggtgacggacgacgacgcagcggaaaacccggctgtggcgcccgatggacccaggatcgacctggcgttgctgtacgccaagttcttgaaccaacagccgccggcgcccgagcggcgcgccgtcctgccggaatcgctcgtcgtcgacaccttgagcgggtcgtcgtcgagcgacgtgggtcccgtcgtcccatcgcgggatcatcagccgttcacgacgcaagacgacgggctgggcgagctgtccgcggcgcg

SEQ ID NO: 155980 - DNA, 535 bp, Zea mays
  Clone ID: MRT4577_73838C.1
gcattgcacttgatatttttacagtttcgaggccggaagaaagcacttaacagggctcacatcaggcatgcctttaaagctggaaccaacaatcgggacgaacatcaccgtggggcgtacattagattatctaccacccctcgggcctgtaggtgcacacgaggtcgtgctcagggtgggcagaccttgggggcgggcatggtgacgcacatggcactggacttgttctaagcctggggggtcccgccacttggggcccgccatgggggcgccggagccgccgatggatgccacggacggcgccatagccggtagcattacggtgcaccatccatccgccgtggaccagacctcgagtggtgctagcttggagggcttctgctagaggtccaccttggccgacctgaccacggcgaaggcgcccgggtgcaaggtcgcggccaccgtcacgggggcgaaggactccttcatggtgagcgacgccatcgctttccgctgggtgggtgccgcgactgctacctggcggtgccggatc

SEQ ID NO: 155981 - DNA, 311 bp, Zea mays
  Clone ID: MRT4577_73839C.1
ctatgactagagccgcgcacgcatctgaatcgatcgagatggacacaccctgaaaggaaacagcagagaacacctatcaagatgagcactggacctcatcaaggctaaccgtcacagcgacgaaggaattgttgctgactcttcagcgatctaaagatagccacctacatgtagagatcaacgaaccttcacactttgaagctatgccaaaccctatcgttccaaagtcacgatatgagagggctcatgccaatggtaatggaattcacaaaggacctgtgaactttgagaaaaacgttcaatagcttatg

SEQ ID NO: 155982 - DNA, 2709 bp, Zea mays
  unsure (1)..(2709): unsure at all n locations
  Clone ID: MRT4577_7383C.1
gggttttccatcagtgtaactggagtcacaaagacaagatagctggtgatataacaacatggctcgagtggatcctgtcacagtcacttctccgaattgcagagtccaacccacaaggcatggatggtttttgggtacagaagggcacctcactgctgcttaggctattgaagagtttgtaaaaggatgtgcagcagcgggcggcaacagcacttgttacgtttgtggttatggatgacgagattgcaaaggtggatcctgcaaggtcggaggcggtgatgcagaatgggggcatccgaatgttgctggaccttgcaaggtgctcaagggagagctcgcattttgaagcagcaaaagctattgccaacttgtcagtgaataccaaggttgccaaggcagttgcagatgaaggcggcattacaatactcactgatttagccaagtcgatgaataggcttgttgctgaagagactgctggtggcctttggaatctctctgtaggcgaggaccacaaggcgtctattgcagtatctggtggttgtgctgcctttgccgatcttcagttcacaatcccaggaggtcggcatgcagtgcatcacgcaggtctcttgcaggaagcaggggcaggtcgggtgttgcgcgcaaccgcggcaagcgacaacagcttctattgaagctaaaatctttgccaggattgtactcaggaacttggagcaccatcagttagggatgtcaacatgaacacccagcagaggttcatcctccaataaacaaaggcctctgcatcgatgggctgcttggccaatgcagaatcaaacagtttggccttcggagccttttgacatcacaacagttttggtctgtgcagacagtgactgaaggagctccaccgaaggtataacccacaactgtgaagtgactgaatgaaaacataagtggcgacccttcgcgtattggacgtttaaggttgagtgtgcaattttctagagttcattttgcgtgtacaagtaaaaacttttttagagtcgatgagaattataaactggcatatagcttaacttatggatatttattccttattcgttagcgttgaggtgtgtggcggcgtcatgtagaagttaggttattcctcctaggatacatgtaactttataaatgtactgttatgtattttcttccttatggttgagtctgcacctttgctcacattggcacgctcagaggttgaagatgttcatgagacagctgcaggggcactatggaatcttgctttttattctggtaatgctctccgcatagtcgaagaaggtggggtgcctgttcttgtaaaaatttgctcatcatcagggtccaagatggcacgcttcatgtctgcactagcactagcatatatgtttgatggaagaatggatgaagttgctttggttggagcatcctcagctagcagttccaagagtgttaatattgaaggagctagaagaatagcatttaagcatatagagacctttgtgctcactttctcagatccacaaatgttctctacggctgctgcctcctcagccccggcagcgctgtctcatgttgctgaagcagtgtttatacaggaagctggacacctgagatgcagtcgctctgagattggtagatttgttgtcatgcttcggaatccttcaccaattcttcgtgcttgtgctgcctttgcccttcttcagttcacaatcccaggaggtcggcatgcagtgcaccacgcaggtctcttgcaggaagcaggggcaggtcgggtgttgcgcgcagcagcggcagcgacaacagcttctattgaagctaaaatctttgccaggattgtcctcaggaacttggaacaccatcagttagggacgtcaacatgaacacccagcagaggtgcatcctccaacaaacaaaggcttctgcaacgatgggctgcttggccgatgcagaatggactactttggctttcggagcctttttacatcacaacaacagtttttctgtgcagacagtgactgaagggacttcaccgaaggtataacccacaactctgaagtgactgaatgaaacataagtgacggcccttcccgtatcgggcgtttaaggtgaacctgcagttttctagagattattttgtgtataagtaaaaaacttttagcgtcgatgagaattataaactggcatagctaaacttatggatatttattccttgttcgttattgttgaggtgtgtagcggcgtcatgtagaaattgggctattcctcctagtatacatgtaactttataaatgtactgttatgtattttcccccatataaaaaaaaaaaaaaaaaaaaaaaaaaaaaaaaaaaaaatcaaggccctggtagatctaatatttcgttggcctgctggaaccgatggagttcttgaacgtgctgctggtgcgcttgcaaacttggctgccgacgacaagtgtagcttggaagttgcaaaggctggtggtgtccatgctttggttacacttgctcgctcatgtaaacttgatggcgccctagaccaggtaaacgacacatggctccagtggcggatctaggatttttgtttagggtacgccgtcatatattttccatgtgcatttggaatgacctatatattggttagcaatatggtaaacagcgcataaagcattgccgtccacaaataaanaaaaaaaaggac

SEQ ID NO: 155983 - DNA, 1007 bp, Zea mays
  unsure (1)..(1007): unsure at all n locations
  Clone ID: MRT4577_73840C.1
atcggatgttagcggctctgatggagaagacacctcatggatttcatggtattgcaacttaagagggaatgagttcttctgtgaagtcgacgatgattatattcaagacgacttcaacctttgtggtctcagcagccaagttccttattatgattatgctctcgatctcattttagatatcgagtcatctcatgttatgtaattgtgtaggtgatatgttcactgaggaacaaaatgagctcgtagaatcagctgcagagatgctttatggtctgatacatgcacgatacattctgaccagtaaaggactggctgcaatgctggagaagtataagaactatgactttgggcggtgcccgcgtgtttactgctgtggtcaaccatgcctgccagttggacaatcagacatccatcgatctagtaccgtgaagatatactgccccaagtgtgaagacatctactacccacggtccaagtaccaaggcaacatcgacggcgcatactttgggacaacgttccctcatctgttcctgatgacatacgagcacctcaagctacagaagctctcgcagcgctatgttcctcgtgtctttggcttcaagctccataagccatgagcctcatgtatttggcttcaagctccataacccagagttttgcgagatcaaggtccttgaagactacatataagagcgccattggctacatataaaagcgctattgacagatcagtggattgataaaactccaccatgcagcggagcgcttttaccttacctggctggcacctaccaacatttgaatgtagctctaaggataccgatgttgttgtaacctaactgtaattgtttttttgattagtaaaccaggaccccgtacgatgtagagtatgggcattatttatggcttatgcaaaaaaaatcgttatgctgtcccaaaaaaaaaaaaaaaaaaaaaaannnnnnnnnnnnnnnnnnnnnnnnnnnnnnnnnnnnnnnncnnaaccc

SEQ ID NO: 155984 - DNA, 1934 bp, Zea mays
  Clone ID: MRT4577_73841C.1
ttgggtacctcgaggccggccattcatcatcatcagctagctgctttgattccgaccgctgtttcctatcctttttcattcccacccgcccatcccttcaaaattcgctgcgtgtccctctctctccctgcgctcgtgctccgcccaggcccctttcctccaccgcgggcgcaaaccctaaccctacagccgctcgccccgcggcgcctgccaatggcgccccccgtgtgagtgtgtgtgagaggcagagacctagaggccgctacccggggaggagagggagggagagggagaggctgatagatgtataagcaggggggagcgggggtaggggctggtctggaccggaaacggatcagcgacgcgctagacaagcaccttgagaaggcggtcgcatcgccgtccacatcgagggggtcagcgggcggcggcggtgtgcgcgaccaccaccgcctcatcgtgccgtcctccgtgtcgtccatccccaagggccgctgctccgaaggggagtctgattctgatagtgaagcatcagatgttagtggctctgatggagaagacacctcgtggatttcatggtattgcaacttaagagggaatgagttcttctgtgaagtcgatgatgactacattcaagacgacttcaacctttgtggcctcagcagccaagttccttattatgattatgctcttgatctcattttagatattgaatcatctcatggtgatatgttcactgaggaacaaaatgagctcgtagaatcagctgcagagatgctttatgggctgatccatgcacgatacattctgaccagtaaagggctggctgcaatggtacatgttctgctctaactggtgtattcacacttagatgtagttttatatattaaggttgctttcttgtacagctggagaagtataggaactatgacttcgggcggtgcccgcgtgtttactgctgtggtcaaccatgcctgccggttggacaatcagatattcatcgatctagtaccgtgaaaatatactgccccaagtgtgaagacatctactacccacggtccaagtaccaaggcagtatcctaaccatactcttattatactatctttatgcgtgcgtttcaaactttgatctcttcgtgagaactcaaacgtatggtatttttgtaccaagtctgacacagctaccaatgttctcatgtcttagcacccatttacctacagctctttgttggttgatacagaaaactattaaacatgaaaacagtccactgcgcccaccaatcaccatgttttttcaactcccatagatataatattgtttagtgcctgagatgcactagctcttttctgtgttactgtggttccttagttgtagaatgtttgtcattttgttatatgctgctattttcttaaccttgtttagacatcgatggcgcatattttgggacaacgttccctcacctgttcctgatgacatacgagcacctcaagctacagaagcccttgcagcgctatgttcctcgtgtctttggcttcaagctccacaagccatgagcctcatgtatttggcttttaagctctacaggatgtggctcactgggggaaaacccagagttttgcgagatcaaggtccttgaagactacatataagagcgccattggctacatataaaagcgctattgacagatcagtggattgataaaactccaccatgcagcggagcgcttttaccttacctggctggcacctaccaacatttgaatgtagctctaaggataacgatgttgttgtaacctaactgtaattgtttttttgattagtaaaccaggaccccgtacgatgtagagtatgggcattatttatggcttatgcacataaaatcgctatgcttgtggccaacagtcaacgagtcatcagtgcggatggatgaaaa

SEQ ID NO: 155985 - DNA, 328 bp, Zea mays
  unsure (1)..(328): unsure at all n locations
  Clone ID: MRT4577_73842C.1
tcgagccggccgggcgacnatcaataagcnncgccgcgtctgttgatggggttcactgctccgtcaccacaggtacccatgccaggcgtacgcgctctacgcgccggcttcgcgggcgtgccgctcgacctcgcagccatcggcgacctcttcgccgccagccgcttcatggtcgcgcacgccaacaacctctccaccgccgcggccccggccaccggacagccgctgctcgtgccgctccagtgcggctgcccctccgggtcccctaactcctacgcggcgatgcagtaccagatcgtgtcgggcgacacctactggatcatctcca

SEQ ID NO: 155986 - DNA, 383 bp, Zea mays
  Clone ID: MRT4577_73843C.1
ggcccccaaaaaatttgcaaacttttgcccccagggggggcctaaaaggggccaaaaggccccacaccaaaaaaatcccaaaaaattaagtttttaatccccaaggcccaggaaaaggggtttaaaaaaaaactcgaagcggggggccccgggaaaaaaaaaaaaaataaaacaaggcgccggggagcaatccaaaggggagggaaggccctcctttttcccgaaaaaaaactcccccccgggaacctgggcaaaggggggttttttttaaacccaaaaaaaaccgggccaggttccggaaccccgaggacaaaaacaaaagcaacctcaaaaagggcgggataaaccccaaaaacctgttgaaaaccctggtgatgggggcc

SEQ ID NO: 155987 - DNA, 209 bp, Zea mays
  unsure (1)..(209): unsure at all n locations
  Clone ID: MRT4577_73844C.1
tgcagtagtacaagnctacaatcaactctactcctaatcagtgccattcctctgccactgcactttcactgtcgatcctgagtctatagnnnctggctgcnnctgagtctcgctccatnagaagtgtatctattagtatatgactatctatggcttcgnntgtggcgtnngctcgannnatatgcttnngcagtgtcgcnncgtcgccg

SEQ ID NO: 155988 - DNA, 320 bp, Zea mays
  Clone ID: MRT4577_73845C.1
ataaataacaaaattttaaaaatttttacttaacataaaaaatttcccccccaaagaaaggaaatgtttcaattatctcccaaacaaaaaaacattatcatttggcaacaaggtggtttcctataactgacttggacactctcccgtaataatttccactatatcctaaccttaaccgtataataacctatctaccatatataaaattcactaaatttttaaaaaattttactccatactctaaatatttccataaacccgtacatatttcccatactcccaaaaattttttcgacacgttcacctaaatattttataat

SEQ ID NO: 155989 - DNA, 403 bp, Zea mays
  unsure (1)..(403): unsure at all n locations
  Clone ID: MRT4577_73846C.1
taccggtccaacttcccggngcaacttccaattattattttcctttttttaaactttattctctcgaaccgctgtgaaaccgaacagcagtgaaaagagtcagcaactgaaaaaaatgtgggaactgaaggtggaggaaaatgtagtaaaggcttggctgaaagccgtgtaaaaaaaaaaaaaaaaaaaaaaaaaaagggcggccgccctttttttttttttttttttttttttttttttttttttttttttttttttttttttttttttttttttttttttttttttttttttttttttttttttttttttttttttttttttttttttttttttttttttttttttttttctaattttcaaaaaacctcccctgttatttaacccctttttttcgggggtt

SEQ ID NO: 155990 - DNA, 264 bp, Zea mays
  Clone ID: MRT4577_73847C.1
ctccacctccacctcctcctcgtcgtcgtcgttcgctacgcagccccgctcgacaaccacgaccacggctccctgccgcgccggcctgcgggtgccgtccggcgtccagacggcgacgtgcgcggcggcgtcccggccggcggacggcggctgaatcgggctgggctgggtcgacatcacgacgtcggcggctgaccgcagcgcggtcgggaggctgcgctcggtgggcggaggccgctgcggaccggccgagatgcacggcat

SEQ ID NO: 155991 - DNA, 473 bp, Zea mays
  unsure (1)..(473): unsure at all n locations
  Clone ID: MRT4577_73848C.1
cgcgggacccgnacaggaggggggggggggcgccncagaacgcccagggcacccanagcgcgnggggcggaagaaggggagacgnacaacgggcagcngggcaanngcgacacgggggagaacanccaccnnaggggggggannngcaccncaaaggaggngacagggggggggaggagccanagggggacanncgggggaacaccannaaggancnncgaggncccgaggaggggagngacaaggggcaggaggaaacnnccaaaagccgggcagaaaggaagccaccaggnggnggccgcggaagaggaaggggggacgnnggggcgaaacccggaggcagaggcancggacggggccanngagangggaggagaggcagnggcggccgaggaaggggnggagnnggngccaaaggggggaacaaagggggggggccgnggccggggcgaaacccggggggcacacgggga

SEQ ID NO: 155992 - DNA, 1925 bp, Zea mays
  unsure (1)..(1925): unsure at all n locations
  Clone ID: MRT4577_73849C.1
aatccttactatattaggcataaaattaggtgtagtttatttatttactggtactacttctttagtcataattaggtgtactagcagctacgccctgacggagacaagcacacacaatagaaaagagcgccctcgtgctcagagtgctcgcctttagtttcgtggctactatatactagttgcgacgatttttattttctttctcttctgggctatcattagcacggccatttaggggtaatgagcancggccaataaacaaagccctgagatgcatggggtagccaatcgggtgtcgccgtgcgcgcgcgcgcgcgtctggcctcctccttccctttccttgctaaataaagcaagtagcagataggggaaagtctgctcgcaagttgcatccgccctgcgccaagaaaagccatcgttcttcccacaaacgcacacatagaagcatcattcccctctcggctagcttcctcctctctccctcctcttcgtcttcctctttccttctcccttgggaaacctgctgcctttgagctttcttcttcgagtgctcccaccagatctcctcctccttaccttctttggcacgttcggcggcgcgcgcggagaaagatagatcccgccatcgtcgtcgccgtccttgcttccgatcggagggccacaaccacaacctctcgctccttagcgtgcgcgcgcgagccagggtcaagaagagagctagctataggccggagatcgatggggaggggaaagatcgtgatccgcaggatcgataactccacgagccggcaggtgaccttctccaagcgccggaacgggatcttcaagaaggccaaggagctcgccatcctctgcgatgcggaggtcggcctcgtcatcttctccagcaccggccgcctctacgagtactctagcaccagcatgaaatcagttatagatcggtacggcaaggccaaggaagagcagcaagtcgtcgcaaatcccaactcggagcttaagttttggcaaagggaggcagcaagcttgagacaacaactgcacaacttgcaagaaaattatcggcagttgacgggagatgatctttctgggctgaatgtcaaagaactgcagtccctggagaatcaattggaaacaagcctgcgtggtgtccgcgcaaagaaggaccatctcttgatagatgagattcacgatttgaatcgaaaggcaagtttatttcaccaagaaaatacagacttgtacaataagatcaacctgattcgccaagaaaatgatgagttacataaaaagatctatgagactgaaggaccaagtggagttaatcgggagtcaccgactccattcaactttgcagtagtagaaaccagagatgttccagtgcaacttgaactcagcacactgccacaacaaaataacattgagccatctactgctcctaagctaggattgcaattaattccatgaagaagagtaaaactgccgtcttatgatgctgaaggaaactatttattgtgaagagatgatactcagagaaagacatatttgtggcagggagatttgagatatgaacttataaatgtaatgcaaataattttcagactggaatggggtcgtggaattcagaggatgattgctttctagttgcatttgatgtttgatgagacttttctcatgtgaaacgtttattaaaacttcaaaatggtgcagatgttgctactacccttgttaggcttgtataaatatttgactttgtgtactagcattacgaaaacagaaaagaagacagacagccgtgataggggacaatgatgcgatctaggagtacaaacagagtctagtttccactcagttgagttttatattgctctcaagcgttatcaagggtttagtaggatacagatataattaagatacagtggttaaatcgc

SEQ ID NO: 155993 - DNA, 567 bp, Zea mays
  Clone ID: MRT4577_7384C.1
cctcccagccggtgcgaagcgcggcgtcattatctcacctcccgattgccctccgtcatccgacggctctaagaccgctgttcctccttgggatctgacctcaacggtgggcgaaggcagagcgcgtggaccacaacgacgatcccgctcaggaagcgcactacgcgtgtccccttccgacggagaccggcattgatatgttccgccgcatacacggacggcctccgcactgtctactacgagctcgcctttggggcgatcgttaccgccatccccagcattcctcgcaatgctgtcgcagtctgtcaaggtgatcttcgcctccctctctgttgtcctcgccctgcactgatcgtgtcacacctcttggccgggattagcttcttctaccacagggtctacatccttcttgagcacaccgctgaccgggagcgagctagcgatcactgatgcgacctgttcaggaacgagaaagaagctgcacatatggcggatgtgctgctcgtatatggccaccttccagatgatcctaatgacatgactgctaatgagatcgatgacctggac

SEQ ID NO: 155994 - DNA, 370 bp, Zea mays
  unsure (1)..(370): unsure at all n locations
  Clone ID: MRT4577_73850C.1
cgcngcggggggggtcaccggcgccgccgaaaccgagacgcggggggcgggnncaccgcagcgcacagagcacccccgacncccgncccganccgcgcgcnccgcnacgacgccccagncanggcaggaanggcacccgagggnncncagnnngangccaagcgcgggtggggcggaaatgcangagctgctgagcactggtgagactgaggagttcttcacttcatatgatgaagtttttgaaagttttgatgacatgggccttcaagagaatcttttgagaggcatttatgcatatggttttgagaaaccatgctgcattcagcagagaggaattgatcgccttctgcaaggggcctgatggccttca

SEQ ID NO: 155995 - DNA, 211 bp, Zea mays
  Clone ID: MRT4577_73851C.1
ggccgcccttttgtaaacagctgggagcataagcacgccgagctgtgctacgagtggctataggggaagctggttcgcctggagctaccgggccggggctgattaccgggacgacgagctcaataccctacggtcgatcgctatcagcatggggtgctctatataccgcaggtacgagacctggtcctttgggcatatagccatgggattt

SEQ ID NO: 155996 - DNA, 280 bp, Zea mays
  unsure (1)..(280): unsure at all n locations
  Clone ID: MRT4577_73852C.1
cggacccctgggccgacgcgtgggcttacgcttgggagagaacagaccanaccgtgcaggccgacatagtatgggtttagttctccaancaatcctatcnccaacccttccactgatcgttgctgccctctgtttcctccggcgcgggcgccgacgcctattttctccgccgatcgcagaaagatcgacgggatcgtggtgacggagaaaggcgccaggagctgcgtctaatgccgcgccaccaccacgcccatgtggcgcaatggccccaccgttccca

SEQ ID NO: 155997 - DNA, 453 bp, Zea mays
  Clone ID: MRT4577_73853C.1
aagttctttaaacagctgcttcaaaagtagatatttactggtttggtcgcaatgctggtcatagtgtgcgattatacaaagaatctataccactttttatgaaagattttaacaaaatgaaaccaattccaaaagcagttaaatttggctatactctttatccaaatgaagcgttttcaaaattgcctcgtttctttgttgaagatcaagctgaaaatgtggtttattattcaattgctgaaaaaggaagtcacttttcatcatttgaagaacctgaagttgctgccaaacaaatcttagccttcttggatgcagtctattctgctcctaatgaacagcaatctaattaaatcgagataagaaaatatttttgtacttaaagttgttatttgtgttactgaaaatgaatgtatttattgaatatttgattaaaatatttaaaaatacagttaa

SEQ ID NO: 155998 - DNA, 313 bp, Zea mays
  Clone ID: MRT4577_73854C.1
cgttgctgtcgccgttgctgtcgttttttttttttggatgaagatgaacaaatttacaggtcatgccaaccatggaggggtgccaagcaagggtcatgccaagcaagggccaagcatcaaggcatggactgatgattcctcttcctttgggctgcactatttatatatgcacacactctcactctagcagtctagctacagaggggaaacgaaactaccatcctaccactagtattcagtattcactgcagtacacataggctcagggagatggaggggtaaataaatcctcctaaacccatatatatggaga

SEQ ID NO: 155999 - DNA, 455 bp, Zea mays
  Clone ID: MRT4577_73855C.1
ggtatctagagctatttttgttcatgtcgaccctgatgcaacaggtgataactaaatgacaagtctgcttacagcctacctgcgaacagaacggacatgctacgacctaactagcacatgcttgccaatactgatgtgccacgtgcgtactatgaacgaccgtgcaatgagtaactgtattgtgatagcatcttgtggacatactctcagaccaagggtgaaactgggggctcaagattacaaggagctgatgcagctgttttaggataccaccagcctcgcccgttgaggaactatctctctatgagacggattcacaataattgaccattggatgggcttaagctacacgggccacagttttgtatagcgtgatcggtaggtacggggaagttatacctctagcgctcttgggaagaaaaggaccattacattaattatatacagttaccttt

SEQ ID NO: 156000 - DNA, 304 bp, Zea mays
  unsure (1)..(304): unsure at all n locations
  Clone ID: MRT4577_73856C.1
ntagcagtggtaacaacgcagagtactttttttttttttttttttttttttttttttatttttttttttttaaaaaaaaaaaacccctttttttaaggagtaaaataacccccggacgacccccccaaaaacaaaaaaactgcggccgaccaaatggaaaatacaacgcccaagggggtcatacaaaaaattgtcggctcctcgaaggaaccccccaaatccacaagcatagccccacccccacccccaaattaggaggcccagggccacatgcaaaacatcaggggcgagtggcacacctccg

SEQ ID NO: 156001 - DNA, 363 bp, Zea mays
  unsure (1)..(363): unsure at all n locations
  Clone ID: MRT4577_73857C.1
ggcttggaacctttgggctggtttaatttgcttgtttatgtgcttgtttatgtgcttgtggatgtgcgggttcgctttattcgttgtgggcgcgtgagtcggatngtcctgagcatcgtcataggcggattcctgttggtgatggtgcggattcgatgtataatgcgatggcgtttaagccgatggcggagacggttggcggtgtgaggtcagagttggaagttaagagtgcggcgacgttggaagcagcgtttggggcggtgcgttcggttcccaggaagtcgttgtggggagggttcgggactccgggtaatgcgtctacgtaagagcatactcgggagactgattatngaaaggggaaga

SEQ ID NO: 156002 - DNA, 217 bp, Zea mays
  Clone ID: MRT4577_73858C.1
ctttaattaattttattttatttaatttccaaaaccataatattttttgctccttgtaaaaacagacgggcgttgtctaaagtttcgaaaagcattactaaacatgtatgttcttatttacacacatggtcgttcgaataaacacacaaatatacaagtttatctttggacgggttgttgcaaaacaatattcttagaccgactttgtaaatacaac

SEQ ID NO: 156003 - DNA, 416 bp, Zea mays
  Clone ID: MRT4577_73859C.1
ttatttttttttttttttttttttttttttttggggttacttttggtcaatttgttcggtttatttgtctgcatcattttttcatttgctggtttagaaaacaacagtgttccgaaaaaccgtgggcccccccgcctaggggattggaacccagccgccaccaaatatcaaacccgcatacacagtctatgttaaaccgtgccagggttaaaacgggaaacggaaaaaaagcggcatattgaaagcccctctaccaggcccaaacttaaaagctggactttaaaccctcatgaagggcccaagggaacacggtcgggcatactttaagggggccctaggcataggggggtcccccataagaggcaacacgggcaaaaaagccatctgcccccctttggctacccccgggacccccc

SEQ ID NO: 156004 - DNA, 1985 bp, Zea mays
  Clone ID: MRT4577_7385C.1
cattgggtacctcgaggccctccatcgagttggtctttggtcgtgcatcgtgctgaactgctgacgcttcgcgcgggtccgaggtcaggcagcagcagcacggagtagcaccagggcgaccgcccaggttatcgtcggccgccggcgacctgtaccccggcgaggagatgcatctgagcgcgaacgaggggatcgagggtctgcgattcgcggtgacgggcgggcagggcttcgtcggagctgccctcagcctcgagctgctccgccgcggtgcccgcgaggtccggtccctcgatctccgcgcctcctcctcctggtcccagcagctcctcgacgccggcgtccgaatcatccaaggggacataagaaagaaggatgatgtgcggagggctttccgtggagtggactgtgttttccaccttgcttcttatggcatgtcagggaaggagatggtgcagactgggagatctgatgaggttaatataaatgggacctgcaatgtactggacgcttgccatgagcaaggtgtcagaaggcttgtgtatgtaagcacatacaatgtggtatttggaggaaagccgattgtcaacggaaatgaggcgttgccttattttccgattgaagaccatgttgatgcttatgggcgcagcaaatcagttgctgaacagctggtactgaagagtaacgggcggccagctaagagtgataaaagtactcgtctttatacatgtgcaattcgccctgctgctatatatggaccaggtgaagagcgtcattttccaagaatcctgtcccttgcaaagttgggattagctttcttcaaaattggggacccaggtgtcaagacagattgggtttatatagataatctagttcttgctctgatattggcaagcatgggacttttagatgacattcctgacaggaagggaactcctgtagcagctggtcaggcgtatttcatatgcgatggatcaccatgcaatacttttgaatttatcatcaagcccctttttcaaagtttgggttattccgttcctcaagtggtgctggatacctccgttgcccttgccgtttcaagaatatttttattcatatctacactgttctacccatggcttgatagtaaatggatgcctcagcctctaattctccccgctgaagtttacaaggttggtgtcacacactacttttcgttcttgaaagctagagaggagctcggctacgtgcccattgtgaggccccacgaaggcttagccgcaacgatctcgtactggcaagagcggaagagaagggagctggatggcccgaccatattcacttggctggccgtaacgatcgggatgctggccgtgttttctgccgcctgcctcccgccagtcggcccgttgaaatgggtgctcgacgtccacctgtttgttttccgctcgatgctcgtgatccggctggtcttggcggtagcgatcgcactgcatgctggcgaagccgtgtacgcctggttcttggcgagaagggttgacccgaggaacgctgccgggtggttctggcagaccttcgctctggggtacttctccctccggtaccttctcaagagaggcagagcgtgaattcgtgtttggttcacatgtacgtacactgcggatcctgtaacagtggttccaacttccaagcttcatgcttggtttttattgaggaggaggcgtcaggcgtatgagcatccccagatcgtatccctcctgacatgcaactgcctgtggtcggatcggatgtactttgtggtgatgctgtgaactggtgaaagtttaacaggtcgctttcttggatgagctgtaatgtaactagccattgttagatccaaatgcaacggatgctccagcagaaatttggtggctgtcgcacatctaacgccgtatatgaaccgtatgatattattgatattgatacgtcgaaggtggaaaaaaaaaacccagctcgttttccttgcc

SEQ ID NO: 156005 - DNA, 400 bp, Zea mays
  unsure (1)..(400): unsure at all n locations
  Clone ID: MRT4577_73860C.1
acagcntatttcattgataatgtccacaagggccaaagcctgcctgcaaattcgtccactactgctaaagtggtttgtcctataccttctttaacgggccgggtcaccagtgctttctgctttggggacccacgacaacctttgacagaagcacactcgattgccaggttcaagaacatttgcttcatgtcatcctccaaagcaaatgccagagcttttccatccataactagagcaaatgctgcgtctggatccttctcgagtttgaccctttgtgacccattggcgatttgcgacaggagactctcctttgcaaccttttttgcgtcctgagctacctgctcacccgtgggtntggacaaacatatttgtttcatgccttgcctcagttaactgcgtg

SEQ ID NO: 156006 - DNA, 409 bp, Zea mays
  Clone ID: MRT4577_73861C.1
gacagtacagagctttgctacattgacagtacaaacaagccaccgcccaccacccaagaggtgcagaggcgctctctggtcgggctacaaggcaccgacgacagtggaggcacgcatccatgacggcaggagactctacaactctgatcgtatctcgcagaggcggttctcctgttcaaggcgctccagatcacacggaggatctctaatacacgcctgacggcatacagaatcctgaacaacccaagagcgcagagttcttgtttacaatgttacatgctatttcttattacacattaaattcagatctaagttatatctccaatctgaagtacaaatgcaacaatgcaaatgctcatcatgatgtgcatcactatatactattcatttcctgcttcttcaaggactt

SEQ ID NO: 156007 - DNA, 655 bp, Zea mays
  Clone ID: MRT4577_73862C.1
cggacgcgtgggggagaaaccgccggcggccgtcggcggtttcacggacacgtctacggcgcccgagaccgggctcgcagatgtctgcagcggcggcgtgaaggagcttgtgccggacccgggccacttcgagtggccgtcgggctgcgatctggggtcctactggggcaccagcgtgttcgccgacaccgacccggcgctgttcctgaacctgccgtgagccgtgacaacgccacggcgtccatgctcaactaatcaaccatcacacgacccacgagatagatgagatgtgaaccgagcacgctgagcgtcaagctcttgaaggcttgaagctgtgctgtagtttcctgagcttactagcgatctctgcttgtctctgatctgataatctcttactagtcgccgtttgtgctccgatctagtaacggctaacatggtcggctgttacaagtgcatgaacctgtgcttgatcttgagctaaatcatggtgtttttgaggctatgatcgaggatcacaagaacagctgcaaggagaacggcgacttgcaagtcgtgtcattgtaactcttggtttggttggaggcatatattctgaagccgtctaaagcatgctgcgcaagcgctaaaaaaaaaaaaaaaaaaggcccctagggcc

SEQ ID NO: 156008 - DNA, 382 bp, Zea mays
  Clone ID: MRT4577_73863C.1
aagaaacacccggtctgattctatttaataaggggaggaattttacacgggaaattccgggcgcgctatatattaacttgggacatggagggcacgttatgccatccgtacatgcagtttgacagggtacatgatcacaggaggcatttgttgcattgggacagagaaggaaaatggaagaagaaaaaaaagaggggggggagaaaaccaaaaccatttggttgatcaaagcacctttttgatcattgggtgggggatcaaagggaggcaatggaaatgcctgcagcttatcaaaagagccaatggggtgtttttttgggcaggacgccctccttgatgggccgcaagctgggcttccaccccctggtggacagctcccggg

SEQ ID NO: 156009 - DNA, 162 bp, Zea mays
  Clone ID: MRT4577_73864C.1
cacaggggaacaacactttgggattttcatttcaatgggccattgaggccatggctaacactgacactgccacccatggggatgggcgacacattattactcaatcatcgccgttaaatgactaacctagctagctagccaacggctatactacagcacata

SEQ ID NO: 156010 - DNA, 623 bp, Zea mays
  Clone ID: MRT4577_73865C.1
acaaagtacactttacattccagaactcaagttttacatggtagaaagagatgtatttattacaagtcctgatagtactcgaagtgcataacttattacaataattggaagggtgaagcctttccataaaagatatataaaaaccttctaagcttcaagtcctccacatgaagtaactaacctaaagataagggaataaaacttctcctttgttgcagagaagaggttctagatacttctaccctataaccagttagatagctccatcacttgatcagcagacactggagtagactcctcttcataatcttcttcttggaactctacatgaaatgtatgtccatgaatgcttatactcacgttatgaaactgtgaggaacaaggaacgagcacaacacggctgagacaatctccacgaaccccggccatggtgaggttaagaacgggtgggcgtggtcaccactggcaggaagatggcgtgcaagtttctgtgaggggcgaagtttggtgactggggagaggtgagtactagcgtgaacacaggaattccagcacttacgcagtggtctcgagctaaaacctgagggcaaggggaagctttactgaacccaagcgaagggcac

SEQ ID NO: 156011 - DNA, 267 bp, Zea mays
  Clone ID: MRT4577_73866C.1
cacagagcggagcccagaccccaactgcgtcactgtgacggggctcccagagaatgtggaggaagccatcgaccacatcctcaatctggaggaggaatacctagctgacgtggtggacagtgaggcgctgcaggtatacatgaaacccccagcacacgaagaggccaaggcaccttccagaggctttgtggtgcgggacgcacctgggaccgcaagcaccagtaagaaggctcctgacatgagcagctctgaggaatttcccagctt

SEQ ID NO: 156012 - DNA, 234 bp, Zea mays
  Clone ID: MRT4577_73867C.1
tgcttaggctacagttgcgttccggctgattaactattttatgtattttcttatccatgtatctactactactgtaactgtactccttttcacaatgtgcaatgattaggcttcttttgccgcttctagactagattttatattgcgccatgctttggattttttttctttctggactagagcgagcattgtacagtgtgggcaatgaaaaaaatgttctattaaaaaaagaaa

SEQ ID NO: 156013 - DNA, 931 bp, Zea mays
  Clone ID: MRT4577_73868C.1
ggaggacgagatcgccgggctgagagagatgttcaagatgatcgacgcggacaacagcgggcagatcacgttcgaggagctcaaggttgggctggagaaggtgggcgccaacctgcaggagtcggagatctacgcgctcatgcaagccgtaagcgcaccgcaccttgttcccgtccttgtcactggcactatgactgcgagtgctgaaggaaaacttgctgttgctgcgtgcgtggtgcgcaggcggacgtggacaacaacggcacgatcgactacggcgagttcatcgcggccacgctgcacctgaacaaggtggagcgggaggaccacctgttcgcggcgttccagtacttcgacaaggacggcagcggctacatcaccgccgacgagctgcaggtggcgtgcgaggagttcggcctgggcgacgtccagctggaggacttgatcggggaagtggaccaggacaacgtagtcagccccccctcctcctcgttccttcttctcttctcttctcttctctgcgtctgaattgttctggacctgctgctgcaggacgggcgcatagactacaacgagttcgtggcgatgatgcagaagccgacgatgggggtgctcccgaagaaggccgacctgcagaacagcttcagtatcgggttcagggaggcgctcaggatggcctagacctctctgtctctgctcccctgctgcatgtgccatagtccatagccatacaggcggccctgcagcggtttggctgcttggttccaaacggttctgtttcatgtcgcgtgcactggagcacatgtgccatatctgcctgctgctgctactgctatatgccgtgcacgtgcacgtcggtgacctgaaacctggctgtccgccggccaccgagctctaacggaattctgccatgctctccggccccggccgg

SEQ ID NO: 156014 - DNA, 406 bp, Zea mays
  unsure (1)..(406): unsure at all n locations
  Clone ID: MRT4577_73869C.1
cgtattccgtggcatcgcacgggcacgttcctagttaagataatatttttttatttattcttccctggcgcgtccccaggctaatcctccccttttttggcaccttctttggtttggatttcgggcaatcctccccccccgaccttggcctccgcgggggggggggctccccccccgtgccccggttttccaaatcttcccggcttggaactccccctcgttctgccccctgatgggcccgtgccccaacctgtggggggcttcccccaccgcgaccccctttggttcaaaccccaggcttcccggggttaccacccaaggcccttttgtcacaaagcaacgcccgccgcttttctgacccccggcttgccntccatgcccgcctcgcccgcccggggggctcggg

SEQ ID NO: 156015 - DNA, 747 bp, Zea mays
  unsure (1)..(747): unsure at all n locations
  Clone ID: MRT4577_7386C.1
cgagggcgcgcgtgtggtttgtgccagcgaggagccggagcgagatctcgctgccaccgcgcacgcccccgtcttcgtctcccccgcgctaatctcgccgcggcagtgcgtcctccgccccaccttcccgaaaatgtcgtcgcccccataaccgcgcgggccggcaccgcggcgcgcagatctcgctccggctcctcgctggcacaaaccacacgcgcgccctcgacccatggcatccccaaatcccgccccggttcctctcccttcccgttcgcggacgatgccgtcgcgcgtcgacattcgcgtccccaaatccccggtttctcttccttcctgttcgcggacggcgcttccgcgcgtcgacgttcgtgtcccaaatcccgcctcggttcggcgcttccccacatcgaggcgccacaccatcgtcgccggtcccgatagcgtcgacagcgcgtggccccatcgttcgcgaaccaacctggccaagggtgccctgttgctgacggacaaggacctggagtcggaggagagcctgtggagtctgtacgagcggtggcgcagcgtgcacaccgtgtcgcgggacctcacggagaagcagagcaggttcgatgcgttcaaggaggagtttgtcagcaagtacacgggcgccaaggtcgncgaccccgactccgaggctggcgntgncaggctcgncagcgacgtgtgcgtgtcgtccagcgacgagtttgtcgtcgcaactgggccgcc

SEQ ID NO: 156016 - DNA, 2642 bp, Zea mays
  Clone ID: MRT4577_73870C.1
cgggatcacttgttcttcttcgagctaccagctgcctatcatggtcatcatcgtcgagctgctcaatccaggccggcacttgcctctctaatcctcagtcctctgtagagctggtcctcctacccctcactttgccttgagcaatttggtttctagcatctgtggggtggcttgtgggtggtcgccttggactgctccttcctccacctgccgcgccggcagggcgacgagggtccaaaagcctggtggggctcatcatcaagaacaccgaagcggcgagagtggcatgggatctgatccgaggcggagctcgaggagctgagggctgtacgtgctcttggatccggtagagatcacgtgccctcgtgttcgtccccggccgccgcgatggggaacacgtgcgtcggccccagcatcaccatgaacggcttcttccagtccgtgtccacggcgctgtggaagacgccgcaggaaggcgacgcgctgcccgccgccgccaatggccccggcggcgccagcccgggccggttcgcagtcggcgctgccgaagccggcgtccgacgtgcaccacgtcgccgtgcagagcgaggcccctgagcccgtcaagatcgccgcctaccactcggagccggcgcccgccgtgcggagcgaggcccctgagcccgtcaagatcgccgcctctcactcggagccggcgcccatggccgccaagcctggtggcgccgccgccaacgccagccccagccccagccccaggccgcgtccgcaggtgaagcgcgtgtcgagcgccgggctgctgctggggtcggtgctgaggcgcaagacggagaacctcaaggacaagtacagcctggggcggcggctcgggcaggggcagttcggcacgacgcacctgtgcgtggagcgcgccacggggaaggagctcgcgtgcaagtcgatcctgaagcgcaagctgggcagcgacgacgacgtggaggacgtgcggcgggagatccagataatgcaccacctggcgggccaccccagcgtggtcggcatccgcggcgcgtacgaggacgccgtggccgtgcacctcgtcatggagctctgcggcggcggcgagctgttcgaccggatcgtgcggaggggccactacaccgagaggaaggccgccgagctcgcccgcgtcatcgtcggcgtcgtggaggcgtgccactccatgggcgtcatgcaccgggacctcaagcccgagaacttcctcttcgctgaccactcggaggaggccgctctcaagaccattgacttcggtctctccatcttctttcgccctggccaaattttcaccgacgtcgtgggcagcccttactacgtggcgccggaggtactgaagaagagatacgggccagaggcggacgtctggagcgctggcgtaatcatctacatcctgctgtgcggagtgccgccattctgggcagagaacgagcagggcatattcgaggaggttctgcacgggaggctggacttcgagtcggagccgtggcccagcatctccgacggcgccaaggatctcgtgaggaggatgcttgtcagggacccgaggaagagactgaccgctcacgaagttctacggcatccgtgggttcaggtcggtggagtggctcctgacaggccgctggactcggccgttctgtctcgcatgaagcagttctcggctatgaataagctgaagaagatggctcttagggtgatcgccgagaacctgtcggaggacgagatcgccgggctgagggagatgttcaagatgatcgacgcggacaacagcgggcagatcacgttcgaggagctcaaggttgggctggagaaggtgggcgccaacctgcaggagtcggagatctacgcgctcatgcaagccgcggacgtggacaacaacggcacgatcgactacggcgagttcatcgcggccacgctgcacctgaacaaggtggagcgggaggaccacctgttcgcggcgttccagtacttcgacaaggacggcagcggctacatcaccgccgacgagctgcaggtggcgtgcgaggagttcggcctgggcgacgtccagctggaggacttgatcggggaagtcgaccaggacaacgacgggcgcatagactacaacgagttcgtggcgatgatgcagaagccgacggtggggggatcccgaagaaggccgatctgcagaacagcttcagcatcgggttcagcatcgggttcagggaggcgctcaggatggcctagacctctctgtctctggctcccctgctgcctgcgtgtaggtgtagatgattgaattgagtgcatgtcagtgcagttgctgtagagaccaccgtagcatagagatctgatgagatgcgagttgaggcgggccaggagacgtgtacatgtgccatagtcccatacaggcggccctgcatcggtttgatttgattgcttggttccaaacggtcctgtttcatgtcgcgtgcacatgtgccatatctgcctgctgctgctactactgctatatgccgtgcacgtgcacgtcggtgacctgaaacttggctgtccggcggtccggccaccgagctctaaggctatccatagcggtttttctaaatttttatccttatatcattttttgcgtc

SEQ ID NO: 156017 - DNA, 186 bp, Zea mays
  Clone ID: MRT4577_73871C.1
gcatgagtcgttgagcccaggcacgcgtacggcagctaagtgttagcctcgagggcgtgcccgctccgccggatctcgaggatccaatccgccgcggcctcgactccctagcaacccgcttctacggccaaccgacactcaggtacggtccgtacctggggaggaaactggatccggagcccggcc

SEQ ID NO: 156018 - DNA, 198 bp, Zea mays
  Clone ID: MRT4577_73872C.1
aaaaaaaaaaaaaaaaaaaaaaggacaaacaaataaaaaaaaaacaaaaaaacaaacacgggcaggcaacaaaataggtgtagtataaaatcacctaaattgggcggccgttttcggggttctacattttcgtccctggcataaccctgttttttcctaatttagtggccctaaaactcattccccctttccgctgtt

SEQ ID NO: 156019 - DNA, 906 bp, Zea mays
  Clone ID: MRT4577_73873C.1
cgacttcgagtcggagccatggcccagcgtctccgaaggcgccaaggatcttgtgaggagaatgctcatcagggacccgaggaagagactgaccgcccatgaagttctacggcatccttgggtccaggttggtggtttggctcctgacaagccgctggactcggctgttctttctcgtatgaagcagttctcggccatgaacaagctgaaaaagatggctctcagggtgatcgcagagaacctgtccgaggacgagatcgcggggctgaaggagatgttcaagatgatcgacgcggacaacagcgggcagatcacgttcgaggagctcaaggtggggctgaagaaggtgggcgccaacctccaggagtcggagatctacgcgctgatgcaagccgcggacgtggacaacaacggcacgatcgactacggcgagttcatcgcggccacgctgcacctgaacaaggtggagcgggaggaccacctgttcgcggcgttccagtacttcgacaaggacggcagcggatacatcaccgccgacgagctgcaggtggcgtgcgaggagttcggcctgggcgacgtccagctggaggacgtgatcggggaggtcgaccaggacaacgacggccgcatagactacaacgagttcgtcgcgatgatgcagaagccgccggcgggtctgcccaacaagaaggccggcctgcagaacagcttcagcatcgggttcagggaggcactcaggatggcctgaccctgaacagctggttggctgcctgcctgcctgtagatgacgaacggagttccgaactgggtgagttccagtagagacggcccgaggcgggcttgagacgtgtacatgtgccatggaggcagaagttggactgctcggttccaaaacggttttgtttc

SEQ ID NO: 156020 - DNA, 1907 bp, Zea mays
  unsure (1)..(1907): unsure at all n locations
  Clone ID: MRT4577_73874C.1
ccggccgggggccggagagcatggcagaatgccgttagagctcggtggccggcggacagccaggtttcaggtcaccgacgtgcacgtgcacggcatatagcagtagcagcagcaggcagatatggcacatgtgctccagtgcacgcgacatgaaacagaaccgtttggaaccaagcagccaaaccgctgcagggccgcctgtatggctatggactatggcacatgtacacgtctcctggcccgcctcaactcgcatctcatcagctctctatgctacggtggtctctacagcaactgcactgacatgcactcaattcaatcatctacacctacacgcaggcagcaggggagcagagacagagaggtctaggccatcctgagcgcctccctgaacccgatactgaagctgttctgcaggtcggccttcttcgggagcacccccaccgtcggcttctgcatcatcgccacgaactcgttgtagtctatgcgcccgtcctgcagcagcaggtccagaacaattcagacgcagaagagaagagaagagaagaagggaacgaggaggagggggggcttgacgtacgnttgtccctggtccacttccccgatcaagtcctccagctggacgtcgcccaggccgaactcctcgcacgccacctgcagctcgtcggcggtgatgtagccgctgccgtccttgtcgaagtactggaacgccgcgaacaggtggtcctcccgctccaccttgttcaggtgcagcgtggccgcgatgaactcgccgtagtcgatcgtgccgttgttgtccacgtccgcggcttgcatgagcgcgtagatctccgactcctgcaggttggcgcccaccttctccagcccaaccttgagctcctcgaacgtgatctgcccgctgttgtccgcgtcgatcatcttgaacatctccctcagcccggcgatctcgtcctccgacaggttctcggcgatcaccctaagagccatcttcttcagcttattcatagccgagaactgcttcatgcgagacagaacggccgagtccagcggcctgtcaggagccactccaccgacctgaacccacggatgccgtcccacgcgtccgcccacgcgtccgcccacgcggccgcccacgcgggcctcgctccgcacggcgggcgccggctccgagtggtaggcggcgatcttgacgggctcaggggcctcgctctgcacgtcgacgtggtgcacatcggacgccggcttcggcagcgccgactgcgaccggcccgggctggcgccggcggcgggcagcgcgtcgccgtcctgcggcgtcttccacagcgccgtggacacggactggaagaagccgttcatggtgatgctggggccgacgcacgtgttccccatcgcggcggccggggacgaacacgagggcacggaatctctaccggatccaagagcacgtacagcccctcagctcctcgagctccgcctcggatcagatctcatgccactctcgccgcttcggtgttcttgatgatgagccccaccaggcttttggacctcgtcgccctgccggcgcggcaggtggaggaaggagcagtccaaggcgaccacccacaagccaccccacagatgctagaaaccaaattgctcaaggcaaagtgaggggtaggaggaccagctctacagaggactgaggattagagaggcaagtgggggcagcagctcgaccatgatgaccatgataggcagctggtagctcgaagaagaacaagtgatgacgacgagagcatccagaggggaagacaaaagggcagcaggagctgatggtgtggaaacgcgtgatcatccctcgcagtctcgcactacgtgagggggagtaggacgcgacgggcggagaagcttttctgaacccggccggc

SEQ ID NO: 156021 - DNA, 855 bp, Zea mays
  unsure (1)..(855): unsure at all n locations
  Clone ID: MRT4577_73875C.1
cattgggtacctcgaggccggccgggggcgccacacgacggatggcttcatccgattggtgtggtctatttgtctcccagtcccactccgttcactcgagctctccaccagctttccccttctctccggtccgggaatcggaagctcagggcagaagaatcaacctgaacaagaagagactggacaaggaagctttgactgctgcgaaattggcgaagaaggagagcaaccttcgaaggtctgtgggtgctgaccagtatctcagtgcctcaactgatgacatagtccctttggacaactacctggacacccagtactttggacagatcagcatcggcacgccaccacagaacttcacagtgatattcgacactggaagctccaacttgtgggttccctcatccaagtgctacttttcgatagcatgctacttacaccacagatacaagtcaaccaagtcgaagacttacacaaagaatggagaatcttgtacgataacatatggttctgggcaaatcgctggcttcttcagtgaggacaatgtgttggttggcaaccttgttgtgcaaaatcagaaatttattgagacaactcgagaaaccagccctactttcatcattgggaagtttgatggaattcttggtctcggatttcctgaaatttctgtaggaggagcccctccaatttggcagagcatgaaacagcagaaactggtcgcaaaggatgtcttctctttctggcttaatcgtgaccctgatgcatcttctggaggaggcgagcttgtcttttggtggtgttgacccanaacactacaaaggngaccatacatatgttcccgttacacgcaagggctac

SEQ ID NO: 156022 - DNA, 170 bp, Zea mays
  Clone ID: MRT4577_73876C.1
gtccggggacgcgtacgcgtggtgctagagactcttagtgcacaacctaccagcagcgcccacaggtaagggtaacgggctggggtctacagggcttggccgagcccactcctttggcggtggcaggatgagctgaattcttgagctcgtcgtcctcgtttccgccgcca

SEQ ID NO: 156023 - DNA, 1286 bp, Zea mays
  unsure (1)..(1286): unsure at all n locations
  Clone ID: MRT4577_73877C.1
ggcaaactgagaggtggcttccatatcggtagtaaatagttaaacatcccgctatttacagtgagtgtgactggaatcaaaatcacaacttttcctactaaatcggaggaggccactctttttcctaccaatctaaaataaaatgattgagctagctgctgttgtatcgtacccctcgagggaccatggaatcaaaatctgcaaaggctcatgagaaagcatcaagtcggtttctctgccgattcgtctatcgtcgatgagttgatcgagaacccatcgaggaagtcgctgtcggggtcaaggtgcaggtctttgaacatggccatgacctgtatcatggttggcctctggttgggccggtcgtccaagcagtcgcgagcgatcttcagatactggtagagctcagcttcccctgacttggtgttcgtcagcgtaggatcgaagatgtcaccgctcctgttctccttgaccatctgcttcgcccagccgacaagattgttgtctccaaactcggtcgggtcgatgggcttcttccctgacagaagctccaggagcacgaccccgtagctgtacacgtcgcccttggtggtgcaccggaagctctggtagtactcaggtggcacgtacccgggcgtacctgcaagtgtgctgacgctcagatgcgtgtccagtgcattcatcagccttgccatcccgaagtcagagacacgggcctccaggttgctgtcaaggagcacgttgcttgacttcatgtcccggtggatgatgtgcgggatgcagctgtggtggaggaaggcaagcccccttgctgcaccgatggcgatcttcttccttgctgcccagtccagcttcacaccagcagtcttggccttgtcgtgcagcagaacatctaggctgccatgcttcatgtactcgtacacgaggagccgctcgtcgccaatcttgcagtatccgagcagcggcacgaggttgcggtgcttgatcttgccgatggtctccatctccgccgtgaattccctgtcgccctgtcctgtgaagtggatcagcttcttgatggcaacaaccgtgccgtccttgagcttggccttgtacacctcgccaaagccgccggagcctatgagagtctcagcactgaagccattggtggcctcgaggagatgcgcgaaggtgagcttcttcagaggcttctcaaatgtcgccacgttgatgctcagtggctcgtgaacacctgacagcttccagcttgtcgtgccagatgtggaaggctttgaatgtacccggtnctc

SEQ ID NO: 156024 - DNA, 4388 bp, Zea mays
  unsure (1)..(4388): unsure at all n locations
  Clone ID: MRT4577_73878C.1
gctttcccaaccaaccatgaactcacccgcaccacgccgttaacgggtccagaacctcgcttccaatctgccctcccgtgtccccctccctgtccgattccccacagtagcgcctcgccctcgtcctcctcctccagtccggatcgccatttcccaccgatccgtcccggcatcggcatggctgcgcccaagccaaaggcgccggcgcccagtgcttcggcagcctagcgtttgtttgcctccgaggatttccgcctatcgcgttaccggatcttcggtgggccggcgaccctctacgccactatgagctccgacgggcgcctccgccgcgcgctggccgcgttcggcggcgacgtgtgggacctcgtggacgcggcgctcgccgccgccgcgcgggacagccccggcgacctgcgcgcgcgccgcgacggcatcgtccagcgcctctacgcaggggcagcccgctgccgcaactgcgacgccgacgcaaccccggcgcctgctcagccgaggaaggcgaatgacgccgtcgctgctgctgcttctcctgcggcggcggcgtcggcgtttccggcctcgcctgaacaggaggtcgacgcggacggtctcgacgacgtcgacgacgcggccctcctccagtccggatcgccatttcccaccgatccgtctcggcatggctgcgcccacgccaaaggcgccggcgcccagtgcttcggcagcctagcgtttgtttgcctccgaggatttccgcctatcgcgttaccggatcttcggtgggccggcgaccctctacgccactatgagctccgacgctggcatggagagcaagattctggcgatcagggatttcctggaggacccggaccagtctgaggacgacatagtgagcctacttcagaacctagcagacatggatatcacctacaaggctctccaggacacggatatcggccgccatgtgaatggcctgcgtaagcacccatccagcgaggtccggcaactggtgaagctgctcgttaggaaatggaaggaaatagtggatgattgggtgaggctgcacaactcaggtggtgatggtagtggctccatcataagcgacggtgactcacctgacaaagtccaatccaagtaccatcaaaatactcatgcttcagacttcaagtatccccccagcccacagaggcataatgttttcagctcagagagatctagcaaccacaatttggtggagtcaacaatggagaagcgtagatcgagccctgctcctgcatacaataacaccaagcagaacaacagcaacaactattccagtatttcatcgtcagcaccagctagagcaatacgggagcaaaagaacactcttttggattctgagaagctagactcagctaggaagaggcttcaggaaaactaccaggaagcgcaaaacgcgaaaaagcagaggacgatacaagtgatggatatccacgacataccgaagccgaagaacaggaacaccttcgtgcgcaagagcggcagcagcgccggattcccggcaaagcaccggtgatctctgcctgaccaccatcggatctgtagcggactcagcgtatttatttctgtactagcaaaaagaaaaaaaagaaagaaattttaagaagcaaactcttgttttcccagtttgatttgtagccctgcagtccagctcactgatattataaggatatatatactgcctagtccatgaggctacgcttttgtacctctagccggccgggggtccctcgacggacggcttcatccgattggtgtggcctatttgtctcccagtcccactccgtccactcgagctctccaccagctttccccttctctccggtccgggaatcggaagctcagggcagaagtagccatggggcagacgcatcttttgttgctcgcttgtttctgggtcctgtcaacatgctccttgctacttgatgcttcctccgatggactgttaagaatcaacctgaacaagaagagactggacaaggaagctttgactgctgcgaaattggcgaagaaggagagccaccttcgaaggtctgtgggtgctgaccagtatctcagtgcctcaactgatgacatagtccctttggacaactacctggacacccagtactttggacagatcagcatcggcacgccaccacagaacttcacagtgatattcgacactggaagctccaacttgtgggttccctcatccaagtgctacttttcgatagcgtgctacttacaccataaatacaagtcaaccaagtcgaagacttacacaaagaatggagaatcttgtacgataacatatggttctgggcaaatcgctggcttcttcagtgaggacaatgtgttggttggcaaccttgttgtgcaaaatcagaaatttattgagacaactcgagaaaccagccctactttcatcattggggagtttgatggaattcttggtctcggatttcctgaaatttctgtaggaggagcccctcccatttggcagagcatgaaacagcagaaactggtcgcaaaggatgtcttctctttctggcttaatcgtgaccctgatgcatctgctggaggcgagcttgtctttggtggtgttgacccaaaacactacaaaggggaccatacatatgttcccgttacacgcaaaggctactggcagtttgacatgggagatcttattattggtggccactcaactggtttctgtgctggtggctgtgctgctattgtggactcagggacttcattgcttgctggtccaactaccatagtggctcaagtcaatcatgcaattggggctgagggaatcatcagtacagaatgcaaagaagtggtgagcgagtatggagagatgatccttgagttgctcatatcgcagacaagcccacagaaagtgtgcactcagattggtctctgtgtatttgatggtgcccattctgtcagcaatccaattgaatctgttgttgagaaacagaagcgtggttctgatcttttctgtactgcttgtgagatggctgttgtctggatacagaatcagctccgtgaaaacaagacaaaagaactcattttgaattatgctaatcagctctgtgagcgtctccctagccccaatggcgagtcaactgttgattgccatcagatctcaaagatgccaaatcttgcattcaccatagcaaacaagactttcaccttaacaccagagcagtacatagtgaagctggagcaagcaggacaaactatctgcatcagtgggtttatggcatttgacgtaccgcctcctcgtggtcctctctggatacttggtgatgtttttatgggtgcctaccacactgtttttgacttcggcgagaacaggattggatttgccaaatctgcatgaggactggagttctgcgctttagtagcatgtccagtttgttatcccggtattgtacatatatatgttgccaactggtgtaatccgcagtgtttaatagtatatattcatgcagaaatctagaagattgtggcatgatatgtgtttgcaaatggagctatgctatgtatggagctccaggacctagagttttatgtaaagggagacgatgaggattagggcttttaacctattctcatcacgttattgtcctgattactataaaaaaaaaggagacgagtaggattagttgctgagcttgtttgggagcaagacgattggaggggatgagtggactaaaattcccttcctatcaaaattgaatatgaaaagtattttagctctcagctttccgcgtctctacaagccnggaatcggaagctcacgacagaacctcagctaccagaccatgtcgtagcccctattttctactgcttgattattacttttcgcttttcttgggagtacaattttatttactcgccgttttggggctgttcatgtttctgttagtgtgtttggtgccttgattttttcagataattggtgcctttcttgataagttgatatacaaccgtggatccttggacttcgatttagttagtgactccgtaggtatcagataaccaaaaaaagaggaatcacgtgaactaccggttatatttcccctggatttcgacaaagctttttaggaaatttcgtactttttttcatggagaaatttcgaagacaccaatgaagttctcgcataaaataataaaaaaaccctaagcatgctcgattttcatttttttgccatgaacaactgctagtcaagcacaaaacaaggatttcctaattcttcacactcgacaaccattattttcacagcttcaagaactctcaacttccccccaccccaaccaaaagaagtgaatacaaccataacctttacagcttcaagaacttt

SEQ ID NO: 156025 - DNA, 299 bp, Zea mays
  Clone ID: MRT4577_73879C.1
accacataaacttaggggaccagaagtaacttataatttggggggatggaatgttaacaacaaaaattttgataaggagccatatatttcacaccattcatattattataagctttcatcttatactgtgattccggctggtacttttgattcatacacagatctttcaccacaccagggcatatatccttgtcaaaaactaatatataatgcttcaaggggacgctttctggtttgatggtattaggagtcatttcctttggcgggggtgtgctttcccttagccttttccctttctt

SEQ ID NO: 156026 - DNA, 421 bp, Zea mays
  Clone ID: MRT4577_7387C.1
aaaagggggcatgaacttaaaaacataaccttcggcagaaaaagggccttgcccttatacagtaaccccccttaagttccctttttagcaaaacccccggccctaaagggggaactgggcttaaaacagaggaaacaaagccctgctttccttcctactcctaaagttcagccccaccactttttttggtgcccttcctaaaataccccaggttcctcaggaacttgggggccctccccttgggggaggtctggcgggggcccttgggttttttaatgccctttttgtgccccttgaacaactggttgtgccccctgtgattttttaacttggccattttttcccggtgcccattaggatgaaaaccagcggggggcctgaaaattacaaaagccatggctcgcgagaaacaaatggtccc

SEQ ID NO: 156027 - DNA, 299 bp, Zea mays
  Clone ID: MRT4577_73880C.1
gtggggaaaaaacccacaaggcggggcttaggggtttttttaaaaaaggccctagaatacccggcgggggggttttaaaccccgggccgggggaggttttttcaaatcttttaacccccccaggtaaaggccccttcgcaaaaattttttctttttagagcaaccaaccaacccacccaccttaaggccctttcccaaagatttaaggcttttgggggccccttggggggactaaaacttaatcagaggacattagaattttaactgggcccccttggggaaaaacccccctccattca

SEQ ID NO: 156028 - DNA, 405 bp, Zea mays
  Clone ID: MRT4577_73881C.1
gccggccgttttcccctgcttccgcactgcagcggcctattcggcgtcgtcctccccctctctcgctcctctgtcctcccctctccacttgacaacaacacaattaggaaaaaaaggcaaaaaacatttaccttttttctatctgtatattatctgaataaatcaagaggaggaagaggggagggagcgagggagggggaggagtaccaaatccagactccatagcaaccagctcgcgagaaggggaaaagggggaggaagagcttcccttgtgcatcgactgctcgctgctccagcccctgcattcgcgccgcttttggccagcccgcggcagtgccctttttttttgtcgccctccccccgccccgcctccgtgactgccgtgcccgccccgcccccgctgct

SEQ ID NO: 156029 - DNA, 668 bp, Zea mays
  Clone ID: MRT4577_73882C.1
tttaaaagaccatatattaaatgagatcgtactcgtagatgccctaactcattgacctaatatataaagccaagacaatacacataatgacaatgcgacgggctctctcctgcccttttttaagggaaaatccgctataggccggtgttgggtgaaagatatcagatacaaatacgtaggtaccaccctactcagataaatggacgacatagagtagatagctggtttggatcacataaacattagcacaggactcaatctagacaaaacctcgcaatcaagccacagaagtagcacaaaggcagtagcattttcgcatccatgaaatgtctgaaatgtagcggcagcaaatccgtgcactggtagaccagaagcgtctgtctcctgcccagaaattgaagggcctgaccacgacttaatcagtgcatgcattcagacgtttgggtcacatcagcagcgacattgtatattcgcctacctcgtcagtacaagcagcgcctagccgcctacccatgctccccaagtttcacacttcattgcggcaccataattttttcgcagcacatacatacatacacacacatctggaatatgcaagtacaatggataatgggtttttaaaaacttttaaactagttcaccttggcttttaaataggctggcattac

SEQ ID NO: 156030 - DNA, 296 bp, Zea mays
  Clone ID: MRT4577_73883C.1
aggacccgtacccagatacgtacttcgcatttcttagtcaaccaccgcgacctgacctcctgcagaccctgcacatgtcatcgccatcatctcacccttaatctcaagcatgatccaatacctcctaatgctcccatattccacaatcttgatctactggcactacactatgcacacacagtacctgtcttctcgatccttcgacgcacgactggaccccacacacactttgtgcttcattcagtggatcacaccttacgtgtgctcgcgagacttcactccttcatacgttcatt

SEQ ID NO: 156031 - DNA, 293 bp, Zea mays
  Clone ID: MRT4577_73884C.1
cccacgcgtccggattgtctccgtccgcttctcgcttggttctggcttcctagttcgcaccacggcaccgcaaagcagatggtagtcgactacggattaaccccagcatctgctcgccattccggtccgtcgagtatttcgtcgaacagttggtaggggacctctagaacggatgggcagaggacaggatgagtcggtttcgtgattctcgatatctagtcatgccttcagctttctcgcggtcaatcaatccatcgctcatccggctgtaattgccgaatgggtagtcaaga

SEQ ID NO: 156032 - DNA, 376 bp, Zea mays
  Clone ID: MRT4577_73885C.1
ttttcgcgtggcggcacggcgggacgcacccctgtagaataaacagaaaggcacatcatcctggaggtccatagtgaaatgtacatcaaatcgcctggatcttagactgcgggtgggactaagcatgtagattgctcaataattaagaattccactattgccagagcagtgacacacatggtttttttgttgccaaagtacgtggagacaatggttcatcctcaatatgtaccattccataagcaatggatttaaatactgcagcttaacgaggatgccttcgctgaagtgctgtccggattggacaaatacccgtcacagattgacttggcagcgatgcatactcggatggagtcaatgagaagtgaacatgatt

SEQ ID NO: 156033 - DNA, 1153 bp, Zea mays
  Clone ID: MRT4577_73886C.1
aatccgattacgtatgtctcttgtcttatccgccacacacaacacgcgccggccacagaaacagagcttcactcccctccgcgccgcggcgaccatggagctcgccaccgtcgccgctgcagtcgcctccgccgctgcgcgcccgcacgggcctttctcctctccccgagcagtctctgcctccgtctcgtggaccagtctctcgctcgcctccacctcccactgtctctccacgtcctcgcgacggcggctgcgctggctccccgtcacctcggccgccgtggagctccgcgaggccactgccgggggcggagactcgctccgtgtcaccaagacgccgcagcctggatccagtgttaagttcagcgtggaggtgcctacttccatcattcacgagtgctaccaatccacgctacaggagtacgccaaacgtgttaaggttcctggatttcggcctgggaagaccattccagaaaacgttcttataaactatgtaggaccgcaacatgtacaggatgccacgattgaagctatcttaaaacatacgcttcctcaagcactgtcctcggtagaggagagggcattagaagattctgttcgcattctgactcaatttgatgatatgagaaattctttctcactcgacaatgtgtttagatatgatgttgctgtggatgttgcccctgaagtccgatggctatctgaagacaaatatcagaacctcaaagttgtcgttgaaatagatgaagctgttgatgcagaaaaggcggcagagaaagagcttcagcgtcgtcataaagctctgggcttacttagaattgtggctgacagaggcctccagattggtgatctggtggtactggatatatttgcggaaagcattaacaatgatggctctagaggtgaaaaaatttcatcggctgagagtacaggtttccacttggacactgaggaaaatagtaaccttgttcctggatttcttggttcgttgattgggattcgtgctggtgagactagatcatttcctatccagttccccgagtcatttgagcgagaaagtctacgaggtgtccgtgcacagtttactgttgtgtgtaaagagctgttctacagagagttgccagtaatggatgactcacttgctgtaaagctt

SEQ ID NO: 156034 - DNA, 942 bp, Zea mays
  Clone ID: MRT4577_73887C.1
atggcgaccaacccctccaacggcgccggcgccgacgtccctgcagccccggtagcggtgcggctctcggttgcggcgcaggcggccgcgatccagccctcttccccgcgcttcttcttctcctcgcttgccgggaccaacccggcctccccgcaccgtcgcatcgccatcgcagttgatctctccgacgctgtctctccacgtcctcgcgacggcggctgctggttccccgtcaactcgaccgccgtggagctccgcgaggccactgccggggcggagactcgctccgtgtcaccaagacgtcgcagcctggatccagttaagttcagcgtggaggtgcctacttccatcattcacgagtgctaccaatccacgctacaggagtacaccaaacgtgttaaggtatcactttctgcgcaaactggctgcaaacacgtggacgagcacacccatatgaaatttcgaaacgcattattggttcctttatatgacaacgaggttggacagtcagtcgtgcttgcaattccagattttgcctactcgcgcagaagtcagtatcaatttatcgtagccgttcctggatttcggcctgggaagaccattccagaaaacgttcttataaactatgtaggaccgcaacatgtagaggagagggcattagaagattctgttcgcattctgactcaatttgatgatatgagaaattctttctcactcgacaatgtgtttagatatgatgttgctgtggatgttgcccttgaagtccgatggttatctgaagacaaatataagaacctcaaagttgttgttgaaatagatgaagttgttggatcgctggtgcaggatgcggaggtccaaaaaccgttgctttcagttttcccagtgacgaatggattcagaatgaacgaggaacttccatggttatgcttaaaaacattttag

SEQ ID NO: 156035 - DNA, 869 bp, Zea mays
  Clone ID: MRT4577_73888C.1
agtaccctactgcttccatcaaggagaactgcaactggaagcgggtgcgagcgactgcgatccggacgaggggagggacctgtccgtaatttcggaaaggagcctgggggagaatgccgatagacatgccgcggggtctccccttcgccgtcgacacgtgggggtcctcctcccgaagccggcgccaccgcttccttacccacgcacaccgggaccacctcgtcggcgccggtgcggacatcgatgggggagggatcgtctacgccactcgcctcaccctgcacctcgcacttcgccactttccccagttggggagttgggagttcgtggagatggatgtggggaggacgttggtggtggatgatcccgtcggcaccttctctgtcaccgcgtacgacgcaaatcactgccctggggcagtcatgttcttgtttgagggtcaatttggtaccatacttcacacaggggactgtcggcttacaccagattgcgtacagaatttgccaatgaagtacgtaacaaagaaaggaaacgagaacatttgccgacttgactttgtattcctagattgcaccttctccaaatgcttcctcaagctaccgagcaaggactcagcaatccgacaggttatatcttgcatatggaagcatatgcatgcaccatttgtcttccttgcttgtgatctgcttgggcatgaagatatactagttgaggtgtcaaggactttcggaacaaaaatttacgttgacccgaaattggattgttttaaagcactctcactgacagcccctgaaatcatcactgacgattcatcttctcgctttcagatggttgggttccaccaattacatgatagagcaagcaaagag

SEQ ID NO: 156036 - DNA, 2008 bp, Zea mays
  Clone ID: MRT4577_73889C.1
atggaggtgggaaggacgttggtggtggatgatcccgtcggcgccttctctgtcaccacgtacgacgcaaatcactgccctggtatgaggggtggcttatccttggccagtttcgtgatttcaggggcagtcatgttcttgtttgagggtcaatttggtaccatacttcacacaggggactgtcggcttacaccagattgcgtacagaatttgccaatgaagtacataacaaagaaaggaaacgagaacatttgccgacttgactttgtattcctagattgcaccttctccaaatgcttcctcaagctaccgagcaaggactcagcaatccgacaggttgtcctccgtgctgtggttatatcttgcatatggaaacatctgcatgcaccatttgtcttccttgcttgtgatctgcttgggcatgaagatatactagttgaggtgtcaaggactttcggaacaaaaatttacgttgaccggaaattggattgttttaaagcactctcactgacagcccctgaaatcatcactgacgattcatcttctcgctttcagatggttgggttccaccaattacatgatagagcaagcaaagagcttgcagaggcaagggcaaatctccaacctgaacccttatttattcgtccatcaacacaatggtatgcaacctgtgctcgaagcccgaaacccagcctaacagaagctgagcaggatgagcttggcatctggcatgtttgtttctccattcactcctctcgtgatgagttggagcaagcactacaacttctccaacctcactgggttatttcaacaactcccccatgctttgccattgagctgagctatgtaaagaaacattgtttcaagacccgcttaacagctgatgatccactctggaaaatattcagagatcctctgggaaagtcagtgtcctccccttgttcagtgcttgcgacacagacagatgaaaataactcaaattttgttgttgatgatgaccattcttcttcctctagcgatggatgcacatacttaaatgtaataagcactcttgaactgaaatttgtgccacctcaaccacctgaagaaccggacattacattgtttggaagagcaaggtttgcctctcaagcaattgactttatgaaagaagattacattgccttagaagaagccagggcatgtgcaccaacagattcggttcatggcagtagtgaagaagtcgaaacatattctggaatggatttcggtgtgaaacaaccaccagcctcccagcaggatctcatggaagttggagatgatgtttctttcaaaaaagttggagatgatgtggattcctgtaagcatgaagtaacctcaacacaattagaagggtttcgagtcaagtcattacctactgttcaaagcaatatgttagtggtgtctgatcaacttgaaaggtcagaagttgtaggagagtcaaaattattgaaatccacggaagacttaaaccttaccattgtcagaagtgcagaaagaactgattgtcaaaaggaacctttgtgctatattggatcatcgaaatgtttgaatgcaagtttgaagaggttttacaggtcaaggaatatccctgttcctagacctcttccatcgcttgtcaaacttatggagtccactaaacgggtcaaaatacaaccaaatactaattatactttgttgaactcacgacacagcttaccctaatgaatgattgagcttatacttggcatgttgtgatagacaaaattttcagatttatgagtatatgaatggattatttctgaagaggacacctgtatattggttattgtgataaccaaaatactcggattctattgggtatacaggtatacttggactggttccgaagaagatacctgtttagtattgatccagatccacacttatacaggagctttgtacgattctcaaactgttgtacagaaaattgatgtaattacccgatgactcccttggataatccgaagtg

SEQ ID NO: 156037 - DNA, 635 bp, Zea mays
  Clone ID: MRT4577_7388C.1
taaagacatgaaataatatcgaccaccaacacattcacttccttccaggcctgcaccctagaaagcagagaagcattcctctcctgccctcactctggttggtgatgctccaactttcctctttacccctaatccccaaggtgacaactttcaagatccataagttgatgcaaatgccatatatgtgtgaagtctgccattaaatgtcatgccacaacaattagaggatgagttgaagagatttggtgccattaaacatgaatgcatccaagttagaagtaataaggtacttgcttttcttctcaatttgttctcaaaaaagttaagagcctttaatactaactctcaaatatgtatgtatttctgttgagtaaacaaaaatccatgggtttatgttatggatttgtataatttgaggatgccactgttgttcaaactgcaatacatgtattaaccttacttttctaggttgatttatgatacaacgtttaggtagttaatttaattttatgcacaccctattctcatgtcaatttctttttaatgactaatgggtcttctataaggtttgtgtaactcttgagtattgcttactggaagtaagcaattttgtgtcacttaagtagcattccaat

SEQ ID NO: 156038 - DNA, 118 bp, Zea mays
  Clone ID: MRT4577_73890C.1
atgttgtgttttttgcacggggggcgctatacacgaactaaagccgggactgctaaatcaataaataccgggggcatccctccatagtgagcagcgactaaagtcaacacacaccaac

SEQ ID NO: 156039 - DNA, 328 bp, Zea mays
  unsure (1)..(328): unsure at all n locations
  Clone ID: MRT4577_73891C.1
ggcacagctagctagcgtacagacghataatctcttcttcacstcactagctaacaccagctagcagctcgatcgctctgtcstgcaataatggcbgcbcgctcstcctcccagcagctggtcgcsgcggcggtchtggcagcngcgctgtgcntgctgghngcvggrdchggnamgngtcggsggsggtgagctgcggcgaggtgagkygtcggkggsgcsgtgcvtcgggtacgcgatgggcascgcggcgtcscctccgcggcgtgctgcagcsggggcsgctcgctcaacagcygcgcgtcggycgacggcgaccgghgscact

SEQ ID NO: 156040 - DNA, 1339 bp, Zea mays
  Clone ID: MRT4577_73892C.1
gccggccaggtcggaatcgtcctcgctaaactgatattccgcgcgtgtgtgcttgcaggcactggcagccaggaggtatcggcgacgagatactgcagcgcgcgtccatcgcctcgtcccctccacgctccgatcccttcgcctcctccgcgcctccctccccgtccccctccttacccccaaaccctcggcgcaagtctcgcttccgcgacgcccctacccccgattctccactcggtcgcgccacatacacctccacctcgcccatctccgccacgcattctcgccaccgccgccacgcctccgcttcctccgcccccgctttcgcggccgatggatccggtgacggtgtcgcccgcctcaactccttcctccgtcgacagcgtgccatggtcgctgacctagcggcaggggaccgccctgcgtcgaggtccaccaagctcgtgctctccgacccctccaaaagtctgagctcgattgtggcggcaatatgctacgcgtggatgcttcccagcaagggtgatggccaggcaacggtgccggtggtgaacatgagccggagcaggatggctaggtgcaggcaggcggcttggctcctgtatcacgtcggggtcgacgcctcagcgctgctcttcgccgacgaggttgacacggatgggctaataatggaccagcgagttaacttgcttgtggtggggcaagatattttgaaatcaaaagctgaggttggctcagtttgcacaaccctgacccatacctattgtgaggatgcttatagcctgcttcaaaacttggacataaagaaacttctgcttgcaggtatcctgctagatacgaacaacctttccaagaagtgctcaaatagagattcagatgcagtgcagttgcttttgtttggaacctctgagcatatgaggcatgaattgtttcagcaattgatgcttgatcacaatgatcactcctttgttgagtatctgaagaacacctacagatattcaaccataaatggtaatgaggacagtcctccagagcaaaaacattcaacctcagcatcagggtcatcccaagatgttaaaaaatctaattcaactaaccaaaggacatcacgtggaagtggtggaaaggcctcagatgaagcctctcgggggaagaataagttcttcttggcgaaatggtttggttttggttcaaaataatccttttatcatttgtattagtttggttaacattttaatggatatgtcatggatttaagaagcataattattttgaggaagtggcacgtgagaaaacttccctctacagattctgttcatgtgaaaacccagttgtgttcttt

SEQ ID NO: 156041 - DNA, 502 bp, Zea mays
  Clone ID: MRT4577_73893C.1
atcggacacacttggagcaccaatttcaaattaaaaggcggaatatgaaacctcattattgtctggtggggcacacatacatacataccaaaaaactatattatcgaatgacaactaatatacaatctaatacagggcaccaccaatgatgagttcttggtatgaggcatgcttgatttgttaaagcatgaagggcaaagggcaacacttgttctaattggaaaagggctgcagcacaaaccgcaaactgctggtataaaagcagcaacatgttagatgcgtcaagaaggaagcacggtttgctaaaaataggtggctaaatgggacatatatttgctgctgaaaataaccagcgggggtcagagcagccaattggctaaatggaagaagcagggactggtgacattacgcattaatatctggctgaacgggaataatgggtgctggaaataagccagacggatcaaagtaaacaattagtcgaatggaaaaaatttctgtt

SEQ ID NO: 156042 - DNA, 174 bp, Zea mays
  Clone ID: MRT4577_73894C.1
atgaccaaggcgacgtccaagggatggctgagcaaacttagggtgtacaaggcctttgggtcccaaaacacatgtgggaataagcctttagtagttgtcttcttcgagtgtaaatggatgtcaccaaaggcaaagaagcacatggtgaagggggtgtttaagggcctattttag

SEQ ID NO: 156043 - DNA, 521 bp, Zea mays
  Clone ID: MRT4577_73895C.1
aagttcaaacatcaaactttataaggttttaagccatactgctgaaaaagagccccgggtgcccaacagaggacacaacaggtccagtaaaccaacgaaaccacaagctcttttaatgacacacaagccggggggggggggggggcgacaacgtccatatacaggaggcacccttggcggcgaactacacatcataccggggtgcagctgttgcctaaacgaaccaaggtttagtgaccaccctccctgccggggaccaccttgtgagggctctcctcctgcttggggtggaggtgcttgggcgcggccgttctgcaactcgcttgccaacaggatcagacgctggtgctctggggggaagccgtgtttgagctggatctttggctcacgcgggccaaggtgtcagggctgtcaacctcccgggttatgggcttgcccgctgaggtcttttcaaagatctgcttctcgcggggcatgcgcgggatcacgtggaaggtgcttctccttctcgatgttggggc

SEQ ID NO: 156044 - DNA, 204 bp, Zea mays
  Clone ID: MRT4577_73896C.1
aaggcctcccccacgagggacgcgacgggcgacggcgaaggccggcgcgacagacaagaattctgaggacaaccggcgagagcgcgaggaggggcagcgccagcaacgcgagaccggagagcgccaagaaggaccacgggaaggccgccagcaagaaccacgccgacgaggccggagacgccgacaagcgccaggagcgaggcc

SEQ ID NO: 156045 - DNA, 461 bp, Zea mays
  Clone ID: MRT4577_73897C.1
ccggccggggcatctgcttgaccaccagcaacaagaacgccatcgccgagagcatcgagtgtgcaggaaggagaagaaagagagagcagacaccatagggcgccctttttcccctcgacacttgacgccgcgtcttctctgttccctgccatggcgccacctgtgtagtcggcagcggtcgtcgcggcaccaaatcgctacggtgaggtcacgagaatctgaagagcaagttggtacctggaatctcaagtgccaggtcaagaacaggtaccgcaggatgaggcgcttggaggatgctgcgatgtgttcgtgagaggtctaggccgtcgtctcccagtcaactttgggttgctagatcgtttcctcatatgatgtaattatttaattattttgtatagaactcctgttatatagtaaagatgtgacattcgatccagaaaaaaaaaaaaaaaaaagcggcc

SEQ ID NO: 156046 - DNA, 343 bp, Zea mays
  Clone ID: MRT4577_73898C.1
gacacacttgcggaccaactagcaccatagtgtgcacactatggcacccacaatggcgggcctaataatgcgcctcggtatgctcgcaagtgctgctgcaagtgccactacggcgaacatcttgcaggaatgcatggatgctcctattgctccgctcctttcaccagacctgtcaccagcgtggtataacgcatgtgtaaacccaatcatgctacaatacacgatccaacatgcaatcgcagctggcataccacctttatcacaattgttactacaactattacaacagctatcacagcagcatccattggcgcattgcttggggccacacaaactggcacaa

SEQ ID NO: 156047 - DNA, 389 bp, Zea mays
  Clone ID: MRT4577_73899C.1
gtttttagaaccgatgcctgggcaaggaggagggggtgctcaagacgcaagaggaccgcgcccgcgccagaggcccctatcaccgctctaacaatgggcctatcctgcaggcgcgtttgcttttgatcctgctaatactcgccgcctaacacgcacgcacacgcgcatgccgatgaatatggtactggcgggagcatggcctatccacaagatgacacgtatcccgcccaccgactgttattgagcgggatcaaaaacagctccgaagtgtactgtacctgatcggatataacaaaggacctcagggcggtcagatatgtgtaagacacttcactaactctttgcgctgatctggacttggtctgctcaccggaactccagtgatcgtg

SEQ ID NO: 156048 - DNA, 339 bp, Zea mays
  Clone ID: MRT4577_7389C.1
aggaagcaatacaaaatctatcatccccaacaacactcgtttacttttacagagggacagagtagatggaagatgaaacatgggcgcagcccatatgtaagaattctacacggaccacacagtggcaggtaagccgagaagctaaccttctatgtgtaagagaaaccacactcttacaacgaggggactatcaagcgtatacaggcaggggattatccgaacccagagctgctagatgaccgcaccctggtagtttgctgagactgcggcaatcgacggtgtcctgtagagccttataaccagacattcgtggaacaggttaagagggacgaccaccgg

SEQ ID NO: 156049 - DNA, 1698 bp, Zea mays
  Clone ID: MRT4577_738C.1
cattgggaccctccgagccggccggactgtactagccggcgaggaccacgtgtacccgccaccgcgccgcgcggctccaccgttcggcggcgctcgggcacggcacgccgtaaaaccctagctcttgcgccccctcctctccaccgcgccggcgagccgtggagacgcggagctaaggatgccgcggaccactgtgctggagagccccggctgcccgccgctccgcgccctcaccaccgacatcctcggccttgtcaaagtcgtcgaggcccacgcgaggccggcgggtgccgccaaggtcgtggagacgtggggcgcacccgacgcctcctgcgccatcgtcgctgcctccctcgccgatcgtgccaccgaccccgttttggctgtggcgaggatgaacggcgtggttgagttgctgaatcccctgaacggagatactttggctgctgtcaaggcagtgggaccagcaccaaatgatggtggcgctgaaggtgatcccctcactgcattgcaccttttcacaagacaggcttcggactcgatcttaggaacgtttcttgcttgcactgagcaggggaaagcttctataaggtccatcacgaaagaaaatgcagcttcaggctcacatattgagccatctgctacatgggatgtgtgcggtggggccaatgtgcaattttgctcagttgatcatggtgaaaactatgtgatgtttggagggaaaggtatagaagtgagtttgtgggatattacatcttgtagtaagacatggtctgctaaatctaaatagtcatcaggtccgcttatatgatactgcattgcaaagaaggcctgccatctctgttgagtttaaggagtcaccaatcaaggcagttgctgctgatccgaatgggcatgatgtctatattggcacagggacaggggaccttgcttcctttgacatgagaactgggaaattgcttggatgctattttggcaaatgcagtggaagtattagatccattgttaggcatccagatctacctttgatagcatcttgcggactggatagctacttgcgtatttgggacacaaacacaagacagttgctatctgctgtctttctgaagcaacatcttacaactgtggtccttgattcacatttttctgttgaagagcctggagagatgaaatccaagcaactggagtcttcagtggagactgagactgaagtccgaaaagaaaagaagaaaaagagtaaggcaattacagaggatgagactgaggcacaaatccgaaaagaaaagaagagtagaacaattgaagaggaagaacaagctggattggtcgaccatagcgatattaatgatgaagtatatgccagaaaagaaaagaagaaaaagaagagtagaggtattgaagggggcaaggagcgagacagcgacggggaaatttgcagtcccaagagaagaaaatctggagaaagaagcaaatgcctgaagaagaggagcaagaaacagctggttgcctagtacaagtatcatttctcattacccgccttcttgattttgcagaattacacaattttgtgtggtagtttgttcggaattgtatcccttttgaaaccctgcaagggaagtgcatcattttcgtgtgcgcatttttctactctggtgtagctaaattttgagacataaaaaaaaaaaaaaaaaagcggcc

SEQ ID NO: 156050 - DNA, 299 bp, Zea mays
  Clone ID: MRT4577_73900C.1
aaagaaaaaaccccccccccgtgcataggctgaggaaaatcccaaaacacggaacaggggaaaagcacactacaaaaccgccgctcggaccccaggccccacaacaagcccacaatcgggcgccacaaaccgcgcagaggatacaaattggggcaatacaaaccgcccacacccttggaatccatggatggggacatgggccggccgctaggcgagcgagcgaaaccccggccggccgtggggcaaaagaaaaaaacacggaagccgcgggacccaaaaacagggaaccccgaagccct

SEQ ID NO: 156051 - DNA, 480 bp, Zea mays
  Clone ID: MRT4577_73901C.1
cgcacacttaagcccagcaacatcatgcgtggacgacagcgctcggaggcaagctcgacgacttatgtctggccagactagactaccacgggtggtagctgccacaccatcaactgccgtgcttgggctaccgagcgctacacttgacctggagctcgtcaacacgcgagacccgatcacccactgcgacgtctacagctgctggatcgtcctcctctaggtcgaatccgggcggtcgcagcgggacctgcgacatgactagccgaccttcgtctctgctcatgtggctgaggcacctgtacgttcggaacgcgatcctcaaagcggcttaccaggggatgaaggccgactacagtctccatgtccacgaccagtgtgaggagaggcagatcgtcgtcgggctgagttgcgcgcaccatgaccacagcgagcgatcgcacatcgcacaggtcgtgcacatcctgcaagcgggagacgcca

SEQ ID NO: 156052 - DNA, 321 bp, Zea mays
  Clone ID: MRT4577_73902C.1
ctctttttttgcgaaggacggcgtactcccacagggctgccattgttgaggccaccgccgtcaccttcgaccgcccggtgcggtgcgtccgccactatcccgagacgcgagagcctggacacccaagtgatgcatgctgctgacgagaacgtgataggaccgacttgttgcagcggtcaggctacccaagatagagtaaacctattggcttaaccaaaccgagtcaatatgaggaaagcctaaggaaccggttcgcgaggaagacatcctccaacttatcgagtgtccaaggaatccaagaaggctgcgattactcggaat

SEQ ID NO: 156053 - DNA, 846 bp, Zea mays
  Clone ID: MRT4577_73903C.1
aggccatcctcggcatgcgacgcggggctcgtatgacccagccgtcccagcggccggacggcgacaccaaccacgccccgttccgttgaacagcgtcgagtcgtcgccccatatcaaacgcccacgcagcgccggggatggagcgcggccggcaccagatgagagctgcctcccacacatggcatcgtggccagcagcgtcaaggaggcggtccagcggcggcatgaaaagcgccgagctttcgggctccggtgcttcttacggctatggccggacgtcctcctcccctgatgcctgcggctacggccggcagctctcggcctacagcgcccgctcctcccaggtcagcaggagtggctccttcagtgcggcggcgcagcgggtcgccggcgccttcaccggctgcttcgtgccgcgccggcaggtcaaagccggggaagaggaggaggaggaggagaagaagagcaagcgctccatggattcaggatcctatcatggatggaatgaagcaaacttgagtgcggcagcaggatcatggcaggaaggcagggctctcaccatcgctgacgtgtcgaaggcaacatcaaacttcagcgaaaagaacgtgataaggcagggacgctcaagcaccatgtacagaggaaagctcagggatggttctcagatcgccgtcaaatgtgtcacgaagctgaacgaccagagtccgacggctgaactctggagggagcttgagaagatccagcacaggaatctggcgaggctctttggattcttcgaacgcgcagctgatactctcgtcgtagtcgagtatgtcggcaatggttcccttgaggaacatttggatga

SEQ ID NO: 156054 - DNA, 778 bp, Zea mays
  Clone ID: MRT4577_73904C.1
attgctcagtcatgttgtctgccctttgagttcaacgccgtaaatgcagctagtcatgaggttacacttgaacatctcgatataagaaagggagaggctattgctgtcaactttgcatatcagctgcatcatactcctgatgagagtgtctgcatagaaaaccaccgggataggatattgagaatggttaagagcctttctcctagggtggtaacccttgtagagcaggaggctaacacaaacactgccccattcttcagtagatacatggagacccttgactactacacagccatgttcgaggcaatagatgttgcttgccccagggatgacaaggtgaggatgagcactgagcagcactgtgttgcaagagatattgtcaatttaattgcatgtgaaggtgcagaaagagtggagaggcatggaccatttggaaagtggcggtctaggtttgcaatggctggctttagaccataccccctaagtgcattggtgaacaatactatcagaacactgttaaatgattacaacagttactacaagctagaggagaaagatggtgtcatttatcttggatggaagaacagaaagctggttgtatcttctgcatggcagtgagattcctgaatatggaagaagcttgtttaggttctttcatggctttgtcttcggcacatagatccaagggtggaacctaatcagcgaatgtgagttccataatccaaaggactgtggctgcttgcttcttggcgcccagctgtcaaccctccgctgcgca

SEQ ID NO: 156055 - DNA, 231 bp, Zea mays
  Clone ID: MRT4577_73905C.1
acgcttggtctttcattaacggtgacaaagatattctaggatcacgcgcatccaattattgacacgatcgcggatgagcttcctggatggcccgcagacttgatgacatcggctggaagaacagttcaagcgctggatgtacatactgatatgcgcatccacttagtaatgtcaatggatcttccaagttgggtccctaaacatgtggatatacacagaagaggctttctt

SEQ ID NO: 156056 - DNA, 755 bp, Zea mays
  unsure (1)..(755): unsure at all n locations
  Clone ID: MRT4577_73906C.1
ctcacatcgaggtctcagcttcaggaaagggaaggaagcatgttcgggcaccaccacggccacggcgggcaccaccaggccccgccgccgcacgagcagacgctgttcaggatcttctgccgcgccgacgaggcgtactgcctcaccgtgcgtcacgacgccgtcgtcctcgcgcccaccaacccccgcgacgagtaccagcactggtacaaggacatgaggcacagcacgaaggtgaaggacgcggagggccagccagcgttcgcgctcatcaacagggccaccggcctcgccatcaagcactcgctcggccagtcccatcccgtgaagctggtgccctacaacgcggagtacctcaacatggacgccttccacggcgacaaggaccacggcggcgtccacgacggcanccaccgtggtgcttctgggagtgggccaagggcgacaaccagcgctggaagatcctgccctggtgaacagagacgatctagatgaatccaaggaaccttacctagctgctgccgccgcctaattcgtcctcctccgctctagctgttctctgtctgtgtcttcgcgtcctgaatggacgaataatatatagcatgcatgtacgctagcgaccatgtctgaatgacatcttcctggctgctacagctagctactgctacctgtctgttttgggtgttctaaaagactctgatgaagtgggnttcccaaaaaaaaaaaaaaaaaagcggccgctttttttttttttt

SEQ ID NO: 156057 - DNA, 936 bp, Zea mays
  Clone ID: MRT4577_73907C.1
acaatccacaagtcacttcactcgcttgcgatctcgtcactaaccatctcttgccaccaaacttaccctgggtcaggcagaccgaccgcaaagccggctagcaatcgatttccatgtacgacgtccccaccgcgtgtggctgctcgacatggaactgccgctcgcctgcgtgctgctcgtgaggtccgccgacgctgctgacgaggcgtccccgactccaggcggctccacctacgggtgcaacccggtcacggacaagtcgcgcaagcccgagggcgagggggcgttcaagcagcagggccatatgccccacccggtgcccctcctcaaaatcacagtgccaatggacaagtgccgaactggactcctggcaattcagggtattccccagccccaggaacatatccaggccagatgtactcatctccggcacagtatgtagcatcagggagcttccttaatacctcagcggccactccgcctcagtatgcaacctcagggggcttccctaataccccatccaccgctccgtcacagtatgcagcatcaaggggcttcccctaacaccacacctgccgcccctcctggtgctccatcacaaaagccgcaccgcacgcttcccagcagatgccgcatcagcatggaaatcattcaggaggaggcacgcccggaactagccaaccgccactgccagcatcatactaccgttaagttggatcttcttttgctattgtacttgacctgtgttttgaactgagtaatcatgtaatactgcaataacctgcggtctgtaactgtgtttagatgtgatagcagatagatacgagtgaggaatacatgaatatgtttgggggttttcattcatcgtaaaaaaaccgatcagtgttggctcatggcgattactggcaagatcatgattgatgttggattggtggt

SEQ ID NO: 156058 - DNA, 1896 bp, Zea mays
  Clone ID: MRT4577_73908C.1
cattgggtacctcgaggccggccgggacaactcacaattcacatcgaggtctcagcttcaggaaagggaaggaagcatgttcgggcaccaccaccaccacggccacggcgggcaccaccaggccccgccgccgcacgagcagacgctgttcaggatcttctgccgcgccgacgaggcgtactgcctcaccgtgcgccacgacgccgtcgtcctcgcgcccaccaacccccgcgacgagtaccagcactggtacaaggacatgaggcacagcacgaaggtgaaggacgcggagggccagccggcgttcgcgctcatcaacagggccaccggcctcgccatcaagcactcgctcggccagtcccatcccgtgaagctggtgccctacaacgcggagtacctggacgagtcggtgctgtggacggagagccacgacgtgggcaagggcttccgctgcatccgcatggtcaacaacatccacctcaacttcgacgccttccacggcgacaaggaccacggcggcgtgcacgacggcaccaccgtggtgctctgggagtggtgcaagggccccaaccagagctggaaggtgctgccctggggggacgaggcctacgcgccgcgcccgtacgctcctcctccgcctgcccaggtggaaccaggctacggcgggtaccgtcccccggctgcagggggctacgcgccgccgccgccgccgcctacccaggtggaaccaggctacggcgggtaccctcctccaccagctgcagggggctacgcgcctcctcctccgcctgcccaggtggaaccaggctacggcgggtaccctcctcccccagctgcagggggctacgcgccgccgcctccgcctgtgcctgtgcaggagcctggctacggcgggtaccgtcctccatctgctgggggctacccggcggggtacgggtacagcaacctgcctcgcgctctggcgtctgaacagaccgtccgcgtctactgcaaggccggcgaagggtacagcctcaccgtcaggaacggcacccgtgtgcctggcgccaaccaacccccagggacgagttccagcactgggtgaaggacatgaggcacagcactagcatcaaggacgaggaagggtacccagcgttcgcgctggtgaacaaggtcaccggcgaagccatcaagcactcgctgggacagagccacccggtacgccttgtgccctacaaccccgagtacgttgacgagtcggtgctgtggacggagagccgcgacgtcgggcacggcttccgctgcgtgcgcatggtgaacaacatctacctcaacatggacgccttccacggcgacaaggaccacggcggcgtccacgacggcaccaccgtggtgctctgggagtgggccaagggcgacaaccagcgctggaagatcctgccctggtgaacgtgaacttcaccttgctgtcttatatacgcagagagacgagctagatgaatccaaggaaccttacctagctgctgccgccgccgcctaattcgtcctcctccgctctagctgttatctgtctgtgtcttcgcgtcctcggttcctgaatggacgaataatatatagcatgcatgtacggctagcgaccatgtctgaatgacatcttcgttgctgctgctgctgctactgctacctgtccgtttggtgttctaaaagactctgatgagtggttctgaatgtctgcatttcaagtttgctgtgtgatgttaatgtaccgtgcgtaccagagctgctgctcctcctaaaatctttatctacctttgttttgatttttgcccgcttatggttatggcaaccctgccccaacaatggcttttttatttcaaactttctataaaataaatatataaaaaaataactttgtgc

SEQ ID NO: 156059 - DNA, 294 bp, Zea mays
  Clone ID: MRT4577_73909C.1
gtgttaaggatattgataagtctacctccagcatcttcctactacaaaacgtcttcatcgcgggggggaatatactcaaggcccccatgttctatcttagaaagctcatggaggttcatggctactacaaagaggatgttggtgtgaagctttagaggcctgtcaaggtagattatgttatccaatacgttgctgctgtcttatatttcgtttgctacttctatatctaagctgagtctttacattactgttcttattgacgtatacttatagttgtctactttatttcattct

SEQ ID NO: 156060 - DNA, 393 bp, Zea mays
  Clone ID: MRT4577_7390C.1
gtgcgcttcgtccctgggcgcaaggcctcaccacagaaaggggtggacattggagccgaatgcacgaccgccgccaccacacacacaagcacaaggccgagaagcactacaacgacgcggtcccggaggaggacgacacgacgcagaaggagcggcgcgaggcgcagccgaggctctcaggcccacacccacgggataccactgcaccggccagaaacacagcgccggcccaacccaggaacagatgcggcctaaccatgcaacgagatgaggtcacaaaggcccaaccagtatctgccagccgggaggccgaaccagcagaacgggcggaaggacgaggggacaaccaaccggccggagcagtagagccaggcccggaagggcacaccaaaa

SEQ ID NO: 156061 - DNA, 272 bp, Zea mays
  Clone ID: MRT4577_73910C.1
attgagaccaactagcaacattattgttcactagcgttccaacaatggcgggcggtgatatttagtcttcttaggctccttggcaattgcgcaagtgctgacactgttaccatattgctgcaatgctcgtatgcttccattgcttccctcctacctctgtacctcttaccattcgtgttttcatgtcgtgatatcttaattcttataaccttttatatatccaacactctattcatccttccttataatttttattatccttgtttctcata

SEQ ID NO: 156062 - DNA, 616 bp, Zea mays
  unsure (1)..(616): unsure at all n locations
  Clone ID: MRT4577_73911C.1
ggctcgcaaaaattttttgcatacccaccactcctctagcaaacgacgcatttcactagcccgttctcgttacacttggggcaccgcctgaacgctccgccacgggaggcacaggcatcatccgcgtcctccacgaacaccttgcagctgccagagcacccgtcgcacggcacgaaccgcaccccgccgcaggcggcacatgcgtcctgcgcgccggcgcctcccttggcggcggcggtgcacggcgccgcgtcgcagacgccgagagccgccccgagctccccggcctcgtgcaggcggcggacctcctcggcgccgcccagacgccggccgtccacgaacacctgcgggagcggcggcaggcggcctccgtcgccgagcgcgagcgcggcgcggagctcgtccttgaacccggcgtgcatggacaggtcgcgctcgtcggcgcggacgccgtatccgcggagcagcgcgctcgtggaccagcagtcctcgtacgtctgccggaccccgcggaggctggtgaggtacacgacgacgacggcgactccgcggngtgccggaggagaggccttcctggctagcttcgtcctcgtcctactcctggcgttgatctttt

SEQ ID NO: 156063 - DNA, 1362 bp, Zea mays
  unsure (1)..(1362): unsure at all n locations
  Clone ID: MRT4577_73912C.1
ttttgcttgaagggagctctgaaagcagctcgtttagctaccaagtgtactctctctctctcctctcaccaggagggagcacctagctctagccagccagctccgcggagcaacaatggccagcgcctccttgctcccggccatggcgctgctgctcctggcaatggcggtggcctcctccgacgcgcagccctcccccggctactacccgagctcgaggttcaggccggtggtgttcaaccgcgcgtacagcaacaagtggggcccgcagcaccagacgctctccggcgaccattcggccatcaccatctggctcgacaagacctgcggtagcgggttcaagtcgaagcatgcgtacaggaacggctacttcgccacccgcatcaagctccccgccggctacaccgccggcaccaacaccgccttctacctgtccaacaacgaggcgcaccccgggttccacgacgagatcgacatggagttcctgggcaccatccccggcgagccctacacgctgcagaccaacgtgtacgtccgcggcagcggtgacgggcggatcatcgggcgggagatgcggttccacctctggttcgaccccaccgccggcttccacacctacgccatcctctggaacccggacgccatcaccttcttcgtggacgacgtgcccgtccggcggtacgagcgcaagacggagctcaccttcccggaccgccccatgtgggcgtacggctccatctgngacgcctccgactgggccaccgacgacggccggcaccgcgccgactacagctaccagccgttcgtggcgcgcttcgccggcttcggggtcggcgggtgcgccgcggacgcgtccgcggactgccagccagtgccggcgtctccggcggcgtcggggacggcggcgatcagcgcgcagcaggaggccgccatgcggtgggcgcagcggaactccatggtgtattactactgcctcgactccaccagggaccgcgcgctctaccccgagtgctgagacgctgcgctgcgctatacgcctatacctacagtgacgagctgagggtgtcggagctatatggaaccgcgaggcgcgagcaactcgcaacacaaacgtatatttgaatattacaacttggaagaagaaaaacgaatcaatctgatatagaattatcattgtcaggttgtgttctgaaaacaaatttgaaattataattccatcgagagaatgtcgaggtacacggagaacgagtgaatgcctgacgttacgtattataaagtaaagtgcaatgatgactacaaaaaaaaaattataattaaaataataaattattataattattaatttaaaagggcggccgtttt

SEQ ID NO: 156064 - DNA, 1402 bp, Zea mays
  Clone ID: MRT4577_73913C.1
tcgagggccggccgggaggagcttcatccaacagcccaagtgtccctgctacccccactggatcagcaagctagctacccagtggagagccacagccgaagccgaagccgaagctagagctagcaagcaatggctgcggcggctcctcctgcgcgtcctactagcagcatcagcagctgctgctgctgcatctcgcggcgcgccgccgccgtcgtgccggcgctgctgctgctggcggcgatggccgcctcctccggcgacgcgcagccttccccggggtactacccgagctccaggttcaggccggtgccgttcaaccgggcgtacaccaacaagtggggcccgcagcaccagacgctctccggcgaccattccgccctcaccatctggctcgacaagacctgcgggagtggtttcaagtcgaagcacgcgtacaggaacggctacttctccactcgcatcaagctccccgccggatacaccgcgggcaccaacaccgccttctatctctccaacaacgaggcgcaccctggtttccacgacgagatcgacatggagttcctgggcaccatcccgggggagccctacacgctgcagacgaacgtgtacgtgcgcggcagcggcgacgggcgcatcgtggggcgggagatgcggttccacctgtggttcgaccccacggcggcctaccacacctacgccatcatgtggaaccccgaccagatcctgtgagccagtctcctcccttcccccggccccctgcgcgccattagctggctgcctgcctgcccgtcactcacatcacatgccatgagctgcgcctgcgtgcaggttcctggtggacgacgtgcccgtcaggcggtacgagaggaaggcggaggccacgttccctgaccgggagatgtgggcgtacggctccatctgggacgcctccgactgggccaccgacggcggccgctaccgcgccgactaccggtaccagccgttcgtgtcgcggttcgccggcctcagggtcggcgggtgcgccgcggacgcgtccgcggactgccagccagtgccggcgtctccggcggcgccggggacggcggcgatcagcgcgcagcaggaggccgccatgcggtgggcgcagcggaactccatggtgtattactactgcctcgactccaccagggaccgcgcgctctaccccgagtgctgagacgctgcgctgcgctatacctacagtgacgagctgagggtgtcagagctatatggaaccgcgagcaccaacacaaacgtatatttcaatattgcaacttggaagaagaaaaacgaaccaatctgatatagaattatcattgtcaggttgtgttctgaaaacaaaaatgaaattataatctaaaaaaaaaaaaaaaaaaggccccta

SEQ ID NO: 156065 - DNA, 522 bp, Zea mays
  Clone ID: MRT4577_73914C.1
gcccaagtgtccctgctacccccactggatcagcaagctagctacccaggccagtgccagagccacagcggaagctagctagctagcaagcaatggctgcggcggctcctcctgctcgtcctagcagcagctgctgctgccgctgcatctcgcggcgcgccgccgtcgtcgtgtcggtgctgctgctgctggcggcgatggccgcctcctccggcgacgcgcagccttccccggggtactacccgagctccaggttcagcgttcaggccggtgccgttcaatcgggcgtacaccaacaagtggggtccgcagcaccagacgctatccagcgaccattccgccctcaccatctggctcgacaagacctgcggtatgttgttgttctgttatttttactgatatctaggagtataaaagggaaaaaaaatcgttgtggctgtgggctgtggtgtggccgactggtcgtgcccgtgcccgtgcctgtgatgtgggccatgtggaccattgatgcactatttcgga

SEQ ID NO: 156066 - DNA, 201 bp, Zea mays
  unsure (1)..(201): unsure at all n locations
  Clone ID: MRT4577_73915C.1
aaaagctaanggattacgagcggaacttatagtccaaaaaaatatttcaatacaaaacataaataatccaaatttaaaacattggtgccggaaacgttttgagaggcaaggctgcctgaaaagggacataaaaaagctacggctataatacttcgacaaaaaggcctcgatcaacatgctgatataattcaatggttcctt

SEQ ID NO: 156067 - DNA, 294 bp, Zea mays
  Clone ID: MRT4577_73916C.1
ttttgtttttttttttttttttttttttttgggtaatccccaacatcacacgggggtgttcgtcctaaccaactaatttcacgtccacgaggtgagatgcgcacttgcttttctgtttttctttctacactgatacacctgggggggggggggggcatttcctcttgcgaatttttaaccttcttcactcacgtgccatgctgtttccacgtcccccagcttaacccggggctccttccacccgaacgcctcgtcctcgtcgccggggccgcccttcagccttagctccaccag

SEQ ID NO: 156068 - DNA, 173 bp, Zea mays
  Clone ID: MRT4577_73917C.1
tgctggagcatagcaaggtcagacaaaggccagctagctacagttgcgcctgacgcggaggtcgcgacggctgccacattgccgaaggcaaagggtagaggctcttggctccggaagcgatgcggcggccctcgcaggttgtcttggacgagagcggacccatcgatcagccg

SEQ ID NO: 156069 - DNA, 550 bp, Zea mays
  Clone ID: MRT4577_73918C.1
accacgcgtccactggaacgggaaggacggcgagttcaagctgcaggtgcaccgcagcgtggctctggtgaacaagtcgtccgcgttcctcactgacgacaacctcgtgccggagtcgtggtgggtggagcggaacaaggggatggtcatcggagaaaccgggctgtggcagctcgaaccgcctggcgaggagcccgtaccgccgttcgtgaccgggaaggtcatcgatgacgacgaccatgtcgctgccaccaccaccactactactaccacggctagtaaggagacgaagacaccggtcaaggataagaatcggttcgggactcagcttttctcggcatgctttagaggggtcaatcagtctgtcgataactgaatggttgaatgtttggaggatattttgctactgttgtatcggtttgtgttggtagttgggacctctgtcgcagttctggaagaacaacaacactgttacgatgttaattcctcctctccctccttgcttcggaaggaaaaaaaatagtgagtgtctttatctttctcttaaaaa

SEQ ID NO: 156070 - DNA, 801 bp, Zea mays
  Clone ID: MRT4577_73919C.1
gttccccatctttaaatattaatagagctcctcagagatctgggggggggggggggggggggcccaaataccaatacctcgttgacaacggtacgactctgcgactcacataagggtgtgcattctccgcacgtactccaactccggcggaggtataacatggccccactcatttatggtgagacttgagattccctacgacagcccacgtgctgctacgcgcgcacacacgataattaatacgcccacacacccggcatatgggtaagagttcatttggtagtaacccaacgcgaaagcttaatcagagtatcctaaccaaagactaggtaacgctgatcctcattgtgttgctcagaaacgtccccacgacaaacctcgaactctctttaacattttgttgtttcgcgaacgctagtgtccgaatagtcgtacagtttactaagtgaaggacaaccaaggactccgtgcagtagagttgggactaggtccaggcggtaagaaccgttgtccataccgtgacttacgttcatacctcagtaacactgaacattagtcggagaaacggttcagattcctcatagataccctagtcggccgtgctggacttcgtctagaagtgtgaggtggagtttacctggttggagtacgaacgcaacactaacgagacacttacggtacacggttcgacagaggtctcaacaacgggtcgggaaactaggacgacgaacagcatagaatccggaactatagtcacaacgtctgtaacgacccctgtacactcaaccaagtctccactcg

SEQ ID NO: 156071 - DNA, 268 bp, Zea mays
  Clone ID: MRT4577_7391C.1
aaaaaaatctctgagaaagagaccgaccccgaacaagggggattcaaaagaagggaacgccccacaccccacgggaaccaggggacagcggcagcggtaaccgaaggtgctcaacgcgcgggcgaaggacacagcacgaaaccaccaccatactggcacatgccggcggcaaccggcaacgggccattgaaaccagcagagtcaaaagacgccatgcaaaaaagcacgcagaggggggcgacgaaaaccaaacccgagcactgtcgca

SEQ ID NO: 156072 - DNA, 284 bp, Zea mays
  Clone ID: MRT4577_73920C.1
aaaaggaaaaaaatttttttaaggcctggccgatcccgtttcatgttcaagaagaacgaaattaggccttttgcccggaaaggggaagtttttcccatccccagactggtccaggttctttttttttcactcctcgctttaaattggaaacacacaactggttttttttaaacccctgcgactaactttaaacattcaacacggcttttgcttaattacgggggctggaacatttatgccaagccggttgaaccaaacggtccatgagtgacaaaaaacacgtt

SEQ ID NO: 156073 - DNA, 365 bp, Zea mays
  unsure (1)..(365): unsure at all n locations
  Clone ID: MRT4577_73921C.1
ccccncccccccnccctttttcnncccgggggtnccgccccacgccgaggacgcttttcccttttttctaaatggcccctccctatacaccacagccgccttcncccggntctactctccctcaaagaggagctgctcaccgacccggccttagagtttaccgaggagcctcttctttttggatcggggcggtatggctgactacaatgtacttgggaggcaagatgaacctgagggctctcttgtgggcgacagctactagctgcttaagggcgctgatgctctgggcgaggaggaaacgttacttgcttgcccccctcggattggggattgaatgggttcacgctttctttcttgcgcttgat

SEQ ID NO: 156074 - DNA, 770 bp, Zea mays
  Clone ID: MRT4577_73922C.1
cggccgggatcatcctctatctaattctctatgtcgaatgactcactcgacacccggagcctctccttctcggtctcctccgcccgttgacttcgtcccctccatctccgagtgccccctcgaccagtccgacaccgttaatccgatccgccgacaaggagagaggaaagatacgcgggtcacgatcaccaagctggtcagccgcttgatcgccaacaatgagaagcggatcctgatggcgacactcgactacgtcgccaaagaccaccatcctctacgagctgaacctcggtgatatcgtcaccaccatccccaccatcgaattcaatgactgaactgaggaggaccacaacatcaccttcactgactgcaatgacatcgggcagcacgatatcaagccactgagtaggcattacttccagaacacccagctcctcatctttgatgaggacaacaatgatatgtaccgtgatgttgaaactaggtatgagcttcaccgaatgctgaatgataatgagctacgggatggtgagtagcttgagcttgctaacaacctacatcttccaaatgctatgaatgtcgctggtatcactgataactatgtactggattcacttcaccagagatgttggacacattctgagcacttgtgctacaacgggtgacgtattgcatgaaggtctggactgtctgtccagcaacattgcaaccaagtcctatatcgtcaagcaaggcttggatcatctaggaacttttgcacgatgatgatg

SEQ ID NO: 156075 - DNA, 257 bp, Zea mays
  Clone ID: MRT4577_73923C.1
atggctaccatcaccccctccttgccgtcgtcctgctctaccccacaccacctcgctctacggtggcccgggtcgttacgcccctgacactcgagtcgcgctcgcgaggaaggagtcggccgagcaaaaagacactaggttcgggcatacgattctactgtgctgtgctagaggaagaccatagggacgcagatgctctgtctcctcaaatcgatgccttcgtaactgctgcagctcttgcaaaggcttctgtctat

SEQ ID NO: 156076 - DNA, 2532 bp, Zea mays
  Clone ID: MRT4577_73924C.1
atggcgcccaagaggaaagcctcgagttcgtctgccgtggtgattcctccaatcgaccccaacagccagttgcctttcgcagatcaggaggtagccgaggcaggtgctttgctggctgaagttggattgctgaaggagaggggtctgactgctgaagctgttgttgctgattttgtcttcaagaatattcagccgttgaaagacagggcgcacccggcttatctgtatcgaggcctagccgactcaactcgggttaccaacagaagaattccctctgcagacttggtgaaccgacttgagatgatccttagaggcaaggtgtcaaatgttggtgccccagtggcatactcggcctggaacctgcctcctcctaaagccttcaccctttttgtgtcgaatcctcctgtcactgatgacaatttgggccttagagtgcggccctctgctgaagaagttagtgccttggttgcctcgctcggggagattcctgatgatgaacggcaggtccattttgaggtgcccctgaaccctagtgatgcagagataagcgctatgcttgatttgctggctgaggactcttctgacgctgctcctgctagggcattggtagtggcgcccctcccagaggctgatacaactttggatactcagaagcctgccagtactcgcccgaggcgcccttgccgagccaatcaacctgatccttctgctgatgagcagaaaaagaaaaagagacgcctccggcgagtatccagtttggatcgggacgttggtacctcggttcctgctgctgaagaagtgcctgtgactgaatttactgacgctgaccccaatgggtgtacccaatctgttgctgatccccatgtgagtgctccatctgttgctgatcccaatgggcgtgctccatctgttgttgatcccaatgggggtgctgcctatgttgctaatgtggacgacgaggaggaagaagatgaagttcctttgactcggaaaaacagtcggcagttcatcgctagcggtgaaagtagtggagttccttctcctgctttgtctactctcattggtctgcaagaactgtccctggccaactttgatcagactcttgaggatatggttccagaggatttgttatcggagccagtggatgatggtgtgatggaggtttgtgctgatgtgcttgatgctgggttgaggtcatcccgtgcctcgtcgaccttagagcgcgatctcgagggtcgggagactgacttggatcgtcctggtcccatggaagtaactgagggcccatcagccttagaagtggctaccgtagaggacttggacccccagggtggtgttgacacatgcccagcccccgaggatgtcgccggggataacttggttcgggtgggaagtgtaagccactgcccagcccccgagggtgctgctggggatgatccggctcaagtgggcagtgcaaactatgacccagcccccgagggtgtccgagcggggtctccctcctgtacttccatggacgttcatgcgggatcgcctccacactccggctatatggtggtagtccaagccttggaccagagagtcgctttagagggtagcgtccccgctgaccgagtgttgggctctgttgatggcaccgagttgattcctgctggttcgttgcaagctgcttcgggtggtggccttacgcccggttatcaattgatctctcctgatttggggatcccttcgttcttttccaacctccaggctttggttgatgggatggctagccagctgaggttacagggtgcttctgtcccagaagtagcttcgtcacttgcatgttggaatccagtgtcacttcaacatcgtgtttctgaactggaggcgaccaacactggtatgactcggcagatttccactcttgaggaaaaacgttcccgagatcaggctgaattggtccagcggtgcgctaacttcgaggaaaagtactctcaaagtcagactgaactaactcaggtctctgctgccttagatgatgccaatgcactgagttcttctcttcacgctcaactcaattctgaaaaggaagaaaaacgtatccttgctgcttctcgtgacagtcttgacagattgtatcacgattctagcaactcgctgaccattctggagaggagtcatcgcttcaccatggaagagttagacaaccaacgttgtaagctgcaggaatccacagatgaagtgacccggctcaagcagttgatatcagcgaaggacgttactatcaaagaactccgagcttccaagaaatccatcgcccaagagttagaaactgctcggctggctgctaaggttgccgaagaaacttctgttactctcagagcccagcgcgatagagccatggacaaggctattcgggcggagcgaatcttgatgaggagacccggcgtggttgttcccgaagatataagggctgatgtgaatgctgcccctgattcctcgagtcgtccttcctcatcgattgctcctgagaaaaatatcacaaaatag

SEQ ID NO: 156077 - DNA, 1494 bp, Zea mays
  Clone ID: MRT4577_73925C.1
atggcgcccaagaggaaggcctcgagttcgtctgccgcggtgattcctccaatcgaccccaacagccagttgcctttcgcagtacttgtatcactgtcgccctggatggccggaggacaacatcagttggttgggggtgctagcttggagatgcgccgcgggaggaagactgagtatcttgaaatccctctcaaagacagcatcaagggatggcgcttggagtggttcattgttgagaattatggaaactctctcccccctcggtcgggaagacagccggacgttcgcaccccgagttggaccgagtcccccacggatcaggaggtagctgaggcaggtgctttgctagctgaagttggattgctgaaggagaggggcctgactgctgaagctgtggttgctgattttgtcttcaagaatattcagccgttgaaagacagggcatactcgacttatctgtatcgaggcctagccgactcaactcgggttaccgacagaagaattccctctttagacttggtgaaccgacttgagatgatccttagaggcaaggtgtcaaatgttggtgccccagtggcatactcagcctggaacttgcctcctcccaaagccttcactctttttgtgtcaaatccacctgtcactgatggcagtttgggccttagagtgcgaccctccgctgaagaagttagtgccttggttgccttgctcggggagattcctgatgatgaacggcaggtccattttgaggtgcccctgaatcctagtgatgcagagataagtgctatgcttgatttgctggctgaggactcttctgatgctgctcctgctgggacattggtggtggcgcccctcccagaggctggtacgaccttggatattcagaagcctgccagtactcgcccgaggtgtccttgccgagccaatcaacctgatccttctgctgatgagcagaaaaagaaaaagagacgcctccggcgagtatccagtttggatcgggacgttggtacttcggttcctgctgctgaagaagcgcctgtgactgaatttgttgacgctaaccccaatgggtgtacccaatctgctgctgatcccaatgtgggtgctccatctgttgctgatcccaatgggggtgctgcctgtgttgctaatgaagacgacggggaggaagaggatgaagttcctttgactcggaaaaacagtcggcagttcatcgctagtggtgaaagtagtggagttccttctcctgctatgtctgctctcattggtctgcaagaattgtccctggcgaattttgatcagactcttgaggatatggttccagaggatttgttatcagagccagcagatgatggtgcgatggaggtttgcgctgatgtgcttgatgctgggttgaggtcatcccgtgcctcgtcgaccttagagcgcgatctcgagggtcaggagactgatttggatcgtcccggtccccactataccatgacacaaaattag

SEQ ID NO: 156078 - DNA, 2766 bp, Zea mays
  Clone ID: MRT4577_73926C.1
atggcgcccaagaggaagacctcgagttcgtctgctgtggtgattcctccaatcgaccccaacagccagttgcctttcgcaggtaaccacatgtccgccatttctgagcctgaacttttccacctcgtatctatcggggttcttcctccacgggaactctgttcttggcggatttgccatgggtttactgttccgactgaggatacccatgagtccgttgtttatgcccctttccttctccgcggccttggccttcccatttctccctttttccgcggcctccttgatttctaccgtcttaattttactcatttgaaccccaattctatcctgcaaatctccattttcgttcatttatgcgaagcctttctcggcgtgctaccacatttcgggttgtggaaatacttgtatcattgtcgccctgggatggccgggggacaacatcagttggttgggggtgccagcttggagatgcgccgcgggaggaagactgaatatctcgagatccctctcaaggacagtatcaagggatggcgcttggagtggttcatagttgagaattatgggaattctctcccctcccggtcgggaagacagccggacgttcgcaccccaagctggaccgagtctcccacagatcaggaggtagctgaggcagacttggtgagccgactagagatgatccttaggggcaaagtgtcaaatgttggtgctccagtggcatacttggcctggaacctgcctcctcccaaagccttcaccctttttgtgtcgaatccacctgtcactgatggcagtttgggccttagagtgcgaccctctgctgaagaagttagtgccttggttgcctcgcttggggagattcctgatgatgaacggcaggtccattttgaggtgcccctgaaccctagtgatgcagagataagcgctatgcttgatttgctggctgaggattcttccgacgctgctcctgctggggcgttgaagaagaaaagaagacgccttcggcgagtatccagtttggatcgggacgctggtacctcggttcctgctactgaagaagtgtctgcgactggatttactgatgctgaccccaatgggtgttcccaatccgctgttgatcccaatgtgggtgctccatctgttgctgatcccaatgggtgtgctgcttgtgttgccaatgtggatgacgaggaggaagaaaatgaaattcctttgactcggaaaaatagtcgacagttcatcgccagcggtgaaagtagtggagttccctctcctgctttgtctgccctcattggtctgcaagaactgtccctggccaactttgatcagactcttgaggatatggtctcagaggacttgttatcggagccagtggatgatggtgcaatggaggtttgcgctaacgtgcctgatgctgggttgaggtcatcccgtgcctcgtcgaccttagagcgcgatctcgagggtcgggagactgacttggatcgtcctggtcctatggaagtagctgagggcccgtcaaccttagaggtggctactgcagagaacttggaccccaaggatggtgctgacacatgcccagcccccgaggatgtcgccggggatgacttggctcgggtggggagtgtaagccactgcccagaccccgagggtgctgccggggatgatccggctcaagtgggcagtgcaaactatgacccagcccccgagggtgcccgagcggggtctccctcctgtacttccatggacgttcatgcgggatctcctccacactctggctgtatggtggtagcccaagccttggaccagagagtcgctttagagggcagcgtccccactgaccgagtgtttggctctgttgaaggcaccgagctaattcctactggttcgttgcaagctgcttcgggtggtggccttacgcctgattatcaactgatctctcctgatttggggatcccttcgttcttttccaacctccaggctttggtggatgggatggctagccagctgaggttacagggtgcttccgtcctagaagtagcttcgtctcttgcatgttggaatccagtctcacttcaacatcgcgtctctgaattggaggcaaccaacgctggaatgactcggcagatttcaactcttgaggaaaaacattcccgagatcaggctgaattggtccagcggtgcgctgactttgaggagaagtactctcagagccaaactgaactgggtcaggtctccgctgccttggatgacgccaatgcactgagttcttctcttcatgctcagctcaattctgaaaaggaagaaaagcgtatccttgttgcttctcgtgacagtcttgacagattgtatcgtgattctagcaactcgttgaccatcttggagaggagtcaccgctttacaatggaagaattggacaatcaacgctgtaaggtgcaggaatccgcggatgaagtgacccgcctcaagcagttgctatcagcgaaggatgctaccatcaaagaactccgagcttccaagaaatccattgtcctggagttagaaactgctcgactggctgctaaggttgccgaagaaacttctgttactctcagagcccagcgcgacagagccatggacaaggctattcgggcggggcgaatcttgatgaggagacccggcgtggttgttcctgaagatataagggttgatgtgaatgctgcccctgattcctcgagtcgtccttcctcgtcgatcgctcctgagaaagatatcaccaagtag

SEQ ID NO: 156079 - DNA, 230 bp, Zea mays
  Clone ID: MRT4577_73927C.1
aaacccagccgtcccctccgatccggggtactcctccccgttcccaactaactcctaaacccatcgccgccacaggcaccctctcccccggcctcagcagccgccatggccgacggcgccaacccaaacccgacatccacacccaggcagaaggcagtcccagactggctcaacagcccgatctggtccgcccctgcccctagcccgcgccaccgctctcctccccgcgc

SEQ ID NO: 156080 - DNA, 2712 bp, Zea mays
  Clone ID: MRT4577_73928C.1
atgactgggcactttttgaaacggtatctggctcgagaatatcccataagagttgcgcttttagccgcctttgctttccgtgccctagttcttgctttcccgcttccgaatcctctctgccattcgcctcccactctgctcgctggtagaatcgagatggcacccaagaggaagaccgcgagctcgtctgctgtggtgattcctccaattgaccccaacagccagttgcctttcgcaggtaaccacatgtccatcatttctgaaactgagcttctccacctcgtatctatcggggttcttcctccgcgagaactctgttcttggcggatttgccatgggtttactgttccgacagaggatacccatgagtccgttgtttacgcccctttccttctccgcggccttggccttcccatctctccctttttccgcggcctccttgatttctaccatattaacttgacccatttgaatcccaattcaattctgcaaatctccattttcgttcatttatgcgaggcctttcttggcgtgctgccacatttcggtttatggaaatacttgtatcattgtcgccctgggatggccgggggacaacatcagttggttgggggtgccagcttggagatgcgccgcgggaggaaaactgaatatctcgagatccccctcaaggacagtattaagggatggcgcctggagtggttcatagttgagaattatgggaattctctcccctcccggtcgggaagacagccggacgttcgcaccccaagctggaccgagtctcccacagatcaggaggtagctgaggcaggtgtgttgctagctgaagttggactgctgaaagagaggggtctgactgttgaagctgtggttactgactttgttttcaagaatattcagccactgaaagacagagcctatccagcttatctgtatcgagggctagccgactcaactcgggttaccaacaggagaattccttctacagacttggtgagccgacttgaaatgatcctcaggggcaaggtgtcaaatgttggtgctccagtggcgtactcggcctggaacttgcctcctcccaaagccttcacccttttcgtgtcgaatccacccattactgatggcagtttgggccttagagtgcgaccctctgctgaagaagtcagtgctttggttgcctcgcttggggagattcctgatgacgaacggcagaagcctgtcagtgctcgcccgaggcgcccttgccgaaccaatcagcctaatccttctgttgataagcagaagaagaaaagaagacgcctccgacgagtatccagttttgatcaggacgctggtacctcagttcctgctattgaagaagtgcctgcgactggatttactgacgctgaccccaatgggtgtacccaatccgctgttgatcccatagtgggtgccccatctgttgctgatcccaatgggggtgctacttgtgttgccaatgtggatgatgaggaagaggaaaatgagattcctttgactcggaaaaatagtcggcggttcatcgccagtggtgaaagtagtggagttccctctcctgctttgtctgccctcattggtctgcaagaactgtccctggccaactttgatcagactctggaggatatggtcctagaggacttgttatcggagccagtggatgatggtgcaatggaggcttgcgctgacgtgcccgatgttggtttgaggtcatcccgtgcctcgtcgaccttagagcgcgatctcgagggccgggagactgacttggatcgtcctggtcctatggaagtagctgagggcccgtcaaccttagaggtggttactgcagagagcttggacctcaagaatggtgctgacacatgcccagcccccgagggtgtcgccggggatgacttaactagggtgaagagtggagtcgctttagagggcagcgtccccgctgatcaggtgtttggctctgttgaaggcaccgagctgattcctactggttcgttgcaagctgctttgggtggtggtcttacgcctggttatcaactgatctctcctgatttggggatcccttcgttcttttccaacctccaggctttggtggatgggatggccagccagctgagattgcagggtgcttccgtcccagaagtggcttcgtctcttgcatgttggaatccagtgtcacttcaacatcgcgtctctgaattggaggcaaccaatgctggaatgactcggcagatttcaattcttgaggaaaaacattcccgagatcaggctgaattggttcagcggtgtgctgacttcgaggagaagtactctcagagccaaactgaactgggtcaagtctctgctgccttggatgacgccaatgcactgagttcttctcttcatgctcagctcgattctgaaaagctgatatcagcaaaggatgccaccatcaaggaacttcgagcttccaagaaatccattgtccaggagttagagactgctcgactggctgctaaagttgccgaagaaacttctgttactctcaaagcccagcgcgacagagccatggacaaggctattcgggcgggacgaatcttgatgaggagacccgacgtggttgttcctgaagacataagggctgatgtgaatgctgcccctgattcctcgagtcgcccttcttcgtcggtcgctcctgagaaagacattgcaaaatag

SEQ ID NO: 156081 - DNA, 678 bp, Zea mays
  unsure (1)..(678): unsure at all n locations
  Clone ID: MRT4577_73929C.1
ggtaccctncgggtctcggccggggacatcttcccttaacgtacactgcattggatgcttcctggagctagtgtcacacctgtctctgtctgcgcgcgtcgaggagacctaaggatgtgctggggctttccccgcactctttgctgtcgggaacaccaagcatttcctgttaggtggctgatgtggaggtgatccagactcttatctgctacaatgtcacaggaatggtcatggctagttcggctagcgacgatgcaccaagggccataactctctatcattggtgatacgtgctccgctcactgcataagatcgcatgggtgagactgatggacgcatattactacgatgaggcacagtccatgagaggtatccttacgctgaagtaccatgattgagtagctgcgattggggagcgagctgggatgacatggcagaaaatgcggcttgatactttagtacaagctgctttcgtgtggccccacaggagaaccctgtgctgctcaccgagcctcctttgaaaccgaagtgcatctgggagaagatgacccaaatgatgttggagacttataatgatcgtgccatgtatgatgcaatgcaagctgtgctctcaatatatgctagtgagcgtactagtggtattggactcgactctggtgatggtgctgagccacactg

SEQ ID NO: 156082 - DNA, 405 bp, Zea mays
  Clone ID: MRT4577_7392C.1
ggctagttctagatcgtgagcggctgcccttttttttttttggtgttgtgggggtttttttttttttttttttttttttttttttttttttttttgggtttttttttttttttttttttttttttttttggaaaaaagagagagggtcccaattcccggccagaggccaaaaccacccttcatttttcgaaagtgaggggggcccccccttttacagctaagccggtataaaacccaaaagggaaaaaacctccccttgcccccccaaaaaagcccccctaaatttggtcatgactcccccaacccaaggctccccccggtcaaaccccccccccaatttcaaatttcgggtacaaaaaaccgccccgaagaataaagaggggccgtccctggggatacccaacc

SEQ ID NO: 156083 - DNA, 457 bp, Zea mays
  Clone ID: MRT4577_73930C.1
cgaccctggtggacattgtcggaagagtggggcggcaatctgatacgctggggggtaaaatctggcgactgtatccggcgacaaaataatacctggcagacctcatagagaccggatgagaggggtccagcttgaccaagacaaccggtgacacttacagttgcgagaacaacattttctaaattaaaacataaatacatgatgaagcacttcataacatgttagtgataaatttatgcacactagagaagaatatccatgtagaaagttgttgagtgcgagctggaaaagaaaaccaagggtctggtgaagatcactacctaatggacaacaagatgcagatttttgagcacaatcggagctttttggaggtgtacaagcatggattccaggaggttttctaggtacctgaagtgtttcgagaacattgtgaggtagatctacacggaggactggg

SEQ ID NO: 156084 - DNA, 607 bp, Zea mays
  unsure (1)..(607): unsure at all n locations
  Clone ID: MRT4577_73931C.1
gggtcggcggcnncntcccatcgggcctggttccttggtgggcggtcggtacgtcggaggcnngatcaaagatatatgctgatggaagcatctgtttgaatatgctacagaaccaggtgaaccctatatatgatgatgctgcttttttaacttatatcaagtccctgctgtgtgatccaaatccaaactatcttgcaaactcagaagcagcaagactgttgttttttttttagagagagaacgaccttgaagtgcgtgataatgtggatgatagttatacagccgactagctcataaatgagttgggcgtgcccgatggggtcacaagttttattagagaaaaaatgacatctactccttgattttcttgatcgcgagttatttggcaacatttaagatcacatgctattgttttgataccaaggtgagggcgttctgcgaggaggaacatgcaatactggtataggctgtggttgtattagagagcaggcacgctgaactattttgtgccttattgatcggataacacatatgtacaattattattggggttgaatttgttatgactggcctatggatcatttttttttagagaacaataggactt

SEQ ID NO: 156085 - DNA, 2472 bp, Zea mays
  Clone ID: MRT4577_73932C.1
atgcgtcgcgggaggaagactgagtatcttgaaatccctctcaaagacagtatcaagggatggcgcttggagtggttcattattgagaattatggaaactctctcccccctcggtcgggaagacagccggacgttcgcaccccgagttggaccgagtcccccacggatcaggaggtagctgaggcaggtgctttgctagctgaagttggattgcagaaggagaggggtctgactgctgaagctgtggttgctgattttgtcttcaagaatattcagccgttgaaagacagggcatacccggcttatctgtatcgaggcctagctgactcaactcgggttaccaacagaagaattccctatgtagacttggtgaaccgacttgagatgatccttagaggcaaggtgtcaaatgttggtgccccagtggcatactcagcctggaacttgcctcctcccaaagccttcactctttttgtgtcgaatccacctgtcacttatggcagtttgggccttagagtgcgaccctctgctgaagaagttagcgccttggttgcctcgctcggggagattcctgatgatgaacggcaggtccattttgaggtgcccctgaatcctagtgatgcagagataagtgctatgcttgatttgctggctgaggactcttctgatgctgctcctgctgggacattggtggtggcgcccctcccagaggctggtacgaccttggatattcagaagcctaccagtactcgcccgaggcgcccttgccaagccaatcaacctgatccttctgctgatgagcagaaaaagaaaaagagacgcctccggcgagtatccagtttggatcgggacattggtacttcggttcctgttgctgaagaaatgcctatgactgaatttattgacgctgaccccaatgggtgtgcccaatctgctgttgatcccgatgtgggtgctccatctgttgctgatcccaatgggtgtgctgcctatgttgctaatgaagacgacggggaggaagaggatgaagttcctttgactcggaaaaacagtcggcagttcatcgctagtggtgaaagtagtggagttccttctcctgctttgtctgctctcatcggcctgcaagaattgtccctggcgaattttgatcagactctggaggatatggttccagaggatttgttatcagagctagcagatgatggtgtgatggaggtttgtgctgatgtgcttgatgctgggttgaggtcatcctgtgcctcgtcgaccttagagcgtgatctcgagggtcaggagactaacttggatcgtcctggtcccatggaagtaactgagggcccatcagccttagaggtggctaccgcagagaacttggaccccaaggatgcccccgagggtgctgccggggatgatccggctcaagtgggcagtgcaaactatgacccagcccccgagggtgtccgagcggggtctctttcttgtacttccatggacgttcatgcgggatcgcctccgcactctggctgcatggtggtagcgcaagctttggaccagggagtcgctttagagggcagcgtccccgctgaccaagttttgggctctgttgatggcactgagttggttcctgctggttcgttgcaagctgcttcgggtggcgaccttacgcccggtcatcgattgatctctcatgatttgggggtcccttcgttcttttccaacctccaggctttggtggacaggatggctagccagctgaggttacagggtgctcctgttccagaagtagcttcgtctcttgcacgttggaatccagtgttacttcaacatcgtgtctctgacttggaggcgacaaatgttggtatgactcagcagatttccactcttgaagaaaaacattctcgagatcaggctgaattggcccagcggtgctctgactttgaagaaaagtattctcaaaatgacgccaatgcactgagctcttcccttcacgctcagcttaattctgaaaaggaagaaaaacgtatccttgctgcttctcgcgacagtctcgacagattgtatcgcgattctagcaactcgctgaccatcctggagaggagtcatcgcttcaccatggaagagttagacaaccaacgctgtaagctgcaggaatccatggatgaggtgacccggctcaagcaattgatatcagcgaaggatgctactatcaaagaactctgtgcttccaagaaatccatcgcccaggagttagaagctgctcggttggctgtcaaggttgctaaagaaacttccgttactctcagagcccagcgcgacagagccatggataaggccattcgggcggggcgaatcttgatgaggagacctagtgtggttgttcccgaagatataagggctgacgtgaatgttgcttctgattcctcgagtcgcccttcctcgtcgattgctcctgagaaagatatcacaaaatag

SEQ ID NO: 156086 - DNA, 142 bp, Zea mays
  Clone ID: MRT4577_73933C.1
ttggcgcccgggttaagcctttacaaacaaattgacctctaaccatctgtcagaaaaccacgtatcgcggggtttacacaaaatcaccagaccacacccgtacattcttttgccccgcaaagggacccccgcgagagaaacc

SEQ ID NO: 156087 - DNA, 2982 bp, Zea mays
  Clone ID: MRT4577_73934C.1
atggcgcccaagaggaaagcctcgagttcgtctgccgtggtgattcctccaatcgaccccaacagccagttgcctttcgcaggtaaccacatgtccgtcatctctgagcccgaacttctccacctcgtgtccatcggggttcttcctccgagggaactctgctcttggcggatttgccatggggttactgtcccaactgaggatacccatgagtccgtgatttatgcccctttccttctccgcggtcttggccttcccatttctccctttttccgtggcctccttgatttctaccatcttaacttgacccatatgaatcccaattctatcctgcaaatctccattttcgttcatttatgcgaagcctttcttggcgtgctaccacatttcgggttgtggaagtacttgtatcactgtcgccctgggatggccgggggacaacatcaattggttgggggtgctagcttggagatgcgccgggggaggaagactgagtatctcgaaatccctctcaaagacagtatcaaggggtggcgcttggagtggttcatagttgagaattatggaaactctctcccccccccggtcgggaagacagccggatgttcacaccccaagctggaccgagtctcccacaaatcaggagagaggggtctgactgctgaagctgtggttgctgattttgttttcaagaatattcagccgttgaaagacagggcatacccaacttatctgtatcgaggcttaaccgactcaactcgggtcactaacagaagaattccctctacagacttggtgagccgacttgagatgatccttagaggcaaagtgtcaaatgttggtgccccagtggcattctcagcctggaacctgcctcctcccaaagccttcactctttttgtgtcgaatcctcctgtcactgatggcagtttgggccttagagtgcggccctctgctgaagaagttagtgccttggttgcctcgctcggggggattcctgatgatgaacggcaagtccattttgaggtgcccctgaaccctaatgatgcggagataagtgctatgcttgatttgctggctgatgactcttctgacgctgctcctgctggggcattggtagtggtgcccctcccagaggctgatataactttagatgctcagaagtctgctagtactcgcccgaggcacccttgccgagccaatcaacctgatccttctactgatgagcagaaaaagaaaaggagacgcctccggcgagtacccagtttggatcgggacgttggtacctcggttcctgatgctgaagaagtgcctgtgactgaatttactgacgctgaccccaatgggtgtacccaatctgttgctgatcccaatgggtgtgctgcctacgttgctaatgtggacgacgaggagggagaagatgaagttcctttgactcagaaaaacagtcggcagttcatcgctagcggtgaaagtagtggagttccttctcctgctttatctgctctcatgggtctgcaagaactgtccttggctaattttgatcagactcttgaggatatggttccagaggatttgttatcggagccggcagatgatggtgtgatggaggtttgtgctgatgtgcttgatgctgggttgaggtcatcccgtgcctcgtcgaccttagagcgcgatctcgagggtcgggagactgacttggattgtcctggtcccatggaagtaactgagggcccatcagccttagaggtggctaccgcagagaacttggaccccaaggatggtgttgacacgtgcccagcccccgagagtgttgtcggggttgacttgattcgggtgggaagtgcaagccactgcccagcccccgagggtgctgccggggatgatccggctcaagtgggcagtgcaaactatgacccagcccccgaggatgtccgagcggggtctctctcttgtacttccatggacgttcatgcgggatcgcctcaacactccggctgtatggtggtagcccaagccttggaccagggagtcgctttagagggtagcgtccccgctgaccgagtgttgggatctgttgatggcaccgagttgattcctgctggttcgttgcaagctgcttcgggtggtggccttacgcccggttatcaattgatctctcctgatttggggatcccttcgttcttttccaacctccaggctttggtggatgggatggctggccagctgaggttacagggtgcttctgtcccagaagtagcttcgtcacttgcatgttggaatccagtgtcacttcaacatcgtgtctctgaattggaggcgaccaacgctggtatgattcggcagatttccactcttgaggaaaaacattcccgagatcaggctgaattggcccagcggtgcactgactttgaggaaaagtactctcaaagtcagattgaactgggtcaggtctctgctgccttagatgacgccaatgcactgagttcttctcttcatgctcagctcaattctgaaaaggaagaaaaatgtatccttgctgcttctcgcgacagtcttgaaagattgtatcgtgattccagcaactcgctgactatcttggagaggagtcatcgcttcaccatggaagagttagacaatcaacgctgtaagctgcaggaatccatggatgaagtgacccagctcaagcagttgatatcagcgaaggacgctactatcaaagaactccgagcttccaagaaatccatcgcccaagagttagaaactgctcggctggctgccaaggttgccgaagaaacttctgttactctcagagcccagcgtgatagagccatggacaaggctattcgggcggggcgaatcttgatgaggagacccggcgtggttgttcccgaagatataagggctgatgtgaatgctgcccctgattcctcgagtcgtccttcctcatcgattgctcctgagaaaaatatcacgaaatag

SEQ ID NO: 156088 - DNA, 806 bp, Zea mays
  Clone ID: MRT4577_73935C.1
ggtaccctcgggctcggcaggagcaccaaccccgacaccaccgttggcagccgcaacccgcaaccagagccatgggcctcttcggcaagagcacctccaagcagaccgccaagctcaaggccctggtcaagctcgccgcggcgcgcctcgccgtcgtccgccggccgcgcctcggccgccggtccatcgcccgtagcgacgtcgggcagctcctctctatcggccatctcgaccgcgcgctcgtccgcgcggagcaggtgatcgaggaggacaacatgctggaggcgctggacgtcatcgagctctactgcaaaatcctcatcgagcagaccgcgcagctggagaaacccaaggaatgcagcgaggagatcaaagaggcggcggcggggatgatgttcgcgtccgcgcggtgcggcgagctgccggagcttctggacgcgcgcgccatccttgcagacaagttcggctgggacttcgccagggcggccaaggagggcgcccacggcgtcgtcgaccccacgttggtgcggaagttgtccggcgagagggcgagcctggagcagacgaggaggttggcgaaggagatcgccgccgagaacgacatcttgctggagttccctgagagcccagtagggattcacaaagatggtcgcacgacctcgcaggtcaacagtcagagagcaggagaggaaactaagaatgcaccggccagaacatttgtcgaggagagtgcagtcaagacggatcgccgtgagggggagcggaattctgttaacggcaagggtgacccgagccttgctcagctg

SEQ ID NO: 156089 - DNA, 3087 bp, Zea mays
  Clone ID: MRT4577_73936C.1
atggcgcccaagaggaaggcctcgagttcatccgccgcggtgattcccccaatcgaccccaacagtcagttgcctttcgcaggtaaccacatgtctattgtctccgagcccgaccttctccacctcgtgtccatcggggtccttcccccgagggagttgtgttcttggcggatttgtcatggggtcactgtcccgacagaggatacccatgaatccgtaatttacgttccttttcttctccgcggtctcggtcttcccatttctccctttttccacggcctccttgatttctatcgccttaacctgacccatctgaatcccaattccattctacaaatttccatttacattcatttgtgcgaagcttttcttggcgtgctgccacattttgggttgtggaagtacttgtatcactgtcgccctgggatggccggggggcagcatcagctggttgggggtgctagtttagagatgcgtcacgggaggaagactgaatatcttgaaatccctctcaaagacattatcaagggatggcgcttggagtggtttattgttgagaaccatggaaattctctcccccctaggtcgggaagacagccggatgttcgtactccaagttggaccgaatcccccactgatcaggaggtagctgaggcaggtgctttgctagctgaagttgggctgctgaaggagaggggtctgactgctgaggctgtggttgctgattttgttttcaagaatattcagccgttgaaagacagggcatacccagcttatctgtaccgaggcctagctgactcaactcggattaccaacagaagaattccctctgtagacttggtgaaccgacttgagatgattcttagaggcaaggtatcaaatgttggttccccagtggcatactcagcctggaacttgcctcctcccaaggccttcactctttttgtgttgaatccacctgtcactaatggcagtttgggccttagagtgcgaccctctgctgaagaagttagcgtcttggttgcctcgctcggggaaattcctgatgatggacgacaggtccattttgaggtgcctttggatcctagtgacacagaaataagtgctatgcttgatttgctggctgaggactcttctgatgctgctcctgctgggacattggtggtggcgcctctcccagaaactggtacaaccttggatatccagaagcctgccagtactcgttcgagacgcccttgccgagccaatcaacttgatccttccgcagatgagcagaaaaagaaaaagagacgcctccgacgagtatctagtttggatcgggacgttggtacttcggttcctgctgctgaagaagtgcctgtgcctgaatttactgacactgaccccgatgggtgtgctccatctgttgctgatcccaatgggggtgctccatctgctgctgaccccaatgggtgtgctccatctgttgctgattccaatgtgggtgttgcttgtgttgctggtgaaaacgatggggaggaagaggacgaggtccctctgactcgaaagaacagtcggcagtacgtcgccagtggtgaaagtagtggagttccttctcctgctttgtctgctctcattggtctgcaagaattgtctctggcgaattttgatcagactcttgaggatatggttccagaggatctgttatcagagccaacagatgatggtgtgatggaggtttgtgctgatgtgctcgatgctgggttgaggtcatcccgtgcctcatcgaccttagaacgcggtcttaagggtcaggaggctgacttggatcatcttggtcccatggaagtaaccgagggtccatcagccttagaggcggctactgcagagaacttggtccccaaggacggtgttgacacttgcccagcccccgaggatgttgccggggatgactcggctcgggtgggaagtgcaagccactgcccagcccccgagggtactgccggagatgatccggctcaagtgggcagcgcaaaccgtgacccagcccccgagggtgtccgagcggggtcttcctcttgtacttccatggacgttcatgcgggatcgcctccgcactccggctgcatggtggtagcccaagctttggaccagggagtcgctttagagggcagcgtccccgctgaccaagttttgggctctgttgatggcactgagttggttcctgctggttcgttgcaagctgcttcgggtggcgaccttacgcccggtcatcaattgatctctcatgatttgggagtcccttcgttcttttccaacctccaggctttggtggacgggatggctagccagctgaggttgcagggtgcttctgttccagaaggagctttgtctcttgcacgttggaatccagtgttacttcaacatcgtgtctctgacttggaggcgaccaatgctgatatgactcggcagatttccactcttgaagaaaaacattctcgagatcaggctgagctggtccagtggtgctctgattttgaagaaaagtattctcaaagccagactgaactagctcaggtctctgccgccctagatgacgccaatgcactgagctcttcccttcgcactcagcttgattctgaaaaggaagaaaaacgtatcctcgctgcttctcgcgacaatcttgatagactgtatcgcgactctagcaactcgttgaccatcctggagaggagtcatcgcttcaccatggaggagttagacaaccatcgctgtaagctgcaggaatccacggatgaggtgatccggctcaagcaattgatatcggcgaaggatgctactatcaaagaactctgtgcttccaagaaatccatcgcccaggagctagaaaccgctcagttggctgccaaggttgctgaagaaacttccattactctgagagcccagcgcgacagggccatggataaggccattcgggcggggcgaatcttgatgaggagacctagcgtggttgttcctgaagatataagggctgacgtgaatgctgctcctgattcctcaagtcacccttcctcgtcggttgcccctgagaaagatatcgtgaaatag

SEQ ID NO: 156090 - DNA, 2304 bp, Zea mays
  Clone ID: MRT4577_73937C.1
atggcgcccaagaggaagacctcgagttcatctgctgtggtgattcctccaatcgaccccaacagccagttgcctttcgcagacttggtgagccgactagagatgatccttaggggcaaagtgtcaaatgttggtgctccagtggcatactcggcctggaacctgcctcctcccaaagccttcaccctttttgtgtcgaatccacctattactgatggcagtttgggccttagagtgcgaccctctgctgatgaagttagtgccttggttgcttcgcttggggagattcctgatgatgaacggcaggtccattttgaggtgcccttgaaccctagtgatgcggagataagtgctatgcttgatttgctggctgaggattcttccgacgctgctcctgctggggcgttggtagtggcgcccctcctagaggctgatacaattttggatactcagaagcctgtcagtactcgcccgaggcgcccttgccgagccaatcagcctgatccttctgctgatgagcagaagaagaaaagaagacgcctccggcgagtatccagttttgatcaggacgctggtacctcggttcctgttactgaagaagtgtctgcgactggattggctgatgctgaccccaatgggtgtacccaatccactgctgatcccaatgtgggtgctccatctgttgctgatctcaatgggggtgctgcttgtgttgccaatgtggatgacgaggaggaagaaaatgaaattcctttgactcggaaaaacagtcggcagttcatcgccagtggtgaaagtagtggagttccctctcctgctttgtctgccctcattggtctgcaagagctgtccctggccaactttgatcagactcttgaggatatggtcccagaggacttgttatcggagccagtggatgatggtgcaatggaggtttgtgctgatgtgcctgatgctgggttgaggtcatcccgtgcctcgtcgaccttagagcgcgatctcgagggtcgggagactgacttggatcatcctggtcctatggaagtagctgagggcccatcaaccttagaggtggttactgcagagaacttggacctcaagaatggtgctgacacatgcccagcccccgagggtgctgccggggatgacttggctcgggtgaagagtgtaagccactacccagcccccgagggtgctgccggggatgatccggctcaagtgggcagtgcaaactatgacccagcccccgagggtgcccgagcagggtctccctcctgtacttccatggacgttcatgtgggatctcctccacactctggctgtatggtggtagcccaaaccttggacgagggagtcgctttagagggcagcgtccccgctgatcgagtgtttggctctgttgaaggcaccgagctgattcctactggttcgttgcaagctgcttcgggtggtggccttacgcctgattatcaactgatctctcctgattttgggatcccttcgttcttttccaacctccaggctttggtggatgggatggctagccagctgaggctacagggtgcttccgtcccagaagtagctttgtctcttgcatgttggaatccagtgtcacttcaacatcgcgtctctgaattggaggcaaccaacgttggaatgactcggcagatttcaactcttgaggaaaaacattcccgagatcaggctgaattggtccagtggtgtgctgacttcgaggagaagtactctcagagccaaactgaactgggtcaagtctctgctgccttggatgacgccaatgcactgagttcttctcttcatgctcagctcgattctgaaaaggaagaaaagcgtatccttgctgcttctcgtgacagtcttgacagattgtatcgtgattctagcaactcgttgaccatcttggagaggagtcaccgctttacaatggaggaattggacaatcaacgctgtaagctgcaggaatccgcggacgaagtgacccggctcaagcagctgatatcagcgaaggatgctaccatcaaagaactccgagcttccaagaaatccattgtccaggagttagaaactgctcgactggctgccaaggttgccgaagagacttctgttactctcagagcccagcgcgacagagccatggacaaggctattcgggcgggacgaatcttgatgaggagacccggcgtggttgttcctgaagacataagggttgacgtgaatgctacccctgattcctcgagtcgcccttcttcgtcggtcgctcctgagaaagatattgcgaaatag

SEQ ID NO: 156091 - DNA, 1266 bp, Zea mays
  Clone ID: MRT4577_73938C.1
atggaagtaactgagggcccatcagccttagaggtggctaccgcagataacttggaccccaagaatggtgttaacacttacccagcccccgaggacgttgccggggatgacttggtcagggtgggaaatgcaagccactgcccagcccccgatggtgctgccggggatgatccggctcaagtgggcagtgcaaactatgacccagcccccgagggtgtccgagcgaggtctccctcttgtacttccatggacgttcatgcgggatcgcctccacactccgactgcatggtggtggcccaagctttggaccagggagtcgctttagagggcagcgtccccgctgaccgagttttgggctctgttgatggcaccgagttggttcctgctggttcgttgcaagctgcttcgggtggcggctttacgcccggtcatcaattgatctctcatgatttggggatcccttcgttcttttccaacctccaggctttggtggacgggatggctagccagctgaggttacagggtgcttctgttccagaagtagcttcgtctcttgcacgttggaatccagtgttacttcaacatcgtgtctctgacttggaggcgaccaatgctggtatgactcggcagatttccactcttgaagaaaaacattctcgagatcaggctgaattggtccagcggtgctctgactttgaagaaaagtattctcaaagtcagactgaactagctcaggactctgctgccttagatgacgccaatgcactgagctcttcccttcacgctcagcttaattctgaaaaggaagaaaaacgtatccttgctgcttcttgcgacagtcttgacagattgtatcgcgattctagcaactcgctgaccatcctggagaggagtcatcgcttcaccatggaagaggtagacaaccaacgctgtaagctgcaggaatccacggatgaggtgacccggctcaagcaattgctatcagcgaaggatgctactatcaaagaactccgtgcttccaagaaatctatcgcccaggagttagaagctgctcggttggctgtcaaggttgctgaagaaacttccgttactctcagagcccagcgcgacagagccatggataaggccattcgggtagggcgaatcttgatgaggagacccggtgtggttgttcccgaagatataagggctgacgtgaatgctgctcctgattcctcgagtcgcccttcctcgtcgattgctcctgagaaggatatcacaaaatag

SEQ ID NO: 156092 - DNA, 146 bp, Zea mays
  Clone ID: MRT4577_73939C.1
aagacactcgcgcgaatcgcatggcgggattatatgtcactctcctaggctgaggtgaccttaattcaatatcagcagatctatgcgcggaggcagcatcagctgttggatatcattaggctcgtgctgatgatgcatctatttga

SEQ ID NO: 156093 - DNA, 395 bp, Zea mays
  unsure (1)..(395): unsure at all n locations
  Clone ID: MRT4577_7393C.1
gggaccgggccggaactttcggggcgacccaagcccccggagccaccgggacggcagccagcagcgccaggaaaaccgaacaccccagccgagaaacacccggccgggcaaaacgcttccttggaattgggctcccaggtagcagcaaaggatagctataaacagattgagaattagtggttcnaggagaacaaaaggcccgacgaaccgttgacacaaacacccacccccaaaggaggggcagggacccccaaagatcagcccaaggcggaagccacaccagccgcccggaccagccgcaccgccacccaaagcgaaacgagagcaagcgacgggacccgaccccaaaggcagcaccagcgagaacaaggaaccgcaagacgacccagacaaca

SEQ ID NO: 156094 - DNA, 264 bp, Zea mays
  Clone ID: MRT4577_73940C.1
agtcacttcgcttccccacctctccattccattgcggttctgcgagctcctacctccctgtggtgcttggtcatggtcgactaccacttcgtgtataacgacttggagggggcgagcacatcgtgggacgacatccagcgccgcgtcaggaacttgcctccgaagccggagccctccaagccggcttttctccccccgaaggttgacgccaactaccaacccaagtccaacggatggcctgacgttccccaacccgaacaactc

SEQ ID NO: 156095 - DNA, 487 bp, Zea mays
  Clone ID: MRT4577_73941C.1
gatactcatcagctcattcatgcagccatgccccgcgcccgagccgccacgagagatagtcgcgacaacttgcaggagcggagcacaactaccagatcacaacgggacatatgaatacaccgagggagaaggtatacgtccgtcctatctcatcgatcgtatcgcggactctgctggccctgcaggaggccgctatcgactacgacatcatctccatgacacgacgggacggcaaccaccgacgcccgaagaacctcggcagggaccctttcgcgaatacgacggcggtccaggatggcgacctcacgctcttcaaatcacgtgcgatcgccaggtatgttctccgcaagcacaagactaatttgtttggagatgctacggctgcagcaaacgccgatggaggatgtgcggctgcagctgctgacccatcagcgtgagcccgccggacatcgccatcgcaggtgcatagtacgtctacctagcgact

SEQ ID NO: 156096 - DNA, 688 bp, Zea mays
  Clone ID: MRT4577_73942C.1
cattgggtacctcgaggccggccgggagaccgccattgtcgctccccacgaaccgccctcccgcccgtgaaatgccatccgttcgagacatcgccgccgatgctttcatccgcgagtacgctggacatttgaaacgatctggcaagatcgaagtccctacatgggtcgatatcgtcaagaccggcccctcgaaggagcttgccccatacgaccctgactggtattacgtccgggctgccggcatcgcccgtcacatatacctccgaaaacatgtcggagttggtgccttggccaaacttcacggaactgccaagaaccgtggaaaccgacccagtcaccacgtcgatgcatcccgatcaattgaaaggaaaatcttgcaaggactggagaaaatcggagtgctcgaaaaggacgcccgaggtggccgacgagtatctcaagatggacaacgagacttggaccgtattgccagtaatattgctgaacaaatgaggtccggtggtgatgaagatgacgaggaatgaaatctaagggcctgtgccatacttcccacctcccaaacctgtccttccgcatcccctcgaaagcttcttcgcattcgggttattctcgtgccgacttacctaaataactattcaagactcttaaaaatttcaaacctcctaaaaaaaaaaaaaaaaaagcggcc

SEQ ID NO: 156097 - DNA, 221 bp, Zea mays
  Clone ID: MRT4577_73943C.1
gcgattatcttcactcgtggagatgctctacaaacaattgatatgaatcaagacaactatctggaagaagcttacaaaatgaggaatgtccttcaagagtttgtaaggcatcctagggacaaagctccaactatccttgggttaagagagcatatcttcactggaagtgtttcatctcttgctggcttcatgtcatatcaagagacaagctttgttacaat

SEQ ID NO: 156098 - DNA, 427 bp, Zea mays
  Clone ID: MRT4577_73944C.1
ggacaaaacccggaaccaagtttgacaaaaccggggggggggggaagttaagggggggtcaaagtgggattcacgggaaacacccatgggggattaggaaaaaaggaaaagaggattacaaatttacagacggggaggggcacccccaccccaggttcccctcaaaattaaaaaaaacgggaatttcggggcaatggacccactaaaggaccgggggaacggaaaaaaggccttctaaagccttttgaggaccggtaccaagggaaaaaaaaacttttggcaaaccccctaaaacttaaagaagaggggctaaacctgagggggaacctaaaccaccggttaaaaaacgcactccaccctcaggggaacctggggaagggaacccgtcccggggagggaacgggcccaatttgaagacaacttttcc

SEQ ID NO: 156099 - DNA, 306 bp, Zea mays
  Clone ID: MRT4577_73945C.1
caggccggcccgtcttgctcgtccgcatcttgtcgccgctgccgccacgttgcttgcctctgctactgctgctgccgtcgccgccattaatgctttgttgatttctctcctggtcgagacaacgcaggttccttcatcacttcactgttgagtatttgcattgggtgtgtatgtatcggattttgctttgcgtgatcacggtaccatatttatttatcggactcctcgttcatcaggtggaggttttcgtaaaaaaaaaaaaaaaaaaaaaaaaaaaaaaataaaaaaaaaaaaaaaaaagcggcc

SEQ ID NO: 156100 - DNA, 294 bp, Zea mays
  Clone ID: MRT4577_73946C.1
atgtttagtattaactgccatcatgcttttttattgagcccgatttgatcaaataaaatcacatatgctaagtaccgggtcttttagcagttaatgggattgtttatgtacaaaaaatacgatgaccataatcttgtgggggggctatgccaatcctttaactggtggccaacttttcagagctctacccaaggtgagatcttcctgtgacgactattatacagactccctgaactctctgacatgaaattaattttctcccagcacatgaataggaccaagcggacattgttt

SEQ ID NO: 156101 - DNA, 869 bp, Zea mays
  unsure (1)..(869): unsure at all n locations
  Clone ID: MRT4577_73947C.1
ttgggtacctcgaggccggccgggacaagctccccattcccattctaccaccgacccgtcccgtcccactgcctgccagcgtctcccccgctccctctcctcgagagatctcgcgctccggcgatcgggcgcggcgggcggagggtcgcgaagtgccctgcccacccccgatgctcttcccgaagcgcatcaactacgtggccccgatgctcgcctccgccgccatcctgctcctcccccgggcctgccgctgccgagtgcgagcgccagcgccagcgctaacggcaccgcggaggaccctgcggcggcgtccgtcagcggcggcgccgcgtggcgcggagccgcgaggtgcgaggacctggcagcgcgccacgtcggggtgctcgtcaagggctggacctggatccctgacacgctcgacggcgtctacacctgccgctgcggggttagctgcgtctggagcaagtctgccgccgccgtcgaccgtcccgacgcgctgctctttgggggcgccacgcctccgccgcagagaatgaaaggtttgcctcttcgtgtttacctggatctggaggccagtaggaagccaactggttttgaggacatttttgtcggttaccatgccagtgatgatgtgcaagtaacatatgctggaaaatcatttcacaccagccgaagttaccatatatcaactgaaaagagaaacgatgcacttatctactggtcatcttcaaggtgtcttcctcatagagataagctcgcaaaagacttcctctcgctggttcctcaccattccttcngaagatgtttgaacaatgtcggcggtcctgacatggcgctatccatgtatccagtctgctccacaacgatac

SEQ ID NO: 156102 - DNA, 862 bp, Zea mays
  Clone ID: MRT4577_73948C.1
cattgggacctcgagccggccgggaagccccccattcccattctaccaccgacccgtcccgtcccactgcctgccagcgtctcccccgctccccctcctcgagagatctcgcgctccggcgatcgggcgcggcgggcggagggtcgcgaagtgccctgcccacccccgatgctcttcccgaagcgcatcaactacgtggccccgatgctcgcctccgccgccatcctgctcctcctcctctcgggctacttcgagctcccctccatctccaccccggcgccgctcctcgcgggcgcagcgcgcttccccaccgcgctcgactccgtcggatcgcgcgaccgcgaccccttcacctcgctcctcgaggccttcgcgtccgtcagcggcggcgccgcgtggcgcggagccgcgaggtgcgaggacctggcagcgcgccacgtcggggtgctcgtcaagggctggacctggatccctgacgcgctcgacggcgtctacacctgccgctgcggggttagctgcgtctggagcaagtctgccgccgccgtcgaccgtcccgacgcgctgctctttgagggcgccacgcctccgccgcagagaatgaaaggtttgcctcttcgtgtttacctggatctggaggccagtaggaagccaactggttttgaggacatttttgtcggttaccatgccagtgatgatgtgcaagtaacatatgctggaaaatcatttcacaccagccgaagttaccatatatcaactgaaaagagaaacgatgcacttatctactggtcatcttcaaggtgtcttcctcatagagataagctcgcaaaagacttcctctcgctgggtcctcaccattccttcg

SEQ ID NO: 156103 - DNA, 449 bp, Zea mays
  Clone ID: MRT4577_73949C.1
cgcttctttccctgtttcaaggaagcaaagccttgacattacctccattgctagcaacggtggaagagtcagttgcatgcaggtgtggccaccaattaacatgaagaagtacgagactctgtcgtaccttcctgatttgtccgacgagcaattgctcagcgaaattgagtacctattgaaaaatggatgggttccttgcttggaaattcgagactgagcacggatttgtgtaccgtgagaaccataagtcaccaggatactacgatggcagatactggaccatgtggaagttgcccatgttcgggtgcactgatgcaacccaggtcttggctgaggggcaggaggcaaagaaggcttacccacaggcatgggtccgtatcatcggattcgacaatgttcggcaagtgcagcgcatcaggttcatcggttacaagcccgaaggatactaa

SEQ ID NO: 156104 - DNA, 588 bp, Zea mays
  unsure (1)..(588): unsure at all n locations
  Clone ID: MRT4577_7394C.1
ggccggccgggaaaaaaagaggtttaagaagagtgctggactggtcgcttcaggggtcgcgaagaatctaaacaaaacggccaattatatcaaggaaaatattcatgacatattgtaccacgatcgtcgcccaccaaagtagtagccatgccgacttgctgagtcccagaacgaagcacagcagccccagctccgtcactgattatgcaaatggagccttccaggattccaacttcactcgctttacttgcataatcttgtaatttagggctgcatatgtacatgcaatttaacttgctgcttgtttgaagcggaaaatcagaatttcgtttggtgtaatcggaagacgatngatattggttgaattttgactgaaaattcgagaaacagcatttctcgatgaaaatancacggtttctccggttgagaatgttagacagcgcaggcagacttgagaatgttagacagcgcaggcagacgcatcgcgtgccgctcgcaacaggggcgatgtattctcttcattcattggtattgaatattgatggatatgaagatctattttccaaaaaaaaaaaaaaaaaagcggcc

SEQ ID NO: 156105 - DNA, 146 bp, Zea mays
  unsure (1)..(146): unsure at all n locations
  Clone ID: MRT4577_73950C.1
gtcatccctactctcgtccactancttttcggggagaacatccttaacttgtagcggcaccaanctctancaaancaaacaccccttancacttactttcccaacatcctnccatgtaccaccntcaacaaanttttcttctctcg

SEQ ID NO: 156106 - DNA, 406 bp, Zea mays
  Clone ID: MRT4577_73951C.1
tcggcccaagatgatgaggcttagaaccagaaaaattggcagaggaatatagttgccgactgtggggaggcctatacgagcccatgaatgccacgtctacacttacagcgcgatactgctgttgtctaattgcttattctagaggctttgcttgcaagcaaccaagcatgtgtgttggatttatcatcctgtctagtatgatggaccctgcttggatagtatgactaatatgtagagcaaagctagtacctaaaccaagatttttggtaaggggcatgtatacaggattatagccgatactgattgctgccggttgctgctgctggaacaatggcagagaatgtataatcgggctgttattggttcctaaatttcgtgatgtggagaaatgtaagacgagaaccgc

SEQ ID NO: 156107 - DNA, 1842 bp, Zea mays
  Clone ID: MRT4577_73952C.1
gcccggacagttttgcgcacaagccccccattcccattctaccaccgacccgtcccgtcccactgcctgccagcgtctcccccgctccctctcctcgagagatctcgcgctccggcgatcgggcgcggcgggcggagggtcgcgaagtgccctgcccacccccgatgctcttcccgaagcgcatcaactacgtggccccgatgctcgcctccgccgccatcctgctcctcctcctctcgggctacttcgagctcccctccatctccaccccggcgccgctcctcgcgggcgcagcgcgcttccccaccgcgctcgactccgtcggatcgcgcgaccgcgaccccttcacctcgctcctcgaggccttcgcgtcctgggacgccgccgtcggctgcccccgcgtccgcgccaagctcgccgccgcggggctggggctgggcccgggcctgccgctgccgagtgcgagcgccagcgccagcgctaacggcaccgcggaggaccctgcggcggcgtccgtcagcggcggcgccgcgtggcgcggagccgcgaggtgcgaggacctggcagcgcgccacgtcggggtgctcgtcaagggctggacctggatccctgacgcgctcgacggcgtctacacctgccgctgcggggttagctgcgtctggagcaagtctgccgccgccgtcgaccgtcccgacgcgctgctctttgagggcgccacgcctccgccgcagagaatgaaaggtttgcctcttcgtgtttacctggatctggaggccagtaggaagccaactggttttgaggacatttttgtcggttaccatgccagtgatgatgtgcaagtaacatatgctggaaaatcatttcacaccagccgaagttaccatatatcaactgaaaagagaaacgatgcacttatctactggtcatcttcaaggtgtcttcctcatagagataagctcgcaaaagacttcctctcgctggttcctcaccattccttcggaagatgtttgaacaatgtcggcggtcctgacatggcgctatccatgtatccagtctgctccaccaacgataacggcacgccacactggtgggatcacctacactgtgcgatgtcacattacaagttcgttcttgcaatcgagaacaccaagaccgaaagctacgtgaccgagaagctgttctacgctttggaggctgggtcggtgccgatatactttggggcgcccaatgtctgggatttcgtccctcctaattctatcatagacgcctccaaattcagttcactcagaaagctggcatcgtatgtgaagacgctggcaaatgaccccgtagcctacgctgaataccacgcgtggaggcgttgtggtgcgttgggtaacttcggcagggcacgcgagatgagcctcgacacgctgccttgccgactctgcgaggtggttagcaagagaggtggtaagggtgcagatgcattgtgagatggatcggtgttttgtatggcttgtataccttgatccggacatgtgaaatagatgtaaatggtacgtcgaacgaagtgctcatgctattccgttcaggaaaaaagtgtgtagtgtgttattcatgtcaagatcaagcacacattgtcgaaagaaatagtgcagctattcttttttttacaccatctctcttttatctgttgaatttggagggttgtacagttgttggagcagagagagttcgtgtttttaggtagagaagtatacagatgggatttcttgctgttgctatgatatgaaccatataaccatgtgtgagccctgaacatacacctccttcgagaaaaaaaaaaaaaaaaaagcggcc

SEQ ID NO: 156108 - DNA, 530 bp, Zea mays
  Clone ID: MRT4577_73953C.1
ccggccgggcgaattcgtaattgatgcattaactatggaagaccgtgagccctttcgtacgacaggtaaaatctgacggaaatcgccaccaagaacaacaatcttgccaccaaatgggaggattgcatttgaaggtgtttgctcagaaagaatatctcgcatagttctatctagagcctcgaagcaacgacgatgtgtcattggcgcttcatcccatataatcagagtggcaatttgtataagctcagcaagcatggtcccccgtttcacattacatgtgctagcatcgtttatgtcaaacggtattttaaaccttgaatgtgcagtgcgtcctttaggtagtagaagagatgcaacgcctgacgatgcgacagctagcactattttcttctcggaacgtaacctcgcaattaaagtggtccataggaatgttttgcctgtgccaccatggccgcaaacaaagaagaaaccaggtgatctactatgaacacgaacgaaaaagcaaaaaaaaaaaaaaaaaaggggcggcc

SEQ ID NO: 156109 - DNA, 1069 bp, Zea mays
  Clone ID: MRT4577_73954C.1
ccggccgggccgggcttctcgtgtcatctccgcttgcgccgcccctagccccaccatcgtcctccccatgaagccgccggttgagccgccccctcttgtgtcgtctccatgtccgcgcagatatgcctcgctcgccaccccgccgtgttcctccccgagacaccgtggccagcctctagcccgcgctcttcctcgtcacggcgatgtcggcttcccggaccccttccggcttgcttccatgccttcgcttcggtttgttcgggcgcaggagaggctacacttcctctatgagtcgaggttggccgtcggcaagagctccgaagggttccaggcgctgcagcaatctacaccagggccagcttcgcgtctacttctgcacagatgagtgcggctaattgttccaagtttaagcttcacctctagtcatgggtaaagagaagtcacatttcaacattgtggttattggccatgtcgactctggcaagtcgaccaccactggccacctgatctacaagcttggaggcattgacaagtgtgtgatcgagagtaaataagttatgcttatttataggttcaggatcttcaggttgagcttgagaatgagaagcaagaaaaaacaaaactttgacaagtgttggataacttgaagacggaatcagaaacttcaagggtaaaacattatgaggaaatagaagttgtaaagatgacatcacaagaaatgcacgtcctcctttgttaaatgctaaaattcaaccagggccagcacaatctaaggccataaagtttctaagcccccaacagtgaattattgtagtatgtttcttttttgaaaattggttgttggttgaactatgtcgggttgttttatcaatagctggttgctagtttttcacaagtaggacttagtggccccaagtttgttgatttttgttactagtagccttatgttttgttgaacaatgttgcttcttgctagatgtattgtgacctatgaattggaatttgtctgccacaattttggtcattggatatgtaaatttgtgaaaaaaaaaaaaaaaaaaggccccta

SEQ ID NO: 156110 - DNA, 674 bp, Zea mays
  unsure (1)..(674): unsure at all n locations
  Clone ID: MRT4577_73955C.1
aattcggcacgaggccccgggctcggattaggtacgctgttcgtgccgtctccacggccaaggacctgggaggagcttctttctctagctgggggatgagcaacaccaagtgatgttccatcatgtttgcttaaaaagacacgcactgcctgcctgtgcctgttcatggtcctcatcctcacagagctggttgccaaaaaattggtatactttttcttggcgcaggatctccgatctgagctgaagctgctaggccaggcgatcgagccgatgtacggctcgccggtgtccaaggacctcaacctcccgacgcagccgccgccgatggcctcgtccgggctgctacgctacagatcggcgcccagcgcggtgctcggcggcctctgcgaggaccagctccagctccctgccgccgctccgagcgccgccgacaacgtcttctcaaggttcctgcccgaccaccacatccgggacgacaagccgtcgcctgcccacttcccgagtgcggccgacatggcctcccaccaccagcaggagcanatgatgttccactcccagtcccagtcccagcaccagcaggagacgggtaggtccgggggcgggctctaccgcaccgtcagctctggcatggaagcgggcgggactggcgtcggcgcccgccgcagcctgattcg

SEQ ID NO: 156111 - DNA, 324 bp, Zea mays
  unsure (1)..(324): unsure at all n locations
  Clone ID: MRT4577_73956C.1
tttttttggtgcagtacaaagatggggtgaactaccttaccacagactgagcaaatgtgattcgacctacaaatcgtctataccattaatcgtagttacaaacgtacagggacactagggaaccatgttcgagcacccggtgaaaaactatggctgaactgcacgatcagctgcccaattgtacacacacaccaggagagacgcgtgggcactactaaactactgttgattcctggggatgacattcgactgaactggacagctggcaaccaaggtttgtatatgacaggcacagattgagcatnaccattagggatgccaagc

SEQ ID NO: 156112 - DNA, 313 bp, Zea mays
  Clone ID: MRT4577_73957C.1
ataataaggtatccgcggataattttttcgcgggtatggatatccagtatccatacccgttacccaatggatatatgacatgtgggccatctagatttaatatgttatcctaaattttaattttcaaaaaaaaaaaaaaaaaaaaaaaaaaaaaaaaaaaaaaaaaatgtagggggtccagtgtttcctaccctatcttcccttccctgtcacgcgactacagagtctatattatagcaataactaaatccaatttccacaccgtttacaactgaaaagactggtaaggccactcgccatttcctaacctaac

SEQ ID NO: 156113 - DNA, 271 bp, Zea mays
  Clone ID: MRT4577_73958C.1
ggtgcagacgccccccggccatttctggctgaccacccacaagttatcggcacacaggcagccgtttcaaggcccttgtccaacccagccccaccagaggccacatgctggaaaagtcccattttgaccatattttcttgtggaatctgatgtccctggagggggcctaaaatttccacggtcattcccagggatgggtgatgctgttgatgtgaaggccgctgatggcgttcaggaagaggaggaatgaggcagtgaattcgcaccaaaa

SEQ ID NO: 156114 - DNA, 647 bp, Zea mays
  Clone ID: MRT4577_73959C.1
ccggccggggtcatcccccacgcgtccggctactcagagggacactgtctcggcccggccaattgcccggccggaccttcgcccatgatcacagggagaacatcctttgcttcccatggccatgaagaagaaccaagactcccagttggtcatgggccggtacaggctgggccaactcctcggcagcggcaacttcgctaaggtgtacaaggcccataaggtggccaccggcgaggctgtggccgtcaaggtgctggacaaggatgctgtgcaccgctccggcatggcggagaaggtgaagaccgaggtcgacgtgatgcggcgcgtgcgccacccgaacgtcgtccgcctccacgagatgatggccacgcggtccaagatctacttcgtcatggaatacgccagcggcggggagctcttcgcgcgcctcgcccagagcacgcggttcccggagcccgtggcgcgccgctacttccagcagctgatgacggccgtcgagttctgccacagccgcggcgtgtaccaccgcgacctcaagcctgagaacctcctccttgacgcgcgcggcgacctcaaggtctccgactttgggctcagcgcgctgcaggacggccgtggcggccgcactcggggttccgggtttacgt

SEQ ID NO: 156115 - DNA, 242 bp, Zea mays
  unsure (1)..(242): unsure at all n locations
  Clone ID: MRT4577_7395C.1
gtcgtnnctggctcgacatattggacgagaaccgcggtaaaaagcgcgcgtgaatctcctggcttcacggacgcaaggggttgccgaggacaagatgtctctcatgcacttgtaacggaatgaatgaaatggtgaagaaacaaagctatggggggggggggggtatcccctcccttagggcgaannccaacacactgncggccggggggggggggggcgaccccccccccaagcnnggcgga

SEQ ID NO: 156116 - DNA, 717 bp, Zea mays
  Clone ID: MRT4577_73960C.1
gccggccgggtcgggataataactcatgtgtaacactgctgccttttttattctctaaaaaaaaaaaaaaaaaaaaaaaaaaaaaaaaaaaaaaaaaaaaaaaaaaaaaaaaaaaaaaaaaaaaaaaaaaaaagaaaaaaaaaaaaaaaaaaaaaaaaaaacaagagaaaaaaaaaaaaacacaaaaaaaaaacccttcgttggaggccctacaagggggcccccctgccagctccccgcaccggggctggggggccgcccacaaggccccccccccgggggggggccacaaccggggggcggcatggcctggtgggtttcaggacgagccgcccccccgcctggggccccctcggggggaattttttcggtcctgggccctttcccggggggggaaccccccccctttggccgttggccccgggtcttagttgcgggccctgtccccgggggagcctccctcccctaggaccttgggccgggcggaaccacctaaaatggggccctgggcccccccccttcccagaaccaggggccccccggggggggggggttcccccttcgggctttccccccccgtctccctcggggggaaacccaaaaaccaaatcgcccccttgggggggggtaccccgaacgttctcggcccccccgggttgggagacttgcctgttataccccgggcggctccccccttgggggggggggcgccccccc

SEQ ID NO: 156117 - DNA, 1312 bp, Zea mays
  Clone ID: MRT4577_73961C.1
ccggccggaatttacgacaccagctagttgttgttttcttcgaagcttcttacaggtggcgactggcgagtgccgacctcgaccgattcttcttcgaaatcctccactagaggatcgcagcttctcttttgagcgaacaataaagcaccagctgctctcacgcttccgcgtttagccaggccagccccggccacgagcccacgacaatgaagccgcccgcgtcgtccaccgccacctcctacctcctcctggccccgctcgcgatcctcctgctcgtcttcgtgctaccgtcgctccgcccttggtcccgcgtaggctccgactccgacggcctcggcatcctctgcgcccgccgcaccggcggcttcgtcgacgtcgccgccgacgcgccggcgccgccaccgggccagacgacacgggcggcggagttcagcctactggtgggcgtgctgaccgtgccgggccggcgggagcggcgcgacatcgtgcgcacggcgtacgcgctgcagccggccgcggagggcgcgcgcgtggacgtgcgcttcgtgttctgccgcgtgacggaccccgtggacgcggcgctgctggcggtggaggcgaggcggcacggggacgtcctggtgctggacggctgcgccgagaacatgaacgacggcaagacgtacgcgtacctgtcgtcggtgccgcgcctcttcgcggcggagccgtacgactacgtgatgaaggccgacgacgacacgtacctgcgcgtggcggcgctggcgggcgagctgcggggcaagccccgccacgacgtgtacctgggctacggctacgccatgggcgggcagccgatgccgttcatgcacggcatggggtacgtggtgtcgtgggacgtggcggcctgggtggccggcgcgcgggagatcctggagcgcaacgacaccctgggccccgaggacctgctcgtcggcaagtggctcacatcggcggcaggggcaggaaccgctacgacctcaagcccaggatgtacgacctcaactggttcatggacaacttccgtccggacaccatcgccgtgcacatgctcaaggacaaccgccgctgggcggccacgttcacctacttcaacgtcaccgccgggatcgacgccaacagcctgccgtgatcaaccagttatttcagttcgattttttttttccctgaggttgacgttggctgattgtgccaaggtggcgtgcgtaagccacattcttttcttgtatttattgtattacatatcgttagtcttctgattggtcatcgataaaaaaaaaaaaaaaaaaggccccta

SEQ ID NO: 156118 - DNA, 288 bp, Zea mays
  Clone ID: MRT4577_73962C.1
aattcccacctacacctacgcttccgctacatcgcatacaattgattaactgcgttccacacttaaaaacactaatactaggatagggcctaataaaccatcacaaattaccatcaacactaaacactcaaaatctagctaactatgccatcatctgccaggaaaaataaactaatgccaattgtttaacctgacatccttgttgatggccctcatgacattgaatcgttcgcttacgtcactgacaccgtccatgctgtctgctacaatgcgctcaacgagcaccat

SEQ ID NO: 156119 - DNA, 2478 bp, Zea mays
  Clone ID: MRT4577_73963C.1
ccggccagcccaacccgtcctggcagcaggtcttcgccttctccgccacgcacctccagtcccatctgctcgaggttgccctcaaggccaaggatctcgccggcgacgacctcgtcggccgcgtcgccttcgacatcgcggaggtgccggtccgcgtgcccccggactcgccgctcgcgccgcagtggtaccgcctcgagaccaagcgcggcgagaagctgccgcacggcgagatcatgctctccgtctggctcgggacccaggccgacgaggcgttcccggacgcctggcactccgacgcgcacgccgccgcgggcccggcggccgtcgcgtccacgcgcgccaaggtatacttctcgcccaagctcgtctacctccgagtcgcggccatcgccgcgcaggacctcatcccgcatgacacctcgcgcccgatgagcgcctgcgtcaagctgcagctcgccggccagctccgccgcacgcgccccggcgcaccgccggggacgcccaacccgatttggaacgaggagttcatgttcgtcgcgtcggagcccttcgacgagccgctcgtcgtcaccgtcgaggaccgtgtcgcgccaggccgcgacgagatgctaggccgcattttcctgcccctcgcagcagcaatgccgcggcacgaccacttcggcaaacccgtggagccgcggtggtacagcctcatgcgcccctctgatgaccctgataagaaggaagtcaagttcgcaagcaagatacagattcggatgtcgcttgattttgggtaccatgtccttgacgagtccacctactacagcagtgatctgcagccatcatcaaaacctgcaaggaaaccaagcattgggatgcttgagctgggagttctgggtgcgcgaaacttggtaccgatgaagcccaaggatggacgcaccacggacgcctactgtgtggccaaatatggaccaaagtgggtgcgcaccaggactattcttgacacgctgaatccacaatggaatgagcagtacacttgggaggtgtttgatccttgcaccgtgatcacagtggtggtgtttgacaacgggcaaattgggagcaagaatggtggtggcccagatcagcgcattgggaaggtcaggatccggctctctacactggagacagacagagtgtacacgcatttctaccctttgctggttttacatccaagtggactcaagaagactggtgagcttcatttggctgtgcggtttacctgcacagcttgggtgaacatgatggcgctgtatggccgtccgctgcttccaaagatgcactacacacatccaatcgcagtgatgcaattggactacctgaggcaccaggcaatgcagattgttgccgcaagactcagccgtgctgagcccccgctgcgcagggaagttgtggaatacatgctcgatgtggactcacatatgtttagtctccggcgcagcaaggctaattttcatcgcattacctcactgttctttggttttgtggcaatgctcaagtggtacgacggcatcaggagctggtggaatccaatcacaacagtgctagtacacatgctgttcttgatactgatctgctacccggagctcatcctgcctaccatcttcctctacatgttcatgatcgggctgtggaactatcggtaccggccaaggcatccgtcgcacatggatactaagctctcccatgctgagctgacacaccctgatgagcttgatgaggagtttgacacgttcccttcctccagaccagctgaaattgtaagaatgcgctatgacaggctgaggagcgttggaggtcgtgtgcaggctgtggttggggacctggcgacacaaggcgagagagcccatgctttgctgagctggagggaccctcgggccaccgccatcttcattttcttatccctggtggtcgccgttgtgctgtacgtgacgccgttccaggttttgatggtcatagccatgctttacctgctgcgacatccccggttccgcagcaggatgccctcagtgcctttcaacttctacaggagactgcctgccaagtctgatatgctcctttaagatccagtatccaccataagagaaacaggtgcaagtcttacttatttatgtctgttccgctcggttccttctggttagcatcagatcagatgtgaatatacctgatgagttcatatattagaggtcattagtatccccggaataaggtgttggtttgatggtttatttccttggttatgccaaagaaagggaacaactggatcccttttgagttttgggaaatagtgggaggaggtttttggtgcagaattgtaatattaacttcaggttattagcatagaactaaaggcaggaacaatattatccccccgtgtattatgtttgtactatttgtgtcaattttgcttgtgtttcagtgatcttttgcctgcagctgggtcatactgtaagt

SEQ ID NO: 156120 - DNA, 249 bp, Zea mays
  Clone ID: MRT4577_73964C.1
ctgttggttgttacaatggggagagggggtatttaaattatgggggggagaaaacagcacccaccgacccccggaggcaaacccccacggggggggggggccccaaactgggaacgggagacccaccgggggcaccccccaaagaaacgccaaggggggaaaaacaccggggaaccaggggggtccccccaacggggtgaaacaacggggtgaaaccaaggtgttaaacaagggggcttttaaacgggg

SEQ ID NO: 156121 - DNA, 557 bp, Zea mays
  Clone ID: MRT4577_73965C.1
agtaatgctacacatcagcttgggagcaagccgaattttaaaaatggagaaatattaagaaccaggcccatatggtacacaccagcccaactagctgaaatgagcactataaggagcaggaacaaggggaggtgagcatcatccaagaaatattctgaacaccacgaactcctcatgttcatcttccacctcaggctcctctactccctctacatctaggtctagctgtctttctctccgggctgttctctatgtatttcccattttactgacagtaatacaactcctagcttcctacctctgtctttcccttttgctctccgatctcaatccctttagttgtgttaacaaggcatcagaactgggcttcggaagtgtggctcggcgtgcgcatgcggcggaggagaggcgatgtgcattgcttgggcggtagctagatcttcaccgaacattggggatcccggggttgatgacgacgcggaccagcacggtggagcttgcagaagaccttggccgaaccagagtggctcatcgatgcgaggacgggcgagggactc

SEQ ID NO: 156122 - DNA, 667 bp, Zea mays
  Clone ID: MRT4577_73966C.1
ctcgaggccggccggacaggaaattcaggcgtcgaaacactatttcttcgctcgcgagaatttaaccgttgtcaattcaatgcgaaagcccccacagaggcatccatggtcttctgctaccaccttcatctcgtatcaccccgccgcctctccttgacgacaaagctgcgaggattgctggcgtgatgctgctgaagcaagcgtccgttccgaacggtcaggctgtacacggagtgtctgaacccggagacgtacctgctattcgactaggaggagacatcactacttaatccacatcgagtacatgttcccggacgcgatcgaggagcaatatctgatgcgcaccaagggcctcttcatccttctacgaagactgccaccaccagtgctgccagtatgactaaggagccaacactgcgcaccacactcaaggggcttctatggagcgtatcaccagccagacgaaggaccagtcccccggaaccatcggaccagcatccctcctggaccaggctgatccttccttcgaagggctggatggcgacgctgtctagttgaacaagtgaaacccccagcccgacgtcaagcggcaatgacatctggactttcctgcggaccatggacgtacctgtcaacatccctgcatgctcacgactacatgtccatc

SEQ ID NO: 156123 - DNA, 338 bp, Zea mays
  Clone ID: MRT4577_73967C.1
tgttcttaatttggagtggggaaaatttttttgatcaacccaacctggccccagctacatttaatttttcatcacccagaaaataatcactctaacatgtacaaatgcaaacacatatcttgaatttaacagacactctaagatgttaaaagtagccatttttacactagaactcaaacccgaaataccgcttaagctaacaacaaacactttcttgaaaaaaaaaaaaactttaaatatgaaattaccctccgggacacccattcagcaaaaaagtccaaaagccaacaccttaattttgccaataaagtccaccgtaaaaacatagggtctacaaa

SEQ ID NO: 156124 - DNA, 384 bp, Zea mays
  unsure (1)..(384): unsure at all n locations
  Clone ID: MRT4577_73968C.1
ggaggcctcgtggaaatcggagtcggagggggcgatggtggtggtgctcatctttgtcggcttctctcttgccatcttcatgttctggaggtttcagatgcagcatctggccggtaacatgaacaataagatcagatagtagtcacaacgcaatgtctccttacttatgctgccactattggcgtacctagatacttgcggattacgcacttcacttgtatctatatatcaatgagatcttaaaccgataggtcttgataagggaaggctaaaatcaggacaaccattgctctctcttngctactggacctgcaaatttacacaaatatcataccttacaggtttgttctttagagaagctgntgaatttttttactttattta

SEQ ID NO: 156125 - DNA, 331 bp, Zea mays
  Clone ID: MRT4577_73969C.1
ggggagcaatcacaactcaagagctggtgctgactgcatatcaaaaccaaggcgggactggtgaaattttgcaacaacacttccacaaaacacattgaaacgatagggtggcccatcaaaaccggcatgttacacatactcgggggagccaacagcataatccagcccaggttagtccatcggggggtacaggggcctaatggccaataccatgatcacagatcagcgacgctcttattttacaatgtctcccaatgttcaagctcctcttcttgggacgggaggaaacagaccttttaaggacccccaaatcccgggatcggttttatcc

SEQ ID NO: 156126 - DNA, 406 bp, Zea mays
  Clone ID: MRT4577_7396C.1
gcttcgtctatataccctatatctctagccaacacacacataatactctccattccattccattccatctcaaaggatagaataatgggcggtctctccaccaagcttttcgtggtcctcctcctgctcgtttgttacaccgggacgcaaggcgggccggtgactatggtgtcggcgaggaagtgcgagtcgcagagcttccgcttcaagggaccttgctcgagggacgccaactgcgcaaacgtctgcttctgcaccagggactgctagtactgcctcgcctcgtgtcctgcgtgtgcatatatagccgcagcggatcagtaaaacatgcatgcatgcgttaccaaatatttggcagtaccagcaagttaatgaattaaaatattaaataatatgtcatggaacg

SEQ ID NO: 156127 - DNA, 361 bp, Zea mays
  Clone ID: MRT4577_73970C.1
cgcgcacacgtatacaggcagcaagaagatagggggggtgtggtacaaggccggggagtgtgccgacaagaacccgaactccgacgaggtggtagagggtgcactcggaatgcgcgggtggctgcgagtcggaggggcatgaggacattgggacgcgtgacaaggaatgcccgaactgtgaactggagaaggacattgaatacatgcatggggctggttaccaccgcattgcaccgatgtgatgtgactgcagagaggataaagaaggagaagaatcttgagctggtggtcacgggaggaatcgggtccgatcatatgtgagctgccatgagctgctggtgcggtctttaactggggggtg

SEQ ID NO: 156128 - DNA, 334 bp, Zea mays
  Clone ID: MRT4577_73971C.1
attcccttagcagaacattgcttctgctcatatccttgacccagatgatatttaattattgccaccggggtatatagcatgcttacttggaatggaagtacatctcataggcttgagggatggccgcctacgtggcatactggcatgattagacccttacttagattgagagagacccgactaatgaggcactggcgatgcttaatgactagaatcccgtaccggattatcagcagcggagctgactcccgcgggggccttgatctaccactagaagtttcattagagacggaacctgccgccctcgatcgagggctgcagccagaccttgcct

SEQ ID NO: 156129 - DNA, 398 bp, Zea mays
  Clone ID: MRT4577_73972C.1
gtggctcgcgaatatcatactcctcagcattcatcaaatactattgcacgggctcattctctctccggcactgtgagcctgcggtctgaggcatcatactcattctaggtctgaccactgttctctctgagaggctattcttgaacaaaacaaggcttaaactaactggtgccattcacatagccgaccggtataatgcgcttgagcattgcggttcttgagatataccaggggtgataaagcagtctcttgatcgcagactatcagaactgttgcatcacaatgacaaaagccagggattggaagacacaccacatttcattacggatcctctactggaacgcctgatgaaagaaagctgttagtataactgggcgggtaatgtacgtggtgtatgc

SEQ ID NO: 156130 - DNA, 676 bp, Zea mays
  Clone ID: MRT4577_73973C.1
ccggccgggtcaggactggttgtgatagtagcaacgtgatgctcgtgcctgtaataagaacaagcaggcgatgtgtgcctgtgatgtaaaaaaaaaaaaaaaaaaaaaaaaaaaaaaaaaaaaaacccacacacaacacagcagagagattactacgatccaacagttctagagcaagagagaggaagacacaccgcagagttagcaggctaataacttgcaggagcagcaggaatggcggcgacgcgtcgcctctcttgctttctcctcgccgtgcttctggcaggagtggccgctgccaccgccttcgacgaagcggctgctgccggcttcgggcttggccacggcgcgcgtttcgcgcgcaagcatggacgtgctgccgctgagatgccccagccggagccacaacctaaaactaagccggagccccatatgcagccactgccccagccagaacctaaaccgaaacctatgccacatccagagccaaagcctgaacctcaaccaaagcccaaccctgaacctcaaccaatgcccaagcctcaaccaaaatccaaaccagagccattgcctacaccgaagcctgaacctaagcccgaacctaagccagagcctaagcccgaacctaaaataaaaccaaagccaaaacctgaaccaatgtctcgaggtcgacggt

SEQ ID NO: 156131 - DNA, 202 bp, Zea mays
  Clone ID: MRT4577_73974C.1
cgagtcagggggtcattggggcttctattagatggacaggtatggccctaatcaccctgggaatgacgcaactccagcataaacgatgaacaccaaaaaaaaattctgttttgaactgaagggtagataacgctccaagcgtttttggcttcttggcagcatagatgtagggccgcaaaacaaactcgctgggcgcttcctt

SEQ ID NO: 156132 - DNA, 339 bp, Zea mays
  Clone ID: MRT4577_73975C.1
tcgcccacgcgttcggagaactgtccgctgtcgtgactgacgttggggaggtcgtccgtgttcttgattgtgcgcagacctgatcttgtcgcagtctccttttccacgttgctactttactgtagcattgcggtagacgacatgatgagtgctgaaggttgatggcaatcaaccactgcatagaactatatagctgtcatcctgttctgtctgtcatctactgactgagaccaattatatgacagacggttgctattggctgtgctctagatcttagtctgactgacgtacttaacgcagcggtcttctacatacttattgacattgctggtaatagta

SEQ ID NO: 156133 - DNA, 366 bp, Zea mays
  unsure (1)..(366): unsure at all n locations
  Clone ID: MRT4577_73976C.1
cggactcgtgggcggacgcgtggggctaatttgtgtccaccaccaccatagtaggccttgtgggttctagggcatatgtattcngtagtgttttctgttaacatgataggtgtctgatgtctaaataatggaacgagtccttttgttgattttgagttgtggaactttcaaagcgtgcgttgcatgctggcgcttgtgccggcaaacatggcatactttcatgttatattgttatttgctagtacctgtgtgccttagttggtgggagtcgatctggcttacaatggggtcttgtccgagaattgccagcagaccgtgtagactgcactgttgccggtcgtgcggcaaaactgcagtaagacatta

SEQ ID NO: 156134 - DNA, 678 bp, Zea mays
  Clone ID: MRT4577_73977C.1
cggacttttgggatcaactcaaatgggggtggggcggtttctagtggtgagagatgcttagatcccagcatttctttatttgattatatgtatacttctatgccattttctacatctccaagttttgaaatatgtaaatataggttttgaaactagacatttttgtagtgtttaggtggggctacttaccgataaatgccagaatgttcaaaagtatactgtttaacttcatacgaaatttgatttctaactctttatttttgagggtatacttctgtatcttcttttggtgagtttgcagaaaccgacaatcaaggttctagcctggaatcattttgggtagatctattggagtcatctatgaaaaatgatactcctgttgatgcttctgcttgcggtggatctttggtatcaaatcagcagactaataatgggatgggagattctggaaataatatcttgtatattaatgccacaagtaatgctatcttttctccaccaactaatgtggtttcagaagcttatgctaatcctggccttagtcaagtatcagagagttactttggatctctgaaagatcaagcaaaccatgctccatctcttttaacatcagatctggattcacaatcaaagcaacatacaaattctttgatgaaaactccggtgtctgataacatg

SEQ ID NO: 156135 - DNA, 671 bp, Zea mays
  Clone ID: MRT4577_73978C.1
gcagaggccgtaccaagtggtgtggaagaggagttggaccaggcagcaggggcaggggagggggaacagcagtggagtagactatgatgatgagattggagagccagaggaggctccgcgtggatatcgtggcagagggaggggccgtggagggcgtggatcttttgcagttggaaggggctatggtggtgataattatgcgatggaagaagctggtagatatgatgatgatggatataacgcaccacctatgcaacgatatgaaggtggcagaggaaggggcagagggcgtggacgcggtcgtgggcggggaaggcaaggccatggacctcctccgcagcagtagattggttggcacatcacctttgggatgtcataacctccatttctttccataagataaatgttaccgtccattatattttttatctggttattaggttcatgttgaaagttgacatagtgactctagtgtggaggatgcggctagttaagatttggtagctaggttgttcgtccatttgcctatttattatctcagatcagacttggtgccgttccagttgtgcattgtagcctctttttaccatgaaagttagttcagaagattcttttatgttgttgccaaacaaaaaaaagttaggaaaagaacaacttatatattaactgtt

SEQ ID NO: 156136 - DNA, 766 bp, Zea mays
  Clone ID: MRT4577_73979C.1
ttgggtacctcgacgccggccgggggaaaatccatcccgactaggcaatctcaacctcctcggcagcacgggcgagccaggcggggagagatggggcaggggcgacacggccatcaccaccatcgtcaactagacactgccatcgacatggacaacgttgacggccacctacacaacaacctacctctcccccttgccactccaattcttggttgccgaccaagcgttccccaaggtgaatgccagggcggtggggcaggcccggtgggagcggcagtggtgtgcgcaacaggagcaagcgggggcgcgccggcgaccagggtgcatgagcttctcgaggaccctatctgcaccgaatccacgtttcccgctcatccatcaagttggtgccttgctcctggtgcaccgattttagattgggtttcgtgcggatttagggttcttgattggaaaggctagaatcttcatagaggaatccaattaaatcgacttattcttggcagattttcctcctacgaacgagtaatttgctcccttttgactagatcatttagctttgaattaattgcaattagaatgtctaaatgggtgtgtttggattactaaacttagaaccatctgcgagttgggccttccttttcaatgatttggtcagttttgcgttagatttaagatgaattgtgcgtttcactatggatctgagttggacatgttatggtacacagatgtatgcaccctctatcttagcatccagcaaaattctact

SEQ ID NO: 156137 - DNA, 610 bp, Zea mays
  Clone ID: MRT4577_7397C.1
catgggatacctcgagggggggctcggtccggcggcatagcttcgtctgtataccctatatctccctagccaacacacacataatactctccattccattccgttccatctcaaaggatagaacaatgggcggtctctccaccaagcttttcgtggtcctcctcctgctcgtttgttacaccgggacgcaaggcgggccggtgactatggtgtcggcgaggaagtgcgagtcgcagagcttccgcttcaagggaccttgctcgagggacgccaactgcgcaaacgtctgcctgaccgaaggtttcaccggcggcgtgtgcaagggcctacgccaccgctgcttctgcaccagggactgctagtactgcctcgtctcgcctcgcctcggctcgtgtcctgcgtgtgcatagccgcagcggatcagtaaaacatgcatgcatgcgttaccgaatatttggcagtaccagcaagttaatggattaaataatatgtaatggaacaaagcctgttttgaacgttgaactgctgagtgctagcagcgctcgtgtttattggcatatatgaactctatggcgcgtttggacttaaaaaaaaaaaaaaaaaagcggcc

SEQ ID NO: 156138 - DNA, 506 bp, Zea mays
  Clone ID: MRT4577_73980C.1
gctgaccttaaaaactgttttgcagccatgcatacaccattgcataacaccaacaccaagtctatgtcaaccaaactgttctatgattgtactaccagcaactcggtggatgttgaacgcatgtctgtagaaacggaaactttgtgcattttgcagaaactaggagacgtaggttctatggttacatctgacattcagtttgttcagtactactactacaggctgctctccatctccagtctccaccgacaagtactgaaatttgtgaggcagtacagacagcaggcggggggcacatgtggatacgcctatttcacttcagctttgcccagtggctgtacgcagtgatgcagtttacaggtcttccattgctagcagcactgattgctgcagtcaccggttgtgcaggataatcagcagccgtgaatggttggagcagcctgtggaagaacggggaaagcgtgctgcatcgtgccagccagatgtggctcctgctcgggccgaat

SEQ ID NO: 156139 - DNA, 268 bp, Zea mays
  Clone ID: MRT4577_73981C.1
gagcactcgccgtcactcaccagcaaattgccgagccgccccttacggatgtgctttcgcgacccatttgatcgattcctgatggcgcccaacgccgagaagaagcccgcggagaaaaagctcccggaggaaaaggccgaaaagaaaccaagggcggaggaagcgcgtgcctagcaaggagggcggcgagaagaaaggaaagaagaaagcgaagaagaagcgtccagacgtacaaagatctacatcttcaaagtgctcaagcaagtgc

SEQ ID NO: 156140 - DNA, 379 bp, Zea mays
  Clone ID: MRT4577_73982C.1
agccgttcgtgcagcagacgatagccatggccagggccgtgcaccggcagcggtaccgcatgggatgcggctacaagctcacagacgatgggacaataaccgaggagtactgggagccggttgaggactctaacactgacgaggaaaacgaagtaccggcaaggaagccctaccggatcgagctcgttggtgtggtctgtgacgcatatctagcggttgtcaggggaatcaggagagctgtagtcactgggagagcagtgagggtgaagtcgcagctgcagtctcacaagcgatttgctacggctttcaacagctactgcagcctcgtcgacaacgccatgctctacagcagcaacaccttgggtgttcccaagctgat

SEQ ID NO: 156141 - DNA, 1364 bp, Zea mays
  Clone ID: MRT4577_73983C.1
agattagagggagcaggagatctcagccgccgcgtccggcgtctgagcagcggccacccattcgttgttcacccagggagtctcaggtcttccgtcggctggcatcggccaccgttccatcgcatcgccgaccgccgccccacatcccaccgcggcaccgccccacagacaaagagatattcaaatcccttgatgatgagactattactagaagattccagcgtcttaaaactagaagaatgcacttgcctcgagtcataactacaagattaccaacttagttcctggatttttgtcggtgattttggtgccgcgctgcagattaagagagaaatttcgtcttgggcagttcggctgacagaccaacctacggcctggattggagacttatccgcgacccctcctccccacttcagcttcagcgcaagccatcttcccgccacaggctcaaaagcaatcaagcgactcctcccacagtcccacttccactcccacccacccacacgcacggccgcaggcagcagcaccatgtggtcggcagcaacggcggcggcggcgcgcgcggtgtccgtgtccccagtcccggcgccttcgctcctcagcggccggcgcggcgggtcgcggggcggccgggggtcggtgtcggtgcgcagcacggtgtgggacttcgtgggcggcgacctggtgcggccggacctgggcaagtggctggacgacgtggagaagcacaaggcgctggccatctacccgccgcacgagggcggctacgagggccgctacctgaaccgcctccgctaccagggctactacttcctcgacctctccgcgcgggggctcggcgacccggagaccacgctcaccaaggtccaccccgtctgcccgcctagcctcggcaggcagccggtggcgcggtggtacttcccgccggaggtggactacaggctcagcctgctgcacccggacgccaaaggcctcgtcgtctggatcatcgaagccaaggttctgtccaaggctgagctgcagttcctggccatgctcccggacatccgccccaaagtcagggtgatcgcagaatgcggcaactggagaagctttgtttggaagccactgaagcagatcgcaggcctcgagccggacccggacgcggaggaatgatcaagcaagcaggtctagctagttgtctaccagactggctactgctactgctacactctccaattgcttctgggacatctctccctgccattcctgcagcttcgcactgaatgagagaggcaattaataaagatatacatacatttttttggcacgaaaaaaaaaagagaaaataaaaaaaaacaggccctagggccgcgggcgctcta

SEQ ID NO: 156142 - DNA, 978 bp, Zea mays
  unsure (1)..(978): unsure at all n locations
  Clone ID: MRT4577_73984C.1
gagtagaatctggatacagattggtaagtggtaacacatgtacatgtactctgctctttcagtcttgggcagttcggctgacagaccaacctacggcctggattggagacttatccgcgaccccctcctccccacttcagcgcaagccatcttcccgccacaggctcaaaagcaatcaagcgactcctcccacagtcccacttncactgccacccacccacacgcacggncgnaggcagcagcaccatgtggtcggcagcaacggcggcggcggcgcgcgcggtgtccgtgtccccagtcccggcgccttcgctcctcagcggccggcgcggcgggtcgcggggcggccgggggtcggtgtcggtgcgcagcacggtgtgggacttcgtgggcggcgacctggtgcggccggacctgggcaagtggctggacgacgtggagaagcacaaggcgctggccatctacccgccgcacgagggcggctacgagggccgctacctgaaccgcctccgttaccagggctactacttcctcgacctctccgcgcgggggctcggcgacccggagaccacgctcaccaaggtccaccccgtctgcccgcctagcctcggcaggcagccggtggcgcggtggtacttcccgccggaggtggactacaggctcagcctgctgcacccggacgccaaaggcctcgtcgtctggatcatcgaagccaaggttctgtccaaggctgagctgcagttcctggccatgctcccggacatccgccccaaagtcagggtgatcgcagaatgcggcaactggtacatgcgcttccttctacctccctccatgtctaaatttcccacacgggaccacttgtggctaaggcctgattacgtacgtgtggccctgttgcacgcgtgcaggagaagctttgtttggaagccactgaagcagatcgcaggcctcgagccggacccggacgcggaggaatga

SEQ ID NO: 156143 - DNA, 205 bp, Zea mays
  Clone ID: MRT4577_73985C.1
gcgaaactattgaaacttttaaccccctttctttaatcatgagtttaaggcagtcagggtcctttgtatcttgaacaaaatccctgtgtgctccttccaaacttaaagataactggaagatttcccgacaaaatatcttcttagtttgttaccaaatccgggcgccctcctcaattgacccacggttaataacactttaacatct

SEQ ID NO: 156144 - DNA, 338 bp, Zea mays
  unsure (1)..(338): unsure at all n locations
  Clone ID: MRT4577_73986C.1
ggaagccacaaacancagacaaaaaacnnaangancgaaccanaacncaaaagaaancnaaaagagggcaccaccaaggangggnggngggaagaaggcggcngggncagacaaagcaagngggagggagggcagcaanggangcagaagaaagagggagccagcgnnaggcgcagcgggcaggaagaacggcaacaacggggggngagncaagaaggaagcagggcacacaccagcnagcnggcngaaaggaagnagngggggcggcgggaaanaagcaggagagnncaaggcngncagnnggangaaaggaagaaanggcggggggnaggcagcag

SEQ ID NO: 156145 - DNA, 375 bp, Zea mays
  Clone ID: MRT4577_73987C.1
cttttcgtaaatcgcgtcgatctcgttcctctacaagatgaccctccttggttcaatcgttcgtcaatttgtctccatcccctcgttgccggcgactcttagcttcaagggacagaccgtgctcatcacaggtgccaatacaggcctgggacttgctaccgcgagagaatgtgtcggacggggagcagaaaaagtaattcttgctgttcgtgaccaggccaaaggcgacgctgccaaagcttccatccaaaagtcatacccctctgcgccaggctcaatcgatgtgtggcatctagacctactctcgttcgactcggtgttggccatcggaaaacgtgcggcccaacttccccgtcttgacgttgcacttctcaa

SEQ ID NO: 156146 - DNA, 529 bp, Zea mays
  Clone ID: MRT4577_73988C.1
cagacaagaaatttattggtgaggagatacatggagatgtggctgtcctgccttggagcttccctggcctctcctcactccagtcctgctcgtctcccagccagtttgtctctgctgatgtccaccaggacctgggcttggcatggagcgtaggaccttctgcggtctctggtccattctgccagtgtccaggtgtcagggcgggttggggttctccaggcagataagatctgggctgtccaagggtgtcccactggctgaccatgtcccgtggcctgagcctgggtactgcgatccacagagcaaagctcttcccatcagaaggttcaagatgcccctgcctttctaccacccgaaactccttaagtcttactgttgcagttgataaggtcaaaccaaccctgtttggtgctggccagggtgctggtctcctaggggcaaggttgtgtgggatcaattcttaacaggttaagaggcagcagattttagagttttttaaaggccctcaggctaaggccagtttattcat

SEQ ID NO: 156147 - DNA, 369 bp, Zea mays
  Clone ID: MRT4577_73989C.1
acaacaatctcccagatctttgcgatgctaccaaaaatcaggcgtgctaccaacatgatgataccaaacgagctagcatgcattgcgttacaaagggtgagggggtgagcgatcctgatctggtctagggaggggagttatgcaatttacaggaagagcgtgcacatctgaccggacattgatagctaacgccttgtagatctatcacggactgtgtcccagatggtggctgtcgaacgaggtggatgcccccgagagacctttattctgtgtagggccgagtgtacaatctcctcgagacctttccgggtccccgtgtggggccaggaagccgccggcgcgcaggccccaggtggggctttaagaatg

SEQ ID NO: 156148 - DNA, 405 bp, Zea mays
  Clone ID: MRT4577_7398C.1
cttactgcagcagactttttagaacaagactcttaactttttaaggcatgcagccctactgctggccaaatagtggtgggtaccccacacagcaggacacagccggttctcattattccttcttagccacccccacgattcatgactcacaacccacagatgtttattaggacaacaacatacctatagatggacaccggagggcaccagacgacgcatgtacccagggacagcagttgctcaaatgacccatggcttactgaccaccgccgaggcggaccaccaagcggatagtgctctccttctgaatgttgcactctgctttggagcggccattctccaattgcttgccagcgaagatcagacgctgctggtctggggggaagccctctttgtcctggatct

SEQ ID NO: 156149 - DNA, 358 bp, Zea mays
  Clone ID: MRT4577_73991C.1
attaccaatggggtgggagaagaaaagtgatttgaattttttacatcctatcgtgctaacgtacagcatataagacactgtactacgtgctattctatagcataagtgtagactttaatctctactataagagttaccgtacaattcagccatcctacatatacaaatttattaacttaattattccgtgtctaaagcatgattaactcaaggggatacaatttcaacgaaacaaaggggtctcatgacttagtgcgctgaattcaaagatactttgtagaaactgggagaacgatctggtaagctatcaggacaatttgtgccgatatgtcatccttagcacatttatatgcattga

SEQ ID NO: 156150 - DNA, 307 bp, Zea mays
  Clone ID: MRT4577_73992C.1
gacgccggcctcgtcttcaccgccacgtccttcttcaagatcctacaggagcccatgcggaacttcccgcaggcgatgatccaggcgtcgcaggcgatgatctcgctgcagcgcctcgactcgtacatgactagcgcggacttgacgagggctccgtggagagggaccccgccgcggcgtcgggcggcatggccgtgcaggtcaaggacggcgtgttcgcgtgggacgacgaggtggacgccggccaggaggtgctgcgcgggatcgacctggacatccgtacgggtgcgctggcggcagtggtggg

SEQ ID NO: 156151 - DNA, 822 bp, Zea mays
  Clone ID: MRT4577_73993C.1
gatctttcttcgttatgcataatgaacaagaaccttccctgaagttcagagcggcctaattatctctccaggaacatttggtgtgatttagaacagttcctgcaaactgcaatgcacaatgccagcctaccgacgtccgacgacgagcacatacactccataaactagcacacccggcccccaatcatgagcctagaatgaacactatatatagcagaacaatctgcatgttcctccgcggacgcgtgggcactgcctctcctcctctgtaggtctgcttttttttttgtttcttggattcaacctggtcgttaggttttcatttgtaactccacaccgtgttagagtctggaggtgaatcgcatcactgccgcacacaggtgtccgccatgggttcctgtacctccaagtccgcgcttgatcacaggaggccggcgaggtactacaccagggggcggcgagtccacagccgccggtccatcatgccggaggcgccccagtcgcagcagctgggcgatgccagcagaggccgcatgaccggcttctccatgagcgagatcgtgcacgtggagacggccaaccggggcaagtcggagcactccaagacgttccacctcacgcagatggaatggcaccacagccagagggactctaaaggttgcagcaacgaagacgcctggttcgattctgtcagcatccttcgagatgattctgacgacgaattcaaggagcgtcgatggagacagcgacgaagacgaagagcaggcggagaagcagcaatacgcgagcgtgtcagcttcgccgacgcgctctctcgcatcg

SEQ ID NO: 156152 - DNA, 331 bp, Zea mays
  unsure (1)..(331): unsure at all n locations
  Clone ID: MRT4577_73994C.1
cagnccgcanccccacancggaccttctcccccaaagaagagagggccaanccgggngcaagcgcacagaagcggagcaagaggcggggaggagaccggccancggcgncgcnccagcnccncncgcggggccgcgggcgccncaacnncnncaccncaggcagcaccgngggncncggggagggacagaagacggggggcancgccaagccggcggcggcgaacgagaaccgggcgcagaaccgggacaacgcgagcccccaggggagcggcgccgngaaccagaaggggggggcgagcaaccacccggacagccccgaggcccgcgccg

SEQ ID NO: 156153 - DNA, 370 bp, Zea mays
  Clone ID: MRT4577_73995C.1
gacagttattgtatttttcgggaatggacatcattaccatctctagtttaagggtacagcatacaactcggttatgctagtgagaagaatcccatccacaccgcatcacccatgatcgatctttttacaaattacagcacaccaccgaccccacagattttgtgaccccgacgagatgaagacctattacttatacaatacagaaacgacgacttacgtaggatgtctgctcgactaacccaacgaattaaaacttttgacaggaagagccaccgataacagtgtcttatgcgcaactattactgcctccgggcgagcttttacacacctgcgagtggctgtgatgatcaatcacccatgcatggatctt

SEQ ID NO: 156154 - DNA, 237 bp, Zea mays
  Clone ID: MRT4577_73996C.1
cccctttatttaacacccccgaaaaaaaccaccaaggggggccttttaaaagaacaagcgggacaacacacaaaccggcagcaaaaaaaccaccaacgccaaccaaaccagaccacaaaggcgaactcgcaaccgcgcaaacccacacattatcacaaatgaaccgggggaaaccataccccccacaagaaaccacagcaaacccaaaacaaggaagccccgcgggaacctaccacc

SEQ ID NO: 156155 - DNA, 616 bp, Zea mays
  Clone ID: MRT4577_73997C.1
actttccatcgaatccggtccgctctcttccatcacgttccctatctccccgaccccggcccaccgaacttcacgccactcgcgccgccccatcgccacccccattcctcatcgcagcgatggagggcaaaacactaacccctgaggcggacacggcctccgcgccccaaaccctagccgccggggagctcgtctgggcgaagccctcccagccccgccagcactgctggtggcccgcgcgcatgctctccgcgtgccccgcctccgccgtccgcgacgcccaagtctcctacttcagcgaccccgccgcctccggcgcgccgtccgcccctcctgcgcaagtccggcgcttcgccgatgccgacgctgacatgatggcttgcggcagcaccgcgcgcggattcttcggggccgtcgcggaggcccaggcgcgtgccgtcgcggccctgcgcctccagctcacctgcgcctgcgtcccgcccccgccgcccggagaggatagcagcgtcaccggagtcgcctacctggcgcccgccgagttcctggcggcgctacgtgaggccgcattggacatctcctctgtcggcctattggacccgcgcaggtttaaagagct

SEQ ID NO: 156156 - DNA, 105 bp, Zea mays
  Clone ID: MRT4577_73998C.1
ctcagcgtgcaacgacactagcatcatggttttcttattatccggtgttcagcgtcctggcgaaagggagccatactcagatgaagggattgcttccatgacgac

SEQ ID NO: 156157 - DNA, 662 bp, Zea mays
  unsure (1)..(662): unsure at all n locations
  Clone ID: MRT4577_73999C.1
cggggnaaaccttgggaggcaccagccaaaatgtcgaaaatctctgttgccggcgttcgtaccaacgtcaaggagctccttgagtactccaacgagaccaagaagcgcaacttcctcgagaccgtcgagctccagatcggcctcaagaactatgaccctcagcgtgacaagcgtttcagcggaaccgtcaagctgcccaccgtccccaggccccgcatggcgctttgcgtcctcggtgaccagcacgacattgatcgtgccaagcaccacggtgttgatgccatgagcactgatgacttgaagaagctcaacaagaacaagaagctcatcaagaagcttgcgcgcaagtacgatgccttcatcgcttccgacgccttgatcaagcagattcctcgtctcctcggtcccggtctgtccaaggctggaaagttccccacacccgtctctcacaacgaggacctcgccaacaagatgaccgaggtcaagtccaccatcaagttccagttgaagaaggtgctctgcatgggtgtcgctattggcaacgttggcatgactgaggacgagctgatcggtaacatcatgttggccatcaactacctcgtctcccttctgaagaagggctggcagaacgtgggctcattgaccatcaaggccactatgag

SEQ ID NO: 156158 - DNA, 2617 bp, Zea mays
  unsure (1)..(2617): unsure at all n locations
  Clone ID: MRT4577_7399C.1
tcgccgccgcgctcgaccgcctcagggacgacgcctccgccggcctcgacgccgggctgctcgccgccgcgcttgacatgctccaggctgagttccgccggctcctcaaggaccactccgcgccgcttgctatgaaggaccccgacggctctggctccgatccgccccccgtcgtcccttctcggatccctgccgcagtcgtgcacaagctcagcctcatccttgaccgcctcgctgccaacggccggcttgaccactgctcctcggcgtatggggacgcgcgaggggataccgtgtgcgccagcctccgcgcgctcggccttgattacctcaaggagacgtcgggggacgcgcaggcgctcagcccgagcgtcgagcgctgggcccggcatctggagtttgcggtgcaccacctccttgaagctgagagaaagctctgtgtcgcggtgtttgaacggcggcctgaggccgcgcccttgtgctttgctgagattgcagctcgtgctggcattcttgatttcctcgactttggccgtgccctggctgatgccaggaaggaccccatcaagctattgcggctgctcgatgtgttccattgtttgaacaagctgaggctggatttcaaccgtttgttcggtggaaaggcctgcgtaggggggcaaagcaggactagggagctcgtcaagagggtcgtggatggtgctgttgagatctttgaggaattgcttgttcaggttgagctgcagcgcactataccgccaccagttgacggcggggtgccacgcctagtgagctttgtcgctaagtactgcaatcagcttcttggggagcagtatcgatctgtgctaacacaggtgatcaccatccaccgcagctggcgcaaagaagtgtttaatgacaagatgcttgttgatgcggtgcttaatatcgttaagacacttgagctcaactttgatacatgggtcaaggcttatggagatacaacactgtcgtctctcttcatgatgaacatacactggcacttcttcaaacacctaagggtactaagctgggcgagctgttaggtgatccatggctccgggagcatgaacagtacaaggattactactcagcgatgtttctgagggagagctggggaacacttgcacccctgttgagcagggagggcctgatcatgttttccaagggccgggctactgcaagagatttagtgaaacagaggctcaaatcattcaatgctagcttcgacgagatgtttcaaaagcagtctaaatgggtgatatcggatagggatttgcagcagaagacatgccacctcgtggtgcaggccgtagtgcctgtttacaggagcttcatgcagaattatgggccgcttgttgagcaggacgttagtgcgagcaggtatgtgaagtacagcgccgaggatctggataagatgctcaacacgctcttcctgtccaagccaggcaggccaatgagagctggaagcttccaaatcaaaaattcgaatgacaagattaccagtgcaatgacaggattgtatcggagtgcttctactctgaagtagcttcagtggcagttgggaaatactgaatgcacaatttgtgcaataagccaataacttcgtaggcaaaggtggttcgggccagtaagtcaagatccccacttatgtggggggtgcaataatggttccatgattagagcagctggagcataagatgaacataaaactcttccagaactgatattgtgggggagaaagatgacaggagtgtttcctcagcgggtctccttcctgtcgatcatcttttcaccttctattgcattcttatctgtagcaagtatactcaattcattttaggaacttgtgtgggagcagaggatgtgtaatcagttatctggtacatggtagaagattggttgtattataggaggtgttaagttgttgcatatggttatggtatactatgttttagatctcatgaacatgcagtgaattatatggagtacattataactggtggcgaatggtaattacagcagttaattaaaaaaaaaaaaaaaaaaaaaaaaaaaatagcttcaattcgtctatataccatatatctccctagccaacacacacataatactctccattccattccgttccatctcaaaggatagaacaatgggcggtctctccaccaagcttttcgtggtcctcctcctgctcgtttgttacaccgggacgcaaggcgggccggtgactatggtgtcggcgaggaagtgcgagtcgcagagcttccgcttcaagggaccttgctcgagggacgccaactgcgcaaacgtctgcctgaccgaaggtttcaccggcggcgtgtgcaagggcctacgccaccgctgcttctgcaccagggactgctagtactgcctcgtctcgcctcgcctcggctcgtgtcctgcgtgtgcatagccgcagcggatcagtaaaacatgcatgcatgcgttaccgaatatttggcagtaccagcaagttaatggattaaataatatgtaatggaacaaagcctgttttgaacgtggaaaaaaattaaaaaaaaaaaaaaaaaaaaaaaaanaaaaaanaannaacccc

SEQ ID NO: 156159 - DNA, 860 bp, Zea mays
  Clone ID: MRT4577_739C.1
accaagacgtgtgtcgcggatgactacgcttaccagcaaaagcagagcgctgaacctggcaaggcaaacgtgtcagcactactacttcttcttcgacgggatgaggagcccggttaacaccaacaacccagaggaactccacggggacatctctctacgaggacaatgtcccggctgtgaagcacgctgagtgtctccatggggcgtatcaattacgcgatgggaggccagaacccgtcgcacacgcacccgcgcgacagcgagatcatcttggtacgcgagggcacgctcgaggtcggcttcctcaccaccgccaacaggctcctcagcaagaccgtcgccacgggggacggtgtggtcttcccccgcggcctcgtccacttccagcagaacagggggcacggccccgccgccgtcgtcgccgccttcaacagccagctccagggcacgcaggccatcgccatgacgctcttcggggccacgccgcccgtgcccaccgacatcctcgccaaggcattccgggtcggcagcggggaggtcgaacacatcaaggcaaacttcgcgcccaagtagacgacgaccaggcagcgtgtctgcattcgttggtttctcaataaatatcccgcggcgacgattatattgctaggtcgatgtatgtatcgtgtcgcagcgtgcagttttccatttgttgttcttcgttttgagacgacattgctgaccacgacgctagttcttgttgctgctaatttgtgtggagccactgcttgtcctccaataaataacatgatcagccctttagttttaaaaaaaaaaaaaaaaaaaaaaaaaaaaaaaaaaaaaaaaaaaaaaaaaaacacccc

SEQ ID NO: 156160 - DNA, 346 bp, Zea mays
  Clone ID: MRT4577_73C.1
atgcccgacgtaagctcggaattcggtcggtgttgtgacacgtttttgtcacctgcaaccggttggagaatgggcggtgtgcagcttcgaagcacgggctcaaggaggaggagcacgagggggacggcgagaataacgagggtcttctgttcaagcttgacctcacctgtcccagttccagataggatagcgaccaggaagtggacgcgatcgatgagaactgcgagattctatcgaggaagacgaagtagatcgccctcaatgagaagctgatggaaaagctgccacactataaggacgggcatgacacggccgaaccgtggtcggagcccgcacccgtggagac

SEQ ID NO: 156161 - DNA, 936 bp, Zea mays
  Clone ID: MRT4577_74000C.1
cgggggatgcagatacaccagcactaaagcaccggatcccatcagaactccgaagttaagcgtgcttgggcgagagtagtactaggacgggtggcctcctgggaagtcctcgtgttgcattaccttgaggggccaccacgcagtcactcccgggccgccgccgccgccgccgccgccgccgcctccgcgaaaaaccctagcaggcttcgccgctatcactccaaggggcgcgaccatggtggccacaaagaagacgaagaaatccacggacaacatcaataacaagctgcagcttgttatgaagagtggcaagtacactctcggctacaagaccgtcctcaggactctcaggaactctaagtcgaagctagtgatcatcgctaacaactgcccgccccttcgtaagtctgaaattgagtactatgctatgctggccaaggtcactgtccaccacttccatggaaacaatgttgaccttggaactgcctgtggtaaatactttcgggtctgctgcctcagcattattgatcctggtgattctgatatcatcaagactacaccgggtgagcagtaaagaagaagcccctgcactgcagtagggggatcttactgcatttgttcttttgtcttgttaaacagcatttacctgctaggaaaccgagttattcggaacatgtcttgaattgaatttttgctccggtgttttgacacttaaatagagctttagcttataccgttgttcaggtcgcagctgtatgttttgtcactatcaaacgaatgctccaccagtggaggtatcctataataaggattcattgtttgtaggaatgagtaatatactgttggaattgtacgatatctctggtacgatcatcttgcacgcatgaatcaatccacagatcatgtaaaaaaaaaaaaaaagcggcccctagggcc

SEQ ID NO: 156162 - DNA, 584 bp, Zea mays
  unsure (1)..(584): unsure at all n locations
  Clone ID: MRT4577_74001C.1
tcgcaaaatccattttatttcgaatatatgccaagatgcaatgctgtagaaaaaattacctgcnngaatcagtttaatnncccagcaaggagatctgggnnaattttctgtnntgttgctttgtnngctcgcaccgagcagcagnnagctagcactttggcattcatnnggcacttttttgtgaatgnntgaattctnnacgcacgagccaacgagggagatcagtgttntnntgtttcttttaaacttnnnttaattcnnttcaattgnnttgtgctcatgttactttctctnngcttggcgnngaattctatttgcaacaagnannaaccggtaacctggtgcttactatnnactctttccattaacaatnnggcagtgagcattcctnntccgattttgtaaactattttttattgnnatgaattgannacttggtatgtcanntggtgatatgaactcatgtantcgtagttgtttgatgaactatgnngttatgtgttgttgatttttgcnnttgtgtacccttgaaccatcgnnctggtgatgaaacnntatggttatgnnagttatggnnttgggtg

SEQ ID NO: 156163 - DNA, 181 bp, Zea mays
  Clone ID: MRT4577_74002C.1
cgcgacactggacatgaagtgcttcttccccggcagcttgcaaatgctggaggcacagaagcgccagaggctggccaccaagctgaacctgggttacaaactggggccgcctgacactgacgtggccaacaaaaaccctaagcagttaaaaactggacccatgagaaagcaaactgacccc

SEQ ID NO: 156164 - DNA, 835 bp, Zea mays
  unsure (1)..(835): unsure at all n locations
  Clone ID: MRT4577_74003C.1
cattgggtacctccggccgggccgggcttccccacgcagtcactcccgggccgccgccgccgccgcctccgcgaaaaaccctagcaggcttcgccgctatcactccaaggggcgcgaccatggtggccacaaagaagacgaagaaatccacggacaacatcaataacaagctgcagcttgttatgaagagtggcaagtacactctcggctacaagaccgtcctcaggactctcaggaactctaagtcgaagctagtgatcatcgctaacaactgcccgccccttcgtaagtctgaaattgagtactatgctatgctggccaaggtcactgtccaccacttccatggaaacaatgtcgaccttggaactgcctgtggtaaatactttcgggtctgctgcctcagcattattgatcctggtgattctgatatcatcaagactacaccgggtgagcagtaaagaagcccctgcagtagggggatcttactgcatttgttcttctgtcttgttaaacagcatttacctgctagtaaactgagttattcggaacattgtcttgaattgaatttttgctccggtgttgacacttaaatcgagctttagcttataccgttgctcagatcgcagctatatgttttatcactcagacgaattccggtggaggtatcctataataaggattcattgtttgctggntgcgacctcccccacngccttcccctttaccctccccaatcacatctttaaggtcgggtttggttgtaacgatgggatatgacaanatgagatgattcttaagattgtttgattgaaaaanaaaaaaaaaaagggcccta

SEQ ID NO: 156165 - DNA, 1174 bp, Zea mays
  Clone ID: MRT4577_74004C.1
ggcccgggcccgggattacttcagtttcgtcgccgcgtgccccgtgcttcggctgaataataaattgacgatagagggccaagtatactattacagagagaagctagctagctgaaatggaggctaacagccgccgccgcgtctctcttgtgccactgctgtgggtgatcatctgaagatgtgcctgccgcgtccagatcccgataccggccacgacagacgcattcacgcactgcgccgctctcgagggcccgccgccgccgccgctgccgccgccgccgcgccgcgccgcctcagccgccgccaccgcccgcacccctcgcggcgcgaccgatgatagccggccggggccggccttccaccacgcagtcactcccgggccgccgccgccgccgcctccgcgaaaaaccctagcaggcttcgccgctatcactccaaggggcgcgaccatggtggccacaaagaagacgaagaaatccacggacaacatcaataacaagctgcagcttgttatgaagagtggcaagtacactctcggctacaagaccgtcctcaggactctcaggaactctaagtcgaagctagtgatcatcgctaacaactgcccgccccttcgtaagtctgaaattgagtactatgctatgctggccaaggtcactgtccaccacttccatggaaacaatgtcgaccttggaactgcctgtggtaaatactttcgggtctgctgcctcagcattattgatcctggtgattctgatatcatcaagactacaccgggtgagcagtaaagaagaagcccctgactgcagtagggggatcttactgcatttgttcttctgtcttgttaaacagcatttacctgctagtaaactgagttattcggaacattgtcttgaattgaatttttgctccggtgttttgacacttaaatagagctttagcttataccgttgttcaggtcgcagctgtatgttgtcactatcaaaccgtcaaacgaatgctccaccagtggaggtatctcctataataaggattcattgtttgtagtaattgtatgatatctcgggtacgatcctcttgcacgcatgaatcaatccacagatcatggtattatttattcaaattcaagatgctgcaaattgaaagacaaaaaaaaaaaaaaaaaaggccccta

SEQ ID NO: 156166 - DNA, 180 bp, Zea mays
  Clone ID: MRT4577_74005C.1
tagccgtgtttctatggaggttccctgatgccgggggcttgttactagtggttgggacaacaccccaatccccgtggccttgataaatctcttcccgagccgaagtgtcaataagatatacgaccgagcgattgcaggtacatttcaatttatcaccaaaccgggctagatggataacca

SEQ ID NO: 156167 - DNA, 605 bp, Zea mays
  unsure (1)..(605): unsure at all n locations
  Clone ID: MRT4577_74006C.1
nccacgtccactctgacgtcggccggcggcggtggcggcggaggctgtgacggcgtcgccggcgacgctgccactgatggtcgtagcggcggcggccgtgcagcaggcgcacgcgcagctgcagctgcagccggtgctggtgctgctcgtggtggtggtggtggtggtgctggtctcggcggcggtgctgcagggcgcggaggaggaggaggaggaggaggaggaggagggcgaggacgtggacaggccgaggagcaggtccacgaaggcgcccacgatcaggtggtggtgctgcttcccgttgatccggaggtaccacgccaggagctcctccagctgcgcccagtcgcggagcccgtgcgccgacaccatctcctccatggacgcccggaagtcgccgtacgggtcgcccgagtccaccgccaccgccacgctgcgctccgccagagacgacgacgacgccgccgctgccgtcgtcgtcgtcgtcggttgccgctgcttcttgacgccgtcgccctcgtccgcgtgcgttgccgttgcgtcttcctcctctgtcggccctgggactgggaccgggaccgttttcttctcgccggcgtctcggc

SEQ ID NO: 156168 - DNA, 854 bp, Zea mays
  Clone ID: MRT4577_74007C.1
gggtacctcgaggccggccgggccggggttcaggacaaaggagaggcgtggacacgggacgcgaggtagacagcgcccggcgtgacgtggtgcgacagggagagcggagaggggggctcaccaaactgcaaagtctgtctcctcgccggcgtgccggatctcctatctctctcgcggtcggcggccgcatagcctcgctcactcgcacgacacagggcagagggggcgatgggctgcgcgacgtccaagcagttcagcaggagcgcgccggctcacgcggatccggccgtgctggcgacccagacctcattcacggtgaacgaggtggaggcgctgtacgagctgtacaagaagctgagcttctccatcgtcaaagacgggctcatccacaaggaggagttccagctcgccttgttcaggaacagcaggagagcgaacctctttgcagacagggtcttcgatctgttcgatctcaagcggaacggagtcatcgatttcgaggagttcgtgcggtcgctcagtgtgttccaccctaaagcagatacgtcggagaagacggcgttcgctttcaagctgtatgatctgagggggacaggctacatcgagaaagaagagctcagagagatggtcttggcgctgcttgatgagtccgacctctgcctttcagacagcaccgtcgagacgatcgttgataacacgttcagccaagcggactcgaacggagatggcaggatagatcctgaagaatgggaggagttcgtgaagaagaaccggcaacgtaaggaacatgactctcccctatctgcaggacatcaccatgtcatttccgagcttcataatgcgttcagaagcca

SEQ ID NO: 156169 - DNA, 389 bp, Zea mays
  Clone ID: MRT4577_74008C.1
cttccggggaggcggccaaaggagcgacccctaccgctcgagcactgcaacacggtgcccaacggaaagtgcgcgccacgtagctactgttaggaggaggcggacaaggacaagaacattaaatatgtggagaatgcatcaaaggccattgactttcgccccatggtcagcatcaaagaacaacttaagaatgacaaggaccacgagagcctgctgctatggaaggagcaaatactcggcgtggtggacttaaacttctggtgatagaagcttaagcctgacataaagataatgagcctgtccatcctgtctacaagacggatcgacattctgctgtcactggcggtggatctcaacgaaattggcgtgtggttcaccctaaaggaagg

SEQ ID NO: 156170 - DNA, 302 bp, Zea mays
  Clone ID: MRT4577_74009C.1
gaaaacttcagttttttccaggtttctgtagcataacagcaagatgtacaactgtcagttttgtttgtcaccaaacagcaacccagaagggaaagatgtagttatatggcatgttacattttcagtttacaggctaaacagcttacagtgtcttgtagtgagatgtaactgtaaggtcggggagcttagtgaggtcagggtgggccatgcgttcccctgcccaacataaccaccattgagcaaacagtattttcatttaaaaaaaagaaaaatgacaaagaaacactgtctaatgaagagga

SEQ ID NO: 156171 - DNA, 580 bp, Zea mays
  unsure (1)..(580): unsure at all n locations
  Clone ID: MRT4577_7400C.1
agcagtggtaacaacgcagagtactttttttttttttttttttttttttttttcttttttttttttttttttttttttttttttttttttttttttaccaccaaaataccaggcaagcaaaataggaaaacacatttttttgacagtttaacaaacacagcaaaccctgatgcattcttgcaaagggcgctcgaaagtaacaagggctacagcgcacttgcaaaattggaaagagggcattgggggaccaaaatggccgaaggaaacaaagcctgatggctctttgaaaatagggaaccaaaaccgctaacttagggaagaaaatggattggccagctgggggggcgagcggcggaccaccagggggcaagctatacggggcaatcgggggcgaagccggaaaggccactgggggggcaccggaactggatccaatagcaggaaagggaggcatggagtgggccataaagggttggttggggaatgcaggcaatgcagaggcaaaaccccccgcctgcagggggggatgccaagcanccacctgtccaactccaaaaggagttgaagtggttgggcttgc

SEQ ID NO: 156172 - DNA, 657 bp, Zea mays
  unsure (1)..(657): unsure at all n locations
  Clone ID: MRT4577_74010C.1
ttctatctcacattacgtgattctcccttctggacacttcatctgtatgactgcaaggatgtcacagtctcgggaactactattctggctccaattgctggggctccaaacaccgacgggatagatccagattcttgcgagaatgtgatgattgaaaattgctatatttctgttggtgatgacggggtagctataaagagtggttgggatcaatatggaattgcttatgggcgtccgtctactaacatcactgttcgcaatgtcataatccgctcaatggtcagtgctggcgtgtctataggaagcgagatgtctggtggtgtctcaaacgttttggtagagaacgtccacatttggagttcgcggcgaggtgtgaggataaagactgcccctggaagaggggcctatgtaaacaacattgtctacagaaacataaccctagaaaatgtccgggttggtatcgtgataaagaccgactataacgagcacccagatgaacggttcgacccgaaggctgttcctgttgtcggtaacatctcttatatgtcaatccatgggcaaagggtgcgggtacccgtcaggatacaagggagcgcagagatccccgtgaggaatgttactttccatgatatgtcggntggtatacttgacaagaag

SEQ ID NO: 156173 - DNA, 633 bp, Zea mays
  Clone ID: MRT4577_74011C.1
cattgggacctcgagccggccgggaatgaaatatcacgacttgttttattgattcttgaagagatctagcttcttttgcaccacaaggtctaggatgtcttgcaactgcggatcaagctgcggctgcggctcaagctgctagtgcggcaagaagtaccctgacctgtaggagatgatgaccgtcgtgcaggcctccgttgtcctcttcgtggacccggagaaaaatgccgcgcccgagttcgtcgaggacgcggcggagtccggggaggccgtccactgatgcagctggggtgggaactgctagtgcgacccctgtgactggtgatcacatcgatcgacgaccatggatatgattattatctatctagcttgtggggggggctgaactataataagcgaggtcgagctggctgccatacataggtattgagtggtgtgtgtgagagagacagaaacagagctcttcactttgctatctctctctgcgtggttggcggcagcctttgtgctcatgtacgtactagtgactactctgcatgctggttgatctcgattgcatctgctgtaatgatatatgaattggtgtgaatgatgatagtgaaaatgtctctctggctccgacttttgttttct

SEQ ID NO: 156174 - DNA, 410 bp, Zea mays
  Clone ID: MRT4577_74012C.1
gctacaccgagcaagatgccattattccccaaccctagccccggatctcacggggggcggcggaaatggataatcccttaaaccaacgtaaggaccacctgaagctcgcgcggcactacgcgctaaagggcctatacgacacctccatcatctttttcgacggggccatctcccagatcaacaagcatctaactggtagaaaacatgctgcacattacaaacggaggtatgaactgcaataaagcactctctgaagaaaaggaaattgtgaaacagctggatgctcaattaaagttccttaaagaagctcctgggacaaggctggcatcatcacctactattcgatctaataaatcaattgtttaccaaccgttggatgagtatccaacatatataccagcacaatttga

SEQ ID NO: 156175 - DNA, 270 bp, Zea mays
  Clone ID: MRT4577_74013C.1
ggcagttccagtcatatatcagctctcatgtgcccagtgatcgtcggcgtgggcggggcaaccaggtttctcctccatcacggccgacaggagggagagggatataatactgggccacatcgagaggtacagcacgtaaaagagtggcacgagagataggggaccgtaatgcggattaacggggccctagacacctactctcattcgcatgaagctaatgacgctcctgtagatcgtgctcttcttctgccatgctggacccatcgagga

SEQ ID NO: 156176 - DNA, 429 bp, Zea mays
  Clone ID: MRT4577_74014C.1
cttccccgcccggggggcccttctaaagggggtgtgggggcgaccttggccatcgcttccggtggctcccgcctacgtcccagcgcctggcggctatcttgcgtcataacctgttgcccgggcgaaatccgctttgcttacctgttccaccaaatactactaccggtgacccaaatggctaaaccgggggggcctaacgggggggcacaccaacattaattgggttggccccaccggcccgtttccaaccgggaaaccctgtggccccttcgtcttttggagccctcccccccccggggggaggcggacccagttttgggctcccttccgcacttccatgggaggtgccctcttggccagggcttatgggtggggggggcgggttcaagctcctcaaaggggggaagtcggctacccccaaaatcaggg

SEQ ID NO: 156177 - DNA, 146 bp, Zea mays
  Clone ID: MRT4577_74015C.1
gataagacgatcgtcatggtcgagacgcgagcgtcgtacgctcatgatgacgtcgaggtactgtctgcgtgctcctggaaaatcagagtcacgaacaggcaagagacatctgaagagagtggctaagctagagaacacgcgatcga

SEQ ID NO: 156178 - DNA, 315 bp, Zea mays
  Clone ID: MRT4577_74016C.1
gaagaccgaagaccgagccttgcggtgttctcgcacgggaacgggacaggacctcgggatctgagatccttgctgtccgcccgaccgtgcccgtcgacgcgtcgttcttgccagccgagcctgatctacgccctcttctcctacagggggatcggatacgcgacaggctgcgcgatggagctgggggtcttcggataccgctgcctgatctggaaccccggcttcgacttcgacgacgaaatgctcggcttgatcaagggctactacgtgcacctttaatctcgcttgcattgaccacagacgcacaccggagca

SEQ ID NO: 156179 - DNA, 415 bp, Zea mays
  unsure (1)..(415): unsure at all n locations
  Clone ID: MRT4577_74017C.1
agcagtggtaacaacgcagagtactttttttttttttttttttttttttttttggggggggggggcgtcctataacaattaggaacaaaacaacgggggggttggccttaaggccgggttttcttcggcggccaattggaggtggtggtaaccaagcttaacaaaacttcaagggtggggggtccttggaggtaattataggagggtttnggggggtttggagttgggaaggaggatttgggttaaaaggtgaaagggtttgggggtttcaaagggggaaatttttggggaaggaaaagttacgggctggnattaaataaagtggaagggttggaaggtaattgggtttttgggttatttttctttagggcatggtttaagtaaaaaaaaaggggggtttggttggtttttggga

SEQ ID NO: 156180 - DNA, 282 bp, Zea mays
  Clone ID: MRT4577_74018C.1
cctgatgtccggacaacaccaggctacaaaatcctgttctcccaacacctggatgcatgatacacatttccgaagcgcctttaactggagcccggcatgcatgggaaaaaaaacaaactgttccttaccaggcaggctcataagattaccggcttccaggcccggcttccaacgactcttttgggaaagggtaagggatggagcttacacacacaaaaagagtatgccgggttgccgggtccaataaccgggagccgaccgtcatcagagttttaccggccc

SEQ ID NO: 156181 - DNA, 309 bp, Zea mays
  Clone ID: MRT4577_74019C.1
tctgaatgcagcaccacccacttatgatgcgactccacaggacaaatcctgcgcccacccaagggatgaccacgaaggagaggaacatcctgctgaggcacttgtaccagaaatccgacgagaagctgatgccaaacagagctgcggaggacaacctcattccggagaacaatcatcaacaagcagcccaccagacctgtgggcgacgacgttggccagtcgagcgcaagaaggtgcaacgcacagctgctggccggcctgccttgcatgtcatatatcgagtacatgcagccagcatgtctcactcac

SEQ ID NO: 156182 - DNA, 382 bp, Zea mays
  Clone ID: MRT4577_7401C.1
atagcttcgtctatataccctatatctctagccaacacacacataatactctccattccattccattccatctcaaaggatagaataatgggcggtctctccaccaagcttttcgtggtcctcctcctgctcgtttgttacaccgggacgcaaggcgggccggtgactatggtgtcggcgaggaagtgcgagtcgcagagcttccgcttcaagggcctacgccaccgctgcttctgcaccagggactgctagtactgcctcgcctcgtgtcctgcgtgtgcatatatagccgcagcggatcagtaaaacatgcatgcatgcgttaccaaatatttggcagtaccagcaagttaatgaattaaaatattaaataatatgtcat

SEQ ID NO: 156183 - DNA, 126 bp, Zea mays
  Clone ID: MRT4577_74020C.1
cgccatgatcatcgagaccctgaaggcgcgcatcctgcgcgcgctgtagccatcgtccctcccgtcggcgggcgacagcgctcgctctgcgaccaagagagcgcaacactaccaaagcagcgaccc

SEQ ID NO: 156184 - DNA, 809 bp, Zea mays
  Clone ID: MRT4577_74021C.1
tcgggccggccggggcgcacctgccgccgcttcctctctgtctcgcgcagccgccgtcgcctcctctccctcgcgcagtcagcagaccctcccccttgcgcgccgtcagcagatccctgcaccgctgaccggcccctcccctcgcgcgccgtcagcagatccctccactgccgccgccgcggtgcctcggcgtctgctgcttccccaccggatactaacaaatgggttctagaattgagttgataaggaaacatttgaaacaggaggaggaggatgatgatgagttattttttgtgttagttccagctatatatgcttccctttattctgaaaagaggccagtacacacttcttgtcgtagtggtgcacaaaaaattagagaaatgctcgatggtcatgagagctggtgcaaatctgagtttcgaatggagccagagatctttagagctgtagcaagctatcttagaagggaaggattgttgcaagacacttcaaatatgagcattgaggagcatcttgggatattcatgtacatgatatctcaaaatgctagcaatggcgatcttacaaaaagaatttcagcatagcggggaaaccatacatagaaagataagcgagttctttggtataatccccgctctaactcaaagatttgtgaagctcccaagtgtaacccaaccacatgtgaagattacatccatccctcggttctggccttactttcaaattgcattggtgcaattgatgggacacacgtccccataactattagtgaagaaaggagcccttcatttagaaatcgaaaagga

SEQ ID NO: 156185 - DNA, 158 bp, Zea mays
  Clone ID: MRT4577_74022C.1
agagtcggtgtaggcgcccaggcccgcagctgtctccgcgacgactgctccgagtgctccgctggccgcctcaactactgccccaagatggtcagcacctacggctccgtctaccccgacgacattggcaagtcctacggcggctacgcagactacaa

SEQ ID NO: 156186 - DNA, 228 bp, Zea mays
  Clone ID: MRT4577_74023C.1
aattcagtccagtcctcgcttccttcgtcccgctgtatctcaaccccatgggcaaaatcaagatcgggatctatgggttcagaaggatccgaaggctgctgcccagtgtgggcctacaaagtgactatatgaagctacaggccgtgaacgaccgcctctatgagcaccgactacatgacctacatgttcaagtccgacactgtgcacagacagcggaagcaccatgaa

SEQ ID NO: 156187 - DNA, 553 bp, Zea mays
  Clone ID: MRT4577_74024C.1
ttttaccacaagcacatggagcagctcggccagctcggcgccatcgccgccggcgcgtacgctctgcacgagaagcacaaggccaagaaggacccggagaacgagcacggccaccgggtcatggaggaggtggccggcccaaccgccgtggtctcccgtcgggttcgttttttacgagccttaggagagacaagctcggcatgaaaaactcctcacaactggttccgttgcaaggttgtctttaactctatgaaccctggtcgtgtgccgcatcgattcttttttggtttccgtagccccaaggatgttggagtgaatagcacgaaggaggactttcgtcggttttttctgcttgggccttcgtttgcttcggtgggggatttggatcatttggaagctaaatttggagaaatttcgcttttctctgtctcctttacccttactcgacatgctatggattcgattattggtagccttgcagatttcgttaatgctctggttggcttgatggaactgttcaatttgatgagagattgaaccccatgatgacagt

SEQ ID NO: 156188 - DNA, 647 bp, Zea mays
  Clone ID: MRT4577_74025C.1
ctaagcagggctaagcttcattagttcgctttataaaacaggtatcaaggaatagtaatcgaattccaaggaatggtaatgcatcaactgtttattcacacaactcctatcacctaatgcaacatataagtgataaaagttttataacaacaagggggtggcaaatgcactggggcttgcctgagataacactaggttagtgtggttagatgatgaccacttggtgagcatctctcatcctggtgcttgatcagatcgtcaaatctcagggtgcaatcgtcaccatcaccttgagattaatccaactcttgccctccacatcacgtgattaattaacgtgcccaatcatgctccgactcaattttagcaagaccgaagtcggcccccagttcgagcatatcatcgaacacctaaggagcgttgaacttaaccttcttctccacctaattctctagggattttactccatatcgcacacatcaacgcacataaaatatcacatcagcagggtattaacaagaactagtaaaacaacaaagggatttagagatcaccaccataggctccaaggagcagctgggcaccatggatgaaggtgttgctctaggggaagtgatgaactcgactggcatagggggtaaactcgc

SEQ ID NO: 156189 - DNA, 515 bp, Zea mays
  Clone ID: MRT4577_74026C.1
gcacgcgtacagctaactaggaatgtaggccgaccatgattttgcttttgattctctagatgaaaaatctcttaaagagaaatagaaaggaagctagcgtgagcagaatggaggacctgcttgcccctgaaattgatgattgtcgatgaagacgaactaaaagacgttagctctatggttgtagaggagattcaatacctccgagtgggcatgggtcatgaaagtgactctgtggaagacctccagaaagcacatgatgcatgccaagacgaccttatgggttctcctaccaaaaagagctatggtttaaatggtgtggctggatatgctggtaatattcactgcttagcaaatgatttcgaatctgtgaagaagcgactggatgatgaaggtgtaaaagctctctcgcttgatcagaatattaaccttctgacacaaggatatcagatacgaggctggataactggggtcacataggcaagataccttgaatgagatggacactgtcgaaacag

SEQ ID NO: 156190 - DNA, 745 bp, Zea mays
  Clone ID: MRT4577_74027C.1
ccggactcggagcacttctcctcccctcatcatcaccaccccggagcgacgagcgagcgatggcgcgcgtctccaattccaagaagcgcatgctccacaccaacagcagcagcagcaacaagaaggaggaggcgaccaccgccaacgccaacgccagcgccgcggggagacgacggccgccccgtccgcgtctacgccgacggcatcttcgacctcttccacttcggccacgcccgcgccctcgagcaggccaagctgctgttccccaacacgtacctgctggtgggatgctgcaacgacgacctcacgcggcgctacaagggcaagaccgtcatgaaccaggaggagcgatacgagtccctgcgccactgcaagtgggttgatgaggtcattcctgatgctccctgggttctcacgccagaattcattgagaagcatcagattgactatgtcgcacatgatgctttgccttatgctgatacaagcggtgctgcaaatgacgtctatgagtttgtcaagaagattggaaaattcaaggaaacaaaaaggaccgatggagtatcgacatcggaccttataatgaggatagtgaaggactacaaccagtatgtgatgaggaatctagcacgaggttactcaaggaaagatatgggcgtgagctatgttaaggagaaacaactgcaggtgaatatgaagatcaataaactgcgggagactgtgaaggcacagcaagaaaagttgcaaa

SEQ ID NO: 156191 - DNA, 407 bp, Zea mays
  Clone ID: MRT4577_74028C.1
gtggaagagatgaagacaacatcctggaggcgtctgctggacaagggaaggcagaagagaagctcggtgatgatatctacaaatctgagatatctgatcaagaaataacagcaaggacaggtgctactctggaaggtagcttcgaagaggatatttcatcggaccaagaggcaaatgatgatgatgaagatgagtgccatgtgaaatctgatggcgaatcagaggacactgaggagcaagatctggaggatcaacagagcatgccagatgatgtctctaaaatagagatttctgaggacaccgtctctggtgacggatgcaaagaggatttttctgaagaagtaacctcggcagctgtgttagcagatgatgtgtttgaacaatatgacaacactgtggatgatgtg

SEQ ID NO: 156192 - DNA, 461 bp, Zea mays
  Clone ID: MRT4577_74029C.1
caaatgtcatgtcggttttgttagttatccatttcttttatactttattggccaggtcgcacttgccgactatctgcggatggttcttgcccgccataccgcatggccccatagaagatcaccggtaaacaagcagagagatggtagttgggtatttcttgtccaatgttaatcatgggagccacatcccacaaggatacaaacatacagcgaatgactaactcaccgcgtgcgcgtaagtgggctgatcaaaaccacatgggtcagtggctatctcctccagctcctggagattagctcccacgggcactgtgactctgttacactatcacacaacgtgcacctttcatgtgaggagaatgtcaacagcagcccttatcttgtgcatgcttaagagcctataaagatgcaggctaatccagacctcaacgttgaaggtgtcgtgataggaagacccccat

SEQ ID NO: 156193 - DNA, 228 bp, Zea mays
  Clone ID: MRT4577_7402C.1
gcacgaggcctccgagcctcagttcgcatccatgcgcgtcgccgccgcctcgcagctcgacgctcagcgcgcactcatggaggaacagactgagaaggctttcctcaatcagccataggttttcctcagctcaaagagatccggctgaggtaagaagcctgctaagggcggcaaccgattctggaagagcattggccgtggcttcaagactcccatggtagcaattga

SEQ ID NO: 156194 - DNA, 335 bp, Zea mays
  Clone ID: MRT4577_74030C.1
gcgatgcctacaggatgctgatgcgagagatgtcaaaataaaccgtaaatctataaagaggtggagtataagacttatggagatcgcactggaggactctactatgctccaacatgatactgaaaccattactgcatgaatggctgtgcaagacaacaatagtcaatgagtaagctagctatccaaccataaggtgcacagactcataggctgtggttgctaagaattacacacctgacatggcttacttgtatatgtggtgaacacggcaaagatgtaccgtgctcgctatgctcgacatcttgcagagaacaccagttgatgtgcatctacta

SEQ ID NO: 156195 - DNA, 249 bp, Zea mays
  Clone ID: MRT4577_74031C.1
gccggtgagccgcgtcaagcgtgcagcttggcgtatggcctcagcatcggcgtcaagctgccgggcgtcgggtcgaacctagaggagtccaatgcagaaggaagccgaggctggcagatgtctggtcggtgcttggttgactcgaacgagggccacacgtggtggcggctagtacccggaaatccggcgcacggtggatgccagatgcttgcgtgaccgtgggctacctggtggtggaaccacgagctc

SEQ ID NO: 156196 - DNA, 1518 bp, Zea mays
  Clone ID: MRT4577_74032C.1
atcaataaatcatgtactttcttatttcataaacatgaataaatatccacaatatttatattacattgataccttcggcttgtcagaaggtgaaaatgtgagtgacgcgagagcgattacaatgcagtgtgaacagtacgatgctactgttcatctatttataggcacgagatacaacccgagcaaaattacattcatatccctgacatttactggtaatcataaggcgagctatcaagggctaagtagtcttttcccttttaggtcggtttcatcttccaccttcatcatcatactaagccgaaggtccttcggccacagcttcgacgctcgttcacccttccttcagaccgcaccttcatacacgcataccttcgtctcaaagccgaagcctcctgtaacagtctatgttatactgaaaacatgttagttacgtttttgaggaccttcggaagaggaaggcccccaacagtagcccctcgcagtactaatttgtttctattttaacaaattcagactgcgacgtgaacgaaggcctttagccgaaggttcgaaaaaacaccttccctttgctagaatagcgaaagacactgacatatagggcccaccaagctgtggtgtgctgggcgtataaataaggaggcacattgatagcgtttgatgcgccatttcaactgcttgtgctattttttcgagcttggattttcttgctctgctagattttgattgatttgtgagcttcggcatttgcacaagttctgactaaatggctaaagagaagaaggttgttgaccctgcactagctgggttttacgaggctatggagaagacaaacacatagaagatcaccaatgaaatgctagctgggttgtctgaagattctggcgatagtgaaagttttgatttggaaagtggaaacgaagatgctagctaggttgtctgaagattctggcgatagtgaaagttttgatttggcggccgagtcataccatcttcagaaagtcgtccatcaagcaaagtcagatttatgctatgaaagggagatatttccgcgatatttcaattgtgagggctggaggagatagcaccgtccctgcgtccgaagtagacgaagttgttgtctatatgagattcatgaaggcagggcttcggtttcccttgagcagatttttagtagaggttctgaagactattgaaattttccttcattagattactcccgaagctatcatcacgatggagatttttatttgggccatgaggagcaagagactagagccgagcgcaaaatgtttctgcaacatgcacgagctatcctatgagacgaaagctactggcaaggagcattatcacaataattttggttgttacggcttcgtgccttgctctgatatgagctatccagttcagacttttcggaagaggtggccaggagcctggatgaaagaatggttttatgtaaagaacaacttgattgaaagagaagatataaaggggatcatccaacaccctatttgg

SEQ ID NO: 156197 - DNA, 301 bp, Zea mays
  Clone ID: MRT4577_74033C.1
gagctcactagatggcggccgccctttctttttttttttttttggtttaagttgaatcattcgatctatcaatcataaagaaacctaggtttaggcgccaaagaataaaaaaggccccaacaactggaacacaccacccaacagtatgttatccagcacgccaacaaaacaaggtgccccaaaccggcaacacacagagagacgtctacagcgacattgaaaaaggcgaaaagaaacatgccaaaaaagggggcacccatccctaaaacaaaaacaacctccaaaaaacgcaaaggaaaaa

SEQ ID NO: 156198 - DNA, 1877 bp, Zea mays
  unsure (1)..(1877): unsure at all n locations
  Clone ID: MRT4577_74034C.1
aaaaacttcatcttcaacaacgcctgtcaatagcagtccagtgtgcagagggtctggttcatatccattcattagcagctgaaagtcctgaatcatgtggcaccagcctcttaggaaacttcagatctgccaacatatttttggacgagaatantgtacaatttatcttcaatgtgaacttgtcaacatttcttggactttcaggtgcacaaaaacatacagtgttttcaattcattacagcggccctgataagtgtcattcacacgcctgcgtgctggctcctctactgctttccacgacccacgattgcgtacgctttggagttgttcttttagagctcatcacttggaagactgtgagatacatgtacaatcttagggctcgtgtgcttaccacagacttccttgattcttataggagagaccgtgatgcaattgggatgttcggcaaggtttgtgatgaacatgaagggtactttgttcatgaggccctttccattgccatcgattgcttacaacttgatattcaaatgaggccagaaatggaacatgtacttttccgtctccggatcattgttgctagaagcaaacttgctgctggtagtaacaataaacctagccaacatattggtcgggcccttgttaacaacattgataaacttcacccaactctcatatcaaccatttccatggaggaactgaatgaagcaaccgggaacttcagtaatgatgttcttataggacagggaccatacgccgaatgtttcctgggagttcttaaagatgggcagaatcttgctgtaaaaaggctacgtacttctgaagaaattcaagtagaggttccgaccattttaagaatgtgttaccatgacaatgttgtgcaatttctaggatgttttcttgaagggggaactcgtgttcttgcttatgagtacgccccaaggggctccttgcatgatattcttcatggtaaaatgggcatcaagggagcccgaccagggccacctctatcgtggttgcagcgtgtgaagattgccgtaagtgctgcaaaaggcatcgagttcctccatgagaaggttgatcctcgtatcatccacaacaacatcaagtccagtaacatacttctctttgacaacgatgttgcaaaaataggtgacattggtgtttcaatacatgatgcccatcgccgggttcataattgggccgagtactattctgtcagggaacatctagcacctgagttcgcattcagaagaaggtatagcacaaagagcgatgtctacagcttcgggcttgtactgttggagcttttaactggccgctcagtttttcatgttgcgacacaatgtggcccgaggagcgcagttagatgggctaaaccaatgcttagtcaagacaaggtggaacagtgcatagatccaaggcttggaggagggtacctactaaacgatgtcagaaagatggcttctgttgctgcactgtgtttacaagacgagccagagttccggcctgaaatgagcatcgtcgtcgaggctctgagcctgttactgaacagcaagtgaacaagtaaccgtccctgcattggtgaagcacgtggaatgtgatttccttgcatgtcattgcgagctcaagatcacgggtttcgtgaaggcgattggcccccaacagaaagttatgattactgcattcatctaggcttggaacttgtgctttctttgtctgtgcacatgtaatactcaaaattctaaataaagaatatagagagatcttctcttaaaaaaaaaaaaaaaaaaaaaaaaaaaaaaaaaaaaaaaaaaaaaaaaaaaaaaaaaaaaaaaaaaaaaaaaaaaaaaaactcgaggagaggcgccggtacc

SEQ ID NO: 156199 - DNA, 1358 bp, Zea mays
  Clone ID: MRT4577_74035C.1
ctggtagtaacaataaacctagccaacatattggtcgggcccttgttaacaacattgataaagttcacccaactctcatatcaaccatttccatggaggaactgaatgaagcaaccgggaacttcagtaatgatgttcttataggacagggaccatacgccgaatgtttcctgggagttcttaaagatgggcagaatcttgctgtaaaaaggctacgtacttctgaagaaattcaagtagaggtcatgcatgtgtgcttgcttttttaacttttgcagttgcactttttcttcatttattgttatgtacagcaaaggattaccttctaaattatacttctgttgcaggttccgcccattttagggtgtgttaccatgacaatgttgtgcaatttctaggatgttttcttgaagggggaactcgtgttcttgcttatgagtacgccccaagggctccttgcatgatattcttcatggtaaaatgggcatcaagggagcccgaccagggccacctctatcgtggttgcagcgtgtgaagattgccgtaagtgctgcaaaaggcatcgagttcctccatgagaaggtgacattggtgtttcaatacatgatgcccatcgccgggttcataattgggccgagtactattccgtcagggaacatctagcacctgagttcgcattcagaagaaggtatagcacaaagagcgatgtctacagcttcgggcttgtactgttggagcttttaactggccgctcagtttttcatgttgcgacacaatgtggcccgaggagcgcagttagatgggctaaaccaatgcttagtcaagacaaggtggaacagtgcatagatccaaggcttggaggagggtacctactaaacgatgtcagaaagatcgcttctgttgctgcactgtgtttacaagacgagccagagttccggcctgaaatgagcatcgtcgtcgaggctctgattctgttactgaacagcaagtgaacaagtaaccgtccctgcattggtggagcacgtggaatgtgatttccttgcatgtcattgcgagctcaagatcacgggtttcgtgaaggcgattggccccaacagaaagttatgattactgcattcatctaggcttggaacttgtgctttctttgtctgtgcacatatgatcttagacttattgtagaatggattatcttgtttggtctgttctggaaaaaacatgcaatgctacgtgtagcttacatctgtgtgcaaatgctgaactatatcacagctctgtaaattctgaatcatagtttacatgactgttactcggattccttatttctttgtccccggaatgcaaaacaaatccatagatct

SEQ ID NO: 156200 - DNA, 416 bp, Zea mays
  Clone ID: MRT4577_74036C.1
gaaacaccacccagcgcttggtgggggggtcttttttaaaattttagaaaaaacattccgagggacacacaacttgataagggtttgggaaaccttgtacccatttcgaattatagcccccaggcactgttccgaatataaacccttgcaacaccccaaacaataattgaagggggggaaaatggtttttttccccctttgggtcgcctatccagagcccaatttttatacatggggcccctcaaaaaattgggcgaagtttaaaaaaggggcttttccgggttaaagtcccgttttggaaatctcaatttttcgaaaacctttccctaaactataaggccccccccttgaggggggggtaaggagcttttcaatatccgcttaatggactctggcctttgtcaaatgccctttgt

SEQ ID NO: 156201 - DNA, 397 bp, Zea mays
  unsure (1)..(397): unsure at all n locations
  Clone ID: MRT4577_74037C.1
aaaaacttcatcttcaacaacgcctgtcaatancagggcagggggcaaagggtctgtgttcatatccattcattagcagctgaaagtcctgaatcatgtggcaccagcctcttaggaaacttcagatctgccaacatatttttgtacgagaactttgtaccaaaaatcttcaatgtgaacttgtcaacatttcttggactttcaggtgcacaaaaacatacagtgttttcaattcattacaatggaccagaaaagtattattcagacccaagggatgtttctggtcaacttcttaacaaaaaatctgatgtatatagctttggagttgttcttttagagctcatcacttggaagactgtgagatacatgtacaatcttnaggctcgtgtgcttacca

SEQ ID NO: 156202 - DNA, 534 bp, Zea mays
  unsure (1)..(534): unsure at all n locations
  Clone ID: MRT4577_74038C.1
acgcgattggttttgtttttgggcccaaatcttggnttcccctccgcccgactggatcgagataaggagctgagagatggacgccaacaggcgccaaggtgggattcagcagttgctggctgcggagcaggaggctcagcaaattgtgaatgcggctagagctgaggaggcagagagggaaatagccgaataccgtgcccagatggaggctgagttccagaggaaggtcgcagagagcagtggtgactctggtgcgaacgtcaagcgtctcgaggaagagacaacggcgaaaatcgaacagctcaaccagcaggctgcaagcatctccccagatgtcattcagatgcttctgaggcatgtcaccaccgtgaagaactgagaagtgctgctcccaaactatgctcatcggtctatttatttttgtcagagcaggtgaggaataataatatggcccttgaccagtaattctttttttaactacggaataagccgcagcagctttagcggcaaccgtgactggtactaccagaactt

SEQ ID NO: 156203 - DNA, 292 bp, Zea mays
  Clone ID: MRT4577_74039C.1
tgctggaagaagcacgacgaaggggcggcaccaaagcacccctccgacaccgcctcggcacccaggccagaccaaagcaaaccaccgagacccgagaccatgggctaagctcaaggagtaccctgctttcaccgccagtgagccccgccgcacggagggaggcggtcctgttccatgcccaccgtcttgaccccgctcggcacggggcagccacacgcagcgcaagccttattcatctagcccggcaggcatgaaccctgcgctctgccaccacggtgaggctccgccgcca

SEQ ID NO: 156204 - DNA, 1259 bp, Zea mays
  Clone ID: MRT4577_7403C.1
gcagaaaccaaaacctataccatacatccatacatgtgctatctcaaggctctaataaaaaaatagatcttcatatgcatcaatattcaataccaatgaatgaagagaatgcgtcgcccctgttgcgagcagcacgcgatgcgtctgcctgcgctgtctaatattctcaaccgagaaaccgtgtattttcatcgagaaatgctgtttctcgaattttcagtcgaaattcaacaaatatcatcgtcttccgattagcaacaggagaacgaaaatcctttcgccccttcgaactgcaactgtgatgtgttggcattattcatcgatacaccaaacgaaatatgattttccgcttcaaacaagcagcaagttaaattgcatgtacatatgcagccctaaattacaagattatgcaagtaaagcgagtgaagttggaatcctggaaggctccatttgcataatcagtgacggagctggggctgctgtgcttcgttctgggactacaatacaagagtaggggtcgattcaggtagtacttgtgtaaggtttccagtagcagcaaggcatttcttcagctctcaaccttgagcatagatgatatacctcagcaagtcggcatggctactactttggtgggcgacgatcgtggtcctcctcctgctcgtttgttacaccgggacgcaaggcgggccggtgactatggtgtcggcgaggaagtgcgagtcgcagagcttccgcttcaagggaccttgctcgagggacgccaactgcgcaaacgtctgcctgaccgaaggtttcaccggcggcgtgtgcaagggcctacgccaccgctgcttctgcaccagggactgctagtactgcctcgcctcgtgtcctgcgtgtgcatatatagccgcagcggatcagtaaaacatgcatgcatgcgttaccaaatatttggcagtaccagcaagttaatgaattaaaatattaaataatatgtcatggaacaaagcctgttttgaacgtggaactgctgagtgcgagcagcgctcgagtttattcgcataaaaaaaaaaaaaaaaaagcggggagtgctcaaatagaaataaaaaccaaaccataaaaaaacaaaaaaataaaaaaaaaaacaaaaaaaaaaaaaaaaaaaaagggcaaccaatataaaataatgcaaactaacaatacgggacaatccaacatatggatcttctttttggaggacctaaatttaaatgaaaggccctcattataaaataaaa

SEQ ID NO: 156205 - DNA, 357 bp, Zea mays
  Clone ID: MRT4577_74040C.1
cttagggtaacctcgacctcggtgctacaacgttgttcatgctgttttttggctattgacctgggcagaaaacaatggtgaggtctgtatccattatgcttttgagcttaaatgcgaaggagtatgatgctaaagttcagacgcactatggttttacaaacaccgtagctgtattatcttgattttgatggtggattcatgttttgaccatcggagagttctgagagcggctatatttacagtcttcggaaaaggggggcttgatgcactgagtgtgccgggctgagttcaatgtttatgtattagcaaatgtgctggcgtgattttgacagggggcgaagcgagtggcattgttag

SEQ ID NO: 156206 - DNA, 394 bp, Zea mays
  Clone ID: MRT4577_74041C.1
gcggccagttaaaagctccaacagtacaagcccgaagctgtagacatcgctctttgtgctataccttcttctgaatgcgaactcaggtgctagatgttccctgacagaatagtactcggcccaattatgaacccggcgatgggcatcatgtattgaaacaccaatgtcacctatttttgcaacatcgttgtcaaagagaagtatgttactggacttgatgttgttgtggatgatacgaggatcaaccttctcatggaggaactcgtgttcttgcttatgagtacgccccaaggggctccttgcatgatattcttcatggtgaaatggtcatcaagggagcctgaccagtgtcacctatatcgtttatacggcgtgtgaagattgcccttcaagc

SEQ ID NO: 156207 - DNA, 617 bp, Zea mays
  Clone ID: MRT4577_74042C.1
gcgatttgttctgttgttcggtccccaatcttcgcctccgctccgcccgccccgacccagatcaggagctgagagatggacgccaacaggcgccaaggtgggattcagcagttgctggctgcggagcaggaggctcagcaaattgtgaatgcggctagagctgagcagtggtgactctggtgcgaacgtcaagcgtctcgaggaagagacaacggcgaaaatcgaacagctcaaccagcaggctgcaagcatctccccagatgtcattcagatgcttctgaggcatgtcaccaccgtgaagaactgagaagtgctgctcccaaactatgctcatcggtctatttatttttgtcagagcaggtgaggaataataatatggcccttgtaccagtaattctttttttaactacggaataagccgcagcagctttagcggcaaccgtgactgttactaccagaacttgccattatttggtataatcggcaaattaaataatattgttttatattggatttttgaacaaacttttttttgctgattccctacctggtgtttctgtttcatttcttgtatgagatctgcaaattcatcatggagtgaaagccgctcgacatgg

SEQ ID NO: 156208 - DNA, 1074 bp, Zea mays
  Clone ID: MRT4577_74043C.1
ctcggccggggcccgctcattgcttgcctccagtctccagagaacgcgatttgttctgttgttcggtccccaatcttcgcctccgctccgcccgccccgacccagatcaggtaaccccgtgccgagattcctgcgtctcttctctcctcttcgtcgcggatcactcgccgcggagctgggacactttccgtccacgcggatcgctggtcctgcgccgtgcggtcggttcgctgacatgatccctggatcccaaatctttctcgccgagctactgtgatgcgtgttattgaaatacgtcgcggcggatttgttggtgcctctgccgcgtgccggaatatctggataacggcatggaagtacacagctggcattgtgtgtcgatttatgtttacacgccttttttttttgatctgaaacagttgaggtctatctctgattctgaattatggattttgcccaggagctgagagatggacgccaacaggcgccaaggtgggattcagcagttgctggctgcggagcaggaggctcagcaaattgtgaatgcggctagagctgctaagtcagcaaggcttaggcaagcgaaagaggaggcagagagggaaatagccgaataccgtgcccagatggaggctgagttccagaggaaggtcgcagagagcagtggtgactctggtgcgaacgtcaagcgtctcgaggaagagacaacggcgaaaatcgaacagctcaaccagcaggctgcaagcatctccccagatgtcattcagatgcttctgaggcatgtcaccaccgtgaagaactgagaagtgctgctcccaaactatgctcatcggtctatttatttttgtcagagcaggtgaggaataataatatggcccttgtaccagtaattctttttttaactacggaataagccgcagcagctttagcggcaaccgtgactgttactaccagaacttgccattatttggtataatcggcaaattaaataatattgttttatattggatttttgaacaaaaaaaaaaaaaaaaaaaaaaaaaaaaaaaaaaaaaaaaaaaaaaaaaaaaaaaa

SEQ ID NO: 156209 - DNA, 231 bp, Zea mays
  Clone ID: MRT4577_74044C.1
acgcggccgatcggcatgccgcttgccaagcaccattcctatttctctttttgattcccagcctacccccgcgctacgcgacctaccatttcccgcccctctttcctactacaataaaactatcaaaaattcccgaacagagttcacccccgcttctcataaacccaattcccgtttctgatcctcaccttaacccctcgccttccctttcccacctctctttccattttt

SEQ ID NO: 156210 - DNA, 432 bp, Zea mays
  Clone ID: MRT4577_74045C.1
tttttctgttttttttttttttctcctttttcctttttcctctttttttttcctctttcttttctcttttaatcgcaatcattattaaaaaagacggcacatcacgactttgatttgctcgtcaaggcattatcacaagagccaacatatcaccggccaccaggaacttcatactctatttggcactacaggaacgggccgaaaaaaaaaagggcaaccgtatccaaagggtcccacgctgggtgggacttaagctttgcgcacaaaacttccatcgaaaacagttgctgggttcaagacacggcggcttctcggtgtgctcttccgcggccaaaagcttacaccataaatttctgacggtacagaatttacgggctgcccctctcattgattcaaggattcacggccaacgggcacttttttatagggttt

SEQ ID NO: 156211 - DNA, 716 bp, Zea mays
  Clone ID: MRT4577_74046C.1
cattgggtacctcgaggccggccgggatcttctatggaatggcaggggtctgcactcacgccaggctggcggcgatggctgcgctcccttgcgcgcgcctggccagtggcggcggcggcaatgcctgctcgcgcgcgccaaaacggcggtggcggccgtgccttgccttcttgcgcacgcctggccggtggcggcggcggcactgcctgcttgctcgcgccaggcggctggcggcggcggggtccagcgccagcgcgccctcgcgacgggttgctgtgcccaagcgccctcgcaacagtaaaaaaacagtgggacggcggcggcgcgccttcgggctggggttgtgaggttgcgcccgcgcaccttcggggcggcgaggccagggaaagccgcgttcgtgtgccggcacggcgtggtggcgactgctcgcgcgcctgcggactgtggcggtgcagaccaacgattctagtttcgtcttcaaggctgagcaggcagtggctatgctagcgcgccttctaagcggcagcgcagcacccgagcgccatagtttcagcgcggttgcgcgtgagctaggggcagcagtgttcttcttctgactttttttttcttgttgtgaggtttctttcagatacttcttgctgaggaaggaaatgggttcaaagaaaaaaaatacaagaactaactttcaaactccaaaaaaaaaaaaaaaagcggcc

SEQ ID NO: 156212 - DNA, 427 bp, Zea mays
  Clone ID: MRT4577_74047C.1
cccacgcgtccgcggacgcgtggggaaaaatccaagaatcagactgagatattgctagaactttctgcttcacaagccgaacaagagtcgttgagacaagaaattgaagaattgaaattgtctttgaaggtggctactgaacgacaaatagttggtggaatttccaaatctggtgatgcaatagatgtccaatttgagctaaaagatgaggtacagtttttgagggaatcaaatgaaaacttaacaatgcaactgaagaagagtcaagatgcaaatatagagcttgtttctattcttcaggaactggaagaaacaatagaggcacaaagaacaacaatctccaatttcactcaaatgagtaatatgattgatcaagatatacccacgaatgcattatcagcgcaagaggatgcagagtgggaaagaa

SEQ ID NO: 156213 - DNA, 164 bp, Zea mays
  Clone ID: MRT4577_74048C.1
cccacgcgtccgcggacgcgtggggtttttccctgacgcatacttggctgatacctttgtgagtacatgactaccaggcgagtattggcaaagaaaaatgcttctgttcgtgatgcccagggtacagtgtaatgttcacgaactgcggctgtgcgttgtgttaa

SEQ ID NO: 156214 - DNA, 131 bp, Zea mays
  unsure (1)..(131): unsure at all n locations
  Clone ID: MRT4577_74049C.1
gactacttcacctgtcaccgtttttattatagaaaattaggtttccttcatcaagctttggtatccattagtaaagcagtatatgtatggaaacctaattttctataataaaaacggngactacttcacct

SEQ ID NO: 156215 - DNA, 779 bp, Zea mays
  unsure (1)..(779): unsure at all n locations
  Clone ID: MRT4577_7404C.1
cctgccgggaggtcgcccatattctcctctcgggcgtctgctgtctttcgccttgcacaacaaaccatcatgtcgaccgaccactcgaaagggatggaagagggcaaggccccgaatgacgttcaccaggttgattcgcccgccgacagcttcagtcctaggacggaagatgtgctgccagcagagaaggagccattcggcaagcgtttcatgcggacactcaagacgcccgggtccgccctccagatcgttatagctgcggcgattgccatcgccatcggcatggcagtcaccgcaacaacatccaacattcccgaggctgcgccggtcattctggagatccctggacagctatggctacgtgctttgagggctacagtgctgcctcttatcatcaccgccatcattttggctgtgcaaaacctcaaggagatggcgaagggcggtgctaagctggccaaattcaccgtgctctggtacgtctccacgaccatcatcgccgtcattcacagcatgatcctggtcgacctggtctggaagaatcagatgcaagttgtctctcagggcgagctccaagagggcatcgaagaggcacagtccatccaggaggagaaccccaacaacgctccccnacgacatcgtggtgtctgtcgccgagtcctttatcccctcgaacgtcttcgccgctctcgccgaagaccagctcctcggcgtattggttgcgtncatcgtcgtgggagcacttatcaagggcccggattcctcgctcctccgtgcga

SEQ ID NO: 156216 - DNA, 196 bp, Zea mays
  Clone ID: MRT4577_74050C.1
gccggatacaggttggggttcgccgcggcttttaacgttttctacccgacccctggggtccatcgatggccgggtttttccggccccggatggctttggaccgggtttccaagcaatcaggaacgttcctataaaggccaaggatcctcctgggagatcccagattatttaaaagctacttctatgcttttgaaaa

SEQ ID NO: 156217 - DNA, 280 bp, Zea mays
  Clone ID: MRT4577_74052C.1
ccaacaccacgcctttgtccatcgtgcgctacgccgtgatccggagcacgatgaaggcgtacggcacattgcaacagatgcggtagcatggccacccaaaacgtgatccactagacctactaccaaggcatgaccgtcatgttcggctagtgagagttcgaccccattgctctggcagagccgtcgtgccccgtgcacctctggcatggcgactaggacgggctcactcctgctgtgcttgatatgtacctagcacgaagatcggatggactactaccat

SEQ ID NO: 156218 - DNA, 907 bp, Zea mays
  Clone ID: MRT4577_74053C.1
gggttttgattctgcgtcgttcccatcaaaatctgcacggcgggattctgtctcgtgttgcgccagtgattctcgtgcagagtctactccgcggctccgcgcgggcgcacgcagatgggcatcagcccctccaagcgcgtggacgctgcgctgcgccgcgcgccgttgttcgccgccgcctgcgacgccgccttcgaccggtgcctcgccgacgcgcagcgccgcttcccgggcgtccgccggtaccagctcgccgacgccgccgcacaccttcactcggagctcagcgcgtccgtcccgctggtccggcgctgggtgccctcgccgccgccccgcgtccgagtcgacgccgcgctccgcgccgctgggctagaggacgaggcagagctctcgcgactccagttccgggagtttgccgtcgagctgttcagggaggccgtgctggccggagctgcggacctcctccgcgcccccgcagccgcggccgggatcgtcgggataggcatggtggctcgagccgctcccccggtggtcgggaggatcgtcgccgtctgcgccgctagcgtggccaccgcagtttacctcagcctgggctagggtttcccccccaaattctagtgatgattagagaacctatacaaaccacttcccacagctctgctgtgttacggttgaacctggattcaacggcagttgttgcagtaatgcattttatgatcggattgagctcaaatgccattgaatcagctgtgcaatgtttcactgtcaaatcgcattcctgaaagaactaaaggatttgctgctgcatgagatatttgtatagtttatatttgatccataaacttactacattttacccttttttctctgaattgattgtgctaaaaaaaaaaaaaaaaaagcggcc

SEQ ID NO: 156219 - DNA, 389 bp, Zea mays
  Clone ID: MRT4577_74054C.1
attcggctcgaggccaccatcacggcccttgttggggctgttcccacgacgcaccagggggggcgactgggatttcttcgcagtattctgggtcacccgataagaaggctatcacttgatgtaggactggtagctacagagaggaatgaccaagccaactgtagtcatgtgttctattactgggtatacaatatagtagttgcagtggccgttccgtaaaaaaacggataaagacctgggcggtgagtatctgtggacttggacgatggctcaaatcgactgacccattcaatgagaatggcaaccaaatatgctttgtgcttgaaacctgagatggggctagtcatgtgcgaatttttacagctcatgtgatgtggtgatgcctgaca

SEQ ID NO: 156220 - DNA, 332 bp, Zea mays
  Clone ID: MRT4577_74055C.1
cggacgcgtgggtttacccaagcgtccacaacggggtggtaacgacagcagaacgagaagggaagactcaaacaatggatatccgagagagaagtgtggtaagcagcaataaagaataaggcgagacgaaagccattcacatggacgcaacgatggaactaatgatgcggatgaccgctcggtgcgcgaggacaaatatcaaagcgctggcataaagtaaaccagtatatataatgcaatttaaaaagtaggtcgacctaccactcctagaatgcatgaataaggaaaagctgacagaatacattgaatgcagaaataaccgtgatgctgaa

SEQ ID NO: 156221 - DNA, 548 bp, Zea mays
  Clone ID: MRT4577_74056C.1
cctcgaggccggccgggaaaccgagcctgtccgcaatagcactgggcgccgccggcacctggccggaggccgtgatccagtgcctcctcttcctcctcgccgcctcgaccaggccgctgtcgatctcgcggaggccgtccgcctgagtcccgagaatgcccgcgcccatgcccttctgggcgagtgctacgagaagaaggggctcgccgctgaagctcgggaagccttcaagaccgctgcatccatcgatccaaagcttggtgttgcgcttgacgggctccgtcggttagacggaggcaacgaaggagacgaaaatgactgatgaacctgttgctgatgagcattttacatctgttgtatatttgtggccgaatgcagtcatgcactaccttctggttcaaattggtaaaagtggtttgttatgtggtctttctgtaattgcttaacttaaagatgccactaaacatggtttactgttgtagattaccacattttcaatcgagcaatagtatgacttcgttgcgaaaaaaaaaaaaaaaaaagcggcc

SEQ ID NO: 156222 - DNA, 986 bp, Zea mays
  Clone ID: MRT4577_74057C.1
gggccggccgggctactactttgcctagtactgcctcacgcctacaactacgaccagtccatccaagccgcaccaagaccgagccatgtccgcaatagcactgggcgccgccggcacctggccggaggccgtgatccagtgcctcctcttcctcctcgccgctggcatgctcctcgcgctccactccctcccccgccgcgccgcccttcggctgcgccgctccggcgccgccggcggctcctacgcggcccagtcgcgccggcacttcgctcagggtgcccagcttctcgcccgcgcgcgcgctacggcccctaagcccccgggcccgctcgcccgcgcggccgtcgccgaggctgaccgcgccatcgctctcgacccccgcgacgccgccccgctcatcctcaaggccctcgccctcgacctccagggccaccgcctccctgcgctgcgcgccctcgacggcgccctcgcgccgccgctcgcccgctcactcgagccgcgcgagcgaggggacgcgttggccaagcgcgccgagatcgcgctcgcactccaccgccgccgccgcctcgaccaggccgctgtcgatctcgcggaggccgtccgcctgagtcccgagaatgcccgcgcccatgcccttctgggcgagtgctacgagaagaaggggctcgccgctgaagctcgggaagccttcaagaccgctgcatccatcgatccaaagcttggtgttgcgcttgacgggctccgtcggttagacggaggcaacgaaggagacgaaaatgactgatgaacctgttgctgatgagcattttacatctgttgtatatttgtggccgaatgcagtcatgcactaccttctggttcaaattggtaaaagtggtttgttatgtggtctttctgtaattgcttaacttaaagatgccactaaacatggtttactgttgtagattaccacattttcaatcgagcaatagtatgacttcgttgtt

SEQ ID NO: 156223 - DNA, 512 bp, Zea mays
  Clone ID: MRT4577_74058C.1
tttttttttttttttttttctagataaatgccataaatatcataaatgtacttattacatagaggaagtcttacaaaataaatgataaatataaaatgaactaaatcttatttccctcgccacaaagctgactgggagacgccaccaagattaagtcgaactcctcgttgggcggctcctcttgaaccacctgttctttttcttcaacaagctcctgctcagcagtctctactagctgaacctctggatcctcagtggctggctcgtcggcgcgttcgcggtgtactgctcaagccatagagaggatgcggtccgcggcggaacgatcgcgacggtgagaaattctcggggcgcagacgagcaattccgagcggcgcggcagcgatcaccacccaacaagacccgtgaagccctagtgcgccactgctcggcaccggtcgtaagcacggtgaagttcacccgcggcggcgcgggtcgactagatgcggattcgccgctttccctctccgtca

SEQ ID NO: 156224 - DNA, 799 bp, Zea mays
  Clone ID: MRT4577_74059C.1
ggttgctgctgctcccctcgccactaaagctaagactgccaccaaggaggttgctaaccctctcttcgaaaagcgtcctcgcaactttgccattggtaacgacgtccagcccaagcgtgacttgactcgctacgttaagtggcctttctatgtccgtctccagcgccagcgtgccatcctcaagaagcgcttgaaggtccctcccgccgtccaccagttcacccgtaccctcgacaagaatactgccacccaggcccttcgcctattgagcaagtaccagcctgagtctaaggttgagaagaaggctcgtcttgccgccatggctgctgccaaggctgagggcaagcaggttgagacctccaagcccttcaatgtcaagtatggtcttaaccatatcactgctttgattgaggccaagaaggctcagcttgtccttattgctcatgatgttgaccccattgagttggttgtctggctccccgctctctgccgcaagatgggcgtcccatatgccatcatcaagagcaaggcccgcctcggtgccctcgtccacaagaagactgccaccgccgttgccctcactgaggtcaagcccgagcacaagcaggagtttgccagcctctgccaggccatcaaggccaacttcaacgacaagttcgacgaaacccgcaagcactggggtggcggtatcatgggcgccaagtcccaggccaaaatggctcgccgtgctgccattgccaacaaggatgccgagctccgtcagtaattcactccctttataatacagatcattatgcat

SEQ ID NO: 156225 - DNA, 337 bp, Zea mays
  unsure (1)..(337): unsure at all n locations
  Clone ID: MRT4577_7405C.1
atagcaatctcgagaacgaggcctaagctttttttttttcttttttttttttctgcttcaaacataaactgttattatcagaaccgacacattataacaaatctatagagggagcccccaagcctgggtggcacaactaacactgttggcgttgtaaaagcacgctgggcgtaaggctacaaccgttttacaactgaaacggttgcagccattgaaccaacttgctttgacaaacgcaacaactgtggaccaacaaacaatgattggggggtcacaccatttagatggcttaagagttacnnntcattctgcaagtaattagctggagggttcaatg

SEQ ID NO: 156226 - DNA, 605 bp, Zea mays
  Clone ID: MRT4577_74060C.1
ggaattcggcacgagctcatccccacaatgccacgcgtccggttcctgcccttgccacagcccggccccggcggcaccgacgacgccgatcccgaccatcgcgacctcgtggacctcgtcgacgtcaagctcgggcacgagtacgagctcgtcgtcaccacctactcaggtctgtaccgctaccgcgtgggcgacgtgctgcgcgtggccgggttcaagaaccaggcgcccatgttcaagttcctgcggcggaagaacgtggtgctgagcatcgactccgacaagaccgacgaggcggagcttcacgcggcggtgagcggcgcggtgcagcacctggcgccgttcggcgcgtcgctggtggagtacacgagctacgcggacgcggggaccatcccgggccactacgtgctgttctgggagctgcggctccgcgcgggggacgtgccggtgccggtgccggcgtcggtgttcgaggactgctgcctggccgtggaggaggccctgaacagcgtgtaccggcagggccgcgccgccgaccgctccatcgggccgctggagatccgggtggtgtcggacggcacgttcgacaggctcatggactacgc

SEQ ID NO: 156227 - DNA, 575 bp, Zea mays
  Clone ID: MRT4577_74061C.1
aattcggcacgaggacacagcactcgaataccccgaatgaacaaccataggtcctgctttacacgacgccgtgcctgacaacgccaaaccttggcctgaacaccagtcacgcactgcctacgactgctcaacacgctgaaattgactacaggacagccgaccgccataaagctacgcagtcagcaccaaacatctagtgcttttgctatatctaatcaccccctctcgcatgatggatcgccaccaccagctaacaatattactcttgcgaagacgccaaggcaaactggctgtgacactaatgagagggcaatgaggtatgaataaactcctaactcttgtgctgaagctgccaaagaatatgggactatctgtcaaagtgccgaacaggcacacaaacattactgaaatcaacattgacattaaagctgtacctagctctacatcccattctacctgatacgacagacatcctcctgtcagatcttgctactactactacgatataatgccctactgctgaagagcagaatcctgcccattgattgaatgctcatcaaagtacaactggcgac

SEQ ID NO: 156228 - DNA, 400 bp, Zea mays
  Clone ID: MRT4577_74062C.1
acgtaagctcggaattcggctcgagcacacatattgacgatttgtcaatgaacgatgctgatcttatttgagcagcatgaggatcgggaggggagcttattgtgtaggctggaggcccttggcacgagtgtggctgtggactgcagcatatgggcttatgcgatgggagtggagcagagattattttcgttattgccaaggcatgaacaggatatatttcagctggctgcagcttatgtgacactcagttgttgcgtttgtgcctgttatactaacacctgtgttgatggcttttttagagggacactgaacagccgaatgatttccttgcggaatctggcattcccgtcctgatctgaattgctgctcggccattatcactattattacaactaccatc

SEQ ID NO: 156229 - DNA, 271 bp, Zea mays
  Clone ID: MRT4577_74063C.1
cgcgagctcaccgtgtggtcccggcaaggcaaggcgggcaagacgcacaagttctctgccggaacctacccgcgcctggaggagtaccgccggggcatcttaggagactggtccaacgctatctccgcgctctactgcaggtgcagctgatcattgctggtctctcatctgcagcttccacagagtgccaagcccctcactcagcccatccctgggctctgctccggggccccaagaaccaggaggaggagcgttctgcctgccccctccc

SEQ ID NO: 156230 - DNA, 708 bp, Zea mays
  Clone ID: MRT4577_74064C.1
tgccaatgcgcaagcctttatttctcgcactgcacctgcacgcaacagagacgtactcattcaggcgatcgaatccatggagctcgtgctcactacacctgatctcccaaccccgctgctgctctccaccttaacgatagtgtccgtggtcgtatgctatgtcctcttctggaagcagcaggcggcggcgaggcgagcgccgctgccgcccgggccgaggggctggcccgtgctgggcaacctaccgcagctgggcgggaagactcaccagacgctgcacgagatgaccaaggtgtacggcccgctgctgcggctgcggttcggcagctccaccgtggtggtggccgggtcggcggccgtggcgcagcagttcctccgcgcccacgacgccaacttcagcagccgcccgcccaactccggcggcgagctcatggcgtacaactaccaggacgtggtgttcgcgccctacgggccccggtggcgcgcgatgcgcaaggtgtgcgccgtgaacctcttctccgcgcgcgcgctcgacgacgtccgcggcgtccgggagcgcgaggcggcgctcatggtgaggtcgctcgcggagcaggcccacggcggcctcgacgcgccgccggcggcggtgccggttggcaaggccatcaacgtgtgcacgacgaacgcgctctcgcgggcggccggttgggcggcgggtgttcgctg

SEQ ID NO: 156231 - DNA, 304 bp, Zea mays
  Clone ID: MRT4577_74065C.1
atgttttctttcattagatatccttgggagtactaaatggagggtgaatcgaaaagttcatgatgttgttgagactatctggagtcaaggtggaggcattgcacggctggtggatatgactcctttgcctgaacgaccagaatcagaggaccctgatgaaatgcagaaatggaagtaccaacataaagaaggcaaagaaaactaaccgtgagctgcatactgagagatgtgacactgagctcaaactcttggctgctcgtaaaatgagagaggaggatggattttattaccctcacaatttgga

SEQ ID NO: 156232 - DNA, 693 bp, Zea mays
  unsure (1)..(693): unsure at all n locations
  Clone ID: MRT4577_74066C.1
cgggatgtctataagctccataattaattagttgcctgttctgtctgatcgcgacgccgataccatgagctctgcaggaggagacctatgaccaccctgaagtcttcgcccggactacgcgcgggtatctttcgtggaagaagccaatacgggtgatgctgtgcgcaaagccccactccgacatcggccggattgcctcctcctctccgcggagcatgtgtttccgcctataccgagttcgaatcttctttattaccgctccgcattcacactacatggtgtgacagtcaggtctagaaaatgtataactcggacatgccctgcgagattggacaccgccgatatagtgctaggtgatgaagctgtcgttccgatatatgtgcataacatgaaatatatggtaatttngcgtaaagtgcagtgaatagacatgtatcataacggacatcgttatcgcggatcgtatatatctatatgggttcagccgtctgctgaagaactaaattatgaacagccacttaggttgctcgactatccggcttttgataccattgatgatgcatcctattattcctgccataatcatgatgcttagatgatgcctgcaggagattgatatatgctcatgatctgcaccctctgacgagccggttattgatggagtaaaacctagcgttgcctaatgaaagagat

SEQ ID NO: 156233 - DNA, 227 bp, Zea mays
  Clone ID: MRT4577_74067C.1
cccacgcgtccgctatcacacaaccgtactttccgtttacatactaaggaccaaactcaccgttatggtcaaccttactcgagacatccttattaacaataatttcaactacatcttcaatgcccacatgattcacactaacatgcttatgaacaagcccttactacacttgatcatcacaattctcatattcatcaacttacatgcatacataagctatattgaca

SEQ ID NO: 156234 - DNA, 1452 bp, Zea mays
  unsure (1)..(1452): unsure at all n locations
  Clone ID: MRT4577_74068C.1
gcagactatagggtaagtataaaaaatgtccctactacatacacatactgcttgcgctatagaaaatcttaatttcgataacattcataatacaaaatctgaatgtgtcacatgcttcgtatagttaagtacttcagtgtggaaatcaatttcaccacaaacatatcaatcagtaaactctctgttaagtcatctggcagtgtgtcactttaccttcaatcagccttcgattgtttcaatgacaattggggaaggttatacagaatcaggcccatcagcaatatcacggcaccaatgatgaaagacgtgcttaattccgtgccatgagggatgtagggcaaaggaagtgaaagaatatagatcgatattggcactgctgatgttgctgtaagtgaagccacaatggcagatgacatcttcaccaaattgaggagagagacattgaatgccatattcaccactataaacagcaaaggcaggaatggagctcctccgcagtcgattggactttctgcgacatttaagaagcactcagcaccaccatttaaataagcaggaagctcagcaaacttaattcccctcaaattagaaaggaatggaagaagaagaaagacaaaaacagcctgaaatccagatccaaatgaattgaccacaaatatgtctggccgcttccccttaagacgttttgcaccatcaatgaaaacagcttccttcagaatagatgcaccagcgtgaaatgctgatgaagcgatcatgagtgctggccaaattaactttacatctgaaagaagctggccatcatccgctccacttgcaacagcaagaatcacaccaggaactactaggaagcaaccaatgacttgtctggccgaatatgtcctccctaaaagcagggcagagaagataagctgccacaccaagaatgactgggacagtataggaatagcaggccctggtagcatagctccagcagacatgccagcagcgactccaagtgcctccagcaaaccgatagcgacgaaccggtgcttggggagcgccagcatgtctctagtcaccaacccagtgcggtacctcgtgtagagcatcgagaagtacacggcaacgtacccgaaggtggtgagctgggcgaggaagaaagggtacgccttgagaggcacaagcgcgagcttgtagagcacgcggttggcgacagccagcgccaccacggcagccgacgccgcggcggtgatcaacggcgaggagctcatcgcacacgacagggttacaccgccaagctattcagttgatggacggagcgttgggctggatggggcaaggtctcgagacgagggaggacactgaaatggaattgctggctcgcaaccgagcatggaaaaccatgggaatggcggcggcggcgttccgcgtggattgtttcatttcctttgtgnccgtggacttcgttcccgg

SEQ ID NO: 156235 - DNA, 674 bp, Zea mays
  unsure (1)..(674): unsure at all n locations
  Clone ID: MRT4577_74069C.1
aacgcaacgccgggcgccacccgccaccgcttccgtgctcccgtaggccgcgcacgcatacgattcttgctccatttggccggcctcctcctcctccgtctccgcgtcttaactaccggcttcactctctctctctctctcgctctcactctgtctctctctgctcctctctccctctcccgcgtctcgctttccgctccctgactgacacaacaaaatccaaaggtagatccgagcaagaatccatggaagccgagtcgagaaagctcctgctcctcgcgcccatcctgctctgctgcttcatggccagatcggaggcgcagtcgcagcacatcggcgtcaactacggcgaggtggcggacaacctgccgccgccggacgcgacggcgcggctgctcaagtccaccgccatcaccaagctccgcctctacggcgtcgacgcgggcgtcatccgcgcgctggccggcaccggcgtctccctcgtgctcggcgtggccaacggcgacatccccgccatcgccgccgaccccaacgccgccgccggctggctcgccgccaacgtgctgcccttcctcccggnctcggccatctccgtcgtccccgtcggnaacgaggtgctcgaagtccggggacgacgcgctcgccgccgcgctgctcccggacatgaaaaacct

SEQ ID NO: 156236 - DNA, 198 bp, Zea mays
  unsure (1)..(198): unsure at all n locations
  Clone ID: MRT4577_7406C.1
cgcaggcatggaacaagcgacatgggcgtctactcctttgtgtgccgcaacaacggcgtcgangggacctccaagcagcactccggcgagatcgaggcttccgccgctaccccatacgagctgcagcgccgcctcgtcgctgccgcctccgcggccgactctgcctactgcgtccagtcgtcctatctcatggtcacc

SEQ ID NO: 156237 - DNA, 743 bp, Zea mays
  Clone ID: MRT4577_74070C.1
tggcggcgctcaggcggcgggcggaactttcttctttattcctttacagaccttgctacattttcctacaccctttttttgcggctagtagctggatctcagggtagtctttgcagtggataccggacttttctgcggtacttggtagcagctttgtgtagaaaacctcctaacggcgtgtacgactttgaacgacaaacataatggccctctcatcgaatggacgaggaaacggaccaaacgccactgttgctcaacgcctccaaaaggagctcatggacatcatgaccaagcccacacccggcatcacagccttccccgacgacgaaaacatgacaaagtggaccgccaccatcgacggccccgcagacacaccctacgccaacctcgtcttcaaactgtcaatggaattcgcaaacaactatccctacagcccaccaaccgtgctctacaaaacccccatctaccaccccaacgtcgacttctcaggccgcatctgcctcgacatcctcaaggacaaatggagcgcaatctacaacatcacaaccgtgctattgagtctgcagagtttgctgggcaaaccgaacaactcaagccctttaaacggccaggccgctgaactctgggacaaggaccctgcagagtacaagcgtcttgtattggctcgccacaaagcacccgaggaactagacgcgtgatggatttgtatatgttacatagaatcgcgggctattcctttttcg

SEQ ID NO: 156238 - DNA, 281 bp, Zea mays
  Clone ID: MRT4577_74071C.1
ttgtacgcgtgtgcccacacgtgctccctcgcaaaccaacaacagcaaggctcaaggtgtcactagcccattacagaattcagaggtgcgtgctctgtatgttgcatatagcataacacagggcgaccgtatgagctcgcaatgacgatggctctgctgtagttcagaggacaacggatacaactttgcgagggctgctggggaatcatacctaggcactaggttggagtattacctgtaaaaagtacaagattcaaacacgtagtcattataagcactct

SEQ ID NO: 156239 - DNA, 1884 bp, Zea mays
  Clone ID: MRT4577_74072C.1
ccggccggggctctcggccaaccaaacgtcgtgggaccgaacatgacaacgccctctaccgcaccagcgccattggcatctctcctcctccgcgtctccgcggcggctgttccagtggctcgacgacgtcctaagagccccgcggctgcggcggcggcacgctgggagggaggtgggggcaggaggaggtgccgggcggcggtggtggaggaagccggggtgctgctgcccaaggagggggagggggaggaggccccggacgcggcggcggggcgctacgactggagggaggagtggtacccgctgtacctggccaaggaggtgcccgacgacgcggcgctcccgctcaccgtcttcgaccgccagctcgtgctctggcgcgacgcccacggcgtgctccgctgccacgaggaccggtgccctcacaggttagcgaagctatcggaagggcagatcgtggacggcaagctggagtgcctctaccatggctggcagttcgacggcgacggcaagtgcgtcaagataccacagctgcccgagggcgccaagatcccgcgcagcgcgtgcgcgcgcaactacgaggtgcgcgactcgcagggggtggtgtgggtgtggatgtcggacgccaaccctcccgacgaggggaagctgccgtggttcgagccgtacgcgcgggcggggttcacggacctgtcgacggtgcacgagctcccctacgaccactccatcctgctggagaacctcatggaccccgcgcacgtgcccatctcccacgaccgcaccgactggacggccaagcgcgaggacgcgcagccgctcttcttcgacgtcaccgagcgcacgccccgcggcttcgcgggctactggggccgcaccggcacgccgcacctccgcaaccttctgcgcttcgaggccccctgcgtgctcaccaacacgctagagttcgccgacaaggacggcagggagcagtgcttctccgcgcacttcctctgccgccccgccgggcagggcaagtccatgctcctcgtgcgcttcggctccaccctcaggtcgccgctcgccaaggtgctcccgtcctggtacttccaccagaacgcgtgcaaggtgttcgagcaggacatggggttcctgtcgtcgcagaacgaggtgctgctccgggagaagctgcccaccagggagctctacctcaacctccgctcctccgacacctgggtcgccgagtacaggaagtggatggacagggcgggccacggcatgccctactacttcggccacagcaccctgtcgccgccgcccgtgccggccgtcgtggagcaggcgcccgcgggggccgtcgcggggatctcggcctcgttcccggccaagggcggcgtcggcatggtgcacgcgcccaacccgaccaacaggtacttccgccacgtcgtgcactgcaagagttgcagggcaaccgtcaaaaagtacacctcgttgaagaccgtgttcgcggccctcgcggcggcggccctatcggccgccatcctggcggcgaccagacagtggaaggccgtcttggtggcggcgtcggccgtgctagccgccgcatcctatgcgtgtgacgcggtgctttctttgatcaccaccaacttcatcaggacacacaggagactgtaattaatgtggtactggccattgtatatttaggtaatggccggcggggagcgttctctgtacatttgtatcaccgtagctgctggcctgcggctgttgtattttgtatatttgcagtaacgttttgcatgtcagcagcaaaaaaaaaaattgattaaaaaaacagaaaaaaaaaaaaaaaaaaaaaaaaaaaagaaaaaaaaaaaaaaaaaagcggccatttacaacgtgtgcaat

SEQ ID NO: 156240 - DNA, 258 bp, Zea mays
  unsure (1)..(258): unsure at all n locations
  Clone ID: MRT4577_74073C.1
accaggcgtacgggaagcccagtcgccgaatgccatccacaatagcctcatatcgaatctgtnagcgtttctagactgccgaggaaaaaggatccgtgcgcggctgatctcactactataagtatatcgcattccgcgagttacaaggacaactgctcgatgtccttatgtttgctgcttggtaataccgatctgttcgctataatcatcgatcagcgtgatgtgaaccactgtttacattgctcgcgtactaataaa

SEQ ID NO: 156241 - DNA, 408 bp, Zea mays
  unsure (1)..(408): unsure at all n locations
  Clone ID: MRT4577_74074C.1
tcggcgcgagggaaaacgacctattttaaccggcgatctacaagtcacaactaaaggaaggtgtcggaccaattggggggctaacgttaacaattacttttacttgattaaggattaggaggttaagcttggcttggaacttggcttaagatttttgagggggtgcgcattttcgaaacaaaaacaggaacctttatttgttaaggccctataggggaatgtgtgtgcccaaaaaattgttttgtgtttttattttcacatatcttaactatttccgatttatttatcttgtgtgcaacaagcactattctcctcttaaaaaaaaaaaaaaagaaagataaaaaaanataataattaatttaattttttttttattttnntttttttgtgtttttgtggtgttttttt

SEQ ID NO: 156242 - DNA, 371 bp, Zea mays
  Clone ID: MRT4577_74075C.1
tcctctagagcggtcgtcctttttttttttaaaaccttgttttttaatttttggaatcaagcactcggaaacattctgtatttaccttgtgtccctttacttcgcgcagatcctgctattcatgccatgcgtccgctatgtatcgttgtaacttggtgcaacatagtccgtgacaccggcggggtataaaacactggccgtcgcctgcgtacgagtccagctgcttgagcagcacggagcactcggggagcggcacctccttgaaggcacccatcgggttggcgcgagccatgccgccggagatgccaacgttaccggggagcctgacaccggcacggttccctgagctccgggacctggcctgaaacctt

SEQ ID NO: 156243 - DNA, 325 bp, Zea mays
  Clone ID: MRT4577_74076C.1
cattgggggtttttttacatttaagggggggtttaatactgacctttacaccacttgcatttatacatttaatccactcaacataccacgatattatggaaaaccgaaactctgcggttttaccactgatctaacgaaggagtcacatcaccatacctggggcgccttataattgaaacgacacttgggctcttagtgagaatacaactggaacccattcctcaaaaacccatggggggggccccacacgaaaggtaaaaaggccgcgccctaaaacacccccaaaatatttatgtcccagactaaaggtgcaaaggggggggac

SEQ ID NO: 156244 - DNA, 393 bp, Zea mays
  Clone ID: MRT4577_74077C.1
gactgactcaatgtaattggattgcggccctgtacatgccaagccccccctattgccacggggactgggggcgggcaggacttcttgttcttgggagtgtcagcagtcagcaccttggactgggcagacggcggctggcttaacacccatctcatctgaagcaggtacagcatgctcatcgaccaggctcaggcgatcgtctggcaatctggcatggcgaacttgaccggaccatgtccggtgagtcgctcgctgtcatgctgttgccccaccggcactgcctatcttccacctcaaccagcgttcacgagtactatgcaaaataccttttatgctgctaaaataacgaaatggacgtgcgtgcagacggccggattactggcgctgccgctt

SEQ ID NO: 156245 - DNA, 203 bp, Zea mays
  Clone ID: MRT4577_74078C.1
tttttgggtattttaaaaggcctaagcgaacctcccaactcataaataaaattagggacatgcttgaatacgaattcagagaccggggaagtaatcccaccaaatgttccggaccgacctggcccagtacaggctccatgagaagcgatcgtccccatggatccccaccaggcccccatgaaggtctcaaccttggtcactgc

SEQ ID NO: 156246 - DNA, 675 bp, Zea mays
  Clone ID: MRT4577_74079C.1
atgtgcctggggtggagtgcgcgctcgcttcccctaccgatacgagctcaacagacccatggattccgtgggtcgctgggattagctgccgtgatccagggcgtctggctccttgatgggctatataagtcggtcgtgacctattctccgcatcccatccaagtaccaccactgttgatcattagggcgttttgtcgcgctcgccggaatcgcgtgggcaaccgcggacctgtgcacgctgataaagcaggagtcgcagcggcgattcatccccgcctccatcgctctgcattcaaggattcagtcgagatgggtttgcgagatcacaacgaagcttcggtggacatccgagggtgtgggagcaaccagaaccatgggaaattccgcatcgcgggagcacacagccgcggagcatcgctcaccgtagctagcattcaactctacctcaagtgcggtaagaaggcctctaccgagttcgctgctatctcttctacgcatagcgctagggaatcgagaattgaatgttgtgggcactggattgggaacgcgctggctataccccgtcgtggtgtgctctacgccgcaggtgggtcagccgatggggagaagaagctgggtgggccgttggatcggcaatggatgggcgaggggtcgcggaccggtgatccatcctga

SEQ ID NO: 156247 - DNA, 698 bp, Zea mays
  Clone ID: MRT4577_7407C.1
gccggccggttcgggatagcttcgtctgtataccctatatctctatagccaacacacacacaaatactctccattccattccatctcaaaggatagaataatgggcggtctctccaccaagcttttcgtggtcctcctcctgctcgtttgttacaccggtacgccttcgccatgatatataaatatacatgcagaaagagaacattgtgtagattcatactactactgctacgacagaaccattacacatgtttgtttgcgttttgcagggacgcaaggcgggccggtgactatggtgtcggcgaggaagtgcgagtcgcagagcttccgcttcaagggaccttgctcgagggacgccaactgcgcaaacgtctgcctgaccgaaggtttcaccggcggcgtgtgcaagggcctacgccaccgctgtttctgcaccagggactgctagtactgcctcgtctcgcctcgcctcggctcgtgtcctgcgtgtgcatagccgcagcggatcagtaaaacatgcatgcatgcgttaccgaatatttggcagtaccagcaagttaatggattaaataatatgtaatggaacaaagcctgttttgaacgtggaactgctgagtgctagcagcgctcgtgtttattggcatatatgaactctatggcgcgtttggactcaaaaaaaaaaaaaaaaaaggccccta

SEQ ID NO: 156248 - DNA, 315 bp, Zea mays
  Clone ID: MRT4577_74080C.1
acaaaccttatgtactttatttaaccatgcaagaaaaaagtaaagagctcaaccaataccaaggagaatacctactgaaacaactcgttcacagcgccaaaagcacacgtagagtgcagtaattataccataggtattaccacggatgccatacacacacactaatcgtcgacggtaagtgtacctaaagggagtaatatggaaaacgaacaggggacacactcagatgtcgactgggcgtactgggacaccaggggattgatgtccaaggctcaaacattagacggcgcatatgcgtccaaatggagttggaca

SEQ ID NO: 156249 - DNA, 756 bp, Zea mays
  Clone ID: MRT4577_74081C.1
atggccggtgtgggggcaacagtgcatgctttgtctccacgtcagtcgggtactaaaacagaaaaaaagagaaaaaaggaaaacagacttggcgccaaaaccctagccgtggcccaactaaccatatcttttccccgccgcgcggcccagggcgtctggctccttgatggtctatataagtcggtcgtgacctcttctccacatcccatccaagtaccgtcactgttgatcatcagggcgttttgtcgcgctcgccggaatcgcgtgggccaccgcggacctgtgtgcgcggataaagcgggagtcgcagcggcgattcatctccgcctccatcgctctgcattcagggattcagtcgagatgggtctgcgagatcacaacgaagcttcggtggatatccgagggcgtgggagcaaccagaaccatgggaaattccgcatcgcgggagcacaccgccgcggagcatcgctcgccgtaactagcgttcaagcctgcctcaagtgcggtaagaaggcctctgccgagttcgctgccatctcttctacgcatagcgctagggaatcaagaattgaatgttgtgggcactggattgggaacgacccggcgatgccccgccgtggtgtgctctgcgccgccggtgggtcagccgatggggagaagaagctgggttggctatcgaatcggcgatggacggctaaaaatagaagcaggataccccttcgcgtaattgaatccaagccatttgtttgcaattga

SEQ ID NO: 156250 - DNA, 256 bp, Zea mays
  Clone ID: MRT4577_74082C.1
cttgaaaaaaagcgacatattttgatgtttaaaaaacaggggcctatttggataactggatgttcacatgtttgcaatggcttacttgttcataaaacatgacaaatggtccttggcaccatctgatttccattcaacatgtgaaccaaatttaactaggccttacaaatcttaggggacatgaactcctatgccaccattctttggtagtggatgttttttcctccttaaaggcctcttgtgttgagagagggtg

SEQ ID NO: 156251 - DNA, 180 bp, Zea mays
  Clone ID: MRT4577_74083C.1
ggtcacctctgtattagtccttactttaatgatgctagcgccgcgttaagtgcttagactcagcagcggggtagcatcaaagttcatgcggtaagatcgtatatgcgggtcgctaccctaggagaatggctgctgatatggctactgcatccacatcttgagatctgtaaattgctaatt

SEQ ID NO: 156252 - DNA, 278 bp, Zea mays
  Clone ID: MRT4577_74084C.1
acgcattctctgaaggcggtcgacatctctctcaagatcgacaccgagctcgctcttcaggttggaagacgtacaaatcgtgcttgactccaccgcgttacgttgtacaagcgttgcccacatatgcaagatgatagagagacggggacgggcgttgcaaaatcaacttaaataacgtaggcctagtctgactaatatagtattgaacccaatccacatgtgctgaggtggattagggtcagtactagagtatccaaacaaagccttataggtgtttg

SEQ ID NO: 156253 - DNA, 553 bp, Zea mays
  Clone ID: MRT4577_74085C.1
ttttttttttttttttcggattggattatatgtattctgataaaaaatattttcgccccttgcttgtcttcccaattaacccgtcaatccctctagtcatctaacgtagcgacaagtgaaccaattaatcatgcctgccaccccaaacgcctaataataataacaatgatgatgatgatacatttcgtgtctatacgacttcaatgtcgatgatgtttgacttgaatggccctgttagagtttcgtttgctggtgtgccctccgcgaatgatgtgtagtccacattcttcttctcctttgtccacacagcattccacatcccctttagctgcaccgtcgccccctcaaaaaccttgtccatcggaacaacaggttcctggagggtaaattcccaaattgccgctcggccaggcagaatctcaattagagcatcatcagcaggcggccagagccgtgatgcttcaatctgcatgatatcaagtggtttgctgtcgccctttggtgtgatgtagagaatgccaagagagatgcccaaggggtccaggggtgagcc

SEQ ID NO: 156254 - DNA, 618 bp, Zea mays
  unsure (1)..(618): unsure at all n locations
  Clone ID: MRT4577_74086C.1
acaacaanaccacncnccagnganagccgcgagannngaanacccancnanacaanccnacaggcnacaagaggccancacagcaagcancnnacggncgnnagcanngaccgnccaacaaccantttttttattgcaacagcgtgtgcttagtgaatctgtttctccaaagaataacagcacaacaactacaacaacggntgcttctaacaattaatcaagtggttgcagcgaaccttgctgcttaccttgaggaacaacaatggctggcatgcaatcaactggctggggtgaaccctgctgctggctgggagggacaacaggtgctaccattgaaccaactgggggggagcgctgctggcatgtggaggggggaacaggggctgccgagggcgggtcaagaagggggagacatgggcggggggggggggcagcaacaggggctgggatgggggccaaaggggggggggaacaggaacgcgnggggggacaagcaggaggggggggccggcaccgcaggggggggggagggggggggctgggggcaaggggggnagggggggngtggggcggcgggggggggggngcggcgnggggtggannggcgcgtgggggggc

SEQ ID NO: 156255 - DNA, 340 bp, Zea mays
  Clone ID: MRT4577_74087C.1
gtgtcttaaatggttgaagtgcatctagatgataatggttgaaccacgtgcagacccccgtgtgggctgttcggatgaccaagctgatagtaatagaagaactgtagcacggtagatggctccacttaggaacacctgcgcacactacacgacgaggaggtggagctatcgttgtctgaaatgatattgttgagcgcaacgcatggatgcatgatgtgctggatgtgggcgaacaatacctcagcacgataggctagtggtatgcatacaggaacaagccgttaatggaccacgtgtaactaggaactaccttacacgaactatatcaaagagtgcagcg

SEQ ID NO: 156256 - DNA, 126 bp, Zea mays
  Clone ID: MRT4577_74088C.1
ctattgtacatttttacaacagcattttcttaaacataatctgtgtttaatgattattgtccattgagcctgtactctgctttccataccaagtaaaacagcaataatctactttccacacaacag

SEQ ID NO: 156257 - DNA, 173 bp, Zea mays
  Clone ID: MRT4577_74089C.1
aattatacaccttttttggcatgtttttttttgggaggtctgggaaaggctggaacaaaaaagttggaggaacaagtatacaaaacttttttgcaacagagaacacgcggaaccgcgggacatattgtttttcaaaaccaatttcacaaatatcttttaaccaaaaatatttt

SEQ ID NO: 156258 - DNA, 810 bp, Zea mays
  unsure (1)..(810): unsure at all n locations
  Clone ID: MRT4577_7408C.1
ccaaaaaaaaaaaaaaaaaaaaaaaaaaaaaaaaaaaaaaaaaaaaaaaaaaaaaaaaaaaaaaaaaaaaaaaaaaaaaaaaaaaaaaaaaaaaaaattggtttcgttggtagggcctatatctctctgacacaaataatactctccattccattccattccattcattcctaaaggatagaataatgggcggtctctccaccaagcttttcgtggtcctcttcctgctcgtttgctacaccgggacgcaaggcgggccggtgactatggcgtcggcgaggaagtgcgagtcgcaaagcttccgcttcaagggaccttgctcgagggacgccaactgcgcaaacgtctgcctgaccgaaggtttcacgggcggcgtgtgcaagggcctacgccaccgctgcttctgcaccagggactgctagtactgcctcgcctcgccttgtgtcctgcgtgtgcatagccgcagcggatcagtaaaacatgcatgcatgcgttactgaatatttggcagtaccagcaagttaatgaattaaataatatgtaatggaacaaagcctgttttgaacgttgaactgctgagtgctagcagcgctcgtgtttattcgcgaaaaaaaaaaaaaaaaaagcggccgcttttttttttttttttttctgcagaactccttccaactgaacactcagttggaaggagttctgagaagaagaagaaaaaaactgctccgggaagaacaaggctntgcagtggcttttgctttggagagcacaggctcatcatcaagtgatggccaagtcaggggcgctacaacttgc

SEQ ID NO: 156259 - DNA, 359 bp, Zea mays
  unsure (1)..(359): unsure at all n locations
  Clone ID: MRT4577_74090C.1
gacccacacgtcaaccgcnngctatcagcttctgaacccgtcatcaggaccaacgctctcccttcgaaatgcgaacctgcgccatagcgacatctgctgcagtcacgatgtgacgagcagagataccgtggatgaagacttcagggacttcgaggctgcgtggtgatatcatgtatcttgttcatacatcatgttatcgagagtttgtttttctttctactgtcggtattcaatcaactgtggcttctgctggcactctgttcctgttaagatagcttccatctcaaaacctacatacaaatttatagacaattgttgtacctttttttagtattaaatttatttatataataaattta

SEQ ID NO: 156260 - DNA, 492 bp, Zea mays
  unsure (1)..(492): unsure at all n locations
  Clone ID: MRT4577_74091C.1
gtgggggtggttttataatacaaataatttttatgctggccatttcaacagttagtactgtatatccttcaaatgaaggactgcaaacataatttttctgacgctggactaggatgcttatatatgacccanaacaacaacattccgggggcggatctgccagggttaaatgatacaaccaaagtataggtaattttttttgtgtaacctatgaagcttggtgtattctacaaaacaattccaaccgatgtttatacagacgagcttgtagaatgccagaatttctcctcaccacactttgttatcccaacgttcataattggtacgagcaatgtccaccacgatgaagacgaatatcgtgagcatgaacgacaccttaactgcatcgctgtttgcatctggcttgtcttcatcctcttcagggtggatcaacatgttgattatcttcatagcattctcaatgaattcaattatttttggcctgggcacttt

SEQ ID NO: 156261 - DNA, 852 bp, Zea mays
  Clone ID: MRT4577_74092C.1
ccggccatcatcatcaacattcccaaggacaatgcaatgcagccagcgagaaggttgctttggccacggccaagatcttcatcgatctgggcctcaaggacgccggataccaatacatcaacattgacgattgctggtctacgagacagcgtgactcaaagggcaaccttgtacccgaccccagcaagtggccaagaggtatcaagcccgtcgtcgatgagatccataaaatgggcctgaagtttggtctctacggtgacagaggtgtcaagacttgtgccggatttcccggaagtcagggtcatgagaagcaagatgccgacttgcttgccagctggggtgtcgactactggaagtacgacaactgttacacgccatgctacaacggcaaccaagccgacatccagacatgccccatcggcaagggtcctagctccagacccggttacgaattgatgagagacatgctccgcaacacaggaaaggacatcctctactccctctgcaactggggctgggatgaggtctggacttggggtgcttccgtcggccacatgtggcgtatgagtgttgataactggggtaaatgggacgatgttgtgcgaattgccaaccaggctgcacctatcctcaagtacacccagcctggtcgttacaacgatctcgacatgatgattcttgccaatggtgctctgaaaccagctgaggagcgaactcacttcgcaatttgggccatcaccaagtcccccattattctcggcacagacatgaccaagatcaacagcgctgagatcaagctcatcaccaacaagggcctcctcgcggacaaccaagactcactgtcaaagcctg

SEQ ID NO: 156262 - DNA, 1098 bp, Zea mays
  unsure (1)..(1098): unsure at all n locations
  Clone ID: MRT4577_74093C.1
ggccgcccctttttttttttttttttgggccaaacataaatataatgcatttgtgagaccttattctctgccaaactacatgaaaattcctctgaactcatgcatctcatcggatttaagcttatattctcgtatacacagaacaaaatagttaaccggcaaagaagctgattgacaaaaggatcacagcaatataattaatagtaaagatttctgaatcccaaatggctgagatgccagaccgtcaaactgggtgccccatacttctggaattgttcttctaccaagcagccatcgaccctgcactttccagtttgagttcctgtcgtcaagtgttcaagtcaaagtagtctttgagttggttataagcatccaggagattaagcataagtatatcaaaagggaacttcttcaaaaatatatatttgaggagctgtgttgtggttgtgccaacaattatctacgcattccatccttaggagggtaaccaagttaacaagctgtgaatctacatggcccaatagtggcagcagaatcagaataaatttacacggagaaaccagggcagcatgaaaacaatcagtaaacttgctaacaagaaattacagaagggctgctgtctccaacaatggctttccctctcctcagtagtttgtgcgtgtgccactcttcggccatgccactgctccatgaattttttcacttccaacccggtgatgtttttggcatctgaaccacatatttcacagcgcctatcgcccttgatcctaaaccacgcctcggcgcattgctggtgcgcggcgccgagctcgtccttgcagccgcagcctagcagcatcacctcggaacctggcaccgctgactcatcgtcctcagggccgaggtggcagatccggcaccccagcccgggggcctccgccggaagcggctctccctcgacatcgatgacaacagcatccgtcgggaggacggtggcagggatcggcggcgaggcgccggccgccgtgggcgcggcggcgacggcgtctcgccgcatgcgccggagcgggtcaggccagcgggtgggtgcgtgccggccgcggcggtnccggacggaag

SEQ ID NO: 156263 - DNA, 799 bp, Zea mays
  Clone ID: MRT4577_74094C.1
ccaactcctacagggagatccacaagggggkgygtcgacgtggattaargaayscmatctgcggaacaaagtcctgaatgtagtggmccccaatctttattcgagcatctaatttcaaattaccgtccaacccttcaactccagtcgttatggtggacctgggactggcctgcsccttttagaggktyctgcaggaaaggatggcactaaaaagaagatggagtagaactyggtccatctttgctcttctytrgggtgtagaaatcgacggatggattttatttacagaggatgaactcaataattttgttgatcaaggcmgtaatatcytgagctcatcagtggcattctcccgacgaaggagcmgcagaagsgagtatgttcaacataagatacatcggtgaaggcagcacagttttggaatctaatamaaggaagaaggatatctctatgtatgcggtgatwgctaagggcatggcgaaagatgtccmccggactctacataccattgttcaggagcaggacacgscgtgagttcgtcagasscggaggctatagttaagaaacttcaaactgaaggamgatmcctcagagatgtctggtgattgatgatgattaattgggggmccctctgcttttccaagttttcttggttcaaaggctsyccctcccatcyagatatttatttgtttatttyctttatcacyccctcctttymgttscytattatagtttaacatgaatggtttgtcaaagttgtctttgtatgaacgaaagttataaactatcaaataaatcc

SEQ ID NO: 156264 - DNA, 556 bp, Zea mays
  Clone ID: MRT4577_74095C.1
tgcctgtggctattaaagaatatatatgtacggggtagtttatcacttttcaaagaagtaaataaagtctctccctctaagtgcatttgcgaatcatgtgcttcagatgctagtaaatgtgctttatggagatagaatctcagtttggttctatgatctataagaaggttcttcctgttcattttgcatggttttgttgttgctcaggattgatttgtgtgccttggtagccatctttgggcttgagtttaaattgacaataatatttcacaatgttttaggtttatgtacaatgcccattgtgtacatgagttcatatttttctattgatctttgaacatttcatagtatgcatgtgactgttgcagattgatttgctgctggtaggacttttctacgagaaaattggaccatatattaatagtaggaataaaaaaataatcactatatgaatatgttaaaaatggccataagaatttgtagagccagcgacggcctatattattacttcattagtattgcttttagccaaacaagatcacgagagactagaaca

SEQ ID NO: 156265 - DNA, 335 bp, Zea mays
  Clone ID: MRT4577_74096C.1
cgggggcaatgatgctctggctcaccggcggctggttgtcagggcgtcgctcgtgacgaccgggcgccgacgcgctcgtgaaaccggtggtgatcgtgaccgtggagcaggtctccaccttcgtcttggtcgggccaataggcattcttcaagatgaggaagtcaaggacaaagctgacgctgatgatgttgcgctacatcatgccaagtgcgatgcttacaacagctacttttaaagtacatgatgctttacgagcctcgagatacaccacaggcacgttgataagcgaattgtacaacattacacctggtgctaacgcttagcttatggcacg

SEQ ID NO: 156266 - DNA, 604 bp, Zea mays
  Clone ID: MRT4577_74097C.1
tgtgcggcgctcgaggcggccgtccgaggtgctttctcggccttttggctaacatcaaatgtaataatctgttcttatcagtttaatatctgatatgtgaactatgtgttcacttcgatattaaatttattttttatgggaaagggcccaccacagtagcttgctattggggtcctcgagtgtcgctcgggcgttgcactgctgccctagcatggcgcacccccaaaaaaaaaaaaaaaaaaaaaaaaaaaaaaaaaaaaaaaaaaaaaaaaaaaaaaaaaaaaaaaaaaaaaaaaaaaaaaaaaagaccccaaaaaaaaaaaaaaaaaaccaaaaaaaaaaaaaaaaagggccccaagggccccgccccctcaaaaataaggggcccccccgggcggcaggattccaattccaggtttttcaaaaccgggacccccgggggggggcccggtaccaatttcccccaaaagggcgagatataacccgcttcccctgggccgccttttaaacacctttggccgggaaaacccttggcgtaacccacttaaacccccttcgcaaaaaccccccttttcgccgtgtggtgaaaaaggaaagaaggccc

SEQ ID NO: 156267 - DNA, 344 bp, Zea mays
  Clone ID: MRT4577_74098C.1
attagatatagggaaacagtcatgattgttcatctactaaattgtaaacatatcattataccattcgttaatagtgttctatgatgaagctgcactgttctggatttcatgattggttttgtggctttgatattaatttcttctgattgcctcttttcactataatatattggagaagaaatgttctggatggtggacaaaaaggattattggccaatagaatttttgggcttttcggttgaagatccaattggacatttgggtttcaccccagaaatttaatcctggtttatacttaaccacttgggcattttcactttggttattcattcgatgtaacatgc

SEQ ID NO: 156268 - DNA, 215 bp, Zea mays
  Clone ID: MRT4577_74099C.1
agcaaggttcaaacacttaaacttgacccagaattgcctgacagttagccacgactacatgtacatgcactgcacgaacacacagggctatcttacttcatgtagccttgacagccacaaatctaatgcgcccggaacacagtgttctacgagataggacgcgcacacctattttgcagcaccaacttgctctggtcgcaaaaggcctccatact

SEQ ID NO: 156269 - DNA, 411 bp, Zea mays
  Clone ID: MRT4577_7409C.1
aaggccaaattaccgttaacggggcgggggtttttgtttacctttccacgggccgggaaaaaaaccctttcaaaataaggtggttgccctttattcttaaaaaaaaatttatagtgatggggcgaggactaaatcccctttttaaattaaaatcggtttgactttttggggcaaaacctaacccttactcgcttacaaattaggaaccgggttcaccttcctcttactttggaggagtaggatgcccacttaaatacaaagataccctactttgttcggcagcgagaaaaaaaacattatctcaaccgcgcggggggtccgcgccttctaggatgaggagcaaaattcccctttcaaggccaaaaaaggaggcgggtaaaggggaaggggttttttttgatgaggaccgcc

SEQ ID NO: 156270 - DNA, 281 bp, Zea mays
  Clone ID: MRT4577_740C.1
cccacgcgtccggaaacaaccatgttgtgctgcgataagagcgtactggaaatgtgatgtgtaatttgcatctttttaatgtcatgtaacagtaagaccccatatgtatgactcatagttctttttttctttccctaagctaggttctaagtgaagacataccacatagacttatcaatatcgataaaaaggattagattagtataaacatatttacctatcactaaaaattgtatattgactttttagaaataatctgtgcgtattgataatgtttgctc

SEQ ID NO: 156271 - DNA, 433 bp, Zea mays
  unsure (1)..(433): unsure at all n locations
  Clone ID: MRT4577_74100C.1
ggttccgtgtccgagcccagcgtgtccgctactccgctccccctcagtcctcaggttcctcacctagcgagagagcgcgcccgggagacgtagatggcgcgttcggaggtgtaaggggcggcgggaacacccctgacaccgacagagcggacggncattgcgattcacagtgtgaagatgcggagcgtngacgagcagatcaaaaacagggtggagcgcctgttnattgaggaggaggttcgtctggagcttgcccttgagcgcccccgtctccacggtggttttggncccgntttgttttttgggaccgacggttttgttgtgttggtgcagtcaaaatttttacctttaggtcggttatatagggatgacggattattaatgacgttggtaatgttttgggatgacagttcctaattggattttgagattt

SEQ ID NO: 156272 - DNA, 517 bp, Zea mays
  unsure (1)..(517): unsure at all n locations
  Clone ID: MRT4577_74101C.1
ccggccgggcttgcccgctggacatagtatgttgtgttctcggcttctctcaagctcgaggacagacgaaagaggtcgggatagaggcggagctgcggagtacatgcacagaacagcagtagaagagggacgcatcaccgaggctccacgacaccattcggtgtggatcaacgccgagcgtaaagccgggctcgctccctgcagcaccctgntccagtatagcatccaatccatgaccaggggatgggcggacaagattgagctcgggatcagatgccgtatacggatccgccctgaatatccggaaggatctcgatgcccaaatcctctcagcgtccagaggccactggtgctttagcgtcatctgtgcgtggatacgacgctctgacagggatccgctgaatgatgtaggattcgaagattatcttacatgcctgacgaatctgacaggttccggcgacctgacatgcaccatggatatggaggctcgccttgcgttgccaaggacctatctgtc

SEQ ID NO: 156273 - DNA, 3032 bp, Zea mays
  unsure (1)..(3032): unsure at all n locations
  Clone ID: MRT4577_74102C.1
ccggggggatccacgcgnccggaagcgtcatgcatgtcaccgtgacttgcaaagcagctagcatagggaacatcgagagagagatgagggtagcgatggtgggttccggcctaagcgggctagtggcggcgcatgagctagcgagaagtggcggcgtgcgtgtcaccgtgtacgagaaggaggaccatctcggcggcgccaagaccgttgccgtggacggcggagcagaagaaggccgtgtcctcgtcgacctcggccccgtggtcttcaacccggtgacaagcccaaacttgatggaatggtttgaaaggctaggggtggagatgtgcacatcagacatgtcattctcagcaagtatgcggctaaacaaaagtagtgaaagcttcgaatggggtagccgcagtggtatgtctggtgttctggcgcagaagagcaatttgcttagccccagattctggctcgtggtccatgagatattcaagttcaagaatcacgccctcaagtacctggaggaccacagaagtggtcctaaccgcaatgaaactttggggcaattcattctatcacatagatattcgcagctcttccaggatgcctaccttattccaatgtgtgcatgcatttggcccagtccgtcacacgaaatcctgggcttccctgctctctttgttctttcatttttccgcgacaatcagctacttgagattttgagtggctcaaaatggcttacggtcaaaggtggctcggggtcctacgtgaacaagataagggaagaattggagagtaatggttgtcagatcaagattggctgtgaagtcaactctatttcaaagtcgaacgatggataccaaattttagaggttgatggttcggtggagacgtacgataggatcataataggtattaatgcacatgatgcactaaaagtattaggagctgaagcaacaaatgaggaactgaagaatctaggagctttccattttatccggagtatcgcgtacctccactctgatgaaagtctgatgccgcgtaattcctctgcatggagcgctaggaacttcttggggacaacaagcagtggtgtctgtgttacctcctggctaaatatacttgagaacattgaatctgccgggcctctacttgtgacacttaaccctcctcgtgttcccaatcatgtattgcttaaatgtcatattagccatccaattccttccattgctgctgcaaaggctaatcttcagctcaacagcattcaaggaaagaggggcatctggttctgtggctcatatcaaggctatggataccatgaggacagtgttaaggctgggaaagcagcagctttaggattgcttggaaggaaatgtgaccttttgtctaacccaaaaccgatggtctcatcgtggacagaggcgggcgcacgtcttcttgtagcaagaagcctagaccaatacataaccattggtaacttctgtatactcgaagaaggaggcactacattcagttttggtaaagcatgcgaaaaatgtcatgtaaaatctgcgatacgcgttcacgatccccagttctattggaaggctgcaacagaaggagaccttggctttgcatctgcctacatcaatggccaaatctcatttgttgatcaccgaaaaggccttgtgaaccttgtacggatcatactggctaatagaggtgagttcaagaggttgagcagcactgctagtggcaatacaaggaaagcctggtggtcgccgttgcttggaattactggagtctcatttgcaaaatactttttgcgtcatgccttgcggaagaatagtgtatccaaagctcgtaaaaatatatctgaacactacgatctgagtaatgatttcttcgctctttatctggatccatcaatgacgtactcttctggcatttttaaggtggcggaggagagcttagaaacagcccaactacgcaaacttgacagtctcattaacaaggctaaggtggagccagggcaccatgttcttgacattggttgtggttggggcactttagcaatacggttggtgaagcaaaccggttgcaagtacacaggaatcacattatctgaggagcaactgaaatacgcgaagagaaaggtgaaagaatctgggttagaggaccgcataactttgctcctttgcgattaccgtcaactaccggcaggcgataagtttgacaggattataagctgtgaaatgattgaacatgttgggcatgagtacatggatgatttcttcgggtgctgcgagtatcatttggcagagcatggcctacttgtcctccagtccatcgcgctcccagaagaattgtatgacaaaatgaggatgcggcccgagtttctcaagacatatatcttccccggtggctgcctaccttctctaggccggattgtgtctgccatgtctaatgcatcaaggctcaacattcagcaccttgagaatattggggaccactactacactaccctaatgaactggagggacaacttcgtggccaacagagaaaaagcttctgcgcttggatttgacgacaaattcatccgtacctgggagtattatttaagttacgctgcggctttgttcaaatcacgcacagctatagattaccagatagtgtttgctcggccaggcgattcaaagctaccaagctatgttgccattgcataaaataaatggataggatcgagatgatgctgtgttatgcgtgtgtgtgtgtgagagagagaaatttattcagtcatgtacgtgcatgtgtgttggagagcagcagcaggccagctgctgcatgctgtgtggcttggatagatgcatgcgtgtggtatatagtactactagaagtctgcatgcatatgtctgctagcggtgctttcatttgcactcgagtcgctccacgtaagaggtgaaataatagtggttaaggcatctgatcgagtgcttggcaaaaacatgatgttaagttgacaacttgtaataatattacttaaatatgtagagaattgttctttt

SEQ ID NO: 156274 - DNA, 614 bp, Zea mays
  unsure (1)..(614): unsure at all n locations
  Clone ID: MRT4577_74103C.1
aatataatatacataaatatcattcaatatctcataaataagcattgtcaaataactcttacataaatgtactctaaattcaaactaaaatacaatggngaaaacttgctcatcaactatttatgctaacattgagactaactaagtatatataaattcaagtctccacacttgtgcgaccacccaaatttgagttccattccatctttcatcgatggcatcatccatcgtttgatcatttcatcatcgtcgatggcatcattcaccagtatttatgtgtatcttctgctctgaatcctgagccttgaccacccgcattaacatgtcagcatgttcagctggctactgtttcggttgcagctttcttcttgggaagattgaccagcatgaaggctccaagcctcctgaggacattcctgcagatagaagaaacactgaaagtcctccaagtaagaaggaagttcaaaggtacagctatctgaatttgtcaatcaaacaatttctttaagctacttcagttttttccgaatatcaatctttatttcttattgatctagcaatgttggacacttggactcctaaagcatgtgccctaaaatgcttggaaatactga

SEQ ID NO: 156275 - DNA, 271 bp, Zea mays
  Clone ID: MRT4577_74104C.1
ggaaacgggcgaactccccacaaaaaagggaatcgccagggtgggtctaaaaatgcccatttaaattcaatggccgtttcctgaataaactaaaaccgggacaaaagcaccaattgctacttttggagtacaaaaaaacaaaagcttcctttccccccactttgtttccttttatctaaaaatacaaaaatctgggtttttttgcaaagcaaactcccatgaaactcctgttccaatgggccccaaatttaagctaaacaaagtttcaaac

SEQ ID NO: 156276 - DNA, 481 bp, Zea mays
  unsure (1)..(481): unsure at all n locations
  Clone ID: MRT4577_74105C.1
agataaatatcattcaatatctcataaataagcattgtcaaataactcttacataaatgtactctaaattcaaactaaanatacaatgggaaaacttgctcatcaactgtttgtgctaacattgagactaactaagtatatataaattcaagtctccacacttgtgcgaccacccaaatttgagttccattccatctttcatcgatggcatcatccatcgtttgatcatttcatcatcgtcgatggcatcattcaccagtatttatgtgtatcttctgctctgaatcctgagccttgaccacccgcattaacatgtcagcatgttcagctggctactgtttcggttgcagactcagctgaagacaaactagaagcatttgaagtctcaatacacctttcttcttgggaagattgaccagcatgaaggctccaagcctcctgaggacattcctgtagatagaagaaacactgaaagtctcca

SEQ ID NO: 156277 - DNA, 870 bp, Zea mays
  unsure (1)..(870): unsure at all n locations
  Clone ID: MRT4577_74106C.1
ccggccgggccgggtaaccttatattgtcaaactccaaaacctggtcacttcaaagatttggactaaacaaagaaaatctagcatctaaatgatttcgccgtccccttcctcctcctcaggtaaacctaattcccttcctctctacccatcaattcacccctaatctgaactacaggccttgtgtccagacgagccgttgctggtgcgcgcggcgcggggcgaggatggcatcccacattggatgatgcgacaggcagagcggtacatggcggagtaccaggcgtcggctaaggggaaactcacattcggccatcaggttcggggagttcctagctgcgaggttttgaggtacatcgccattgtatgttttctacaatatctttccacatggtattgatgaagacgaggatgtaattggagctctattgttgatcattttacactctcatccctctgatgaagtatgtttttgttgtcttgcaagctaatgataatggtccaaatgattactcttggaggttcttctgaactggacttgttgattacatggcccattttcagaaggtgttgttttcagtgtgaggcctacaaagaaaagttggaaaaacatttccaatatatcttgtggtgagaagctattgtgttgttgcagctacagccgaagcagtagccagctgaacatgctgacatgttattgcgggtggtcaaggctcatgattcagagcagaagatgcacataaatactggtgaatgatgccatcgacgatngatgattgatgaaacgatggatgatgtcatcgatgaaagatggaatggaaactcaaatttgggtggtcgcacaagtgtngagacataaatttatatatact

SEQ ID NO: 156278 - DNA, 513 bp, Zea mays
  Clone ID: MRT4577_74107C.1
caagatgcttggggagtggtcaggctccaagggttactgcatgtgcattaggcgaaggggacttcggatccgacgcgctacagtctccgcttgactcgcttccataggggagagaaggcgagggcccgtggcagacgagaaggggggctcgctgcagcctcagacgtaccccgaaggccttcccttagacggcgaacgcccagtccaagcgaaggcaaggacatgacttcacagaatcaagggtgcgacacacgagcggaggcctcgacaggttacggaaaaacccaggactcccccccgcagtcatctgggcccacttgtaaaccccttgcggggtaaattttgtagtgggtccaaattaccataccccgtcccctgtaatgaccccgttaaagaaatattttgggaatgtaacagtacttgggacccactacccctcccggttacctataaatacccctaccttgtacacagatgggacacacataacaagacgctacagttccctgcccc

SEQ ID NO: 156279 - DNA, 607 bp, Zea mays
  Clone ID: MRT4577_74108C.1
aataacattataattaatataatatacataaatatcattcaatatctcataaataagcattgtcaaataactcttacataaatgtactctaaattcaaactaaaatacaatgggaaaacttgctcatcaactgtttatgctaacattgagactaactaagtatatataaattcaagtctccacacttgtgcgaccacccaaatttgagttccattccatctttcatcgatggcatcatccatcgtttgatcatttcatcatcgtcgatggcatcattcaccagtatttatgtgtatcttctgctctgaatcctgagccttgaccacccgcattaacatgtcagcatgttcagctggctactgtttcggttgcagctgcaacatcacaatagccacaatagcatgtcagcatataagaaatagcatgttacggagtacggacattattctattacatatttctgttgtagctaccttctttcttactaccacagacatatgtttatagaaaacagtaagaataaattgacgattacactcagctgaagacaaactagaagcatttgaagtctcaatacacctttcttcttgggaagattgaccagatg

SEQ ID NO: 156280 - DNA, 1569 bp, Zea mays
  unsure (1)..(1569): unsure at all n locations
  Clone ID: MRT4577_74109C.1
attgggaccctcgaggccnggccgggagttcgataaaaaaaaaataaactccttccttccatccattcctccctgtctccgccctcttctgactcccgtaggccgtggtgccgccgccgactgctgggactgccctacaccaagtgcccaggtcatcttcgggccattcgccggcgacgagcaccaccaggtgtgccaggttgaccgagctatggacagcctgtggcatcttggggacgagctccgcgggcagcccaaggtggtggaggaccgccagtggtctctcatgacgtccaagctggcggagatcaccaggtccaagggcgagaggatgaacaccgtccctgacgccaagcagtgggacaagacgtcctaccagcttcacgacgacagcaggatgggccacatcggcctcatgaacctgtgatctcaagatgaacgaggctgccgccatgaagctccccttccgtggcatgccgtataacatgaaccagatgtacctcaaggggagcaatgccaattccaatgtcaatgcgttcaagatgaatgttggagtcaacaagtactccaatagtccaaacgggaaagacgccaatgggaaaaacaatggcggcaacaacaacaatgggagcgccaacggcacttctgtggctgacaagcgcttcaagacattgccgacgagtgagatgctaccgaggaatgaagtccttggtggatacatctttgtctgcaacaacgataccatgcaggaggatctcaagaggcagctttttggtttgccagcaagatatcgtgattcagtccgagcaatcactcctggcttgcctcttttcctctataactacacaacccaccagcttcatggggtatttgaggctgccagtttcggtgggtccaatatcgatcctactgcatgggaggataagaagtgtaaaggtgaatctagattcccagcgcaggtgaggatctgcattaggaagctgtgcaagccgttggaagaggattccttcaggccagttttgcaccattatgatgggccaaagttccgccttgagctctccatcgcggagacattgtcactgctagacctggtccctgaaacaagctgcggagagtgagcctgtcagtgtattgtgtctggcgtggtcaagaaccaaatcaatgttggaccgaccgactgagagtttggagtgtgtatgttttgctattactcttatctctagtagagtgtgggtatacctgggcagaatgtgtccccaaaagttgggggcctgtctgtgtactgtgtgcgatggacgccctaagtaaaaaaagggcaggtgatggtcgtgctccaggtttgtgttttgtactctgttgtaccttgaacctcctttgcgttttgccttgtgagagaatgaatgcgggggcctgtatgtaacactacgtgtaatggttaaggtgaatgtgccgtgaggccccccaaaagttggagtgtgtatttttgttgtcaccttgaaccgactttgcgtatgcttttttttagtgctgctaccttttgcgctgtgtttggcttctggtccatgtttt

SEQ ID NO: 156281 - DNA, 1383 bp, Zea mays
  Clone ID: MRT4577_7410C.1
ccgagaaaccgtgtattttcatcgagaaatgctgtttctcgaattttcagtcaaaattcaaccaatatcatcgtcttccgattacaccaaacgaaatctgattttccgcttcaaacaagcagcaagttaaattgcatgtacatatgcagccctaaattacaagattatgcaagtaaagtgagtgaagttggaatcctggaaggctccatttgcataatcagtgacggagctggggctgctgtgcttcgttctgggactacaatacaagagtaggggtcgattcaggtagtacttgtgtaaggtttccagtagcagcaaggcatttcttcagctctcaaccttgagcatagatgatatacctcagcaagtcggcatggctactactttggtgggccgacgagcggccgcttcgaaggccggcccgggcccggagaatctaagatatgtttggggtgagaatacgatcccgcgggccgggccgggatagcttcgtctatataccctatatctctagccaacacacacataatactctccattccattccattccatctcaaaggatagaataatgggcggtctctccaccaagcttttcgtggtcctcctcctgctcgtttgttacaccgggacgcaaggcgggccggtgactatggtgtcggcgaggaagtgcgagtcgcagagcttccgcttcaagggaccttgctcgagggacgccaactgcgcaaacgtctgcctgaccgaaggtttcaccggcggcgtgtgcaagggcctacgccaccgctgcttctgcaccagggactgctagtactgcctcgcctcgtgtcctgcgtgtgcatatatagccgcagcggatcagtaaaacatgcatgcatgcgttaccaaatatttggcagtaccagcaagttaatgaattaaaatattaaataatatgtcatggaacaaagcctgttttgaacgttgaactgctgagtgcgagcagcgctcgagtttattcgcatatatgaactctatggcgcgtttggagtgcgaggattttttttacctgttttcttgtgtttctcatagcaaaaaataaaataaaataaaataaaccgataaaatgctgacaaaaaacctacaaactatccctaacgctggcataatacaagagtaggggtcgattcaggtagtacttgtgtaaggtttccagtagcagcaaggcatttcttcagctctcagccttgagcatagatgatatacctcagcaagtcggcatggctactactttggtgggcgacgatcgtggtacaatatgtcatgaatattttccttgatataattggccgttttgtttagattcttcgcgacccctgaagcgaccagtccagcactcttcttaaac

SEQ ID NO: 156282 - DNA, 427 bp, Zea mays
  Clone ID: MRT4577_74110C.1
aacgaattaccggtatttttatccgtcagaggagacaggtagatgcacagccactaccgagagagagagggaggggagaaaacatagttcctgggcggtctgtctggccatgcaccgcggggtcggggcgtgccacctcccccacacgtacctcctcctctcctgaaaagatcctgggagagatgtaacgcagagggggcgaagaacaactcggagacttataatcgatgggcgggatcctctccaggggactcctgttggcttttggatatggctatcctgcctactaatgctacaagaccggtggactgaacaaaccaaacattgcgcaggtcatattttcgagccaatagtggactctaggtcccctgttgacggctttcgagagattcggaaatatgccaacatcatggataccgtcttactc

SEQ ID NO: 156283 - DNA, 568 bp, Zea mays
  Clone ID: MRT4577_74111C.1
ccaacatgcctgagaaagaaccaggagccgacgtcccggccgagcagattttaggattttccagcttcatcaagtcactcgcggatatgaccggcgatctgtcaagtatgaccgcgccacccttcatcctctcccccgtctccctcacagaattccctgcatactggtgcgagcaccctgatttgttcgctgcgatctcggctggggccacaccacaggaccgagtggaacgggttctgaaatggttcattgcgacattgaagggacagtacaccaccagaaacgagaagatgggatctgagaagaagcccttgaacccagatctcggagagctattctacggaacttggccagacgccaacggtagaggcgagaccgttctggtcgtggagcaagtctcgcaccacccacctgtcacggcttacttcatcgagaacaaaactgccggcgtctctctgcagggacactcgggtcagaagacctcgttctctggaacatcgatcaacgtcaagcagtctggtcatgccccgctgacggtcaagccgagatcccgagggcaggagacata

SEQ ID NO: 156284 - DNA, 840 bp, Zea mays
  Clone ID: MRT4577_74112C.1
ggtgtgtttttttttatttaataacactataattaatataatatagataaatatcattcaatatctcataaataagcattgtcaaataactcatacataagtgtactctaaatttaaacttgcttatcaactgtttgtgctaacattgagcccaactaagtatatataaattcatgtctccacacttgtgtgcgaccaccaaaatttgagttccattccatctttcatcgatggcatcatccatcgtttcatcaattcatcatcatcgatgacatcattcaccagtatttatgtgcaccctcctgcccttctgaatcctgagccttgaccacccgcaataacatgtcagcatgttcagctggctactgcttcggctgcagactgatcaaatttagtagcaaggctggttccaaatggtgctgtttaaaactgatggagaagaactttaaagcaaattgttcttgcgcgtgtgcctatgtcttcactgtattcatttttcccataatttctgatccgaccatccatcaaggattcaacgtccatgggcaaaccacaaggacctctcgcactggtatagatgaaacttcctgctgtacatgtaactgtagaaatggaagtttcatctatacccctaatcttagccttggtagtatgttaaccacagttgtcatactaccaaggctaagattaggggtatagatgaaactgtggttaacatttttctaactcatccgcatctgaacagaccaagtaatcctgtgtgctgattgaggacctaaacgagttgtttaagtgcaagtgaactggaactggaaaaaaaaaaaagaaaagagagaaaaa

SEQ ID NO: 156285 - DNA, 1270 bp, Zea mays
  Clone ID: MRT4577_74113C.1
ccttccttccatccattcctccctgtctccgccctcttctcactcccgtaggccgtggtgccgccgccgactgctgggactgccctacaccaagtgcccaggtcatcttcggtccattcgccggcgacgagcaccaccaggtgtgccaggttgaccgagctatggacagcctgtggcatcttggggacgagctccgcgggcagcccaaggtggtggaggaccgccagtggtctctcatgacgtccaagctggcggagatcaccaggtccaagggcgagaggatgaacaccgtccctgacgccaagcagtgggacaagacgtcctaccagcttcacgacgacagcaggatggcggccgccaatctcggcctgatgaaccttgatctcaagcggcggctcgtggtagagcaactgaccctctccatctctctgaccggtggactccgtgtgggcggagcgaagtgggagccaacgccaagccagccgagccgactcctatcctcctcttccccttccccgcagcagtttccccaaatccagcgccctccccgccggaatccggcgccgaatcgagcagagagcttgaactgagctatggacaacttgtggcatctcggagatgagttccgtgggcaatcaaaggtggtggaggaccgccaatggtctctcatgacatcaaagcttgctgagatcacaaagtcaaaggctgagaggatgaatgactttgagtatgcacggatgaacaccgtccctgatgtcaagcaatgggataagctatcctaccaccaagaagacaacaagatggaccacctcaatcttggcttgatgaacctggatcttaagatgaatgatctcaagatgaacgaggctgccatgaagtaccctttccgcaacatggcctataacatgaatccgatgtaccccaagggaaacaacggtaatgtcaattcgttcaagatgaatgttggggtcaacaaatatcccaataatcagaatgggaaggaaacaaacggcaaacacaatggtggtaacaacaacaatggaggcaacagcaacaacaactctgttgacaagcgcttcaaaacattgccaacaagcgagatgctaccgaggaatgaagttcttggtggatacatctttgtctgcaacaatgataccatgcaggaggatctcaagagacagctttttggcttgccagcaagatatcgtgattcagtccgagccatcactcctggtctacctcttttcctctacactacacgaccattcag

SEQ ID NO: 156286 - DNA, 1222 bp, Zea mays
  Clone ID: MRT4577_74114C.1
gttttttttttttttttttagataaatatcattcaatatctcataaataagcattgtcaaataactcatacataagtgtactctaaatttaaacttgctcatcaactgtttgtgctaacattgagcctaactaagtatatataaatttatgtctccacacttgtgcgaccaccaaaatttgagttccattccatctttcatcgatgacatcatccatcgtttcatcaattcatcatcgtcgatggcatcattcaccagtatttatgtgcatcttctgctctgaatcatgagccttgaccacccgcaataacatgtcagcatgttcagctggctactgcttcggctgtagcttctcaccacaagatatattggaaatgtttttccaacttttctttgtaggcctcacactgaaaacaacaccttctgaaaatgggccatgtaatcaacaagtccagttcagaagaacctccaagagtaatcatcttgaccattatcattagcttgcaagacaactaaaacatacttcatcagagggatgagagtgagtgtaaaatgatcaacaatagagctccaattacatcctcgtcttcatcaataccatgtggaaagatattgtagaaaacatacaatggcgatgtacctttatctgtacatgtccttcagttgacttacatccttgtccttgggctgatcaaggttctgatccagtccccacatgctgccccgttttgttgtctcgatatctgacatcgacgccataagcatctccttggaccttgaggtcaaaatcccacctcaaaacctcgcagctggaagctccccgaacccgatggccgaatgtgagtttccccttagccgacgcctggtactccgccatgtaccgccctgcctgccgcatcatcaaatgtgggatgccatcctcgccccgcgccgcgcgcacaagccacagcataactctgtttagtaagcaagctcccttgacgaatctgccacacgatgaaggtgcctagccacgatgtccaagaccgtcagcgggcggagctcacgctcgcaaaaaacagccgccatgacagcggctcgccctgcacacgactgagaggggcgcctggctcacaggcagaggagggcgttgtgggcctaggcggggcgacgatgggttcaccctagggagcggcggcggaggaggaggaggcgatagggtttgggtggtgagatgggtaag

SEQ ID NO: 156287 - DNA, 1788 bp, Zea mays
  Clone ID: MRT4577_74115C.1
agaagctgccctcgtgaagggccgggtcgtatacatgttgaaaggagcttttttcttctctccagcacaaccccactcagcacctgtctacagggaaggccgccatttaaacggccctacgtatacatggacacttggaccacctgccttctctcgttccttccatccattcctccctgtctccgccctcttctgactcccgtaggccgtggtgccgccgccgactgctgggactgccctacaccaagtgcccaggtcatcttcgggccattcgccggcgacgagcaccaccaggtgtgccaggttgaccgagctatggacagcctgtggcatcttggggacgagctccgcgggcagcccaaggtggtggaggaccgccagtggtctctcatgacgtccaagctggcggagatcaccaggtccaagggcgagaggatgaacaccgtccctgacgccaagcagtgggacaagacgtcctaccagcttcacgacgacagcaggatgggccacatcggcctcatgaacctgatgatctcaagatgaacgaggctgccgccatgaagctccccttccgtggcatgccgtataacatgaaccagatgtacctcagggggagcaatgccaattccaatgtcaatgcgttcaagatgaatgttggagtcaacaagtactcccatagtccaaacgggaaagacgccaatgggaaaaacaatggcggcagtggcggcaacaacaacaatgggagcgccaacggcacttctgtggctgacaagcgcttcaagacattgccgacgagtgagatgctaccgaggaatgaagtccttggtggatacatctttgtctgcaacaacgataccatgcaggaggatctcaagaggcagctttttggtttgccagcaagatatcgtgattcagtccgagcaatcactcctggcttgcctcttttcctctataactacacaacccaccagcttcatggggtatttgaggctgccagtttcggtgggtccaatatcgatcctactgcatgggaggataagaagtgtaaaggtgaatctagattcccagcgcaggtgaggatctgcattaggaagctgtgcaagccgttggaagaggattccttcaggccagttttgcaccattatgatgggccaaagttccgccttgagctctccatcgcggagacattgtcactgctagacctatgcgggaaggaaggcatctgagctgtcgaggaggtggtggtggttgccttgtgagcttctagtaaataccaatcatctttgtatgttttgtggatggtggttggcaacgttgtttatttatgcgcaagctgctgctggtttcgggatggaaggaaagacctggtccctgaaacaagctgcggagagtgagcctgtcagtgtattgtgtctggcgtggtcaagaaccaaatcaatgttggaccgaccgactgagagtttggagtgtgtatgttttgctattactcttatctctagtagagtgtgggtatacctgggcagaatgtgtccccaaaagttgggggcctgtctgtgtactgtgtgcgatggacgccctaagtaaaaaaagggcaggtgatggtcgtgctccaggtttgtgttttgtactctgttgtaccttgaacctcctttgcgttttgcctaatcagagaatgaatgcaaaaaaaaaaaaaaaactgccagagtgttggctcctggttcaaaaaaaaaaaaaaaaaaaactcgtgcgtgtttggctcctggttcatgttatgctgaatcttggaat

SEQ ID NO: 156288 - DNA, 1340 bp, Zea mays
  Clone ID: MRT4577_74116C.1
gtgcgccgctcgacctgcccgtcgcggacgcgcgcccttcaccctcgcgcctttgacccctctcccttgctcctcgaggacgcgcgcccatcactcagccaccgccgccgccggagtgatggattcccgcggattcgattccgccggccgcatcttctccagtgccacagagatgtggacggaagagctcggttccagcatcacggcttccaccgcgggggaagctgaattcaccccggcccccgccgccgccgccgaagccagcgaggaagggggcggagacggaaaacgcaaggagtggtactccaaggctatcgcctactggcaaggcgtggaggcgtcgaccgagggggtcctgggaggttatgggtgtgtgaacgacgcggatgtcaagggcagcgacgccttcctccgccctctcctcgcagatcggttcggcaccgcgaagcgtcatctggttgcgcttgactgtggctcgggtattggacgcgtcacaaagaattttcttcttggtcatttcaacgaggtagatcttgttgagccagtatctcattttcttgaagcagcacgggaaaatcttactggatgtatggaccaaggagaagactcacacaaggctgccaacttttactgtgtgcctcttcaggacttcactcctgaggaaggaagatatgatgtgatttggattcagtggtgcatagggcaacttcctgatgatgatttcatttcattttttaatcgtgccaaggtcgggctcaaacctgatggtttttttgttctgaaagagaacattgcaagaaatgggtttgtgttagataaggtggataacagtgtcactagatcagacgcatactttagggacctatttaaaaggtgtggattatatatccttagtgttaaggaccaaaaggaactcccgaaggaactatttgctgtcaaaatgtatgcactggtgaccagtcaaccaaaaatccagaatagtggaaagagaagacggcctagaaattcacctcgtatgatccgctcttgaagaatgcccggtactaggtggccattgagctgctgggcctgtctggtcatgtattgccactggattgtgctaaaagttgctgggacatcagtttttgcggtgattgttttgtttctatacattttatttctttacaagcacaaatttcttttgggtgagcacgttcacattattctgagatgaatatgctgaagttctgaattgggatgatttagatgtgttttcccgtcccctctcgtaacatgtttaaatgtaatgaactatcgcagaacagcgcttatatcgtgagaaataaacatgcgattggtgg

SEQ ID NO: 156289 - DNA, 279 bp, Zea mays
  Clone ID: MRT4577_74117C.1
attgcgcatgcgaaccttcgtgaacgcagttacgatttagcccgccatatccattatgaggagcgggcgaacataatcgcacatgccgttgtgatgacaactccctaacccagatctgctctgacgttgtgcaacagttcctagtactgcctcgaatatttaattcaagacattcacttatagtcagacttactataacttctctccactggctgctaacactaatacaacgtctaactgtgtgaatcaacggctcctgtcctgctatgctgaattact

SEQ ID NO: 156290 - DNA, 1139 bp, Zea mays
  Clone ID: MRT4577_74118C.1
ctcgaggccggcccccgccgccgccgctgaagccagcgaggaagggggcggagacggaaaacgcaaggagtggtactccaaggctatcgcctactggcaagtaaagcgcccgctcttcctcctccccgaggccttgaaccctaaacccccaattcaaatgtttattcatgccttcggatttagcttagaatttggtcgatttggtgtcgtagggcgtggaggcgtcgaccgagggggtcctgggaggttatgggtgtgtgaacgacgcggatgtcaagggcagcgacgccttcctccgccctctcctcgcagatcggttcggcaccgcgaagcgtcatctggttgcgcttgactgtggctcgggtattggacgcgtcacaaagaattttcttcttggtcatttcaacgaggtagatcttgttgagccagtatctcattttcttgaagcagcacaggaaaatcttactggatgtatggaccaaggagaagactcacacaaggctgccaacttttactgtgtgcctcttcaggacttcactcctgaggaaggaagatatgatgtgatttggattcagtggtgcatagggcaacttcctgatgatgatttcatttcattttttaatcgtgccaaggtcgggctcaaacctgatggtttttttgttctgaaagagaacattgcaagaaatgggtttgtgttagataaggtggataacagtgtcactagatcagacgcatactttagggacctatttaaaaggtgtggattatatatccttagtgttaaggaccaaaaggaactcccgaagggactatttgctgtcaaaatgtatgcactggtgaccagtcaaccaaaaatccagaatagtggaaagagaagacggcctagaaattcacctcgtatgatccgctcttgaagaatgcccggtactaggtggccattgagctgctgggcctgtctggtcatgtattgccactggattgtgctaaaagttgctgggacatcagtttttgcggtgattgttttgtttctatacattttatttctttacagcacaaatttcttttgggtgagcacgttcacattattctgagatgaatatgctgaagttcgcaaaaaaaaaaaaaaaaaacccgcggcc

SEQ ID NO: 156291 - DNA, 482 bp, Zea mays
  Clone ID: MRT4577_74119C.1
actcatcttggctcgtcgtcggcctcctccgcggctccggcgcggtgccgaccggaccgacgaggtttccgtgcgacgcttctcttgcctgggactgggcaaacggacgtgcacgcccaaccatgcgtggcgggacttgtgcggccaaatgtgggtgcgcgttttctgcggtcaaaaaggcgggcgggagggtggcggcgcagcggcgttcagtgcagtgcagccgccggccggactatacgtacggcgctggttgatacgcgatgtgtgccttccgttccgcccaccacgctgtggacgtgccggtgctattccggttttcatgcgctgctacgagcgacagagtacaattcgcgtttggtttttttttctgcgcccgtggccaccacggtcatctacgcacgagcacgaacggagaaagagatacgttttactgtatagatgctcgaccgaattttcctccattctctatatatttctgc

SEQ ID NO: 156292 - DNA, 1420 bp, Zea mays
  Clone ID: MRT4577_7411C.1
ctcgaggccggccgggcggtctcgcgaagaggaagggtggaaaacctcctctcccctcgttctcctccgcctcctcctcccacctccccacacgggcacacctgccctcaccgtcgccgcggacccactcccatggcaaagctcccgcgtctaccctgcccgtttgccgttctcgcgctcatgtgcatcatcccgctcacagcgccgcggcccgcactgtcctcgcgcacggccccaagggacggtgtctccttcgccggcgcaggcaacacgatacatcaacttcttaaagatcacggccttcccggaggactgctcccgcgcggcgtggagtcgtacaccctggacgagtcgaccggcctgctggaggcgcggctgtcggcgccgtgctacgccacgtacgacaacggcgaactggcctacttcgacaacgtggtgcgcggcaacctcagcaagggcgcgctccgaggcgtggagggcctctcccaggaagaactcttcgtctggctccccgtcaagggcatcctcgtccaggaccaggaacccggggtcatcctgttcgacatcgggttagcccacaagagcctgtcgaggtcgctcttcgaggacccgccggactgcaagccgtcggcctccggcgggatgagcgccgccgccgccgccaggagggagggcacgcaaggtgttactggactacggttgaggcgagagatggcagcagcaggcagcgaccagagtcaggagcagaggtgaggaggaggaggaggagctctgagacgacaacacccgagacaatggcgagccagttttccgctttataaaatcctgcggtgagtgagtgagtgagtgagtgagtgagagagagagagagagagagagagagagagtgccgccgccgccgcaacaaaaaaaaaaaaaaaatacaacaactgcaacttcctgcagaggttggaatgtgctacgtatctactaagatatgggtacttttttgcggttctttttttttctttcttctcccttttttttggcctgagctcctctcttgttcatgcacatgtgtgatattaagtttgtcagtcaattgttagtataagcaagcacgcagaaaaaaagaaaagaaaaaaggttaagctgagaagccaatcgtcggggctgtggtctggctggccgtggcctatgatagattcttgttctcctcctcagggaggaaattcttctggtgagatgagagtaggttgttggtgcatgctccagctcagctggggagtgagctgggcacagcacatccttcattcatgtggggcttgtgttggctggtggttggttcacttctccttgtggattgatgagtgtatatgtatataataaaaccatacaatatacttatatatgctactgcgaaaaaaaattctgctaaccc

SEQ ID NO: 156293 - DNA, 496 bp, Zea mays
  Clone ID: MRT4577_74120C.1
aacttactaacctatattctatttgttttttttttggcttccgttcactgtattgctcgagggaaaaacaccctgctgctggcaggagctagacacttggagtgtttggacatgtacagcgagcgtatggcacattttggtcaaccaaacataccaacctcctttcttttgtgaggggggcaaaaactacaaatagaactacgtacaaaaaaatacaacagccgtagacgcacccatcatactgtggcctggcagttgcttcctaggaccctacccttataccccgatagcaaaatgcagcatgagcttgtatagacatcttgacctgaatccttttaggggggaccttcagatacccccttggcggccaggaacgtcccgggcccggcaagagcatctaggaagagcttgacggcgcccttcccacggtagacggggacggtaaaggaggggtagcggccgtacgcggagggtgactaggacgcggggacttgcg

SEQ ID NO: 156294 - DNA, 777 bp, Zea mays
  Clone ID: MRT4577_74121C.1
cccagcgtccgcccagcgtccgccccgcgtccgccccgcgtccggacaagatggcttcgccgaggacacagataagccctccgggaagctgtccaccatcagcactggaattaacatgtgggaagaggatggagaacctgatgcatcctcatcccctcgcaaggagacagacccacgcgacgcagcacccgagcgaaagaaagcgaggttcatgataccaaagagcgcccaggtggacagcgaggtgcggcgcgagctgcaggagctcatggacgccagggaggcgggcatgtccttcatcctgggacgctcgtacatgaaggcgaagagcgggtcgggtttcgtaaagcgggtcgtgataaacttgttgtacgagttcttgaggaagaacagccgtggccctgcgtacgccgcgagcataccccatgcctccactcttgaggtaggaatggtctaccaggtctgacaaacagttagcggggtgtgtaaaggtagaagaaactagaagagatgagacgacgcttgtatatacacccacttgttgctgccgataccgttaacataattacaggataacacagagtagagagacatttgaaaacagctgtggatagcccaaccagaagcatgtgtttagtttcgtgatatgtttgctgctgctgttgacttgctgagtctcagacagtacttgtgagctgtcattgtctgtgagctgtaattgtctgggcgactagcaaaatagcagttttgacgtgcagcgacctctgtagttctgct

SEQ ID NO: 156295 - DNA, 835 bp, Zea mays
  Clone ID: MRT4577_74122C.1
gggaccctcgagggccacaggggttacaccgcccgaaattcggaggggaagtcctcgacgacgtcgcggcaattggcagctcggacgatggcgtccaactccgcggccccggctgccgccgacgggggcgacgacctcgaccagctcctcgacagcgcgctcgacgacttcaccagcctcgacctctccgcctctgccgcccccaaaaggatatggactccattgttgaaacaatgatgcggcagcttttgtccaaggagattcttcatgagcccatgaaggacattgtggagaaatatccaaaatggctggaggataataaaaacaagataagcaaagaagaatatgagcgttataataatcagctagaactcatggtgaagcttattgaggtctatgaaaatgatcctgagaacatgactaagatttttgacatcatgcaaaacatgcaagaatgtggtcagccccccagtgatcttgtccaagatactgtacctgatctggatctgagcaagttgggacagctgtctcctgagatgcttgaatcagcaccaaattgttgcgtaatgtgaagacaaaaaacattccacttgggattcaattccatgaagtttcttaacctgtacgaaccccctcccccctttctggcttgagtagattcaagataatttccatctggataatctgtaaagccttgcaaatatataatgggctcaatgttctttctggttctttctgttatttttctgtaacactcccgtcgttcctatatacataccttacgtgtcaaaaaaaaaaaaaaaaaaaactcgaggggcgaaaccccttacgtttt

SEQ ID NO: 156296 - DNA, 1165 bp, Zea mays
  Clone ID: MRT4577_74123C.1
ccggggaaaccccaaatcgcacgcgtcatcccaatcccaacccaattagtcaattacgacacgcctgccgccgccacgccgcccgaaatccggaggggaagctcctcgacgacgtagcggccattggcagctcggacgatggcctcgtccaactccgccgccccggctcccgccgacgggggcgacgacctcgaccagctcctcgacagcgcgctcgacgacttcaccagcctcgacctctctgcctctgccgcccccaaaagcgccggcgaggcatcggggtcaggatcgggaggcaaggggccggtgaaggggctggggctggggcttccggaccccaaggcgccgaagcggcgcgcggggaagcagccgccgccgaggggcgcgtgcgccaaagaggcgcttgaggagctgacgcgcgagacgcgggaggctgtgcgcgagctcgagacggccactgggggtgttccgtcactggacgatgacgccatgatggaggagttcgtcaaacagttcgaggagttcgcaggggcacaggatatggactccattgttgaaacaatgatgcagcagcttttgtccaaggagattcttcatgagcccatgaaggacattgtggaaaaatatccaaaatggctggaggataataaaaacaagataagcaaagaagaatatgagcgttataataatcagctagaactcatggtgaagcttattgaggtctatgaaaatgatcctgagaacatgactaagatttttgacatcatgcaaaacatgcaagaatgtggtcagccccccagtgatcttgtccaagatactgtacctgatctggatctgagcaagttgggacagctgtctcctgagatgcttgaatcagcaccaaattgttgcgtaatgtgaagacaaaaaacattccacttgggattcaattccatgaagtttcttagcctgtacgaaccgcctcccccctttctggcttgagtagattcaagataatttccatctggataatctgtaaagccttgcaaatatataatgggctcaatgttctttctggttctttctgttatttttctgtaacactcccgtcgttcctatatacataccttacgtgtcgaagccccttacgttttgaaaaaaaaaaaaaaaaaaaaaaaacaaccag

SEQ ID NO: 156297 - DNA, 1201 bp, Zea mays
  Clone ID: MRT4577_74124C.1
ccacgcgtccgcacccccgcgcttcacgccggcccaaacgccaaatcccacgcgtccgcgcgtcatcccaatcccaacccaattacgacacgcctgccgccgccacgccgcccgaaatccggaggggaagctcctcgacgacgtagcggccagtggcagctcggacgatggcctcgtccaactccgccgccccggctcccgccgacgggggcgacgacctcgaccagctcctcgacagcgcgctcgacgacttcaccaacctcgatctctctgcctctgccgcccccaaaagctccggcgaggcatcggggtcaggatcgggaggcaaggggccagtgaaggggctggggctggggcttccggaccccaaggcgccgaagcggcgcgcggggaagcagccgccgccgaggggcgcgtgcgccaaagaggcgctcgaggagctgacgcgcgagacgcgggaggctgtgcgcggtctcgagacggccactgggggtgtcccgtcactggacgatgacgccatgatggaggagtttgtcaagcagttccaggagttcgcaggggcacaggatatggactccattgttgaaacaatgatgcagcaacttctgtccaaggagattcttcatgagcccatgaaggacattgtagaaaagtatccaaaatggctggaggataataaagataagataagcaaagaagaatatgggcgttataataatcagcttgaactcatggtgaagcttattgaggtctatgaaaatgatcctgagaacatgactaggatttttgacatcatgcaaaacatgcaagaatgtggtcaaccccccagtgatcttgtccaagatattgtacctgatctggatctaagcaagttgggacaactgtctcctgagatgcttgaatcagctccaaattgttgcgtaatgtgaggaccaaaagcattccatttgggattcgaattccatgaagttttctttacctgtacgaacccccctttctggctttagtagattgaagataatttccatctggataatctgtaaagccttgcaaatatataatgagttcaatgttctttctggttcttgaatggaatctatattctttctgttgatgtactgtaacactcccttccctcttatacaatgagtacatgcattgcctttcaatgccactccgtttttgtgacgctttttctgtc

SEQ ID NO: 156298 - DNA, 311 bp, Zea mays
  Clone ID: MRT4577_74125C.1
gtcgagagtgagctcatggacatgtactccaaatgcgggttgatggaggatgcgctcagggtgttccgctccggccaggatcctgacgaagtttccttgacggtgattcttgctgggtttgctcagaacggactggaggaggaggcgttcaggttgttcgctgagatggtcgggaaaggaatcagcgtcgacgcaaacatggtttctgcagtcctgggtgccttcggtgcttcggcgccgtttgctcttgggaaacagatccacgcgctggccgtcaagagatgcttcggagggaacacctacgtctgcaa

SEQ ID NO: 156299 - DNA, 656 bp, Zea mays
  Clone ID: MRT4577_74126C.1
ttttttttttttttttaagatttccttggtcgaaaacgcacttggggtgcagtaataagtaattgcaacacagcacaagtagaaccacataaaaaaagggggcaggagtaaagggaacagagcttggctttcttccaatggtagaaacatccaaagaggaagggggaattcagagaattcatccatccaggtcataaatccaaccccgagggccccaacgctagaaacagagagagaattcaaaggaaccgagatactacgtggttgggcagagtgagggaaggaagaactttgggcgtgccaccacctcaatctaagaaaacccaacagcagcacaagaaaaaagaccaactgattcatcatcccgcgtccgtgtcgaaactgaattcggagctcagtctctccatccaaattcagagagaagaaacagcagactctctgctaatcggctcgggaatcgatgaacagcgagcgtgagaaagcagaattcagagtactttttttcctttcttctcatcgggcgaacctgatagaagaattttgtctgatcatacagcaacaacatggagtagattgtactgagaaaatgggaggggaggcgagctaataattatcggaaggtgctgctgttcctctcgtgccgaattcggcacgag

SEQ ID NO: 156300 - DNA, 506 bp, Zea mays
  Clone ID: MRT4577_74127C.1
ccggccgggaccgcatacaaagccatgacaactgtagggggggcatgaaatgtgaggtatgaagcaggtgctgactgtgctcgcttatgcattggtgatgtggataatgaagaagatcttgctgcccttgttccacagcaagatcatggtgatcctcctctacatcctcagcctcctctttgccatgctgctatcagagacattccccaggttgtattatatacacgtactcccccatctgaggtgaccgcgaatgaaaccatgcccatacatcacgtctactattaaagtaacctacatccactaacacgatcatatacagggcatacgtcttcaattgaaaaaaagaaaaataaggtggccctcaagctcctaattcatgtaccattcaatgagaattagtatcgacactctacgtaatcataacctgagcagcaccctgagagaaaatcttaaccgctcacgatcccacccagtgtaccaagaactcctgtacaaagaaaaac

SEQ ID NO: 156301 - DNA, 674 bp, Zea mays
  Clone ID: MRT4577_74128C.1
attctgaggacactgcaattgtggcccacgcctatctggttcgctactcctttcttcctcggccccggccccaaactagccaacggcggcgagatccagatccaccgcactggacccggacccgcccgacgactccggccactttttacttactagccagcggcggcgaaatccagatctccatagcaccggacccggacccggacccgcccgccccgctggaacaggatgttcggacttcaggcgagcggcgcggctgcctcgtgggtggtggggcggatgggcaccgacgcgcatctctacgacgaccccgacgacgcctccatccccgagctcctcgactcccgcttcgacgtcgacgtcgcgcacctcttcccgcaggtcgtcaagaatgtggcgtcgcagtcgctcgaggtcaagaagctcgtctacctctacctcctccactacgccgacaagcgccaaaacgaagcccttctttctattaacatcttccagaaggatttatcggatataaacccactggtgagggcttgggccttgcgcactatggctggcattagactacacgttgttgctccgcttgtgttggttgctatcaagaaatgtgccagggatccgtctgcgtatgtaaggaaatgtgctgcctacgcgctttgtaagctgtgcgactt

SEQ ID NO: 156302 - DNA, 215 bp, Zea mays
  Clone ID: MRT4577_74129C.1
caataaagtttatgcccaaacaagcatggcacttacaaggatccgaacaagttacaagctcagggcctcgattaattaaccagagggggcggaatgcaattgcctcatacttatggccacctgccttgttatggttgttgcccgaggaggacccggatccaccggccatatcctgttgacccttttaggccgccttttcaaccagaacttttagg

SEQ ID NO: 156303 - DNA, 735 bp, Zea mays
  Clone ID: MRT4577_7412C.1
cgggaaaaaaaaaaaaaaaaaaaaagcgttcccttcgttgctcttagaggagtgagttttgaagtattgctgtatttgtgtttttaacaattttgcttgttgcatcaatcaatcttcataagattttatactttcgacaaatgagctatttgcacgccattatataatatactatgtgtttatgttagttgttgagtttctactgaaaatgaattactaagtgaacatgccttcaataatggggtgtttggtttgaggaatgaggtggtccatcttctcactcctcactttttttgtttggtttgtggaatagaatgagttgatccatcaccacctcattcttcataaggtatataattagtatatgcatgaggaatgggttgattccaccaaaatttatgggatgagctcatgatgcatcaccttatgaagcataggttgactcaaaaatttatgggatgagctcatgatgcatcaccttatgaaacataagttgactcacaaaccaaacacaccataagtgtcttggtgagttcattgaggcttcaatggcaatatatttgttgtataagcatcttgtctgagtgtgactctttgtggcttgttagtgcacatgataattttgtgacaattactggatacgagtttgatgtgaagtcagtttgtcctctggcacctgcatagcatgattcctatgcatatggaatattattggaactgaaattcatacagcag

SEQ ID NO: 156304 - DNA, 702 bp, Zea mays
  Clone ID: MRT4577_74130C.1
ttgggtacctcgaggccggccgggaacctcgctgttgaaccgccctctccccggcgctccccctgcccctcccccaggtgcactacaggaagccgcttgagctctggtcgcgaacctcgaccgtctcccgctccgcctacaaggagcccaccagacttacagcctttgacatccgcccaccttcgcgccctctctcgccggtatctcgaccaccagatccggctctagattacagacacttccccctctctcgcaccagagcactcctcagcgagatgaccaggtggctccggaagtctcttgtctctgcggtctctcgcgagtcgctagaggaggggaccgcgttctctaacggtgttggtttgtatgacgaccacgcgggagatcatgttggagaagtcgatcattggaggtctggggaattgcaacacggactagaacaccaggactgacgagaagactgaggtggactggaaggactacgagacgaacatgacgaggtgcgcctcgactccgacgagggcgacctcacgatggcgaagaggcgcgacgacaggaaaggccccgagatggaccgcaagagggatacgcacaccgccgccgaacgggtgcggcgctagagcttgaacgggctgttccctgacctcgatagatgtcttccgaccatgaagaacatcaaggggtccctcccaggccatgatc

SEQ ID NO: 156305 - DNA, 148 bp, Zea mays
  Clone ID: MRT4577_74131C.1
ctgctgctgtgtgtgtttccaatggagaggaaccatagagtatatactcgaaatatcccagccattaaccatcagagaactattgagtagctggctaataagtagttctcaggtggttaatggttgggttaatgcgagtatatactct

SEQ ID NO: 156306 - DNA, 290 bp, Zea mays
  Clone ID: MRT4577_74132C.1
agccccggcacatccaagtgaagagactaaatgggagagtggctcgcacccaatctgccgaagaggacgccgaggtgttcgcggagctgctgctggcaccggcggtgacgacctcaaagggcgccatcacctgcgcaaaggaaagctccgacatcgcgcccagcctctcctacgcgagcggcaaggagaccggcccctccgcgacctgcagaaccggagcaaagaacctcaagagcaccgctagaaacgacgccgacatgcgagacggatgaaactgacccaagaacgcc

SEQ ID NO: 156307 - DNA, 550 bp, Zea mays
  Clone ID: MRT4577_74133C.1
aaaaggcaaaaaaaaaaacggggggaggaactttacaaaacaacttcagcacaggggggatctgaaacaattccagcaaatcatcagttttgccaaaaaaggttgaagggacccaagagccgccgaaaagcccattgcccatgaaaaattgcatgcaaaaaaatgaccagggacataagccacccccgaaaaacccccacaaaagaaagccgcagcaggatcatggcaggggagccacaagaaagccccccggccccccctccggggaggcggcccctcaaagctgggggggattttcccgaccaacccattcattgggcttgaacagttagggaacattgccagggaagccatgaggagaggggcgttgaattccattaaaaagccatcttggaatttctgggattccgaaaccggaagccttcttacaaggcttgaaacttgcctaaacagcgaattgcccattggaatggcacctttttgcatggcaacaaaataccggtggataacccggcccccgctattgagcatcttgagggcaccgggtatt

SEQ ID NO: 156308 - DNA, 340 bp, Zea mays
  Clone ID: MRT4577_74134C.1
ccgcctactggcgagcttgtccacccgtgcactaaaacaggaccggggcgtgcatccctactttctgggcttataacaaaaaaaacaagagctcgaagtggtcatggtaacagctgatacctgtgtgaaaaagtacagagatgacacttccacacaacataaaaatcatgtgcaaccagaggcaagcctgcgctgcctaatgagcgagctgacacacaagaacaggtacgggcccaatgcccgctaaacagtaacgaaacctgccgtgcgcggtgactgaatgaaaccgccaacacccggtgagaggactgacatttcttgcgcgcaacgcgctgatttt

SEQ ID NO: 156309 - DNA, 447 bp, Zea mays
  unsure (1)..(447): unsure at all n locations
  Clone ID: MRT4577_74135C.1
ttttttttttttttttttaacctaataacatcaaggagaatattatttaaattgaagtcgagacaaaagaggacagaaaatagaggatgaccttaataacactatagtactagactatcgtccaatcaatataagccatccaacccttactatgtgacagttcagatggatcctttgatataagctctctttcactagtaccgggaatgtcatatgtatcatgtagagaggtagtatgtggaataaaaatcttcgtctctctgagcgtccccatgctgcgtcggttggaggcaaaggtcgcaatgaatgcagacacagacggaggcggagcctagctagnacaatggagaggaaagtagtcgtcagagggaaaattttatcgccgtacatgtcccgataaaccgatttcctgttatcgtggccccgattttttacgatcggcaaaaa

SEQ ID NO: 156310 - DNA, 499 bp, Zea mays
  unsure (1)..(499): unsure at all n locations
  Clone ID: MRT4577_74136C.1
ccgggnaaaggacacactggggcaaaagagatcactcatcaggcaacaagaacagcgggggcggcggcgctgacctaggctaggggtacacccactttggggcccggagcgggataaggaaaaaaaaacgatgcgaccacctggactccggtcttcatgactaccgggatagaaggaggcacattagcaccgtcaaatcgacattgctctacaggaattatgctctgaaatccagacagttcttcgatttttatcagcctttgctacttcgtgtaacggaacatgaaggaacaagcaaaacgccgttgagaaaacacggggtggcatcgctgcacagaaaaaaaagacaaaacactcggggcgaaagggaccaaagccagaggagagaaagacacaacttggactaaggagggcagccgggcagccgatatgaagaggaaagaggaccagtgccacgggaggcgcaatgcggtggagaacccccgccgtgctgtggcgg

SEQ ID NO: 156311 - DNA, 154 bp, Zea mays
  Clone ID: MRT4577_74137C.1
gcgtatgccaaaactttaaaaagcttaaaaatatgccgttcccacaaagaaaataatactaatctgccgaacacaaaacatcccgtgatgctatgggatcctgctaaactgaaatcctgggcctgcccttttgcgattctccggatcatcacct

SEQ ID NO: 156312 - DNA, 332 bp, Zea mays
  Clone ID: MRT4577_74138C.1
ccggagcgagagagctaactcacatggtggaggcgtaattttagcctgcttatgctcctaaaagcctaactactctacctgtgctgagtctgatggatcagcctgcagaccctaccttgttgactccatgggtcttacttaatgctgccttctatttttctcctgtgaagaacccgcttacatctagtcttgctgaatggaagaacatttcggcctcttgtaaacatgacattaagatgctgttccccagcccactcacatgcttgaaagatggaccgactgatcttctaggaacactgactcaaacgcaggctgttggcttgttcatcgac

SEQ ID NO: 156313 - DNA, 318 bp, Zea mays
  Clone ID: MRT4577_74139C.1
aggcagcggagtttatttgttactaaaagttacaaggtacaacagaatgacattatatttatcagagcggctacagagtgatatatagcaataaactttgaaatgttatgaaagcattcatcagttcgaaatatatgctagcttaagtgaccatcctgaataataagtataggatacggacttagacttatgagaagggcctgcccaccggcgcttaacaccattcacagctgcacaaatctaggacctgcaacaacatgggttcgaaaaccctatgtactaagtgtactttggcaagtcttacctgtctaaggaaaa

SEQ ID NO: 156314 - DNA, 1366 bp, Zea mays
  Clone ID: MRT4577_7413C.1
gagccgccgggaccatttaccagtttcaatcccattactttctctccacgcgtccgcatcgcccctcgttctcctcccgtccgccccctcctcccaccccccacacctgccctccccgccgccgcggaccccctcccatggcaaagctcccgcgtctacgctgtccgtttgccgtgctcgcgctcgtgtgcatcctcccgctctttgcgccgcggcccgccctgtcctcccgcgccgcgccgaaggacggtgtctccttcgccggcgcaggcaacacgatacatcaactccttaaagatcacggccttcccggaggactgctcccgcgcggcgtggagtcgtacaccctggacgaatcaagcggtctgctgcaggcgcggctgtcggcgccgtgctacgccaagtacgacaacggcgacctggcctacttcgacaacgtggtccgcggcaacctgagcaagggtgcgctccgcggcgtggagggcctctcccaggaggagctcttcgtctggctccccgtcaagggcatactcgtccaggaccaggagcccggggtcatcctgttcgacatcggcttcgcccacaagagcctctcgaggtcgctcttcgaggacccgccggactgcaagccgtcggccgccagcgggatgagcgccgccgccgccgtcgccgccgccaggtggaagggtaggcaaggtgttattactggtctgaggttgaggcgagaggtagcagcagacagcgacgagcatcaggagcagaggtgagggagggagacaatgcaacaccccgagacgacgccgaattccggtttcccgctttgtaaaatcctgtggtgagtgagagagagagagagagtgctgccgcaacaaaaaaaaacaacaactgcaacttcctgcagaggttggaatgtgctacgtatctactaagatatgggtacctttttgcggttctttttttttttatttcttctcccccttttttttggcctgagctcctctcctgttcatgcacctgtgtgatattaagtttgtcagtcaattgttagtataagcaagcacgcagaaaaaaagaaaagaaaaaaggttaagctgagaagccaatcgtcggggctgtggtctggctggccgtggcctatgatagattcttgttctcctcctcagggaggaaattcttctggagagatgagagtaggttgttggtgcatgctccagctcatctggggagtgagctgggcacagcacatccttcattcatgtggggcttgtgttggctggtggttggttcacttctccttgcggattgacgagtgtatatgtatataataaaaccatacaatatacttatatatgctactgcgattatt

SEQ ID NO: 156315 - DNA, 278 bp, Zea mays
  Clone ID: MRT4577_74140C.1
aaaaaatgggggattgaaagttaatgcttgcccacaggcttgaagttgttcagaacattgtttagctgcatatggattgagtttggagctggaaaaattttatggttgccccatccagcatgagccttgtgcaggggagttaatgaaagacactgttccttttatttatatatatatacatatctataaagggaaaaggctcccttccacctaaaaaccttttctttggttatagattattccttttaacaaaatctttactcgcaaaattttctttc

SEQ ID NO: 156316 - DNA, 358 bp, Zea mays
  Clone ID: MRT4577_74141C.1
gagaatgttacgaattaactattcatgaatctagattcctgttggaattcagggcaataatgcaaaatgatatccaccaaaatcagaacttttgaagaaggtaattcacaaacgtgttgctaaatgcgtagctttgtacgtaacagacgcacgaaggttccccagaacgagtagaacctgagcactgttatttacacctctcgttttatttatatagaaaataaacaagctgccatcaaagctaattctaccaaggtctccgccattgattcatgtagtttggtgcagaaccgtgacgatagcatagctaggatgtggtgccaaagcagcattcgacggccggtgcacatcatgagac

SEQ ID NO: 156317 - DNA, 1271 bp, Zea mays
  Clone ID: MRT4577_74142C.1
ccaccaaaatcagaacttttgaagaaggtaattcacaaacgtgttgctaaatgcgtagctttgtacgtaacagacgcacgaaggttccctagaacgagtagaacctgagcactgttatttacacctctcgttttagggggtgtttggttagagggactaaagattagtctctagtttttagtctcatttagtcccttttttgccaaacactaggactaaaatatggactaaaatgatttagtctttagtccttcacataggtgctaaaagagactaaaagcccacatgagtgtattccaagagcatttgagtctatttagtccctagaaccaaacaagtagggactaaagtttagtcctaggactaaagtttagtcctaagactaattgaaaccaaacatggccttatttatatagaaaataaacaagctgccatcaaagctaattctaccaaggtctccgccattgattcatgtagtttggtgcagaaccgtgacgatagcatagctaggatgtggtgccaaagcagcattcgacggccggtgcacatcatgagactattgtccatagtaaggcctgtaactgtcagaactccatgagcgggaactaccttgatttggcacccactgagcagctggttgtggaccatgtgctggaaaagttgatggtgataacacctgatgtggcctcccaatcagatttccagctgcatagcaaggtgccacataggcttcggctgacccaggtgctcggtagaggttcctgctactcatgggagcctgaataccttggtgcatctcagaattgtatgggcttgggttcctgcgggaagcatatgtactctgtccatatcccggaagtggtgtacttcggtagcttgcacggacttcatattggtttgagttactcaggtagcttgagggcatctgatattggtttggagcacttggatagcttgaatggattccatgttggtttcctgttggactccggaaacttcgaacgctgcagggtgtctgtccatgtgttgtgttgccttcagtatgcacacctgtgctgaaagtagcagcactgctacgtaggtcgccaactccatatgaattggccgttggtggataaaagcctggcattgatgaccttgcactaggatcaagtggagcagcagtcccagcatatgttaactataatgttttggttgccagagtttccatagcttggggtcacatttcttggcaacacacgctgcatatcatctaggtaaaccggcagaga

SEQ ID NO: 156318 - DNA, 395 bp, Zea mays
  Clone ID: MRT4577_74143C.1
cacgctcttgcgcccagacccaaatatttctccactcaatcactgcagtcatggacgccaacggagccagtagcaaggcgaagaacggggcggctgggcgcaaggctggcggccccaggaagaagtccgtgtctcggaccgtcaaggacgggatgcaatttcccgtaggtcggatcgggcgctacctcaagaagggccggtacgcgcaacgcgtgggcaccagcgcccacgtgctatctcgccgtcgtgcttgagtacctagccgacgaggtgctggagctggacgtcaacgcttcgaaggacaacaagaagacgcgcatcgtaccgtgccacgtgctcctggcgatcgcgaactacgttgaactcggcgcgctactgtctggcgtcaccatctg

SEQ ID NO: 156319 - DNA, 1505 bp, Zea mays
  Clone ID: MRT4577_74144C.1
agatttgtcagtgtcagtccaaaaggggtcaagtttctctctactgctgataaaatagatggagcaccactggtatttcagctgactgcagagatgattgaactagaggagcacggtagttcacatcataaagaaggtggtttgaatcttgtgccaacattagaatctgaaaaattttctgaggatgaatcaaaactctatcaaaggctcctgaatgttaggatgaagattgctcaagatattggcactgctccgtatgctgtatgtggcgatcagacaataagaaactttgcaaagatgagaccttctactggagctagacttgctaatatcgatggtgtcaaccagcattttatttcacgtttcagtaacattttcatccaaaatattgcggaattgtcgaaggagttaaacctcccgttggataattcaccatttccaccaccaccaccaacaaatccagctgcagaaaatattgctggtataccaaaacctgtacaaaacaatcttcctgggatcttgggtgatgcaaagctgactgcatgggaattgtggcataagcaggagtactcattcctgaaaattgcttatttccgcagagcagtgccaataaaagagcaaacagttattgcgtacattcttgatgctgctcgagaaggatgtgagatggactggagtaggttttgcagggaagtagggctgacacctgatatagccaccgcaattcgtcttgcaatctcaaaggttggatcacgtgagaaaatgaagccaatcaaagaggagctcccagagaatgtaacttatgacatgatcaagacattcctgactattgaggggtgtggattgtcagagcaagtctttggtaacggtaccgctgacggtgtctctagtagaatagcagagtcaccaatatcttcctgccgtgcaagtgaagcaggcggaaatggtgtcccagcagtggcagaggccagtgatgcaaacccttcagcaaagagaggtcaaactgtttgtgctgaggagccagcaacaaaactgcaaaggacagacgagcatggagctgagttaactggcacggcgactgctactgtagattctgtgctagatctggttgcgagctgcaatggggtatcgctggaggatgttgccaagcacttcaagggatccaagagagaatcggtcctggagatattggagggccttgaatctgaattcacaatttacaagaaaaacgggaactacatggtcctgtgacaaacttgcccgtgtagtctgggaaggggatatgcctcagctgtgtgtatatatctatctatcctatggtgggtgactttggactatggtagcaaagttgttggctggtgtgcatgtgctcattttggggattgggcagaactagcagatgtacgaacgtgtgtgtttggagctgggatcctttctgtcatctcgcatatgagtatcttggactaattgaccccgcgtattttcgttgggttttgatgccttcc

SEQ ID NO: 156320 - DNA, 118 bp, Zea mays
  unsure (1)..(118): unsure at all n locations
  Clone ID: MRT4577_74145C.1
ctgtggttctcgccggacatctncaacagggattcgcccttggactacgtgcgctgtagcgcgaatgccaggccctgtatgtggcagccgtggaggacgaacagcaagttgcgcacgc

SEQ ID NO: 156321 - DNA, 347 bp, Zea mays
  Clone ID: MRT4577_74146C.1
gacatctgcatgaatactccctcccccgacctgcgcaccatgactgctgagaagcacgccaacaagtacaatgtggtgtactccgcgacagggctagacatccaggtggacgccttcaaaaaccgcgtgaaggctgaactgcccctctccaatgaggaggtcaagacagccccgacgccccaggctcggaggccagctgaacctctgcaagacctactacctggacgccctctacaacctcagtgcctgcaagcgctccatcggatgacgacacgccttcaccatccgcgccactatgagcatggtggcgcaggacacgcataactgctacgagtagttcaggaacg

SEQ ID NO: 156322 - DNA, 320 bp, Zea mays
  Clone ID: MRT4577_74147C.1
accggctaagtacagtgtgtccgtgacggcgccggcagggatgaaggtgacggtttcgccgacggcgctgtccttcggcggcaagggcagcaagcagccgttcacagtcacggtgcaggtcagcaaggtgaaaaggaactcaaatgactacaactacgctgggaactatgggttcctgagctggaacgaagttggaggcaagcatgttgtcaggagcccgatagtctctgcatttgcccaatgacccgggaagacatgttagcaatgcacgaacaaaaaaaataagactataaggttggaaaagataattattatattta

SEQ ID NO: 156323 - DNA, 396 bp, Zea mays
  Clone ID: MRT4577_74148C.1
tttggtggtgtttaatggcaggtgcccattttaaagcatgccacatgccagaataaatgtacaacacaaaatgtgaggcttagatccaatcttgttgcaacttgatgcttaattgggccatagtccatattacaatgagaactgacatggcgtccgtcactaagtcatcatctaaccgagaaattgccagcaacaacatcagaccaacctacatgggtaactttgttggggaaaaaatgaagactaatttcttagcttctttttaaatattcaccctacgaagcaactacaacagtccgttttccactaatggccctcacaggtagagggcattcatgggcaaaaaaagcttggctacccccccccacccagggttgagaaagttccaatgaacca

SEQ ID NO: 156324 - DNA, 1495 bp, Zea mays
  Clone ID: MRT4577_74149C.1
aacaatccataactcgaaaccttttcttgtgctctgtctgtgtgtttccaaagcaaacgaaagaggtcgaggatgtcttgcagctgcggatcaggctgcaactgcggatcaagctgcaactgcggcaagatgtaccctgacctggaggagaagagcggcgggggcgctcaggccagcgccgccgccgtcgtcctcggcgttgcccctgagtacgaaaaaggcggcgcagttcgaggcgatatccgatcttggttaggccgcccacgcttggagcaaggccgtgggatcggaattcccttccggacaagacacctaccaccacccaccacccagcgcaaggccaggcggggccaggccaccactccttaccttttcccccctcttttgttccttcattcacgaatcccgtcttcttcctttcttggccttctccacctcatcgccgagacgagatctctcccacacgaggagggcagcagggaagggagagatgggcgggcgggtggatcacgagtactcctacctgttcaagatggtcctcatcggagacagcggcgtcggcaagtccaatatcctctctcgcttcacgcgcaaccacttctccctcgactccaagtccaccatcggcgtcgagttcgccaccaagtccctgcagatggacggcaaaacaataaaggctcagatctgggacacagctgggcaggaaaggtaccgtgcaattacaagtgcttactaccgtggagccgtgggagcactgcttgtgtacgacatcacaaagaggcagagcttcgacaatgttcacaggtggcttcgtgaactccgcgaccatgctgactccagtattgtgatcatgatggtcggtaacaaatctgacctaatccacctgagagctatctctgaggatgaaggcaaagcgttggctgagaaggaggggttgttcttcctcgagacatcagctatggaggctataaacgtggagcaagccttccagactatcatgacggaggtctatggcattgtcaacaggaaagcgctggctgccaaagaagcagcagctgcaactgcttcgttgccctcccagggtaaaattatcagcattgacagcactgcaggaaacacaaagagggcatgctgctctacctaaaaatgttcaaacaccacattatacagaaccttggagacaattgttggtagaaaatggagcatagtgatcacaaatgatgtggtggcaatatctactcttattctattctattctattcttttcttttctttattgtgtggacaaaatgggggtacatgcagtttagtttgttcagtgtgtgttagtcaaaagttagatattttcgttaggatccataccatttatcttctcaagttaaatgatactgcagtataactcagaatcatatagtcccaagttgctacagaattcaactgcgaatttgtgatttcatcatgcttacattctaaaaaaaaaaaaaaaaaagcggcc

SEQ ID NO: 156325 - DNA, 440 bp, Zea mays
  Clone ID: MRT4577_7414C.1
gccatgcgatcggcgacagtatctggcataaggccaatatggctcacgagagggacgccgagaaagacatgtcgtgagaggcagacagttgggaggcaaccctaaagacatgaacataccacgcatgatctgcatgcgtaccttcatctgcaccacctccaatgcctagtgccatgaacatgcagacgcgacgtatccaagcaacgacctctaccagtgatttcgcaacctcaagaatgatcttgcactagaagcatatgatctggtcagctaaaagacaagtactacatatatatatctacactgggtgtaaatgaatgggttgttagctgatgctgatgcagatggctcatacgtggatcccaatgtgattacgtactgtgacccttgactggcaacgaactgtgcataaaaccaaaaaaaaaaaaaaaacccacgcg

SEQ ID NO: 156326 - DNA, 410 bp, Zea mays
  Clone ID: MRT4577_74150C.1
ggccgggggggacatacatacactacacacgaataggggatgacacaaaagctaaaaaaagggatttatacgtaccgatcgggacgggggggcacacataataaacatgcccgaccacctgggacatgcttgcccagacgacgaccacaagaacattttaattagtacgaaaacacacaccctaaatagggacgggggccagatgagagaaaaaaaaaaaacgtacgtacgggcccctgcctggaccctggtggaaatgcacaaacaaacacctacaattaggaatgccgggggccttggcttggcttgggtagcaaaatgctaacaatccggcggggtggcaaggccccacttggccggaaactccatggggcccttgggggcgatgttgtaaaaccccatccacgggg

SEQ ID NO: 156327 - DNA, 449 bp, Zea mays
  Clone ID: MRT4577_74151C.1
cgtgctgtcggagaaccagacaggatatgggctaaaccattgactaatggatgctatatgaggagagagcctggaacacttccccccatgtgtgaacgtgatggtgactcagatgctgattggggtgtccccatgaaagtatgcctaaccccatactctaagagagttagtaaggctaaaggcagcgaattacttccctggccacaaaggctcacaacaccaccaccgtgcctggaagagcttggaatcagttggaacaatttttcagaggacaatgagatttggcactctagagtaattcagtactggaagcacatgaagttcgagatacaaaaggattcctttcgaaacgttatggatatgagtgctaaccttggtggatttgcagcatctctgaagaaaaagaatgtctgggttatgaatgtagttcctttcacggaatctggaaa

SEQ ID NO: 156328 - DNA, 618 bp, Zea mays
  Clone ID: MRT4577_74153C.1
cgttcagtgctgaccagttgttgtaagcgtaggggctttggtgcatgtagccgtacatcgccgttggtgtctccggctccggccccgggccgcagtcgaggtttacgccgaacagccggagccgccgcgacggtggcggcggtgccgaagctgcactgcagctcctgttgtctctgtcggactgagattctcctgcaattgttcaccccacagcagtgcataagaggacaacctgtgcctgcctccgtcgaggacgctatatggcggacaccaaccaactgcaaattaaaagagagaatacttctctaatctctctgtgttagagagcacctcctgttgttggaggatcgggatgcaggacgacgcaaggaccagagaattggggatatgtgtgacgtgattattaatctcacgtggcattatgctttctgctcctcctcctcctctgtggcttcaagttcccaagcatcacaatattcgagcattggaatgggaagtatatataggatcaagattggacctggacaaagatctgcccgcccttagcctgtccgtccaatttccgaaagcctttcgactcagacgacgagcaagctacagaggattctgaggttcagc

SEQ ID NO: 156329 - DNA, 1509 bp, Zea mays
  Clone ID: MRT4577_74154C.1
ctcccgtctctctcgtctctctctctctccctggatcccgcccgccactggccgcccccactcgcccgccaccgccaccccggccccgaccccatccaccacggctgcccccgcccccggccgccactcccgccggcgcggccgcccaagcccacacccgccatgggagtcgggagctcagatcgggagggacggggtaggtagggttcacgagcgagcgagggtgctgccgtcgggcgccggtgtccaagtagcaagaggagagatggacgcgttcctacagagactcaagcggttggacgcgtaccccaaggtgaacgaggacttctacaagtggacgctctttggcggcatcgtcacgctcgtcgccgccgtcgtcatgttgcttctcttcatctccgagaccaggtcatatttttattcagcaacagagactaagttagttgtggacacatcaagaagagaaaggctacgagtaaatgttagtactttttaaacgaaataaactgtctgtaggctattggctgatattggtgtttcttggggaaaagagtacgagcactctcaataatgtaactcagcaaatgtcatttgtacatatatattagacacctccagctaccttgccaacgcaagaacgagaagacgagttagactttgtcaaaaccctcttcactagtggaggtatcgaccatcactcgtcactgtaacccgatggtgatcggcaaccatgagcttccatgttattgtgttctgatacttgagacgtttattatgattatgtatgagatattgtctcttattagtactggatgatgagatgtgtcttattatgactacggatgagacttttgtgatgtaattgatgagactatggatttaaaaattgttatgtgattgtgtgtgagatattttatgtgaaaaaaaaaaaaaaaaaaaaaaaaaaaaaaaaaaaaaaaaaaaaaaaaaaaaaaaaaaaaaaaaaaaaaaaaaaaaaaaaaaaaaaaaaaaaaaaaaaaaaagcctccgcctctccttccaggggccgccgtcgggggctcgctacccctctccctcgaggcctttgccggggaaaagggcccagtcgcccaccaggaagaagtttgttgctgccaacctgcttggtggcctcgctgggaactccagcccctctgccgaggacttgacagccattctggagtcagttggctgggaagttgacaatgaaaaaatggaactccttctgtcccaactgaggggaaaggaaattaccgagctcattgctggtggaagggaaaaatttgcttcagtcccatggggcgggggcggtgtggctgttgtggaaactgcccctgctgttgggggcgctcctgcagctgagggaaaaaaaaaagaaaagggggaggaaaaggaaaaaagtgatgacgacatgggtttcagcctcttcgactaagcctgggaaatagtcaagagtattgtttttgagtcgcggaagcagagggaagaaaa

SEQ ID NO: 156330 - DNA, 180 bp, Zea mays
  Clone ID: MRT4577_74155C.1
ggttcgagtatcgcgagcgtccgcacttgttctacttttgagtgggcagagccgagggtgggctttctgtgcgtggagattttactaccgtgtatgacggctgcgaacttaagattagcatgcgttgcatattagtaaacgcgcctatgacctcacgatttggttatcccgatagttcat

SEQ ID NO: 156331 - DNA, 2006 bp, Zea mays
  Clone ID: MRT4577_74156C.1
cgtttcaggcactaagagatgcatgagagacctggtgatttccttctgagcgacttttcgaagtttgaacattcacctgtgcttcatctagcctttgtaagctctggataagtttaagaaaattcggcacggggatcctaccgccggctgtgagcaggatgctcaaagtttcctgaagtttgctgctgatattaatgaagcatctgttggttctaagctggaaaacattgatgaaaagttgctccgtcatttcgcaagtggttctcgagctgttttgaacccaatggccgcaatgtttggtggtattgttggccaggaagttgtgaaggcatgttcagggaaattccatccgctttaccagttcttctacttcgattcagttgaatctcttcctacatatcagttggatccccaggacttgaagccttcaaatagccgctatgatgcccagatctctgtatttggttccaagcttcagaaaaaactgctagatgcaaatgttttcattgtgggttctggcgctcttggatgcgagttcttgaagaatcttgccttaatgggtgtctcctgcagctccaagggaaaggtaactataacagatgacgatgtcatcgagaaaagcaatctgagccgccaatttctattccgtgactggaacattgggcaagcaaagtctactgtagctgcagccgctgccattgctatcaatcccagcttacaaattgacgctcttcaaaaccgtgcttctccagataccgaaaatgtgttccatgacacattctgggatggtttggatgttgtcatcaatgcccttgataatgtgaatgctaggatgtatatggacatgaggtgcctgtacttccagaagccactactggagtcagggacattgggcgcaaagtgcaatacacaaatggtcattcctcaccttactgaaaattatggagcttcaagagacccacctgagaagcaggcacccatgtgcacagtccattcttttccacacaacattgaccattgcttgacatgggcccgttcagagtttgagggtttgctagagaaaacaccaaatgaagtaaactcttttctgtctaatcctgctcaatatgctgctgtcatgaggaaggcaggtgatgcccaagcaagggaattacttgaacgtgtctccgaatgtcttgacaaggagcgatgcaatacatttgaggactgtataacttgggctcgattgagatttgaggattatttctcaaaccgcgtgaagcagcttacattcacttttcctgaagatgctgctactagcacaggcactcctttctggtcggccccaaagcgctttccccgccctctgcaattttcagccactgattcatctcacatcaacttcctcatggctgcttcaatactgagggcggagtcatttgggattgctatacctgagtgggcaaagaacactagcaagctggccgatgcggtcaataaggttgcagttcctaaatttgagccaaagaaaggggtgaatattgtgacagatgagaaggctactaacctttctagcgcctcagttgatgatgttgctgttattaatgatcttttggcgaaactggaagaatatgccaagggcctgccaccagggttccaaatgaaacctatccaatttgagaaggatgatgatactaattttcacatggatttaatagctgggcttgcaaacatgcgcgcaaggaattacagcattcctgaggttgacaagttgaaggctaagttcatcgccggaaggatcatcccggccatcgcaacttcaacagccatggccacaggtctagtgtgcctggagctgtacaaggtcattgctggggagcaccccatggaggactaccgcaacacattcgccaacctagctatacctctgctgtctatggctgaacctgttggggccattctgatcaagcatcaagatatgaggtggaccgtatgggaccggtggactatcaggggcaacctgactg

SEQ ID NO: 156332 - DNA, 292 bp, Zea mays
  Clone ID: MRT4577_74157C.1
cccataaaaaccccatcaaccatgcaataagaaaacatttgggggtaatggggttggctacaaagctgttttgccaaaacaaattttttggggtttttaacacaaacccacatggcccgggggaacattacttgttatgaccaaaccaaacccccttttttttgtttcaatgcccccttttgtttacactacaaccactaacagttattctacaccgtttttcgggacttgaaaagctcgatgggggggccctttataatgggaacaattttcttaaccccccccggggggg

SEQ ID NO: 156333 - DNA, 380 bp, Zea mays
  Clone ID: MRT4577_74158C.1
actcctcccacacctttcatcaagggctagtttttacatttccaggatgttatgacccccgcccacagggccccgggccagtggggggcgggaaaccaaaattcctctacgtggatgggccccgtggcccaaaaagatgttcctggtgggccgccgtggccccctggggggtggccggtggccttggttttagtccctgtggccgctggcgcgggggcccctcggcgtttgccccctcctgttggttgcctggactcgtctgttgtccgttggcggccgggtttgccgccgcttgctgggtccgagctggtgcactttgttgccccaactgttggtgttggttccttggtgccttgcccaccgggagcgggcttgttgaa

SEQ ID NO: 156334 - DNA, 721 bp, Zea mays
  Clone ID: MRT4577_74159C.1
aatggcatcaaccgctgcctttgcatgctctaattgggtatttgactgcgtaatcttccggtgtgtgcatatacctgtatctgacgccgttctctttccagtgccaattttctgaccaaatcagtaataattttagttttcacaccaatgtccttggcagtggacaccttcgcatggttggcttcatgtaacgagttctctagactttctactcgacctcttagaaatgctagctcttcactaagttctaaatttgtgcctgttaacagtgtgcattttgactcagcacactcagctctggtttcagtttttgaaactttacccttcagatcttcaataatatgttccatatcagacatcgtacatttcagcataccttgctgttcaacaatggcatcaaccgctgcctttgcatgctctaattgggtatttgactctgtaagtttcttctccaaaagactggccttatctgacttctcgcttttaagggcatttagttccccattaagctctatattaggtacagttagctccatacaccttatttttgcattttgcgctttgctttctgctcgtgagacatcatctttgatattcttaattgtgttttccaatgtgctcagctcagattgcaatgcattttgctcctcctgctttgtttctgctgaagccagtgctaattgcagttgcaaattggattcaatcaaggacgggttgggcg

SEQ ID NO: 156335 - DNA, 1873 bp, Zea mays
  Clone ID: MRT4577_7415C.1
cattgggtacctcgacattggccggctcgacgccggccgggagtttcaaatcccattactttctcccttaaaacctcctctcccctcgttctcctccgcctcctcctcccacctccccacacgggcacacctgccctccccgtcgccgcggacccactcccatggcaaagctcccgcgtctaccctgctcgtttgccgttctcgcgctcatgtgcatcatcccgctcacagcgccgcggcctgcactgtcctcgcgcgcggccccaagggacggtgtctccttcgccggcgcaggcaacacgatacatcaacttcttaaagatcacggccttcccggaggactgctcccgcgcggcgtggagtcgtacaccctggacgagtcgaccggcctgctggaggcgcggctgtcggcgccgtgctacgccacgtacgacaacggcgaactggcctacttcgacaacgtggtgcgcggcaacctcagcaagggcgcgctccgaggcgtggagggcctctcccaggaggagctcttcgtctggctccccgtcaagggcatcctcgtccaggaccaggaacccggggtcatcctgttcgacatcgggttagcccacaagagcctgtcgaggtcgctcttcgaggacccgccggactgcaagccgtcggcctccggcgggatgagcgccgcctccgccgccaggagggagggcacgcaaggtgttactggactacggttgaggcgagagatggcagcagcaggcagcgaccagagtcaggagcagaggtgaggaggaggaggaggagctctgagacgacaacacccgagacaatggcgagccagttttccgctttataaaatcctgcggtgagtgagtgagtgagtgagtgagtaagagagagagagagagagagtgccgccgccgccgcaacaagaaatacaacagctgcagcttcctgcagaggttggaatgtatctactaagatgtgggtacctttttgcagttcttttttctcgcttcttttcttctcttttagcccaagctcctctcttgtccatgcactgtgtgaattaagtttgtcagtcagtcaattgttgttataaacaaagcacgcaggggagaaaaagaacaagggaaagagttggctgagaagccagttgggggatccgcggactgtggtctggcctagaatgatagatttttgttctcgtcagggataaaattcttctggtgagggtttgttgcatgtgccagctcagcggggagtgagctgggcacagcacatcctccatgtgggcttgtgttggcttggctggttgttggttggttcacttcttccgtggattgataagtatatatatataatattatgctaggtttggttaggccttatatatagcactattaaagaatatagaagttgcatttctttttatgtcttgatgaaaggtatctctgtcaatctgtctgtcaagtagctgtattggaatttttaaaaaatatatatatatggctgtattcctttcaaaaaaaaaaaaaaaaaaaaaaaaaaaaaaaaaaacgtcggccgccagcgggatgagcgcccccccccccccccccaggtggaaggttaggcaaggtgttatttttggtttaaggtttaggcgaaaggtagcaccaaacagcgacgagcatcaggagcaaaggtgagggagggagattatgcaaccccccgagacgaccccgaattccggtttccccctttgtaaaatcctgtggtgagtgagtgaaaaaaaaaaaaaaagtgctcccccacccaaaaaaaaaaattacaacaactgcaacttcctgcaaaggttggaatgtgctacgtatctactaaaatatgggtccctttt

SEQ ID NO: 156336 - DNA, 430 bp, Zea mays
  Clone ID: MRT4577_74160C.1
caaagagagaacccgcacacagcagagttgcacctggtcgaacgatcttctactactagctcggtcgcttcacacaccagggagcaccaatggcatctgctgttactactctcctcaagaggtcattcctccccaagaaggctgaatggggatccaagcaccacctgtgtgtcgctcatatcaggccggggaccgccgtcgtctccatgggtgcccgcgctcgcgcctacactgacaagcttgtgcacaccccgaaaaccatatcgtctccgcgaaggggcatactctccatggacgagtctaacacgacctgcgggaagagggtctactctatctggctctagaacacagagggcaaccgccaggcctacacgaccctcctcgtgagcgctctacgcctgtgacagaacatatctggtgccacactctt

SEQ ID NO: 156337 - DNA, 283 bp, Zea mays
  Clone ID: MRT4577_74161C.1
gcgtccggtaataactcccggtgggcgatgctgggcgcgctgggctgcgtgtttccggagatcctggctaagaacggcgtcaagttccgcgatgcggtgtggttcaaggccggcgcgcagatcttctcggagggtgggctggactacctgcggaaccccaacctggtgcacgcacagagcatcctggccatctgggcgtgccacgtggtgcccatgggcttcgtccagggctaccgcgtccggcgcggcccgctccgggaatggctccacaaagtgtaccccg

SEQ ID NO: 156338 - DNA, 336 bp, Zea mays
  Clone ID: MRT4577_74162C.1
cctgcagtccgtccgattccctgtcaggccacgctcctaccttatcttactccgataccccctcatcctgccatccaccacaagcagctcaaacatatggggcgccgttccatgctggtcctctccttcagtactactctttctccttcttcttaccgcggcggcttcctcctacctgctagctcatctatatcgccccgtaccatgtggttgacagcgccaacagtttctatatcctgctacacacgtacgccattgatatcaccacggtacccatccaggacatttccttcggatacttcacgctcacctgctttctacagatggtcgactaca

SEQ ID NO: 156339 - DNA, 505 bp, Zea mays
  Clone ID: MRT4577_74163C.1
agaagagaacgagggcttcctttcagtaaagtttttgattggggtctacaatcaaaatacaataacccctccctttttaaaatacttttaaaaaaaaaaatgggagcacccgggtcaggtcgatgaattaacccaaacgacccccaccattacgagaaacctacccgggggggcggggctggtttttttttttggccaagttttaactcaaacagacgctaagggcgagtacccaaaccagtggacccgggatcttttttttacaagagggttttttgggccggcctccctacaggaaattccgggcttccccccggagctgagctgaatgcacctgtagctgcataacaactttaagggggcaggggtaagttactccaacgggggaacaccatgccaacaagcatttccttaggcttttggaagggcactttttagccatactttcgctaaaggatggggcaatctcacgaaatcttccaaaatcaaatcagagggtctagct

SEQ ID NO: 156340 - DNA, 688 bp, Zea mays
  Clone ID: MRT4577_74164C.1
cggccgctcaggcggcgggcgggcttccactaaacatttgttctgtctggccattccaagtctcaatgctgggtggaggttaaccatgtctcgtccctgcggcaacactcgtcctgcaggagtggttgccatgcaccttgatcccttgttcaaggaggttcttcttgctgggtctgccgatgatgcgcctacggtaaagccaacagcggctttggcctttggaggttcgtccaagattttggttgaggtccgaggtctacaagccacagccgccgctgcagcaccctgaggtggatgggtggcaactggtggaaagtaagcacattcgccagctccgttgcaaggcctcacacttcccctgtcgtatggtctcgttggatcttcaggggaagtgtttcaattgtctctctgcctcccacatcgctgcttcttgtcgtcggccgacgtgctgttgtatttgtcatttgctaggggtgctttggcaaggccaagggggaggcggttcgttggtctctgtctgggatcagcttgaccccctgcctgttccttctgatagggagtccaaggctgagcttaagtggaggtcagggtggcacaggatcatgccagcggccatcccccagctcccccggcccgcccggctatggcattctttgctagttttgggggtctgttgctgcgccggccg

SEQ ID NO: 156341 - DNA, 490 bp, Zea mays
  Clone ID: MRT4577_74165C.1
ggccgcttttttttttttttttttattttttttttttttttttttttttttttttttttttttttttttttttttttttttttttttttttttttttgtttgaacttaagttcaaaagaacaaatcgaagaaactcacacacttggaaaacacacagatacaatacaaacataaacccatcgccttttctggcaacttttaaccacacgggtgttcccttagggaccccccccaatgtggccccgggagaaacccccacagaatttgggcccgcaacaaaccccggaatatatggggggggatgaacccgggggcttattggggggaaagcccccctgggccctggtcggggggcaaggcccacccccccatggaaaaggcaccagcctaaaccccggccaaaaaaggggagaaaccaaattgggaaaggaatttcttaaacaacaggtccctaaacaggggggggctggcccccctggggaggggtccc

SEQ ID NO: 156342 - DNA, 272 bp, Zea mays
  Clone ID: MRT4577_74166C.1
tcgaagatgccgaaagcatagaaaataccgttacaagttaaaccagcatatgatgctgcctgatcactgctgtctgaaaaggtcagatatcgtgatgatgatggaatggattctattcttgacgtagatgatgtcctaattgatgctgacaggatggataacgatattactatggacattgtgcgataagagatgaacgcttgtggcagacgatgatcaatcagtcagggtgagagacttctacgtgacatatctgaagtttatgttgacac

SEQ ID NO: 156343 - DNA, 229 bp, Zea mays
  Clone ID: MRT4577_74167C.1
attctcaattttttttaaaatgtctctcaccgaaaacatacaagggtttactctcccttcacccacgggaaggggaaaaacaaccccaactcaagccccccacggctggggctaaaacccccgggccagggagaacaggaaaaccccggcaagggcaatcccagcacccagagaggggatgggaaaaacaagggaaccaaaaaacaaaagcgaaggacaaaaaacccaa

SEQ ID NO: 156344 - DNA, 336 bp, Zea mays
  Clone ID: MRT4577_74168C.1
atgtggttattttttttttttaaccggaagtaaccccctttgcaagaggggaaaagggggggaattggggaaataattattccatttccattccgagcaaaaaaaaagggattggaacggcatggccaggacaaatgccccaaaagggaaacaaatcagggagtaaacggggacatttcaggaactgtatacacccgaaaaaatttcgaacaaaaaaataagaaccttttttaatggccattaaaaaaacctttaaaaaagggtttaggaggtaaaatgcccccggggaaccgggggtggtttttccccctgtccaaagaaggactttcaggggga

SEQ ID NO: 156345 - DNA, 537 bp, Zea mays
  unsure (1)..(537): unsure at all n locations
  Clone ID: MRT4577_74169C.1
ggccgcttttttttttttttttttcgttttttttttttttttttttttttttttttttttttttttttttttttaaaactttggccaaacttaaaatagtttggctggcataacttctataatttcattcttagacgcacggagtacatatttcatacaactactttatattgtattatattatgtacatcaaacgaggaactctgccacgtcatccagcgacttcaacgttttctcgtagaagaggtaggactcgtagaccttgggagtccgcacgaagcgatcgaactccgtcatgttgtcgacgagctcgttggcgacgcggacgtagtcagcgcggcggcccgcggggacgccggccatggcggtggtgaggtcgaggccgaggtacttggacttgaggcgcacgtagaagagcacgtacttccaggacatggtctcgagcatgggccgcagcgtgcgcatgccctcggccggctgccggatgcgcgcggccgcctcctccgcgngtcagctccggctcgaagtaccgctcgc

SEQ ID NO: 156346 - DNA, 281 bp, Zea mays
  Clone ID: MRT4577_7416C.1
ggaggatgcatcagatgatgaagaaactacattggttgcgcaaactacttttgaggaccccatctttcttaccaccatcgaagacgacccttctcattctatggttgagggcaatacagaacctgttttggtggaggacgcaccagatgatgaggaagctaccttggctatacatggtccttctctttctatggttgaggacaatatagaacctcgactggtagaggatcctccgatagagacaaggtcttcttcgtccaccagagctagagaggatgagg

SEQ ID NO: 156347 - DNA, 271 bp, Zea mays
  Clone ID: MRT4577_74170C.1
gttccgtagtcagatcttggccccctaaaagtctcgatcggaacatcggtggacggtgatacagggacggggagatctcgtctaggttagggccgggccaggccggtctggtgtgagcaggggagccatggcgtctgtgcaggcaccgtacttcgaagtcgatctgttctgcaaggaccattcttgaggccggtaagaagcgactagagctttttcgtatgaaaaaagcgtattataatgtcaatgtatttgtttcagagcaagtaaaaat

SEQ ID NO: 156348 - DNA, 405 bp, Zea mays
  Clone ID: MRT4577_74171C.1
cccacgcgcacggagtgtcccttcccatatttctaacgtgctttgggtttgacgcacccggggtcgttcgtcgagatgccgaagccggtcacgaagctggaatacatcatgactgaggaccttgaccgcaaagagcgacctgtacaattatcggcgtgctgtactacaacaacatgatggtctggaacgcatcgatcggtctcgggggtccaaggagcagagactgtgggactgtgacacatacctagctgtatacagaagattagctatacacgccatcgactgagcgatttgtgtgtacgatgtttgatccaaatatatatgctgatggaagcatcttgttgcatatcatagacaaccagacgagtcctatatacgatgttgctgcatttttaacttctatcc

SEQ ID NO: 156349 - DNA, 2760 bp, Zea mays
  unsure (1)..(2760): unsure at all n locations
  Clone ID: MRT4577_74172C.1
gnaagcgacaaccgaggccaccgatcagttgactccctgtctcctcgtcgcaggttctcctcacacgggnacacgaacatcgagccctctccgcaggagcagaagacgcttcgcttgttccggccggtatcatccgtttggccgcttcatttctctccccgcttcggtgctgcctgctggccgaccgccgaagcgacaaccgaggccaccgatcagttgactcccgtctcctcgtcgcagggtctcctcacacgagcacacgaacatcgagccctccccgcaggagcataagacgcttcgcttgttttctaaaacattgctggggttgcagcatgtgtacttgggcatagagggattgttacatcgagctagtgctttggtctctgctgtagcagagcgcaatgggcatccgggcttgttcggtttgctggttgttctatgtgctggttcttgtctgttccttgtgtcaggtactttatgttggatcagtggcggctcaaactgctcagttgactgtggatgcttcacctcagaatgctcagataatccctggcaatatgtttggcatcttctttgaggaaatcaaccatgctggtgctggtggattgtgggcagagcttgtaagcaacagaggttttgaagctggtggttctaatactccttcaaacattgacccatggttgatcattggggatgaatcaaatattattgtggcaacagatcggtcatcatgttttgctagtaacccaattgcacttcgaatggaagtactttgtggagctagtgaaactaatgcttgcccatcaggaggagttggaatctacaatcctggttactggggcatgaacattgaaagaacaaaggtctatagagttaccatatacatcaggtcatcagaatcggtggagctaatggtttctttaacaagttcagatggtcttcaaaatctagcctctcatacaatcatgggagacaaagaagatttcgttgagtggacgaaggttgaatttgatttgcaatcaaattatataaatactaattcaagacttcagcttacaaccaccaaaagtggcataatttggtttgatcaagtatcacttatgccatcagatacttatatggggcatggtttccgtaaagatcttgcctctatgctggcaaatctgaagcctcgatttctaaaatttccagggggcaactatgtaatgggaaattaccttataaatgcattccgctggagtgaaactgttggaccatgggaagagagacctggccacttcaatgatgcttgggcctattggactgatgatggacttgggttttttgaatttcttcaactagcagaagaccttggcgcttgccccgtttgggtggtaaatgatggggccagcatctatgaaggagttccatcagcaacaatagctgcatttgtaaaggatgttgttaatggtattgagtttgccaggggagaccccgagactgcatggggttcagttcgtgcagcaatggggcatccagagccctttcagctttattacgtttcaataggaaatcaagaatgttcaaagtactattataaagataactatgtgaagttctactctgcaataaaagcatccgctggccgaggaacactaatagctgctttagctgaagctgcatttctcattggattagaaagggacagcgacgtggttgagatggcaagttgtgctccactctttgtaaacgacaatgaccaaaggtggaacccagatggtatcagtccttaactcatggcagcactatgggatgtccaaagtactggatgctgcactttttcaaagattcaagcagcgccacacttcatccgtccactattcaactaccgaactacgaccaactggtcacagctgctatcagctccactctttgtaaacgacaatgaccaaaggtgaaaataaagtgctatagtctttaactcatggcagcactatggatgtccaaattactggatgctgcactttttcaaagattcaagcagcgccacacttcatccgtccactattcaactaccgaactacgaccaactggtcacatctgctatcacttggaataacccacatgatgggaacacttacatgaaaataaaggttgtaaattttggaagcaaagctgttagtctgaatatatctgtaactgggttggaaactgatattcagacatttggatccataaagacggttctcacgtcgggttggctgcgggatgagaactccttccaacagcccgacaaggtggtgccggcggcaagtccaataaccaacgcgggcaagcaaatgggtgttatattgaactcgtactccctgacctcatttgatctcctcttggactcggagtctcaggttcgagcctccatccaagcttatgattagtgtgagatgtgtcgtgtgcgtgcccacaatactcaataccgagatacgggtccccccaaggctccccacaaggctttcaatagaaaatacgatatttgtgaattattgtgaagtacaggcgtacagctggctatgtgtatgagattcaacaaatggtttctacgaccctaataaaggtataaaagcacctttcctcggatatcgcgcatccgttgtagtctgcactcttgacattttctcttttttagagcatgtacagtgtacctaactaccgcaaactttttgtcctggtgcactacagcgaatgtgccatatataagaataaaaagaagggaaatataaccgt

SEQ ID NO: 156350 - DNA, 326 bp, Zea mays
  unsure (1)..(326): unsure at all n locations
  Clone ID: MRT4577_74173C.1
ggccgggnacaccaccactgggtcttgagaccttatttttatctactccagatcgcaggagaacccgatcgacaccatgagggtgttgctggttggcctcgctctcctggttttaggtgtgtagcgccacctccacgcatccaagcggggggtggggatgccagccaccgtcgccggttcatataccgccgccggcgcatcagtcaccttcggggggggggccacctgcggtgcatctaccaccgatgggccacctgacgtcgccggtccaactgccaccgccggctcatgcgccgttgtcggatcattttatgacgccaccatgc

SEQ ID NO: 156351 - DNA, 761 bp, Zea mays
  unsure (1)..(761): unsure at all n locations
  Clone ID: MRT4577_74174C.1
cgaggccggccggggatttgacttcacttctactcaccatcattgctctgatccaaatgctggtccctatccttgcagttttctaaaacattgctggggttgcagcatgtgtacttgggcatagagggattgttacatcgagctagtgctttggtctctgctgtagcagagcgcaatgggcatccgggcttgttcggtttgctggttgttctatgtgctggttcttgtctgttccttgtgtcagatactttatgttggatcagtggcggctcaaactgctcagttgactgtggatgcttcacctcagaatgctcagataatccctggcaatatgtttggcatcttctttgaggaaatcaaccatgctggtgctggtggattgtgggcagagcttgtaagcaacagaggttttgaagctggtggttctaatactccttcaaacattgacccatggttgatcattggggatgaatcaaatattattgtggcaacagatcggtcatcatgttttgctagtaacccaattgcacttcgaatggaagtactttgtggagctagtgaaactaatgcttgcccatcanggaggagttggaatctacaatcctggttactggggcatgctagcagaagaccttggcgcttgcccccgtttgngtgggtaaatgatggggccagcattctatgaaggagttccatcagcaacaatagctgctnnntgtaaaggatgttgntaaatgggtattgagtttgccaggggagac

SEQ ID NO: 156352 - DNA, 766 bp, Zea mays
  unsure (1)..(766): unsure at all n locations
  Clone ID: MRT4577_74175C.1
tttgggtaccctncggggccgtccgggaaaatactgccatcttgngcccctccagctctgacgaattatcatccgtttggccgcttcatttctctccccgcttcggtgctgcctgctggccgaccgccgaagcgacaaccgaggccaccgatcagttgactcccgtctcctcgtcgcagggtctcctcacacgagcacacgaacatcgagccctccccgcaggagcataagacgcttcgcttgctagagtattatacagggacaactggttacgcagacagtgcactgtgcatggtgttgcttcctggatggacaaggagaaaacgacacttgtgggttgcttgcccgcgactggagtgcaactctaacaattttctaaaacattgctggggttgcagcatgtgtacttgggcatagagnggattgttacatcgagcntagtgctttggtctctgctgtagcagagcgcaatgggcatccgggcttgttcggtttgctggttgttctatgtgctggttcttgtctgttccttgtgtcagatactttatgttgggatcagtggcggctcaaactgctcagttgactgtggatgcttcacctcagaatgctcagataatccctggcaatatgtttggcatcttctttgaggaaatcaaccatgctggtgctggtggattgtgggcagagcttgtaagcacagaggttttgaagctggtgggtctaatactccttcaaacattgacccatggttgatcattgggggatg

SEQ ID NO: 156353 - DNA, 222 bp, Zea mays
  Clone ID: MRT4577_74176C.1
gctaggactcgctgatctgcgcgacggtgaactgacccagagttgtagttgacgggttcaagaaaaagaaaaccgtcatggtgctggcaaattattcctgcttcgggatcttatctccgtctggaaaccattatctttgcttttttgttgtcgtcttttctgatccatagatatgcttaaaaaggaaccttttgttgcgctaaaaaaaaaaaaaaagggcgg

SEQ ID NO: 156354 - DNA, 1638 bp, Zea mays
  Clone ID: MRT4577_74177C.1
aattcggcacgaggcttatatggggcatggtttccgtaaagatcttgcctctatgctggcaaatctgaagcctcgatttctaaaatttccagggggcaactatgtaatgggaaattaccttataaatgcattccgctggagtgaaactgttggaccatgggaagagagacctggccacttcaatgatgcttgggcctattggactgatgatggacttgggttttttgaatttcttcaactagcagaagaccttggcgcttgccccgtttgggtggtaaatgatggggccagcatctatgaaggagttccatcagcaacaatagctgcatttgtaaaggatgttgttaatggtattgagtttgccaggggagaccccgagactgatggggttcagttcgtgcagcaatggggcatccagagccctttcagctttattacgtttcaataggaaatcaagaatgttcaaagtactattataaagaataactatgtgaagttctactctgcaataaaagcatcctatccagacatcaaaatcatatcaagctgtgacagatctgctatttcatcagacaacccagctgatttgtatgatgtccatgtctatacttcatcaggtgatatgttttccaaatctagaatgtttgataatacagcccgtaccggacccaaggcaattgttagtgaatatgctgtaactggaaatgatgctggccgaggaacactaatagctgctttagctgaagctgcatttctcattggattagaaaggaacagcgacgtggttgagatggcaagttgtgctccactctttgtaaacgacaatgaccaaaggtggaacccagatgctatagtctttaactcatggcagcactatggatgtccaaattactggatgctgcactttttcaaagattcaagcagcgccacacttcatccgtccactattcaactaccgaactacgaccaactggtcacatctgctatcacttggaataacccacatgatgggaacacttacatgaaaataaaggttgtaaattttggaagcaaagctgttagtctgaatatatctgtaactgggttggaaactgatattcagacatttggatccataaagacggttctcacgtcgggttggctgcgggatgagaactccttccaacagcccgacaaggtggtgccggcggcaagtccaataaccaacgcgggcaagcaaatgggtgttatattgaactcgtactccctgacctcatttgatctcctcttggactcggagtctcaggttcgagcctccatccaagcttatgattagtgtgagatgtgtcgtgtgcgtgcccacaatactcaataccgagatacgggtccccccaaggctccccacaaggctttcaatagaaaatacgatatttgtgaattattgtgaagtacaggcgtacagctggctatgtgtatgagattcaacaaatggtttctacgaccctaataaaggtataaaagcacctttcctcggatatcacacatccgttgtagtctgcactcttgacattttctcttttttagagcatgtacagtgtacctaactaccgcaaactttttgtcctggtgcactacagcgaatgtgccatatataagaat

SEQ ID NO: 156355 - DNA, 198 bp, Zea mays
  Clone ID: MRT4577_74178C.1
cctacaaataccatctccactctatttcatatccaaaaatcacttacctcaccactgatgatatttaacctctcagtcattaacctcacccaatttaaagtattacaaaaaatcttttttctcacaactattcaactacttcttatcctcaatgcatattacaaacaaatcatctaacaaatcatatactccatttca

SEQ ID NO: 156356 - DNA, 493 bp, Zea mays
  Clone ID: MRT4577_74179C.1
aaaaaaaaaaaaaaaaaaaaaaaaaaaaaaaaaaaaaaaaaaaaaaaaaaaaaaaaaaaaaaaaaaaaccaaaaaaaaaaaaaaaaaaaaaaaaaaaggttggtccctgggccgggacccccctaggggggatttttggaaatttccttcacacgggggggcgttcgagcttgcttttagggggcccatttcgccttttgggggggggttttacatttaatgggccggggtttaacaacggggggggggggaaaaccttggggttcccaaatttaatggcttgggagaaaatccccttttccccagttggggtaatagcaaaagggccccccccgttcgcctttccaaacatttgcccaccctgaaggggaaagggcccccccctgtaggggggctttaaggggggggggggggggggttacccccagggggaccgttacatttgcaagggccttaggccccgttcctttggtttttttcctttcttttttgg

SEQ ID NO: 156357 - DNA, 107 bp, Zea mays
  Clone ID: MRT4577_7417C.1
aggcaaccgaaggttacggaacgcttttcactaaacaagagtaccaaatgcaagaagatagtatgtacagtacatactctgtctgaactctgaaccggacgcgtggg

SEQ ID NO: 156358 - DNA, 197 bp, Zea mays
  Clone ID: MRT4577_74180C.1
gtttattggtaagagcccggagaagatctgctcgggatccgacgaaagagtgtcacatggggacacgctcttaccgatgcaatgatagcccgagccaatggtgccaaccagggagaatgggcggctcagcggaactcggtggagaagcactatgcgtactctacgagaccaccagtgcaagtgctgaggtgctctac

SEQ ID NO: 156359 - DNA, 612 bp, Zea mays
  Clone ID: MRT4577_74181C.1
ggcacgagccccgtcatcgaatacaaccatcccctatgccgtgcaacgccttcctctaccttgccctctatccaaggggaaccgtttctctccccctcgatctggagctccccaacatcaattcccatgactggtgttggtcagccagcgtccacgccttcgtttcccactcccatggccaccaccacggtgctccccttcccggcgtcgaccaggcacaagtccggtgatggagccctcacggggaacatcacgacgacgctaatcacgaactgtgcatccgcaagacgagcctatgagctccatggcacgacagagtgcgtcctacccagtctaccggtcctgaggtggaggtccagtcgggcagatctactctatgctcgtcatcgagatgcaacacctccgcctcacacacgcagaagtcgatgcgctcgcggtcatggccagctcggagcctgtctaggccctagctagcctaccagccatcctcgtcctcccctccctcatccctctcaagatgaacatccagattactgaatcaaccttgtcagttctatttgcaaagtttctcaaataaagctgaagatcttttgtgtaaaaaaaaaaaaaaaa

SEQ ID NO: 156360 - DNA, 310 bp, Zea mays
  Clone ID: MRT4577_74182C.1
gttaagcgctacactccttaataaataaaacactcggggctgaaaagttttaaaacaacccaggatgccacaggcctacacaaggtacaagggagccacagccatataaggatactttttttaaaacaataaagatggggctatggaacataaaaacaagacacacagaggggggaataccacaatacagggactaggggtccctaggaccacccttttttgcagcctaagcgggagccttttttggctatatctcaggaacatattcatcaatcttagccccctaaagtttccggagaccattcttttt

SEQ ID NO: 156361 - DNA, 458 bp, Zea mays
  Clone ID: MRT4577_74183C.1
cgggccgtaacccctttgggggaaattaatggttccaaaaatgaggataaaataaataaacaataatccaggaaaaaaaaaaaaaaaaaaccctgccaaaatcctacgaaggttaaaaaaaagaaaatggaaaaaaaattttaaaaaaaaatccatgtcaattgaaaccggaaagaaaaaaccaaatactgaaaaaaacccaaaaattaaacgtcctgaactttagggctcaaggcaaaaaaaaaaaaaaagctcctgcgtttttccggaagcgggaattttaaaactcaaggttaatgcctgcaaaacgggaaaaaaccaaagttttccaataacccaaaccgccccgggaaattgcgcccaagggttgaaaccgaaggggcccacctcgaaaaacatggaggctaatagcaactccaaaacaaagccggcctgaaactcaaggtgccctggtcggg

SEQ ID NO: 156362 - DNA, 289 bp, Zea mays
  Clone ID: MRT4577_74184C.1
ggaaagggccgcccgagcccgatccggaatacgggggcgatccacgcgtcgacaccgcaagagactcttttgttgctaactcatgggcaggtcatcacggacaagccaagggagagaccgagctgggaagaagatacacgaggcggcctcggcgtacctgagcagggaagagagagataagacaacagcggccatgtgctggctccagcgcccggaccggctgacggggaatatcacggagggatcaagcgcgggccacaaccgcgccacggaaacgctggtcccgaag

SEQ ID NO: 156363 - DNA, 390 bp, Zea mays
  Clone ID: MRT4577_74185C.1
ccgccgccggcggcgaccatgcccctggcggctgtcttggagttcctcatcgtgtgcgcgctggagatgctcgaccgctacctcgacctcgccagaaagagcggaggacttactgatgagcagatcaaagcgcggcttgtatatatgcaacttctcaaggaggctgagcagttgtgaacgccggttccatctgcacaagctgctaagatcaatcgcctggctgctgtcaaggagaaggaactggcaaaaatgcaggaacaggacctgtgaagggaagcaatgcttatacgacaaatacacaaaattttcgtaggttactaaggtcataatttatgcttgagctcgatctgtgcttctggagcactcctgtaagtgcagtttcacagcatc

SEQ ID NO: 156364 - DNA, 611 bp, Zea mays
  Clone ID: MRT4577_74186C.1
gacacacatgagacagctgatgactcagtgggaggatggccgaaagcatgagaccactgccagaccaactgaggccacatcggccagagggccttgcaaggagggcatgaaggaggacttcactgaccagtgctgtgcccacatgtgcgcctccgtgccatttatccagaaaatcatcgaggagatcttcggcacctacttcctgatgtacttggtgtgcggcgcggtgaccatcaacgcgagcatcaacgggcacatcaccttcccgatcatggcgatcgtctgggggctagcgttgatggtaatggtgaacgccattggccacatctccggcgcgcacttcaacccgcacttgaccctggccttcaccatcagcttgcggatcccgtggcggctgctgtcgccgtacgtgctggcgcacatgctgggcgacacgctgggctccaggacgctgtgcctgatgttcggcgtcctgtacgagcacttgcacgagacgctgcccacggccttcgagatgcactcggtcgtgatcgagatcatcatcacatatctacctcatgttctacatctccggcgtcatctccgacaacagagcaatcaacgagctgtct

SEQ ID NO: 156365 - DNA, 312 bp, Zea mays
  unsure (1)..(312): unsure at all n locations
  Clone ID: MRT4577_74187C.1
ctattttcnnnnnnnnannnnnnnnagnagaaagcattaaggagccttagccattgtttgttgatcagcattacactatacatgagcctccatcgtaagtgagcttatacatattattccccacacttgctgagcgatgaacatttatgaccttacccttgcaatacctcccaggtgaagaacaggtaccactgaaggaagattactacgacgagatcagtcgtcgtctctcagtcaactgttggcgccaagaaaataatattagttcgattcatttattatcaggaattttgtaagacattttcgttatgt

SEQ ID NO: 156366 - DNA, 2202 bp, Zea mays
  Clone ID: MRT4577_74188C.1
tcgaggccggccggggagcgcatccacacgccacgcccgagagcgcccgcgaaaatgacgccgccggcgagcacatcaggcaaacgcgccgtcgcgatagacgagccgctgctgccggagtcctcggcgggtgggcggcacggcggcggggcgtcggtctcgggcgccgtgttcaacgtgtcgacgagcatcgtcggcgccggcatcatgtcgatcccggcagcgatgcgggtgctcggggtggtccccgcggcgctcctcatcgccgccgtcgccgcgctcgccgacgtctccgtggagttcatgctgcggtacacggggcgggggtggggcggcggcggcaaggacgaggcggccacgtcgtacgcggggaccatgggcgacgccttcggccgcgccggcgccgcattgctcaacgtcttcgtcgccctcaccaccacgggcacgctcgtcgtctacctcatcatcatcggggacgtgatgtctgggagcgtcggcggaggcgacgagcacgccggggtgctgcaggagctgttcggcgcgcggtggtggacggggagggagttcgtgctgctcgtcaccgccgtcttcgttctgctgccgctcgtgctccgccgccgtgtcgggaggaaagcgaagtgatggacggagtccttaggaacttcggcccatcaactctcaatgtggcttacttccaagagctcatggtagtgctctgttcacaaggggagaaacacaggtaagcatggcttctgtttatggaggttgtttagcacttcaagatggtggggttcctataaagtttcctgttgctggaattgaaatgggcctggtccttgatacacaagaatttggtggagatggtagcccacttatactctctgatattactggagctgaagatggttctggtgacatggatttgaagattgctggtaatgaaagtggcatatctgcatttcagatggacactaaggtagttgggataactctacctgtgatggagaaagcactcctccaagctagggaagggagacaacatattctaaattcgctgagattcacgtcggccatttccatcctactggcggtagtgttcatgctcatcagctcggggatcgcgctatacgctctcttcaagggcaccgcgaccatgccgcggatgtttcctgacttctccagactctcctcgccgttcgagctcttcaccgccgtccccgtcatcgtagtcgccttcaccttccacttcaacgtgcacccgatccgcgcggagctgagcaagacgtcggacatgaaggtggcagtgcgcgtctcgctcgtgctctgcgcggccatctacgccgccgtgggcttcttcggcttcctcctcttcggggacgccaccatggccgacgtcctcgccaacttcgaccgcagctctggggccggtgtcccgcaggcgctcaacgacgcggcgcgcctcagctacgcgctgcacctcgtgctcgtgttcccgctcctcctcttctcgctccgggtcaacgtcgacgagctcctcttcccgggccgccggccgctcgccgcggacacgcgccggttcgtgtccctgacagccgtgctcatggcggtgctctacgtcctggccatcgcaatccccagcatctggacgctcttcgagtactccgggtccacgttcgcggtcaccatctcgttgatcttccctggcgccatagttctcagggatgttcatggaatagcgaagcgcaaggacaaggcattggcggcaacgatgatcgttctggcagtggtcacgagcagcatcgccattgcctcgaacatcatgagctccatcagtgacgaagacagaggaggtcatgtagctggtagacgataatggctcagatcgaatcaaattaaaatgtggtttccaggccaaccgcgcgtgaagattgctgctcgtgtcatgcgttcctcctgggtattctttctttgcagcgagattgcttcggcccctgagatgcaagtttagtctgtgccccctcatggtgtagatgtttgtggttgagaggagatacgttggtacatggtaaggaaattaccagttggccaatgctgtatacttgtttcggtgatacattacagtgtaaaatagaaaacggtcatattttctttttcagggtttataaacaaaaaaaaaaaattgcaggcccctagcgatctaga

SEQ ID NO: 156367 - DNA, 568 bp, Zea mays
  Clone ID: MRT4577_74189C.1
cattgggtacctcgaggccggccgggactctgcaaagcgcgcgcccggacggcccggttcgttctcgacctctcgtctcgctcatccgcccgcccccgcccccgaggaaggaaccctagcctagccttgctccgaccggtcgccgcggcgactgcgacgatgatggactgcgctggaggccgagaccccgtggaggacttcctcctcggcggcgccggcgacgacggagatctcgtcgccgtcttctgcgacgacggagggtacggcgatgccgaccggagcacccctttctcgtcctagtatatacttccatgtggactgcgtttaggcttacggaccggtgcatggggttttatactcccgagggtcgttgtcgctgccgctgcggattccttttttttttgttttaaatttgtgggcggtggtagactgattgcttgatttggctggtgtagcttctaaaaactatgtgctaactgaaacagcatgcgcatatatcttttttttttctgtccaagggaaaggaggaaggcttgcgtgcatctgccagttttccgtctgcgatgct

SEQ ID NO: 156368 - DNA, 160 bp, Zea mays
  Clone ID: MRT4577_7418C.1
agctcctattaacattgactgtcgggggccctacgggccggtgacaataggctgaccccaatccgcctgattgggctcgcaccttcggtcatggatgcctgagctaggccgatctcctaggggatcatgttcctatcgacgcttaaggaggcgaagccgc

SEQ ID NO: 156369 - DNA, 762 bp, Zea mays
  Clone ID: MRT4577_74190C.1
gccgcctgcctaacttcgccgactgggcgcgcaagctgcgcgtgcgcgcgcagggcgccggccacgacgagatacgccgcgccgcggtggaggcggccgagctgttccgcccgcagcccggggagcgcaatgtgggaggttccgaggcggcggccgaagcggcggcggcggcgccctgcgcgatggggagcttcgagatcggcggcggcgaattcccttactacccggtggacgacgggctggagttcgagatgcgtgggtaccttgacatggcgcaggggatgctcatcgacccgccgcagccggccgctgggcagtcggcgtggatcgaggacgagtacgaatgcgaggtcagtctttggagctactgatcgagcgcgtctggtaccaacaaggaccctgtgtacatacagcttatggtgtgctgatgatgtctgtactgtttccctgctcttctgacgaatcgcaatcgctatcagaaggagcagaggagtgtgcttaggttttgagcggctgtctctgcacatttggcgctaacacggccaaggtagccttggcgccagatatggcacttggtgcggacgccctcttataagttacgtaagataagaaccacatggtgtaataaacagcagagcctgctgagcgtttgaacctgcagcgatgtcaatgaaattgccgtgtgagtgaaattacctgaactaaaaacatatatgctctatggataaatgtccactgcaagagcaaatatattgattggaa

SEQ ID NO: 156370 - DNA, 730 bp, Zea mays
  Clone ID: MRT4577_74191C.1
cacagtcctctcctgccggcgccgctgccgttttgcgtgcgcgtgcatcctcgccagggtctgccggaacctagcgaggtccagggtcacgttctggccgccgaggtagacgcgcgccaccaagttccatccccccttgtcccgcttcgccgcttccgggtcggtcagcaccacgtcgcccggcgcgtacctgcgcgccagcgagctctcgccggcgcgcacctcgtactgctcgtacgccagccccatccgggcggcgggttccccgaagtcttcgcgcgcgatcggggacacccccagcggcgcgatctgggtgagcgaggcgcgccccggccgcaggaacaggaacttggtcaggtccgcgccgtgcacccccacgagcgcgtcgcaggcacgcagcgacgcgtaccacgccgagagcggcagcccgttggccgtctccaggatgtccacgtcgaaccccacggacgaggccagccgcgccaccgccgcctggttctcgatcacccgcgtccccttgcgcgacacgatccccagcctcggccgccgtcgccgccgctgctcggcgtcccgcaggtcctgctgctgtgctggtcttgccgtctcccgtggtggcttctcgtacgcgtcggcgagcatctgttggaagtcgacgatggtcttgttgtcccggagcctagcggggtccacgatgaggatgccgtggtagcggttccccacgatggcgccc

SEQ ID NO: 156371 - DNA, 660 bp, Zea mays
  Clone ID: MRT4577_74192C.1
gttcgctcatatctccccactgctcgttcaccagatacgccccccggcgataaatcccccggtgaaacccgatagagaaaggcctcgctgaccacgcggagctcagggttctcaaggacgactttccgaccacgccgaactcccccttcggaaaccgcggggtggcggcctgctgcaccgatgccgagaggacaaccccgatcaagatgactgcatccatgacaatcatactgctgaaatggactcagttgaaaatgcggctcatgagacatggacaactacagaatgctcaaggaagagctgtaggcctcccatctgatgatgacgtggcacatcatgcagtaggacacacatgatgttggcgctggacaaactctagctcttctggctaaccttggctatgcagctgttgactctcgaaagacatatgatggataagcttgcaactacatcaaagaatcctgagacagggtcactcatacccatgttgtatagttgagagaagtggttaactgctcccggactaataaatcggagatacatgcagatagtgctgactgaatagtggctacttgaatcggtgtgtacatccatagtgatatacgtctcgaataagatgtaaccagtatcggtttcgctgataccctatggaatgatcta

SEQ ID NO: 156372 - DNA, 386 bp, Zea mays
  Clone ID: MRT4577_74193C.1
tttgccgcccttgggagtccgcttacatgctccattaatgccccgagacagaagttcatttcgcatgtgcacgcacccaaatgggacctagtattgtctgtaaaagaagatatgtcggcatctaaaacataggagaggccggacctagtacaagaagagtttttttttacacggagggaggaactaactattcgactcatggatcatcaaaagctattggtatagatatgaggtatatattgaactgaccgggcaccaggcgcacccgagcttggcaggcctctgagaacagtgcgccagacctgcaaagcagggaaagggggtaagtatcacgtcctccagtccttagccatgcggttcgtccggtacggttcatgaaccgtgga

SEQ ID NO: 156373 - DNA, 453 bp, Zea mays
  unsure (1)..(453): unsure at all n locations
  Clone ID: MRT4577_74194C.1
tntttttttttttttttttttntttttttttttttttntttttttttttttttttttttttttttttttttttttttttttttttttttttttttttttttttttttttggggggggaaaaaaaaattttttttaagcaaactttggggggggctttacaaaaaaaaaaggaaaaaaaaaaacaaacaggcggaaaacccaaaaactaaacatttccgggggtgggaaacaaaaacccctaaaggttggggggttttaggcccccccccccaagttcagtggatgggggagggcacccaccccaaaaaaggggggggcctgacaagggacaaccccccgaaagctccagcacaaaatcgggttccatccccctctgctcaggggcaggggggtcacaaccccaaaaaaacgcccaaaaggggccggggggaaaaaaatctgcccacgtccttt

SEQ ID NO: 156374 - DNA, 1435 bp, Zea mays
  unsure (1)..(1435): unsure at all n locations
  Clone ID: MRT4577_74195C.1
aggaagntatttttgnaatggatggnaaggaaattgatgggnggnaggtangtgtnaanatggntaatgagagacttgttgggaanngtggtggtggnggttatggtggnggnggttatggaggtggtggatangaaggtggtggnggntangnagttggtgnntatgntgntgncannnnnagctatgacgtcgcatgcacgcgtacgtaagctcggaattcggctcgaggcgcgccatggttgtggaggccaactcagggagcacgctggcggccgtcggcgtggccggcaccggcagcagcatggccgtgcacagccaccagctttcgaccgtggtgccgagctcggtgaccggggaggaggtgaactacgagctcgcggacgccgacttgctccacaaggtgcactacgtacgcgcggtgcacgtgttccgcgcgccgaccgccgtcgcagcgccgccgctcaccatccgggagctgaaagagcccatgttcccgtggctggacatgtacttccccgtcagcggccggctccggcggcgtcaagcggccgagggcgaagaggccgccgcggcggcggtggggcggccctacgtgcggtgcaacgactgcggcgtgcgcatcgttgaggtcgactgcgacgccaccgtggagcagtggctggaggcggaggcggagcgcggcgggctgtgcaaggcgctggcctacgacaaggtgatcgggccggagctcttcttctcgccgctgctctacgtgcaggtcactagcttcaagtgtggggggatggccctcggcttcacgtgggcgcacctcatcggcgacatcccctccgccgttgccagcttcagaaagtgggcgcaggtcctcggcggcaacaaggccccggcgccaaccctgcgagacccactcgcggtgccgccgtcggccccacctaccagcgtgacggtcccgccgtcggtcaaggccaccgcggcccccgtcggcgatcactgggtggtcccgaccacccatgacatggtgtccttctccttccacgtcaccgagcagcagctgcagggactccagctcagcgcgatcaagggttaccatcggcgcgaggttgtgggcccgtttgagctggtctccgcgctgatgtggcgggcgctggccgcgatccgaggccccgaggaggaggaggcgacgcgcacggtgaccgtcgtgaagactggagcggcgccgacgtcggggggcagcccccgcccggcgctgaccaacgagcaccgcatcggccacgtcgtcttcgcgaccggcggctcctcgccagcgacggccgacgtcgccaagctggcagcgctgctggccggcgcacacctggaggaggccagcgcggtcgcggccgccgactagtgagctcgtcgacccgggaattaattccggaccggtacctgcaggcgt

SEQ ID NO: 156375 - DNA, 535 bp, Zea mays
  Clone ID: MRT4577_74196C.1
gttttttttttttttttttttttttttttttttttttaaaccaaacgaaggcacaggtagtagattactaaacaataatcagttatttacatgtacaactaaattaaatgaatgtatgaatgaatgaatgaatcaactggccaatatgccaacgaattagtactgtgagtctacaacaacaatgtgcaggctgacgagtgacgacagaaacgcaaagaattgctctactactgtactagctagtataggtagtctactctaaagtacaaagcccggcggcgatgggctggcctttcgatctttccggccgtgcacgggcagcaaaactaactctacacaaaaagctggaggaggacgggcggcggggcttcttgctgatgccgtgcttgggggccacgccgccgccgccgccgcccagggacagcgcgagggaaagcggcacggcgccggcgtctctctggtgcttcatgtacgtatgtcggtggtggggaatgagtgtctgagggggtgaaagcttgcgatcgtgctcaaaatg

SEQ ID NO: 156376 - DNA, 316 bp, Zea mays
  unsure (1)..(316): unsure at all n locations
  Clone ID: MRT4577_74197C.1
aagagacgacaaccggggggagcgggggcggcaaaaggcaagggcgacgggaggangcccggcggcgagagggggccggcagcggagacaggggccgnnccgaagcngaaggcgccgaaggggaggacgacgaaggaccacgagggacgccccgaangccggcnggacgagggcggagggacaaggaccggcgaccacaaccgcaanngcgcccacaacggggacggcngccangccggcgcacggccgggccaaccacggngaccccaagaagaccgcaagaacagggacgngaaagnggcgaaagaggagcaag

SEQ ID NO: 156377 - DNA, 373 bp, Zea mays
  Clone ID: MRT4577_74198C.1
ccaggaattcccggacccgcgggtggacccggcaatttcggatatggtccggtcggaaaaacaccggtgccaataaggggctcgctgaaagctggggcgaaacaggggcccagccgagagccgggggaaaacggaaccggctgacaaaaacgcaaacactggggggcccaatgacagaacgaagccgcagggggggctaagcggtgagcttcctccgaagaatcggggaacctttactggcccctttcgaagcgggaaagccagggcgccgggagacacgatgaagaacttgacccccagggagaagcgcgcttccttgagggcgaccgggaggggcttgttgtcccccatggaaagggccacagagaggtgg

SEQ ID NO: 156378 - DNA, 500 bp, Zea mays
  unsure (1)..(500): unsure at all n locations
  Clone ID: MRT4577_74199C.1
cacgccatttaaacagtgggggtttggaggcgagagattgggaagcctcctgtgcttcagcagcgcgcttgacggacgcncatttgatcaatggcccngggctactagactaatactctattttgttatcatctgatgcgctaaatggatcatatcagttataacatggaattgctgggattgtctatgatattgttgaggataaatctaataattctttgctgaattatgtaatgttgcatttattgatcattgtataatataatttgttattgtttgctttattcnatggacacctgggccacccttttccagactttttgatttctcatcttttcattaacatctttagttattcaatattgtttagtgatccagattctgttatccgaatctcataccancttacgtgtcaaaacattttggaaaacccactatatttggttagaggtgatttcccttttgttactgccatctttataggaagtgaccagttcgtt

SEQ ID NO: 156379 - DNA, 380 bp, Zea mays
  Clone ID: MRT4577_7419C.1
atggtcaccttgtacccgttcagccctctgaggctggatggcgaggcgtcggcgtcgtaccattcccctcgcttgccctgcaggatgggccagaggatcgcggaggacacgacggcgcccaagagcagcgagaagttgaccatgggagggcagatcatgccgatgcccacgaggctgggagagaagtcgaagtagaatcgcttcttgtaggcctcgaggccgaagagagggaaagcctggaagccgcagccgtcgcctcccgtgtagaaccactggaacaccgcccagctgaagctcccgcctagagatcgcagcagagtggctatctgcaatcttttattatttatgtaaaaaaaaaaaaaaaaaaggcccctagggcc

SEQ ID NO: 156380 - DNA, 756 bp, Zea mays
  Clone ID: MRT4577_741C.1
aggtcgctggctagctcgctgccggccgggccgggactcagcgcaaatctgcaagcagcccaagaagggtttagactttcagaggaaggggacaacggaacccgtcgatggcggcggctgctggcggcgtgcggcgagccctcgcggcgctgcgctccggttccccgtctactatctctgcaacgctctcccgccaggcggcagctcgctctctggagctagcggccgcgtccctgccgcgcgcctctcgccggcgcctcgcgatctcgagggtgccggttgcggcgctcggcggcgtccaggcttcgctgatgccgatgcacaacgccaccgcgtcggcgctgctcacctccatgctcgggcttaaacctggctcttggggctggctctccgaaggatttgctacacctctataacaggaaaaaggagtatccgtgataagtgcctgtttttattcctttgcactagaggattccaaaaacatttttacatgccttgcggagtacacccttggacttctgctgatggaatctgtactaaaatctgcgacaaaaaacttatggtcctatgtcccaattatcttggttctactatatccatcgaattattcgctttccacgctaaaaaaaaaaaattaactcgcgctgcattgccatgggattctaatatgacatcagcatggctagtatcaaatatttgttatccgaagcatcaaagcacaagtatgaatgatatatttacatgttttgtgttgtt

SEQ ID NO: 156381 - DNA, 350 bp, Zea mays
  Clone ID: MRT4577_74200C.1
gccggccgggccgggtcctctcttcggatcgtcgctccactccagtccaagtcccccagcccgccaggaagccggagcatcgcgcctgcaccgcacgcccacaggcccacagcaagcaccaaacaagccaaacgatggcgcttctggtgctgcgcgcgcctgcagccgtccacgcggcctcccggctgctccctccgccgcggcggcggtggcggcggctcgtggccgtcgcctcggcggcgtcctccgcgccgtccggcgacgtgtcgtcccagcacggcgcggcggcggcggcggctacgggatcgtgggagaccggcccagattgccttggtacgtatcgcctccag

SEQ ID NO: 156382 - DNA, 306 bp, Zea mays
  unsure (1)..(306): unsure at all n locations
  Clone ID: MRT4577_74201C.1
ccgggncgaccccgcgnccggaccattcaggcagccggcagcgaggcagggaggcacgggcaaggaccgcggcaaccacggggacgaggacagccggcagacaagccggcgccggccggccacccggcggaccaaggcgccgccggagggccccgaggcgccagacggggaccgggagcaccgccccacgggggcagtcgggaaccagcacgacgcggcgcggccgaagccgcacacagacaacggnccggccccgccgccggccacggcggcgcaagacaccgcggcggcccgcaaccccaacgg

SEQ ID NO: 156383 - DNA, 395 bp, Zea mays
  Clone ID: MRT4577_74202C.1
caacccctaattttaaaagggaaaggcttgatctttgtcccaaaataacccaatttttattccacccttaaacaattttgaccaaatttcccgacttggtaaaaccccttgggaaaaaacaaacggtttttccctttgttcccccgaaaggaacaagggggcccaaatgcagtcagtctccaaccttaaatttgcttctcccttcaaaaaaggaacttgtttaaaaacaggcccttttttttatttggccattataaccttaacaaactccttgaagttaatctggccatcaccgcccacgtgggtttaaaaaatttttttttccacctccttgtccggaagtttttaacctaggttggccataacatgtcaaacctcaccaccaaaaataaacc

SEQ ID NO: 156384 - DNA, 402 bp, Zea mays
  Clone ID: MRT4577_74203C.1
gggaacacccataaaaattttttggattggtcccccggggcccaaggggctttattttaaaggcaaaacctttcggctccttatggctttataacgggcccccatggggggggttgccccgttgttttgatccaaacttttttcaaaaatgtttgacaaaccccccaaatgtcctaaaaacccggaatcttttttaaatggctccccagtttttagcggggttgggtttcacttaggcccccactgatggttttgggatctcactgggcccagcatcctttggggtggccccattaacgggaacctcagtcacaggttccgaggcccttgaaccattcacctggttttaaccagttgcctaaaaggaattcttggagggctgctttgaaagggcctttggtt

SEQ ID NO: 156385 - DNA, 352 bp, Zea mays
  Clone ID: MRT4577_74204C.1
cccacgcgtccgcggacgcgtggggttctagatcgcgagcggccgcccgcgatgtggaacgtgctaatagaacgcgagtgaccatcagccggactacgatcctagcgctcatggatacactaactgccacggacgtcgattgccacaactcatctcacgatcgactatgtagatcaatacttgtccaaacgcacgccagattcccgacacacgaacatctgtagcacgctcattgatcacctaatctccaatgcctcgcgctttcacaccaacgtgcatgcacacgcctataggcgatgatccctcctgccggacgaggcatcagctaccggtattaccaaagcgcaagctc

SEQ ID NO: 156386 - DNA, 1363 bp, Zea mays
  Clone ID: MRT4577_74205C.1
ctggggtacccctcgaggccggccgggaagtggcagcagcaagcaccacggagagggacacgactcctctccctccctccctcaccatgccttccccttcctcggcccactggctgagcctcgtcgggagcatctggctgcagaccatcaacgggcccaacgcggacttccccgtctactcgtcgcagctcaaggacctgaagcacatcacgcaggtgcagctcaacttcctggccttcgcgtccgacgcgggcaagctcttcggctggttctccggggtggcggcgctgcacctgccgctgtggctcgtggccttggtcggcgcatccttcggcctcgtcggctacggggtccagtacctcttcctcgacagcgccgccctccgctactggcacctgttcctgctcacctccctggccgggaacggcatctgctggatcaacaccgtctgctacctcctctgcatccgcaacttcggcagcagccgcagccgcgtcgccgtgagcctcgccgccagctacctcggcctcagcgccaaggtctacaccagcctggcggactccatacccggccaccaggccacctccaaggccaagacctacctcctcctcaatgccgtcgtgcccatgctcgtcaccgtcgcggtggcgccgtcgctcagggcggtggacctcacggtcacgggcgagggccaggcgggggccagcacggacgcggcattcctcgtcatgttcgccatcacgctcgccacgggggcctgcgccgtggttggcagcatcggctccacgtccggcggcgggctgtcgtcgagggagcacgtggtcagcctcgccgtgctgctggccacccccgtgctcatcccgctggcgctcagggtccgggagagcctccacaggatacgggagaccaagcgggagaacaggatctacgacctcggcaccgacgacggcgtcgtcgtcgacgtggcggccaccgccgggagcaaggacggagacggcgtcgtcacggagaaaccgcaggaggagatcgacggcctccggctgctgaggaagctcgacttctggctctacttcttcagctacatgttcagtggcaccctgggcctggtgttcttgaacaacctgggacagatcgccgagtcgcggcggctcgggcagacttccacgctcgtctcgctgtcgtcttcgtttggattcttcggccgcctgctcccgtccttcttggactactactccgcgaagtaagcacaaagctaattaatatatatgaagactcgatcggtagtagattcagtttcaagtttctagatcgaccaccgatgcgcgtggtcgtttttaattgacatgctaacgaacttgtcgcg

SEQ ID NO: 156387 - DNA, 284 bp, Zea mays
  unsure (1)..(284): unsure at all n locations
  Clone ID: MRT4577_74206C.1
ctggcgcctgcagttcggaaattggaggatctccagtatttgtaagtctctcacacaacgaccggnctcggtttgcgcggagttcgacgttcaaccgtttgatctctgataattcttcacgtatgcgccatgtcttcgcctgacactgcccgctggtaggtgtgacactgcctcgctactgaacgaggacaacctgtaggtgaaactncggatgaggagaactcagtgcaaaggtgaacccgagtgagtgttnacgctacgttcagcatatgggtcctatgcta

SEQ ID NO: 156388 - DNA, 144 bp, Zea mays
  unsure (1)..(144): unsure at all n locations
  Clone ID: MRT4577_74207C.1
catggaaatggattctctcacatccattgggattgatctttttccaanaaaacgtaggtgatcttaaataaatgctgcatttcctcttaaaacatctgtaggtcttggaggttatctacgtgtcatgggatctccaacagattt

SEQ ID NO: 156389 - DNA, 2128 bp, Zea mays
  Clone ID: MRT4577_74208C.1
cattgggaccctcgaggccggccgcgggcgggagcaccaccggagaaggacacgatgccttccccttcctccgcccactggctgagcctcgtcgggagcatctggctgcagaccgtcaacgggccgaacgcggacttccccgtgtactcgtcgcagctcaaggagctgaagcacatcacgcaggtgcagctcaacttcctggcgttcgcgtcggacgcgggcaagctcttcgggtggttctccggggtggcggcgctgtacctgccgctgtggctcgtggccttcgtcggcgccgcgttcggcctcgtcggctacggggtccagtacctgttcctggacagcgccggcctccggtactggcacctgttcctgctcacctccctggccgggaacggcatctgctggatcaacaccgtctgctacctcctctgcatgcgcaacttcggctccagcagccgcgtcgcggtgagcctcgccaccagctacctgggcctcagcgccaaggtgtacaccagcctggcggactcgatacccggcctggtggccagcggctccaaggccaagacctacctcctcctcaacgccgtcgtgccgatgctcgtcgccgtcgcggtggcgccgtcgctcagggtggtcgagctcaggagcgaggcgagcacggagtcggacgcggcattcctcgtaatgttcgccatcacgctcgccacgggagcctgcgccgtggtaggcagcatcgggtccacgtccggcagcggggggctgtcgtcgagggagcacgtgatcagcctcggcgtgctgctggccacccccgtactcatcccgctggcgctcagggtgcgagagagcctcaacaagatacgggccaccaagcgggagaacaggatccacgatctcggcgccgacgacgacgcgggcgctggcgcaggcgtcgtcgtcgacgtgggcggtgccggccccgagagcaaggagggagagggagacggcggcgtctcggagaaaccacgggaggagatcggcggcctccggctgctgaggaagctggacttctggctctacttcttcagctacatgttcagtggcaccctgggcctggtgttcctgaacaaccttggacagatagccgagtcgcgacggctcgggcagacttccacgctggtctcgctgtcgtcctcgtttggattcttcggtcgcctgcgcccgtccttcttggactactactccgccaagagtgggtactccatctcaaggacgggatccatggcgtcgctgatggcgcccatggcgggcgccttcttcctgctgctgaactcgagcgacttcttcctgtacctgagcacggccgtgatcggcacgtgcacgggcgccatcgcgtcggtggccgtgtcggcgacgagcgagctgttcggggccgagaacttcggcgtgaaccacaacgtggtggtgagcaacatccccgtgggctccctgtgcttcggctacctcgcggcctacctgtaccagcgcgcggcgcggggcggcagcagccaccagtgcatcggcgccgcctgctacagggacacgttcgcggtgtggggcgccacgtgcgccgtcggcacgctgctctgcgccgtcctctacgcgcgcggtcgtcgccgcgcagctccgccgggagaagtaaggacggcacgtgcctcgcccgcttagctatagctgcctcgtgtctgtcatcgtaggtgcatggtactacgtagcagggcttagctgcagaagtttctgatcgatcgtctgagggctccagaagaagtttctgatctgagggcctgattaatcacacaccacccatcgatcgaccaagcatcatctgcctgtagggctctagctctacagatgatgatgcttttgatctttgcttctttttttttagtgtgtgtgtgtgtgtgtgttcttggagtttctcttgactgatcccgatggaaggggggctacagaagaagccttgggcgaggaggctgatcatgagtagatattgtgcagcaggttggccacctttttcacttgttattagtgcgtatcgtatatatgatcggtacacttaattaacttgaaagaaattcaggtctagccagttccgtgctggtggtattattac

SEQ ID NO: 156390 - DNA, 306 bp, Zea mays
  Clone ID: MRT4577_74209C.1
gcagaacgacttcaggaggaattcaaggcgttggcttcacatgtatatcttgcttgcagggcaaacgaacaacagcttgtgcatgcaagaaaagaggctgcggagctgcatctgcataagagccagatagaagagttacttcagaaggcccaaggagatctcggatcagtgcaggatcagcacctggtgaaggtccagcagctaataaccctagaggatttcaagtcaaaggagatagacagtgctactgaaggagctcaaatgcatgagtgatgagtgccataaccaaaaaagatgtggtgaggc

SEQ ID NO: 156391 - DNA, 357 bp, Zea mays
  Clone ID: MRT4577_7420C.1
aaggaaaaaggggttttaggagtaaaaaccaaatccccacttgatcaaagataaacccaaaggggtttcgaaaaaagggttgaaaatttaacccaataataaaaaaaatacggccaaatctaaaaaaggccttgattgttccccggccaaatatttgtatgggggaaataaaaacgggaatggccgctaacttagttttgcctaagaccggccccctaatttgtttttttaaaaaaacccccttggcccgggggggcccccttttaacaaaagttgggcgcagaaccaaaggcgtctttaacctcttgggtgggaaaggggaccctgttgttaacaatggagttgaccaacaccccc

SEQ ID NO: 156392 - DNA, 300 bp, Zea mays
  Clone ID: MRT4577_74210C.1
cggacacgtgaactatcacccttattatttttttatcatgatcactttaatcggggcagagcctattaagaatagcccaagcataaaccacttcgccacatactaacgccttataaacatggatctcatccaatcaaccaataaatgcatcatatcctctggtaaccatcctgaagtacccaaatacaaatcattctagtctgtaaaatctgacaacttgtaatactatgaccactaactgcccattataatttatcaagcacatcgattatgtatgcatatataagcatataccgtatc

SEQ ID NO: 156393 - DNA, 294 bp, Zea mays
  unsure (1)..(294): unsure at all n locations
  Clone ID: MRT4577_74211C.1
natncnnngncgtacgnnagctcggaattcggctcgnngncnantngnnnanatagnnagcacaacnagtnttccaacagtggcagncgagatnttgncgcntacnntatgntncnaggtattgctngcnagngctgctaaggnggccattgtcncgcgatgttngnaagnncctatagncntnncttcntcncccgtagnctactacacnancnnngannncgggntgtgaaaanccagttctnnnaancctcnaggatnccaacagncaatngtngnatgnnangtnacctt

SEQ ID NO: 156394 - DNA, 398 bp, Zea mays
  unsure (1)..(398): unsure at all n locations
  Clone ID: MRT4577_74212C.1
ggaggagcaccacnggcgaancgaaggccgacgcnggggcgnccaagaccnacccgcagcaggcnggcaccgnccgnaagaacggcnncancgncancaagaaccgncccngcaagggggnggaggggggggggggcaagacnggnaagcanggccacgccaaaggccacnnngncgccanagacacanncaaggggaaaaagcnngaagananngnnnccgcaacacacaacngngacannccgcaggcgaaccgnacngagcaccagcngancganannncagagganggacccgcgagcccccnacnncagacggcnacacnaaggacgacccnagacccccaaccgaggagacncccgnggcccagaccaaggaaggcggcgaaagcgggaagg

SEQ ID NO: 156395 - DNA, 446 bp, Zea mays
  unsure (1)..(446): unsure at all n locations
  Clone ID: MRT4577_74213C.1
ggggtacctcgagggccggccnnggttttttttcncgccagaattacggtgggatnnccgtcatctgaaccaaaaaaaaaaaaaaaaaaaaaaaaaaaaaaaaaaaaaaaaaaaaaaaaaaaaaaaaaaaaaaaaaaaaaaaaaaaaaaacccggttcgggcccaaacacagccacaagaacctacatcccccgttgtcacctctctttccatcgccacagggggcccttctccgggaaagccggggggccgccgcctcctttacccctctcgcggggttcctacgcaccgtaattcccaagaattccccacgggcaagggggggtttggtcaaaatgggcaatgcggttgatgacatcatctgggaaagggatgggggggaccccgtacaaggatgcgcccaggggaaaccccgcaatgttctttaactaaggggggaaggggga

SEQ ID NO: 156396 - DNA, 314 bp, Zea mays
  Clone ID: MRT4577_74214C.1
ggcaaaccggttttaacatttgccgccccccggtcccgaatttttcaacaaatctcggcttaattgggggggggggggcccaggttcccccccaaatttggggggcccccccccaactttttttcccctttcgggcggttaaaaagctaccctgaccccgcttcttgcctaccaaaaaattaaattgggggcccccctctccccatgggggggggccctagctttttattaggttcccaagcccgggtttcccctccggttttgcaccggggccccccccggcctctttttttcccccccccccaccttttttt

SEQ ID NO: 156397 - DNA, 650 bp, Zea mays
  unsure (1)..(650): unsure at all n locations
  Clone ID: MRT4577_74215C.1
nggatcatgaacagtgctgagcgcaacactgaagaccacttcctgcctcactgtgctatgtgctcttagcgaaccactgacacaacaatcaccaccaagtggatcccaggggctgatcccttccttgacctgatcctcatgatggctgacaccgcaaatgcttgcaaaccccactgttctgacccaactgtcccaacaacgcctgtcgtgcctactccgtcgaatgacacacacaggctctgcccaatcgacgagctcaagctcatcgtgagtaccaacgagatagaacacgacaaatcctgtctaccacatcacgactgatgctgcccgtctgtggaggagctgctggaccacaacgacgcattgtgtctctgcaacgacattaaggccaacggcatcgttatcaaactccatcagcctgttacactatacttcttccacaacaactgcactcggcatttgaactgataacttcacttgccccatataagcttggcataacattgggcgctccatctacgacagactatttaccaacatgtcttactcatgaaacattaacgcataacattgtcgaatcagattctatcgctgaaccatcgactactagactcagctggaagtgataatgatctacctgatgatatcca

SEQ ID NO: 156398 - DNA, 439 bp, Zea mays
  Clone ID: MRT4577_74216C.1
gcatgacgcgcatgcacgcggcggcgcgaggacccagagcgcgcgcgcccttttttttttttttttttttttggcaccaaacaactcagaggggagaatagaaacaggggggggggggctaaaaacaggcggcaaacacaggcaccaaaggagggtacgggggccaggcagacccaggaaccaaaggcaggggggccagaggggggccccaaaaaaagggcatactaacccggcgggggggggaaggggggaaaaaaaacccaggggccaaaaagggaaactaacgccggcccggcccaggggaaaggagcggcgggaaccagaaccccaaatgggggcccgggggggggggccaaaaagggacaccggggggccccacaaccggggggacgggaccagcaaaaaattggaggcaccaggggggggccaaaaccccccg

SEQ ID NO: 156399 - DNA, 242 bp, Zea mays
  unsure (1)..(242): unsure at all n locations
  Clone ID: MRT4577_74217C.1
cgaagctcggaacncggctcgagcgccatcaacgacacatggttttggaccgagaaggaaggagacgggggacaagggggaggagagcgaggacacaaagaagccacgcggaagaaaanngcgggccccagccagcgagcaccggagacacgggcccccccacacaccacaaaagcgcnagagaacacnccacccccgacaagaggcaacgcaagcaagcaaccacacgacaagaagaaagc

SEQ ID NO: 156400 - DNA, 122 bp, Zea mays
  unsure (1)..(122): unsure at all n locations
  Clone ID: MRT4577_74218C.1
cgatagggtgagttaaagggcaaactttgtgggcatgtgggttgggcggcggggaaaaccaaggggaattttgttggctccaccaaccaaagtnnctntgcccggggggggggctcagaaaa

SEQ ID NO: 156401 - DNA, 2510 bp, Zea mays
  Clone ID: MRT4577_74219C.1
cgcgtgggctcaaaattagtattttagtaatgttcttaaggttagtatgctactaggaaaaacctacgccggcccattggctcgggaccctccgggagacacgaagtccaacccaaatctcaatatcccaaccctccgatccccatttccatccactccgacaccaatcctccgctccgaccaccgccggagaaatggggcggcgccgccggttcgcgcagctggacgatgacgacgacgacgacgaagacgtgcccatcaatttcaagccctcgggtggcgcctcctcctcggacgccaaacccaggaagccccagccgccgccgcagcagcgccgcggagtctccgatgacgacgacgaggacgtggaggaagtggaacttgaggaggaggaggacgacgagaaggatctcgaggcaatgcgacgggccgaggaggaggagcgccgcgagcaggaggccgagacgaagactcgccgccgccggggacggcccaagcgccgccgcgacccggggagcgaggatgaggagcccgaggagctagagctgcaaacggaggatccccgtgaggaggagatcacggaggcggtgcccgtagctgtaggggacccggtcaagatcactggcaaggggaagaagcagaagaagcactatgcttccttcgagtacgagggcaacagcttcgagctggaggaccccgtgcttctcacgcctgaggacagcaatcagaagccctatgtcgccatcctcaaggatataacagaaactgatgggagcctatatgtaactggccaatggttttatagaccagaagaggctgacaaaaaggagggtggattctgggtagcacgagatacacgagagctattttacagttttcatactgatgatgtgcctgcagaatcagttatgcacaaatgtgtggtccatttcattcctcagcaaaaacagattcccagtcgaaagcagcatccgggatttattgtccagaaggtctatgatgcagttgagaagaaactgtggaacctaacagacaaggactatgaggataacaagcagcaagagattgatcttctggttaagaaaacaatagaccgtattgggcagcttcctgatctcgaacctgaagagacacctcttgagaacaattatttgtcaaataaacgaggcctgcgtaagaaacctgttaaccctatagatgtaacaagagaacctccagttggcaaatccgagcagtttgcaaaagcagagacacctggaagtgataagatacggaattatgatacccttgttaagtataaagtacttactggacattctcatcgtgataggtggctcgataaattgatagaaagtattccgcttgcatcaaaggagaatgctggaacatctgctgatgctaattctacagccaaaagttcaatcagtggttcacctgcaaaggatgttggttctgctgaaaatgaaaaatcatatggacttgatgttgttgttgagataatgactgcattagaaagatctgcatatgaagctcttggaacagattttgggaaatataaccagaaactgcgacaactacagttcaacatcaagaatatctctaaacttcgcaggaggctgatggacaaggagcttgatcctccagttcttttaaccatgtcccccgatgaattaaaggctggcttgacttcagcagagaaaacatctgaaccagaagaatcaaggaaattgcagatgactgatacaagatgtcaaagatgcagcgaaaagaaagttggcatatctgatattatccatgcaggtcatggagaccgctatcagttggaatgcacttcctgtggctacacatggttttcgtccagagatgccatcacaacacttacagaggatgccccaagcactgctgggaatgtgggcactgcccccttggcaacagcaaaggtcgagggtcgttgagaagaagctcacgagcccacgggaccaatccggcaagcctgcttctgatgctctgcagaagagcactgcagcttacatgccaactatggagagccagaagtcgtttgctaagaccaagttgtgggatgaaccctcccccgcaccaaaacaggggtagagccgtattcatgctgcagattggtctttgcaggatttcgagatacatacttgtacataggggtgatccaccccccgcaccaaaacaggggatgaaccctcccctgcaccaaaacaggggcccttttcttgacatgctaccacctcgtactggttgtcttcgtttcggtagtttgttttgcagtcatgcatagccagttacctctcgttttattatttgcttgtttgttgtagcactcatcagttgacatgaggacgtaggtttgtggcgtttaccagattgattttgctttctatgtgctataaattttgtcttgcaaggatcacttcccagttatgctgggcgacatcatgaccgtctgttgcaaacttaaaaccccttctttgagtttttgagtt

SEQ ID NO: 156402 - DNA, 522 bp, Zea mays
  Clone ID: MRT4577_7421C.1
gtgcaatgaccgtcgccgggaagttgccgccactcaaattattgccaataagcagattgatcgcacatttgccttcgacaaggtttttggcccatcgtccaagcagaaagatttgtttgaacaatccatctcgccgatagtaaatgaggtccttgaaggttacaattgcactattttcgcttatgggcaaactggtaccgggaagacttacacaatggagggaggtgggactagaaagaccaagaatggtgaactcccaactgatgctggtgttatcccaagggctgtaaggcaaatctttgacattctcgagtctcagtgcgcagagtatagcatgaaagtcacctttcttgagctttacaatgaagaaatcactgatctgttggcacctgaagaaccaaaattccctgttcttgaagacaagacgaaaaaacctattgcccttatgaagatggaagggatttgtttttgtgagaggtcttgaagagaagttgtgtactcagctggcgaaatctacaagat

SEQ ID NO: 156403 - DNA, 397 bp, Zea mays
  Clone ID: MRT4577_74220C.1
tctcttttttttttttttttttttttttttttgtttttttttttttgggcaggggaaatttaattacatcatcagcatgcgattaaccacattgggggggggctacgtacgtgaaaaatttgggcgtacatgtgcaacttttacgtatatatgcatggcttgcgtgggtgttatacagtagttctgttggaaacgtatgcaacggcgggggcaaaaagaatgctgatcgatattggagcttcagggtagtgaggcacatgggggtatctctctgcgggcatgttttatgtatatggactacgacttgatggccttgttgttggctccattgtagcaaaaatgggcatggaactccccaccgatttcagattttatcctcaggaaactcggttccttt

SEQ ID NO: 156404 - DNA, 212 bp, Zea mays
  unsure (1)..(212): unsure at all n locations
  Clone ID: MRT4577_74221C.1
gaggctggccgggtagatttgctctaaaaaaaaaaaaaaaaaaaaaaaaaaaaaaaaaaaaaaaaaaaagggactgagggtgctacagttgaccgccggtccgcctcgcnagtggcaaggtgccccgagcagatgcagacagataattcaggcgccttgcaaggctggcctcacnacgcaacggggccccgccgcgcttccttgggccgcag

SEQ ID NO: 156405 - DNA, 461 bp, Zea mays
  Clone ID: MRT4577_74222C.1
cacgatgctgttgaagctgtggaaggacatgcctgggatgatggcgctggaggacaagagagctgacccagggcgtgcggaagacgggggcgcgcgccgcgaatgcgcgcgggagcaggcccaggtccgacatccccagcagctggaacgccgcgctggtgaacgtatccgagtagaggccgatggaggacagcaccgcgcccacctatatccagtgcttgagccaacgtccaccgatcatgcctgtgtacgtggtgagcgtaggtgcatgtacagcagtttagggctttaggccagtttccactttccagccaaggtatccctacaaaaaaaaataaaaaaaaaatattgagggcatatttttacgtggcgggcgacacttgctactagaagtggttgatcattcgatctgaatagatttgactttttctgcaacaggttaccgactatttaatcttacc

SEQ ID NO: 156406 - DNA, 589 bp, Zea mays
  Clone ID: MRT4577_74223C.1
ccacggacccagatccgctacgttgaacacttcccgatcgttaggggtgactactgtcgtcacgtctccagtacctgatcgtgccccataccgtgcccgttcgggggttcgggtgcgaatcacaggaccctagcacgccagacagctccagtccgaactcccgccgaaactacagcgggggactgctagtattaaaactccatcaacaggaggatagttagggaactcgtaccctacactttgcaaggagttcctggagttagtagacccgttctgcacaccgtggggatactagaacctggaaaaggggtgaatctgggggcacgagggagaccgggaagaagacgacacaacgttctaacctcgaccagggggtggcggactctactggtgtccggacgaaacctgtggacatcacgtccacacttacgagagaggggaggtttagtggggtccactcgggggggtccgagacgaactgccacagggccaagaggaccaacccggttgacactttcgtgaccaagggtacaatggtgaaattattcaccacatacaagtgggtgggtaactcgaggggttcaaccga

SEQ ID NO: 156407 - DNA, 718 bp, Zea mays
  Clone ID: MRT4577_74224C.1
aaaatacataataattaatagaaaattacataaatctaatgattattatgtccccatacatgttcaaccaaatcatttagtagttgtgtatacatcgatgtgtccgtcatctcgttgtccatttgaatcctagctgctaggctcggggttgcattgtagtagatcgacgggccgactgtagaatcaactgtctcatatgtctcgtctaaatcggcatcacgctcgtcatcgatgatcatattgtgcaaaatgacacatgcacgcatgatcaaaccaagagtacgttgagagtaagaacgtccaggaactgctataatgacgtgaagaagagtagaaaaggcgagtttggaagagagaaatgagatgaaatggtgtgtggaatgagctccacccgggtagggatatatatagagggattggggatgaaatttatgattttttgcatttttttcgaattttttgactccaaacggtcaaaaacggctagttgcaacggctagcacacgtggaccaatcagatcgcgacacgtggacccagttagatcgcgccacgtcgctctcgaccgcctctcgcccgggcgggcgctccagcgcgggcgagagcgaggcgattccgcccgctctcgccgggcgcgagcgaggcgattccgcccgctctccccgggcgccagcgccgtcgtcctacgtccccgtacgcgtgggtcgtatcccgcaattc

SEQ ID NO: 156408 - DNA, 376 bp, Zea mays
  Clone ID: MRT4577_74225C.1
aacgaacgacccaggaaacagttttgttttacccttttggggcaggaaagctttacccaatgggggggggcttccccttggttttttccccaccagaaaggcataaaccatgagccccagcccggcaaaaggcataggggccttacattttattttttttaaagaaacaagtttttcccccccaaaagggggaattttttttccacaccccgaatggccccttttggtgttgctcgcacgggcggggtttgggcattgggcgccccattattgccattgccacagagtttggaaagaactgtcctttaagctccttggaccaccggccagaagggtttggtgcctgccttccctggcccgggcctttacggaaaac

SEQ ID NO: 156409 - DNA, 480 bp, Zea mays
  Clone ID: MRT4577_74226C.1
ggcaccatttcaaaacgaggaccagcccggtggttggggcttggccctttccgcgcgccggccgggcctgggcacctggttcgggttggatctaaaacgagcgaacggtacccgggggttttgtcgccctcagggttacccacccggcggttttttggcttccaaggcaaatttttcaacccattttaacaccgaaaatttccacccattcactttcgggggctggtggccgccggtttatttaaaccggcccgcaaggggaacccgaacacttcccccgggggcttttccggcaggttccccttaaccccggacattcaagccttcaaggggcggcctccggaaaaccaaacccacgggaaccaccccgttgaggggtggaaggggcccggcccttggccgccgttggtgaattccgcttcttttttttttgccgggggggaagttggacccgttgaaccgggacgttgaccggccccc

SEQ ID NO: 156410 - DNA, 160 bp, Zea mays
  unsure (1)..(160): unsure at all n locations
  Clone ID: MRT4577_74227C.1
tcgttttccncatctcgngcnggtaactgcnggctgtccngagtaccgacaacgnggtccgctccccgccgtgaatcttcntcttccgcgnnggagaccttcccgtnggtgangnaatcctcctaatggatncgnngggnacgcgtcgccgtgaagtnnt

SEQ ID NO: 156411 - DNA, 1105 bp, Zea mays
  unsure (1)..(1105): unsure at all n locations
  Clone ID: MRT4577_74228C.1
gattatctcatcgttcctcgcgctcatcgcccactttgccgtcgatgcatttcccactcccgcctcttcgccggcgatgaccgccgcctcccacgtcctaacctcctcggcttctctatgacgactcctccgaacccctccccgctcctgtcctcccgcccgaacccctcccttcctctccaccgccgcccccggttcccccactccccggccgccgccaacaccaccggcgccgcatcggcgccggactggttccgccctcgccgtactccggactcggacccgtccatctccggcggccgcgtcaccgcgcgtgatcctggcgttcgcgtcaaggccaaggagggcgccgaggaggaaaaagataagaaggctaagaggaggagatggtgggagcgctggtcgggggacaaggagagctacctggtggacgatgtggagccgctccccatcccattgaccgtgccagagacggagcccatgtcgcgggaggagctggaccgccggctcagctgcgacgtcgagatcgatgaatgcaagacggtctcatacgagtggacaggcaagtgccggagctgccaggggacgggactggtcagctacttcaggaagaagggcaaggagaccatttgcaagtgtgtgccatgcgccgggattggttatgtgaggaaaattacacttcgtgaggacattcaaaagatagacgagctagacaatgagaaactaccatagtttgaaaggtctcaagtcattcggcctctgcaattttgtaaatgctgccgaagagcttgtgctcgcaacctacacattgactaatgattctttccactgcacatttactgttcaggcacgatactagcttggaggggttattctttaagcactgtaaatttttgtgttcaaaaaaaaacattgcaaacttagcaatggtgtctagtaattgtaccccttttatcttggttatttgctgatagatatgataacgatcgatacagaaaagaaaataataattgtatcccttttgtaaattcttttagcacgttggtnnnnnnnnnnnnnnnnnnnnnnnnnnnnnnnnnnnnnnnnnaaaaaaaaaaaaaaaaaa

SEQ ID NO: 156412 - DNA, 482 bp, Zea mays
  Clone ID: MRT4577_74229C.1
cccctcgagtttttttttttttttttttttttttttttttttttttttttttttttttttttttttttattttttttttttttttatacacagagacgatgaccaagccccaaatcgaattcgcatagaggcacacactaacgagaacaacaaattggatgctgggtttagctccaaaaaaatcccaggcaattggggcgggaaaccccccttgtccaaaccggggcggaggagaaaacgaagacgccgaccctaagggccacttagaggagtttgccgaggacccggccctcgccctcggcgcaaaggcacaatgcggcgccaaggaccaccaggccctacaccaggggccaacatgcctcaaagggggccaagccgaccttgacgaggcccaccccggaggtgcacaccttgggtttcccggcgtcgatccgacattgaacgaggctgttctagggcaccactgggggggcccccacgac

SEQ ID NO: 156413 - DNA, 351 bp, Zea mays
  Clone ID: MRT4577_7422C.1
tgcacccctccgtaagctcggaattcgtctcgagccttgttttttggcctgcttttttatatactgcatgccatatacatgatgctggcgaatcatgctatctaatgtggcacaatacaatgcactcactgtattgtcccctgatgaaacttgagtgatctaccacgccttagttgcaggtttttacacaaaatagcatcgtacctgacatgctaagattgtatgaatcagtgcaggcacatactgaatcgccttgatagcttatgtttggctacagatgaatgactcatcacagctcctgagacacttcttcatcaactggcaccaacaagatgagtacactgacctttt

SEQ ID NO: 156414 - DNA, 388 bp, Zea mays
  Clone ID: MRT4577_74230C.1
gcacaggctgagtcttgacttgcctctacattatgcgcttttgctggttatagtcggtacgggtaaccgttttttatcctagtcctataaggctataacataaggcgcgtgtgtcatctctagacatgcgtacatcgatgtagtagtataaagagaattaaatatattcctcagtctttgaactaaaggtggttatgccttatatacttatatactgggactgagggagtatatttctgcagacaatatgttagctatgatcaaaccttgaatctcatgtctaattgaaagcatctcttaaccaggaaaaggatgctagggacattgaaattcctaatatcagatgggacgtctttgaactcatgatgagatttatctatacagggtc

SEQ ID NO: 156415 - DNA, 756 bp, Zea mays
  Clone ID: MRT4577_74231C.1
atccattgtaaagtcagctttatgtatggtactagctaccttaatgaacttagtttgtgcatctctttatttttcctgtttttgaaggtaatgtgtgtatctttaagtgttcagctttgcaaatgctgcctttcatgtttcataattatatataaatacttctatagattaggatctttgatttgtttcattaatttacaactctaggcgagtgaatagctgcttatttatgtggacacttctcatgtgtaacagctatccataaagtaacacatgaaagtgcagtccttatttaaagggctgagagcaaacagattaaggagaattattaatgattcctttgtctcagtaaaaactacttatacgcctgtgaaacttggatggaggtagtatttgattgcctatttgtttgtcattcttttatagtgatgtcaaatttggatacatattatagtgatgtttatcgttccatatctatgttgtatattaatttttaactctcgtggcaacgcacgggcacatacctattgtattaaaggagtgcacatgtatctgctgaagtttttagaatttgatagttttatatactttattgttatgaaaaaattgttttattcataaagaaatctgtcggtgtattgctaccaaaatccgctattaagtttgagagatatcttggatgaggtgagatctttcaggcgctactatatgtttctgtaattgttaattttagtaggatatagtctcaccacattg

SEQ ID NO: 156416 - DNA, 277 bp, Zea mays
  Clone ID: MRT4577_74232C.1
cctgaattcccgtttctacccactcttcctgactagttctagatctctagcatcctcccttttttttatctttattatctcaatttagttagttattttaggacgatagtatataatttcttaaccattaccaaaattctttcaaattaaagctccaactaacttaaatattcctatcctaaaacctttttaattacaccatttcatccaaaaacttttaatccgaacctctatatcaacccttcccaactaaaactattccccaacaaactttcca

SEQ ID NO: 156417 - DNA, 1656 bp, Zea mays
  Clone ID: MRT4577_74233C.1
gctcctcagtatctgaagcgtgtttgttatatttgaaaggctgttgtttgggcaaggcgaatcaggcaagagttgatgacgagcggctaaactaatccaagagttgatgacgaccggcttgttctttcacttgcaacgacttagagtcgggcgacctgcaagatcaaggtgcatggtcgtcgaaggatggcgacggcgtatccccgttcaggcaaggcgaatcaggcaagcatctatttggaggttggttagttatcccatgtcatcagacatcacgcaggaatcaagtcatccatcaggaagcagccaactctgcctggactaacccagggcaaaggcaaacagcaaactttccaggataagtctctgacttcgttatactttcctgtgtgcaggaggtcttgaagatctggaactgcaggtgcagaatgctattgcagcagttgcagctccacccaaggaaagcaatagtgtcagcagcaacgatcctggtagctcgtcctctgtgatttttccgtctggtccagctgatcaagtccctgttcctgctacctctccagaaattgagccccgttttgcaaaccaaatccctgctgcttcttcggaggttaaggcaccatgcatggcaggtctgttgtttgtaagcgacaggaacgagaggaactttaggttgcctagcccttctgataattgtccatggaacttattcgaatctagccgtagcgcagtcagctttctacaggagtatatgctttccggaatcgtgccactgaagttattcagcatgagatctatggttcttagactgggcatattgctgaataactatagttggtagatggtctcgctacagtagacaggaaaggcaccatgcctggcactggcaggtctgcagcgaacaccgttgtatgtgtatgtatagtatgcacgtgtgcaattcatattagcttaacagcctgtgtaacaaaaacaattacccaacttcccaagatagttaatgcactatatatccaaaacctgatacatgcatcaatttgtcttaaaaagtacattcataaaaatataaatgtataaagagttcatttgtattttaacaaaagtctttggtcaaagccatattctggagaccgtgtcagtgtcctagaccacaaataacattggagggagtaaattatatctcatgtctatcaacgaagttttactttttaggttctattaatgtctaattcttgtaacccctcttttttggtatctcaattgttgcagttaggaaaccttccattacggccttatttctgcagaagtatgacaccaactttcatctattctctaccaccaaagagatggaaaagcaggttgcccccacccccatagctttctgttttgtccctataacaggtttacctatgttatatatagacaccgtagcaatgcacgtgtaatggtagattttctgattggttagtttggaagtgaagtaggtgccaatgttgtgcatgagcagaagaaatattattcccttcaatattagtagaggtagagatatttacttttatcagtatttgtgttgtgatagctatttttagcctaatgtttcaggtcaaagggccatacttcatagctttttgctcctcattgttttaagtgaaagggcgc

SEQ ID NO: 156418 - DNA, 123 bp, Zea mays
  Clone ID: MRT4577_74234C.1
cgctattcaatatggtgataatatcatgcatataatactgaacaggtcacttgaagttagaactaccctttgactagagtgagcatacatccctgggacagtcccagtttatgtctattatcc

SEQ ID NO: 156419 - DNA, 542 bp, Zea mays
  Clone ID: MRT4577_74235C.1
gtacgcctgcaggtatcggtccggaattcccgggtcgacccacgcgtccggggagtctaagtttgtgagcgctatccgtcgtaacaagacgccggcgactttggaccctcctcctctcgtttttctcctccttagtgggacactgtatcgggtgcagcgatgccgggaatgatgtggacgccggagctggcgcttctgaggggcttctccacggaggcggagcggctggtttggaagcaggagggcatctgtggttcagatattggagttttcttagaattgctgttagaagggagctatgaggctttgttcttccattcaacgacacaaactattttaaattcaacaatgatggctgaagaaaagattgacagctacctggagaagcagatagtgaatttcctggattgctctacagatttggaagaaattgaaagacagcagctggtattcctacttggtgtgagcagcttgcagctttttgtccagagcaactggactggacctcttgtggacttgcatcctcaggatttcttgccatc

SEQ ID NO: 156420 - DNA, 378 bp, Zea mays
  unsure (1)..(378): unsure at all n locations
  Clone ID: MRT4577_74236C.1
gagaaagatacttgggggccttgtcttcctatctatataaggataggctgcacctccttaaggaggaatcaatcaatgaagaagaattagtctcagatctctctatttttctattctttttcaagccanagctccgcccgggtggggggggccccgctgtttatccccctatgaactagattcataacaggagagagggaaaatgtctctcgccctatatggtcccaaataggacagtttagagttgaacttttgcttttatcttgaaggataacacgatctcatctataattcataatcctatacatgacactgtatacaattgggtgctagaggattcaggattgtgtaccactatactttaggctgtnttaagag

SEQ ID NO: 156421 - DNA, 231 bp, Zea mays
  Clone ID: MRT4577_74237C.1
ggcaccccgtgggacctcctaggactgggccttcttccagggggcccctggcagcagctggggtgtcgggcagaatgtgacttgtggccttaccatggacttgaatgggacttggctggcctcaggatcttgtgcctggaaatagcctgaggtggctcaggaagcggagaaatgggtgccggcctatctctggcggcgatcagggcactaggcctcagggctgcgaagaga

SEQ ID NO: 156422 - DNA, 985 bp, Zea mays
  Clone ID: MRT4577_74238C.1
cggacgcgtgggcggacgcgtgggcggacgcgtgggcagtgacccgcaggcgcagctgccaattgcaagcatgtgcgggagtaagaaatccgtagcctacttcgcccacgaccgggcgcaccggctgctccccattgccggcggcgacgacttcacctgcggcgggtgcctggtcgctggcgccggcccgcggtaccggtgcgcccacccgggctgcagctttaccgtccacgaggcgtgcgcgcgccgctccccgaggacgctcaggtccgccgtgcacccgctgcacaggctgaggcggcgcgaggccgcgggagccgacggcagcggcggcggcggcgggtgcgaggtgtgcggcgaggccgtggagcgcgcgtgctacgcctgcgtcgcgtgcggggtcgccgtgcacccgctgtgcgcgcggatgcccgggtcggcgcggggccccgcgcacccggacgacggccacgaggcgtggctggtccgagtcgcgtcgccgccggacgacggcgatggcaagcagaagcagaagcaggcggcggggtgcggctcgtgcggccgggccctgggcgcgtggcggtaccgctgcgtgacgtgcgccgcggagttgcacccccgctgcctggtgccggcggtagaccagtgccgcggcgccggcgagggcgaggccgggcgcgcgggttccgcggccagtagctgctgcttggggctggtgcacgacctgacgcgctgcttggccacgctgggcaccgccctccactaccgtggttactacaatggttgacgttgtaacgcgggaagcttggaaattatgcgtgcatagccatagcatcggcactctggagatggatctcccagctctgaatatgatcgagtgcaaaacagtagcagtactaccaacctgttccttgtttgctcacccttgccatgtctgtcgtccttgtcctgatgagttatcatgaaaaagctcaagatggccacc

SEQ ID NO: 156423 - DNA, 231 bp, Zea mays
  Clone ID: MRT4577_74239C.1
aattttctactaaaaacttggtcggctcatacataggtctcgcgaggacaacctgcaacgcaatgtacaccaacccgaccacctgattggccaacacgaccaccgtttaccaccccaactcattctgcttcttgtgcaccaacacctcacccttcttcattgatcctctgattgcctcgtgcctcccatggctctacttccaaacctaataaggcttcagcacacctgatt

SEQ ID NO: 156424 - DNA, 361 bp, Zea mays
  Clone ID: MRT4577_7423C.1
cgcacgcgtccgaaaaaaaaaaaaattaaataaaaaaaaaaaaaaaaaaaaaaaaaagaaagaataataaaaaaaaaaaaaaaaaaaaaaaaaaaaaaaaaaaaaaaaaaaaaaaaaaaaaaaaaaaaaaaaaaaataaaaaaaagtgcctccccttttaaatattccaagtttactatcccttatttccaaattcaaaccttttttatatcgtcccttaaattaaataccatacccgtcattttacaattatcaccctggaaaaaccttgacttatccaacctaaaacattttttacaaaatccccttttacccacttgccatattaccaaaaaacccctaccaaaactccttctaaaaa

SEQ ID NO: 156425 - DNA, 425 bp, Zea mays
  Clone ID: MRT4577_74240C.1
ctgctttgttcggccgagggggcgcgccctcgtgccgcccggtccgccggctgccctccgtcccggcgcgggcgttgggcggccctgcgtgcggacggctccctggggtgggggccctgccgccttggcccggtgggccgggtccgggccggcgggcctgcgcccggccgcgcggctctgttcgctggcggccgctggggcggccgcctctcgctgcctgcgcgccggagggagcccctccccttggctccgcctgggggagcatgctggtcttcgcgtcgaccctgccggcggactatcccctcgggtggtgtgctccgctccttcgctgcgtggggccgggatccggacgggagggcttgccctccgacagctgcggctcctgtttgctgggaagccgcctgcggaccggcgcgcgctggccc

SEQ ID NO: 156426 - DNA, 218 bp, Zea mays
  Clone ID: MRT4577_74241C.1
agggatggaggagatatatacctgaccttatcataaaataccagccaagatataaccagagcgtaacccttattgcgtcttccaatgatcgcatcttgaacccctactccctggaaaggatcgcttgctcctagagactgcttcgagcatgctgggccatctgtcagtaaagaggcgttctagttccctgctagccctgccgggggatagggtcaaga

SEQ ID NO: 156427 - DNA, 1288 bp, Zea mays
  unsure (1)..(1288): unsure at all n locations
  Clone ID: MRT4577_74242C.1
ttntnnncnggaatacaaagggtacaaattctccgtgagcatattgcagctactagttcgaatagaaggcccccgcaactgcgagtcactcagccacagaaagaaaatataaattcaactacttcaagttgatcgccaaacgtaggcaaactttgctaggaatggtcaaagtaacgcaaaaggtgcacaactaaagtctagcaaaggtaaacttggggatgctagataagagacaacatatgctctactattgcattgatatggataaaaaatgaccagaagatgccctctacagctgcatattttcaccaatgtaaaaaataatcagtatggcaaatgctacagagatacctagccaatatcctgtcccccgtaaacaattgataaagaaccacctatcccactagcgctcttcagaattgtacttattccaagcctccttaagaagatcaaacaccttctcacaaatgtatttctgtctgattgtagcacctctttgctgcactttatctggatggacacaaagggttgccttcctgtatgccttcttgacaccagcagctgtgataaggtctgtgaggggaactgcctgccagccactgtctgaaccaagtatatattgcaatgtggacagcaatgctcgcagatttccttcttttccatttgaccatctcttgacttcaggatcaagaaattcagccagtctctgtatccaaaagtgctccgttcatgccagcatatcccgcatattcttttcagcaagggctttcgccgctcgctcagctgtgcgttggtgcctttccaattttgctttatgtcgtagagctgactcaacctcgactacttcaacacaagaatccatgctttttccatgcttattataagccgtcttctgagatgatgcctcatgttgattgtcctgattaggtgccttaaaactatccttgaaagaggacctgaacttcccaattcgctcctttgcatctgcagcagcttttgccttttcaattgccctctcccgagcttcagcagttgctctctcaacggctgcacgttctgctttcattctagcttcccttgaagcctgcgcccgagctgcttgagcggttgccttctcttctttctcgtgggcttctgcggatgctctttgacgtgctgaggtgatcctttctaatgctattctttcagccttagctcgaacctcggcgaatgccctttcatgtgcttctcttgtagctctctgaacagcaagcctatcttttgctcgctccatttcctcgagccgaat

SEQ ID NO: 156428 - DNA, 553 bp, Zea mays
  Clone ID: MRT4577_74243C.1
gcccctcgtcatgatgcgtgacatgccccagccgatcctgctatcaagacagctgtcgcgacagctgcgccccccaatgacacacacagggacatgtataggaaaggtgtttaaaaagaaggactagcaaacttgttgcagaattggctgcactgttactttatgtggatctttgtaccactgctcacgatgctgaacaagaaggtaccaaaccaaagtgccgatccaaataataatgaagatgctactgatcatgctgatagtactgcctacagcaagaactacaagaagacaagagttcagacgagggatcagaggcacgagagcacttcatgagtcacatgatactgccaatgcaacacctgatgaagatacttatgatgatactgttaatgagcgcttgaagaagatctcgtagatgatgaagtagatgtcgagcagagagacggacacagataccaacactgccgctgacaatgctgctgcacggactgcaaggcttgctgcagggcttgagaaagacaagagtattgcaaccagcattccgtgcagc

SEQ ID NO: 156429 - DNA, 431 bp, Zea mays
  Clone ID: MRT4577_74244C.1
agcagtggtaacaacgcagagtacttttttttttttttttttttttttttttttcttttttttttttttcgttttctgtttttttttatcacatgatatgctttagtggtgcaccatttccacccacaaagccacacaggaaacggcttttttctatccaaggaaggggaaggggggggccccaattccaacggcaagcgaaccaccaacggagctttcaagttcccaagaaaggggaaggggcccaacccacgaggaaggggccccaggcccccatcggggttcgaaaaagaggaaaacaggccaaaagcccaaactgagggccgggggcgcccgcccccctcccggtttgggggttagaaactaagaccccacgcccaagtcggagggccgcgcgccgccctacttttgagccgccacaggcccgaaaa

SEQ ID NO: 156430 - DNA, 262 bp, Zea mays
  Clone ID: MRT4577_74245C.1
tgccacgcttccgaccacacttccggcagaatggtaagggaactattcaatatgacggacctaatgggtctacaaattcaagtgagaacaattcattgtgtgacctatattccaagcttgctaatgatgcaaggctatatggtgcatgtgacaatgatcaaagccacttgccgtcaacttcttaagttttaccgtttgcatactccaattcatattattttctaaccttcaagtttacctgacttgcttattggcacccctt

SEQ ID NO: 156431 - DNA, 450 bp, Zea mays
  Clone ID: MRT4577_74246C.1
ccggccgggaatatatatccccgacgccggaccgcactcctcaccatttacctgaccctacatattatcccgacgtggtccgcgacttggcgacaccatgagatccacggagtgcggcggaggtcttcgtgcggccgacacgtcgtgagctgaggtggtcgtcctgactgtggaccacgaccagaccgttctccttctcgacaaaccaggtgccgacgtcatgctgctgccgacggtccgggtgaccggcatgatcgcctaaccggtcctgtcttcacactcgcaccacatcccccacatctctgatatatattcgtatccgtttcctttccttgcacccgaacttgaaaagtatatatactatgaataacgcccatgcctatatgatggtgattctcctaattatgatgcataatatgcgcatccaaagacaaaaacgaacccgcgatc

SEQ ID NO: 156432 - DNA, 297 bp, Zea mays
  Clone ID: MRT4577_74247C.1
ggcaacacgaacttcaaatttacattccggaggaaaaaaacgtgacctttcaaaaaatggggcgggacagcgtactaaaatttgcagttcgatgaaccacgatgttgttaatagcattaccgaaaattttattcttttttttgcaccgactggttggttggcgaccaccacccaaataattcccccgggctggcttattgacttggaatagacaacacccccgggcccaccaaagcttgaatggggccagccttttattcccaaaaaaggagtcaaaggaagaggttcttttttggg

SEQ ID NO: 156433 - DNA, 377 bp, Zea mays
  Clone ID: MRT4577_74248C.1
cactcctggcacatatgtcgacgcaggtgtaggcggcgtcgctggagtctgcatggtcaggggagtagactgggaggaccagaagagtgaagaccgacatgacctatgcatgcttgatgcgaatggaaacgtaaatcagcacaccgtctactgaagggatagactacatgtatcctgatcaggaatgatgcaccaatacgctgacccatgcaggccaatcgaattcagatcaaccatgcgatctactatcacggacatcacaaggcatatcatctctgctagtatatcaagtgatatcactaccggttgtgcatacatagctgaatagccacgatatgctattgaagatgctgttaccaactatgacgaatggtact

SEQ ID NO: 156434 - DNA, 853 bp, Zea mays
  unsure (1)..(853): unsure at all n locations
  Clone ID: MRT4577_74249C.1
cctcgaggccggccgggccgggccgaaagagcttcgcgcgaaaccatccgaggcctccagtccagattcccaagccgccttccgttcggccactcgcgcgacggctcgttccgccgccgccgccgccaacgccaacgctctgctgtgaatcttccctccgtcgctcgccgaactttccgccgcttcctcctcggcggcgcacgaggggaaagaaaagcgccgaattttgcttcctttttatttcccccctcctcctcctccgcgcgcctgatctattccgattctccggacgcggccagcgcccagcgtcgtctatctccggccgtcagagtttttcctgggttgtttgggcggccaaaattagccacccccctttctctcccccctccttgcagtaagttaaggccgggctcggctaaacttcgcgccttctccgcggccgcgcgcgcgggggattggattcttctcccggccgcccttctgcctgcctgccggattggaggagggcgggaggcatggggctcggcgtggtggcggagctggtgcggctgggcgtgctgagctcgacctccgaccacgcgtcggtggtgtccatcaacctgttcgtcgcgctgctctgcgcctgcatcgtcctgggccacctcctggaggagaaccgctgngttaacgagtccatcaccgcgctcatcatcgggctgtgcaccggcgtcgtgatcctgctgaccaccaaggngaagagctcgcacatcctcgtcttcagcgaggacctcttcttcatctacctcctacctcccatcatcttcaatgccnggntccagggtgaagaagaanacagttcttccggaatttcatg

SEQ ID NO: 156435 - DNA, 316 bp, Zea mays
  unsure (1)..(316): unsure at all n locations
  Clone ID: MRT4577_7424C.1
naaaaaaaaaaaaaaaaaaaaaaaaaaataataaataaaaaatagttaaaaaaatagagagaaaaaaataaaggggtgcccgttcttgggggtgcaagttttcgatgctcaaaggctgccgaaatcataagcttccaaatagttgaaccctaaattaattacactgaacttcatttaactgccccactactgaaaaatccctgccgttacaaaccttgatatcccccaagtaaatccctttttccccaattctcttttttccgaagaggcccacacctaaaaccctttaaaaaattcccaaaacaaaaatgcctaa

SEQ ID NO: 156436 - DNA, 407 bp, Zea mays
  Clone ID: MRT4577_74250C.1
gcggccggcccgacgtactcaatgctgctgcatgcttttaaagctattagatcatgaggcgccctatcttgctcaccctatccagacagggtgctctgctcgatgctcaattgtagtgacatgattacttatgtacataccacttactgataaatgattgctctgaagtgtacctctgcttgtaagagatgacagcgccataggacgccgctacctaagcacaccgatcctgtgctgctcacattagattttaacatgaatgctccatcacttgacagcacctgcgaaccgatcatgactaaaccaaaaccagctacaaagactcagactacgccccctcatactataactatccacactgagactgaaacctctgtccctcgagcaccagaaccacaacgaggcgg

SEQ ID NO: 156437 - DNA, 478 bp, Zea mays
  Clone ID: MRT4577_74251C.1
aggaccgaaccaacaagcaaggtttcttagcacaagaaaaatacatacctgaacagtgacggtgtgggccacgagggtgggtcctctggcagaagaaagaaggcaacaacacgaaagggaacaccctactcattgaggttcggttgccctagggaccacaaggctttacacgataacaggcctcccctcacatgtcataaagcctgcacctgctgctatagcaaatactgcacctgcgggccttgggcctcctggtactgtgtggtcttctacaccagggaagaaatggacattctttgccttcttgaaatccatatttaacatacaatcgaccttgtcccatttgaagaaatacttacttctaaacaacacagtgaactggtccttcaccttgaacaagatctttaagatttactggaccatctcgataaacgtggacactatctacatgcccctaacaaggatgaactatactctg

SEQ ID NO: 156438 - DNA, 413 bp, Zea mays
  unsure (1)..(413): unsure at all n locations
  Clone ID: MRT4577_74252C.1
agtgtgatggnatatnnctgcagnnaattcgnncccttagcgtgnngtcgcggccccgaggtactatattcacatgttgtcatccagatcagatatatgttttatagtgtgcacacagacgagtatagaattataccatgactctcacggatcagaattacgtatatgtattatgatacttgtgtccgatacacttcagtgtgtactatcttgcccaacagatgctttataaatgatcaccttgggatggatgtatagccagactgaacggtttcgaccagagaaccctatatcgagtgaagatgaccacttgttactatacattactaacgaatagtagactttcttttataggtgaaagtcgactggattctagtttataccccttatcttgattgtatgagaccaaaaac

SEQ ID NO: 156439 - DNA, 310 bp, Zea mays
  Clone ID: MRT4577_74253C.1
cccacgcgtccgcccacgcgtccgaaacattccacgaagaaccagcgtgaggcgacggcggctgcggcggctacatcatcggctacctacgaggctacgacacgaagatcagcgtggagaacatcaggttttcaccggtactcacgtccttctcctctgactccttctcacatgtcgatggagagtggatctgcttttcaccgctgcaacttctgcctgcaagagctcttgctgctgggggaacatagtagctaggtgaggaggagaaccaagccggcgatcaagcccgacgaccagcgaccacgccaaa

SEQ ID NO: 156440 - DNA, 311 bp, Zea mays
  Clone ID: MRT4577_74254C.1
atcttgcttacgcattgcaaaggcccaaattgactaggggctagggcacactggacaggcaaactgggtgggactgctactacccaaaccgatggcccttactatttactccacaagccctttttgctagaattactatctccgacgctccatgaccatttgggggggcggaggcaggtttagggcaaacccaaggcccgccagccccgccgggggcaaccgggagcataaactccgttcccgttccccttcctccctttcccccggcgccgggtccaggaacaggcacggttgggtggccccccgccccg

SEQ ID NO: 156441 - DNA, 632 bp, Zea mays
  Clone ID: MRT4577_74255C.1
cccgggtctgcaccactcgttacgtaacatggaaggcacataccctgtcgtactggttgaccaacggcatggaccgtatctctacaccgcgactttgagcgaggaagacgtcgctggaacggtacgcccgctcaagtctcgtgctctctgccgaggggccctgctaaggaatactcaagaacaagcccgcaagatcttcacgcaccctgccgccgtgacaaagatcaacgaggctaacctcttgctgctcatctatcgaatattcaacaacccaccgaactacctgtacatgcagtacctgatggaatacaactgggacatcgtcgacctgttgccggacatcaccacggcagtctataacctcatgctcctggccaaccactacctctacctcatactgggcacgttgagctaccagtcgccagatatagtagccacaacaccgaatttcttgcagcacgacatctcgttcatggtcaggtttattacttagcttgagcaataattcctatacttcctgaactctgtctttatgcatatgctgaatataattactatattgttactgctgtactgactcatatacaacaaaagaagctattgtactaggtattattccgctgtggtaggtt

SEQ ID NO: 156442 - DNA, 310 bp, Zea mays
  Clone ID: MRT4577_74256C.1
ccagtctcgcgggcgcggccactctgtgggacagcgagaagagacagacacagatcgcgcgcggtgatgtcgtaagactcgctgctttgcgcgcgcgcgctggtgcagatcttgccctacaccttttccgaaatcggcgtcgccgtctacgtcggtgaatccgccctcggagcgcaatggcgtttcttcataacggggagcagtactcatcggggccgccatcaaggggcccaggatcacttgctaggaacgttatcagggtaatcttatgggaggctgtagaagtctatggcgtttttgtggcaattat

SEQ ID NO: 156443 - DNA, 196 bp, Zea mays
  Clone ID: MRT4577_74257C.1
ttgcactttctctctacccacccaaatgtaatcggattactttacaacgaagcggtgactaatcctttacctatctcatcatccaaacccactttccaatcactaaatctcccaacaaacataccatcaccatcaagatgaaatcattctttgccaaatacactgattaaacctacactcataaccatctctccca

SEQ ID NO: 156444 - DNA, 533 bp, Zea mays
  Clone ID: MRT4577_74258C.1
taaaaaaaaaaaaaggccaaaggacaaacctttttttttaaacaaacaaaaaaaaaaaaaaaaaaaaaaggttgttccaaaaaaaactttttttttccaaaaaaaaacttttagggcgaatggggcccaactccggcccacttgggggggttccccccccccttgggggggcccaatttgccctttaaggggggcccctttacccccttaggggggggggtttaaccaccccggggccgggaaaaaccccggggcacgccaaaaataaaacttgggtggcgcgccgcaatcctttattttggtggggccgggcggaaactcttaatgaggcccccggtccttatttctcttttgcgaccagtgcacccccttttttaaaaagggacccccccttttggggggggttaacccccggggggggggggtttacccccaagggggcgggtaaccctcccaaggcccctacccccctttctttgggttttttcccctcttttttccgcgatgtgccctgtttttccccccaagggggg

SEQ ID NO: 156445 - DNA, 622 bp, Zea mays
  unsure (1)..(622): unsure at all n locations
  Clone ID: MRT4577_74259C.1
ccacacacataacgcaaacgcataggantgcccaattaggcacccaaatggaacaaccagctgctgccgacatcggtgatgtcgtcgcaattgatcaaggagctccggttggacgcggaggtcctcgtccgacaagagctgagcgagactcaagtcgatcgagttaatgttgtgagctgtgctctacccgactggctgcctcccgctgctccatccttgtactgaggtgggctacaaccgtatcgacggttttaaccttgggtgcggcaagactactatctgacccacacctttaagtacatcggcattcatgtgtggtacgacaggaaggagacagagttcgtggagctctagaggatgcacggttctctccggggtgaagagcaaggatctcctcatctatagtcaccatctaactacatcgtcactcagcccctcctgcaccaagatcgtgttgcgaacaccctgggggctcggacgttccttgcctgtcaccgccttccagtttgagcccgagggggaccacaaagccagagacgccggcgccgccttcgcaaactgatctgatctagcttgcggaatgggacgccccgcgtaggctgctatatacgcagtggcagtg

SEQ ID NO: 156446 - DNA, 370 bp, Zea mays
  Clone ID: MRT4577_7425C.1
attgagctctgagcatgcctctgctgtctgcccatctttgtattcacacatgaaaaccttggttggaagcttgttcagctgcatcataagaatccctttttaaaaaataaaaaaaatacaaaaaagaaaaaacataaaaccaaatatgaaaataataatacaatatataacgcactacataacacaaaaacacactactaactaactacaacagatataggatgacaaagcaatgggcaggacgatatgctctacccaagtatccaaccaattatttctatctctaaacacctctatatctgaacccaaatcctcaatgacaagataacttattcaaaacgtactcgtctaaaaacctatattttacaca

SEQ ID NO: 156447 - DNA, 445 bp, Zea mays
  Clone ID: MRT4577_74260C.1
gcttgcgtctctgccgcgtcgtggcttgggtcctgctatgagcggccgacgtcgcccttttttttttttttttttttttttttggctatggttttcaacgcatttaaactagcctgcatggccttttttttgacaggtaagcgattattttttttcgttggctttttctttgggtccctgtttgggggggttcaaaaataaaagaaaatgcctcgggggtccttttttttatttggttctcccacgggtgcctgtcctccctcccggcttggtccccccgggcgggcctctttttttgggggggggcccgcgttcctttttttgccctgggaaaaaaatcttgttttgttttttaaccccctttcctccccgtttttttttcccttcccccccctcttttttttttttgggggtggccttctccccccccctcccctttcttttt

SEQ ID NO: 156448 - DNA, 1977 bp, Zea mays
  Clone ID: MRT4577_74261C.1
actactattccaatccgttctagaagtgtctctctcgtccctgcttttgcctcctccgggaaggaagacgaacccatttcttgcagtgccacaggaaggagcaagacgatccatatttggagaggccatttggcatccagagcatccagataaacttgaaagagcaagaaaaacgaggcctcgtttcttgcagtgcctgtgcgtgcggcggcagcgcatgcgcattctctcccctccccgttctcctctccccggacaacccggccgcgccgcccccactttcttccaccctcgttggtagagtaccgatatagttccccccatcggccaggaatcctcgcatcgcatcacgacacccggttcctctccctcccttcccttcctctgcttccggggaggaggagaggaaagagacagacgaagggcgcaccgggaaggaggacctggaggaggaggcacacaacacaatccttcctcttgcacgcggagtcctcaagcgggcctcctcctcggccttggctcaaattccgggtgccataacacgacctccgccggcggccaccggcagccatgtcgcccttctacctcgctcgcggtgcttccaagctagtgagaaggattacctcggagacatcggtcgagctcaagattctatctgataaatggcggcttctcctcgctggcctcattttccagtacatacatggtttggccgctcatggggttcattatctgcaccggccgggccctacccttcaagatcttggcttcatgattcttccggagcttgggaaagaaaggggttacatcagtgagacattgtttacattcgtcttcctcaccttcgttttgtggacatttcatcctttcatccttcagactaaacgcttctacactgttctgatatggcgcagggtacttgccttcttatgtgcttctcagtttcttcgaataataacattctatgcaacacagcttccaggacctaattatcattgtcgcgagggctcgcctctggctagattaccacctccccagaatgcagctgaggtctttctgattaatttcccaacaggagtgatttatggatgtggtgacttgatattttcatcccacatgattttcaccctagttttcgtcataacataccagaaatatggaagcataaggttttgtaagatgcttgcttggtgcatagctgttgctcagagtcttcttattatatgttctcgcaagcattacagtgttgacgttgttgttgcatggtatactgtgaatttggtcgttttctttgtggataagaagcttacagaacttcctgatcgatcagtgggatccacatcagtacttcctgtgagtgcaagggataaagataccaagttgaaagaagaaaataccagattgctgaatggtaactctatggattcagctgatcggaggccacgaacacaaatgaatggaaagcaaattgagaatgaaagccatgttgatagtgaaactgtgaaaacatgatcaactatcatggaggggattttgttagctaagagacgtttcagacgactaaagaaatatgggatgccatccgctttggtgcctactgcctagctccttgacgacttcatgaaatatagctacgaaggaaatagttttacatctcgctgttctaggcagcagaagttttgtttgcaaaactgtacatcttcctcagctctctcattgtaaccctttttctttctggtttctttcatttatttaccagcttggaattcagattatttatactagttgtgtatagttagcacaggttctttgcatgtgaacagtaatcatatggacaatataagattgttcttgttataagcaccactttttattattcaactttttattcaagtgaaacagccgtagtgtaaaaggatgaaagtggtgacacgttgtatatctttggtggtgacccgttatatctctttggtggtg

SEQ ID NO: 156449 - DNA, 1491 bp, Zea mays
  Clone ID: MRT4577_74262C.1
cacttataatgtgaaaacattcaagattgctgcaaagcctttggatcttgttttaaagcgtgggagcatcattcagaaagcatcaaatactgatgggttaaccataatcccagagtatgattggaaattattctctgaagagtggagtgctacacctggaaaaggtatatctgctgaaattgcttttagcaagagttctcaagacaaactgcatggatcatctgaagcagtgccgattacggatggaaatctaggccagtctcttgatgacacaaacgatgatttgggagccagagagccttatatcagaactgatcccgaggtttgtgaagaatgtattggcgaaagggagagctgtgcattggtggaaaaactcaactatcaaaatgaagatatccacgtttactttgtccatggaaaagaagcaccaaagtctattaaagaagcatctaaagctgttactgtaccagatcgtcggacatcgaagcgttcccggagaacaagctctggaaactcaatcagtttgaaagtctctggctctacatctgtctatcagttgaaactgatgatatgggaatctttagggattgttaaggagaaccaaatgcttcacaaaggctctgttgagattgaagatgattttgctactcttgctgataagagtatttttcctggggattttctctgggtcagagactctgaaatatatgagaaccgtgacattgcagatgagatttcagaacaaaaggatgatatgctacaggctgaggaaggctttcgaggaactctgttgacatcaactgtctcagctcagctttgtcaggatatagcttttagtgaatgagttcccacatcagatatgtagctgcatatctgctgacttaagctggtgaagcctgctgggagaaggccgattgattcatgattatggtggttctggcagccgccgaggtggaaatttttgtcgaccccttatctccatgctcagtcaagctaaggttgtttagcgaggaaaatgtatggggtacctactgtagttaaggccccgtttggtttgagggactaaagattagtccctccattttagttccatttagttcctagattgccaaacggtaggactaaaaatgggactaaactgttttagtccctagtctctcaagatgtggctaaaaagactaaaccatattaattccacatttgcccatcatttagttcaattgtactaatagcacgagaatgttaaagacaattttagtctaaaaaaaaaaggaccctggccgcccgcgcgctccagctccatgttccgttacctgttagtgaagggcaagtgtgcgcttgtcgtggtcatggtcagagtctcggtgctgagtgatattgcgatccgctcccactccccctccgcagtacggatgcgtaaggattaaatgcctgggctgcctgtggctagtgactgatctaactcacttcaattgcgctcgctgtcacgtg

SEQ ID NO: 156450 - DNA, 1500 bp, Zea mays
  Clone ID: MRT4577_74263C.1
cacgacctctgccggcggccggccaccggcacccatgtcgcccttctacctcgctcgcggtgcttccaagctagtgagaaggattacctcggagacatcagtcgagctcaagattctctctgaaaaatggcggcttctcctcgctggcgtcatttttcagtacattcatggtttggccgctcatggggttcattatttgcaccggccggggcccacccttcaagatcttggcttcatgattcttccggagcttgggaaagaaaggggttacatcagtgagacattgtttacgttcatcttcctcgcctttgtgttgtggacatttcatcctttcatccttcagactaaacgcttctacactgttctgatatggcgcagggtacttgcattcttatgtgtttctcagtttcttcgaataataacattctatgcaacacagcttccaggacctaattatcattgtcgagagggctcacatctggctagattaccaccaccccagaatgcagctgaggtcttcctgattaatttcccaagaggagtgatttatggatgtggtgacttgatattttcatcccacatgattttcaccctagtttttgtcattacataccagaaatatggaagcatgaggttttgtaagatgcttgcttggtgcgtggctattgttcagagtcttcttattgtatcttctcgcaagcattacagcgttgatgttgttgttgcatggtatacggtgaatttggtggtcttttttgtggataagaagcttacagaacttcctgatcgatcggtggggtccacatcaatacttcctctgagtgcaaaggataaagataccaagttgaaagaagaaaatacgagattgctgaatggtaactctatggattcagctgatcggagaccacgaacacaaatgaatggaaagcaaattgataatgaaagccaagttgatagtgaaactgtgaaagcatgatatactctgatggagggggttttgtttgctaaaagctgttcagacagctaaggccccgttcgtttgttacggattgatggatcggaacgattcctaatcggattgctttagtttatataaacctcagctggaacgattccggggattgcttctctagtttatataaatctcaacgggaacgattctggatgtaattctacacaaacgaacaaggcccaaagaagaaatatgggatgccacgcgctttggtgcctagctccttgatgacttgatgacatagctacgaaggaaatagctttacatctcgctgttctaggcagcagaagttttgtttgcactttgcaaaactgtatatccttctcagctgtctcattgtaacccattctttttctggtttctttcctttattttccagcttggagttcagattctttctttatattaactgtgaatagatagtacacatctgaggttctttgcatgcgaacagtattcgtatagtcaatataaaattgtccttataa

SEQ ID NO: 156451 - DNA, 286 bp, Zea mays
  Clone ID: MRT4577_74264C.1
attacctcggagacatcggtcgagctcaagattctatctgataaatggcggctgctcctggctggcctcattttccagtacatacatggtttggccgctcatggggttcattatctgcaccggccgggccctacccttcaagatcttggcttcatgattcttccggagcttgggaaagaaaggggttacatcagtgagacattgtttacattcgtcttcctcaccttcgtttagtctgaaggatgaaaggatgaaatgtccacaaaacactagttctagatcgcga

SEQ ID NO: 156452 - DNA, 335 bp, Zea mays
  Clone ID: MRT4577_74265C.1
gccgccgccgctgccaacgccgcctgctgccgcagccgccatgggggcgtacaagtatgtgtcggaactatggaggaggaagcagtcggacgtgatgcgcttcgtgcaacgcgtgcgctgctgggagtacaggcagcagtcgttcatcgtccgactcaccaggcccacccgacccgacaaggcccgttgtgtggtctacaaggccaaacaaggatatgtcgtgtaccgtgtacgtgtgaagcgaggtggcatgaacatgcctgcgccaaagggtattggctatagcaagcccaaacaccagggaaatacccagctcaggttccacatgaacaaga

SEQ ID NO: 156453 - DNA, 314 bp, Zea mays
  Clone ID: MRT4577_74266C.1
acgcagacgctttgtccgacccgccgttcacatcctcttccggcgtggtcatcccctccgacacccgcctgagttcggccgcagaaacccgacctgtgacattctgcatgactacctcatggtgtttcgctcataggaagatatgaccatttgagaagaatatgatagagaggggcgctgatgctgagacagcctagaaggcaaatgattatcctgtcgggcctattcttcttgagatctttgccttcggggaaggagcatcatgactcttcgagagcatccagacagcgtcaaacgctggcctattctgagga

SEQ ID NO: 156454 - DNA, 245 bp, Zea mays
  unsure (1)..(245): unsure at all n locations
  Clone ID: MRT4577_74267C.1
ccgtccgttttgggcctaatttggtccttttacacaatttatacttttgacctcaacaagaacaaggattcgggtgtcctttagttttgggtgcacctcctttcctgtaaatgacctgaatgtaaacatggggggggccatcggggtaaatttaaacatggttttttgcatttaaaatccatcctttcctgttnttaaaaaaaaaaaaaaaaaaaataataaaaaaaaaaaaaaaaaaataaagg

SEQ ID NO: 156455 - DNA, 292 bp, Zea mays
  Clone ID: MRT4577_74268C.1
cccactcgttcacccactcgttcgttcactctttcggaatcatcaattaccaattgaggggctctgtattgctcaatggagtgctgtttctaattttaccttaaagtatgctttctctatcattcatttgcatatatatgttgtcatatatttgtttcacactcatattattctgatatctagttactattatctatgcaactgactttttaatcacatgattatgtattactatcttcttgtgttttaacacactttatatctgatacacactttaaatttgattttctaa

SEQ ID NO: 156456 - DNA, 249 bp, Zea mays
  unsure (1)..(249): unsure at all n locations
  Clone ID: MRT4577_74269C.1
ccgtcccagctctcactccgccgcgttctcctcctcctctcctccgccgggttcagccccccttcctgttacaggagcccttccttcgcagcgatggnggtggnggtgccgccggtggtcaagaaggtcccgcngtagctcgtttgagcacggtgaangtccgcgttcgacaactactactggntccncgacgantctcgatccgaccggnangttcctcgnntnnctccntcgtngagaacgantata

SEQ ID NO: 156457 - DNA, 536 bp, Zea mays
  Clone ID: MRT4577_7426C.1
tttttttttttttttttttttttttttttttttttttttttttttttttttttttttttttttttttttttggcccctattttcccaaaggatttgttttattcgtgggttattggttcccaacacggtttggcacacccccccccccccggtgaaagggaaaaaaaggtcacagggggccaaacccaacaaaaggggggaaaaaaaagggctccccggggggggggcccttccaggggagcccacggggccccttggggggggggggggggacccaaaaggggccctgtttttcttgggaaaattgggcaccggggaaatcccccccataggaaggggagcccccccccccaacccggggggcagccctttgaaaaaaaaaagctctaggacaaaagacgcaaaaggcccccccaagaaaaacccgaaaaagccaatgtcccccccgggggaatgggggggggaaaacttcgttggcaacacccgagaaaaggcccggaacaaaaaaacaagctcgcccaaatgttttggagggg

SEQ ID NO: 156458 - DNA, 270 bp, Zea mays
  Clone ID: MRT4577_74270C.1
tgatctccaagaaagaagaagcaaatagagcacagagtctttttgaaaaccattcagcctatcatggcttcgagttccaggagcaccgtgttctcaccttttttcctgggggcgctgttgttcagctgcagcggtatgagcagcgcggcccggttgctggaagaggcctccgcccaaggaggagcacccacatactgccgcgccggagctgccagaacctgagctgtcgccgcacccctaccgacggcgggccgactgagctgaccaaac

SEQ ID NO: 156459 - DNA, 331 bp, Zea mays
  Clone ID: MRT4577_74271C.1
cctccttcttcttctattatttttttttttatggggggtttttataaatgttttcggggggcactccccccaatacaaaacagacaacacggacaaaacgcgcaaaaggaaaaggataccgaacaaaaaccgaccttacaatccctcatagataccagcctactaaactaaaaaaaaaagcgcaaggagtgcacaccaagggccaaaagctaaaacacaacaagaagcatcccaatggtgcacaaaccggtaaccctcccacagggcagggggtggacaacaaaaaagaccaaaccctacacggcctagactggacaaggcacaccgccca

SEQ ID NO: 156460 - DNA, 518 bp, Zea mays
  Clone ID: MRT4577_74272C.1
cccaaaaaaagctggggcctgtaccttttttatttgtttcaaagctttccaccttagccggcaaacccaaaaccggcccttataaccccccttttttggggcggtccaccacaaacaatagccccggggcaaatcaaaaaaaacccccaccttgtaaaacccttttaaaagcttgtttaaccccagcaaccccccaaaggctttttactgaaaaaaaaggcccccttaggcaaaaggtttccccaactggaggggctcccccccctcccaggggaaggcagggccgccccttccaaaggggccgaagcccccctttttgaggtaccccccgttgcccccttttttgaggccaaggttgatgataaccatcccagccccgaaatcaaaattccccttgacaattttgaggatccccttggggggaatccccccggtcccctaccttttaacaaacccggaaaagggcccggcccccccattggcttaaaacccctggacaatggccccggaaacaaagc

SEQ ID NO: 156461 - DNA, 609 bp, Zea mays
  Clone ID: MRT4577_74273C.1
tttaaatattaatagagctctgcagagatctggggggggggggggggggggtctcgacctccccaccgccataacccaggccgccaaactgctaccctatttttccgccctgaggcaccatgcctggtgcccaacacaccatcactcgctcgcctccaatcactcccacgccacatcgcttctaacagactttactcgacacttcgctacttttacacacctaaatcatcataatataactgctctatgagctgcagatgacaaagattataattaagacaaagatgacccagactacaatcaagaagatgctgaaggagacctataataactcgaagacatctaagattctccagataaagaagaacgcaaagacaatcatgcaactttacatccttatataggttatgcacgtcttgatccaggtttttaccgtatttctcctcaagaacaccacagttgttctggttctcgacgcacacattacatagtacaaggttaactcgacaataagtttcatcatagtttcttagttgctggtcggaatacaggtcctaactgatttacaactgaacatccagttcgttgtataggttgaggtcggtgtta

SEQ ID NO: 156462 - DNA, 292 bp, Zea mays
  Clone ID: MRT4577_74274C.1
ggcatttgggtgctaatctccccatccaagagttgggttccgcctatgtgggtggggtgcagctctagctccggcgtccctagtccaagacatggaactaacctagaagctgctcggccgaccactcatactacagacatgatcgcgcctcacgtgctcctgctcgccgacgagccagattaccccatctccccaagctcgtcctcatggctgaagctccctgacgtccgacctgtaagctggagctactcctagagatagtcgatgcctttcctatctgcagccctcacta

SEQ ID NO: 156463 - DNA, 640 bp, Zea mays
  unsure (1)..(640): unsure at all n locations
  Clone ID: MRT4577_74275C.1
ccagcacctgctgncatcctggggctcttcatcacaaattagtctaggcttgccttatcaaaactcaaaactgtttttgttgattattactcctgaccagaaaaggacgcagttctagcatagtatgaagttaaatgatcttgagtttgactaactatatataaaaatgtatcaataaatattgttagacttatcatgagatatattttcataatatacctattttggtgtcatatacgccaatattttttacctatatgtttgaagtgtctgaacacttgaactgttggactattatgactaaaaaatagtaatgtagttcatgagcttactattaatgtatttaatgatgtctatcaagttgtatggatcccagggtgcactcatagttggactattaggaattctgccctccaatataaattatatgccctaggatgcctaggggtttctgcagttctgcttgtaaatattcacaaattagcgcaacagacgcttcttgttgcactgaccattgctactcaattttttttgtgccagttgcttcatagactcggtaggtactcttggtacactccatgttgcattcgctcaagaacaattgtgcatgataactataggcaacaaggatctgacattg

SEQ ID NO: 156464 - DNA, 147 bp, Zea mays
  Clone ID: MRT4577_74276C.1
catccccaacacacaagttgtagctgcctatacgcgcgcctgactggtggtcagcgcagaaagtacaccgcagcccatcagtgaagtcacatcgtagacctgctcctcatcctcaattcatttgatacaaatgacggagctctctat

SEQ ID NO: 156465 - DNA, 507 bp, Zea mays
  Clone ID: MRT4577_74277C.1
cattgggtacctcgaggccggccgggacacacttcaatccgcgaatcgacgcgcctatctcagcttgctgcactgcactgcactgccctgccatcatatcgtacgtgagcccgggcgagagcgagggagaggcatggctgctccgaagctcgcgacgctggcgctggccgggctcctggcggcgaccgcggatggctcccccggtcgcggtgcgcgcggtgatgtcgagctccaccgtgcacagcacgatgatggcgagactgacaatcgtgcaaatgagcgggacaatgtacatccagccgagctagaattggacactgactcagctatgttatgaaatcatgacactatatggaatgatgagatgtcagtggctacctaacatctgaaaatttaccatctttggcggcacccacactcgagccgcatgggcgctgtgcccatcaagagcgaagacgccctgacgaacaagatcagcaacaacgcttcactgcgtcacgcttatgt

SEQ ID NO: 156466 - DNA, 477 bp, Zea mays
  Clone ID: MRT4577_74278C.1
acttgactgtctgccctgtctgcaggcactagtcttcttcctggagagaaaaagcagaagacaatacatagatgtccaagatggctgaagagaaagcggcggtagcgggcggactcggatgagccggggcggctgacgcggcgcatcagtagcagctggcatcacgggaggcctcggtgagttgtgtgcacaccagtggtatctctgcttcgcgcggtaccgctgaggctatgcgtggtcgccatgaccgtaatgctacgtaaccagcagagcatctagtatggagccgtcgcctacttcgacctgggaggcttcaagtaccttgtctacagccaacggcctgtgcgccgtctactcgctgatatccgcgttctacactgccgtgccgatgactgccaccgagtcgcgctcctggctcgtcttcctcctcgaccaggtgttcacgtacctgatcctggcggaggtcacagcggcggc

SEQ ID NO: 156467 - DNA, 390 bp, Zea mays
  unsure (1)..(390): unsure at all n locations
  Clone ID: MRT4577_74279C.1
tgctgcggcgggtaggggggtgccatgctgttcactgggatcgtggggggtcgcgcgtggggttgagccggtttatggtgtgtaacacaattggcaggtaatcgtaaccgtgtcgactcacggaaatctcgcaacatgcgaatcgtgcgggatatttggaacatgccatgaatatcgacaaggacggttttggcgaatatagtaggataactccaaaaaaactgggctacgcaccgtcgccgctttgtttgatgacctaggagaggtagggtatacacgatggcgacgactagtggatcggtgcagtgtggagaggctacagcgacgacgttaccttgtgggtctgatggtcgncatgctgtaactccactggctgcgttaccggcgcca

SEQ ID NO: 156468 - DNA, 1283 bp, Zea mays
  Clone ID: MRT4577_7427C.1
ctccttttccccttttcaaacattcaggagccgaaggtgccagccaccctttgctcggcgcgtgtcccggcgtagctcacgacgcatcctcacctgcctgcaccgagccaaggagagtcgttggctatgcgcgttagctccgctgctgggtggtcaccatcgtccgagcacaacacagggggggccatcctctcactgaattacttataggaagcctcatcatgtagtttgtgcgctactagggcgagatccacctgttgtgatgatgctctatggcgcacatgtttcttttttatgggaacctcttcttagtaagtgggatggagagctttggtggagtttagcaggtggtcatctgatgattaggcgacgataaggaagtttttgatgagttgctaactgctaggtcggggacgtggggtgctgatgctgttgggtccatgcttcgtcgccgaaggtcttcaagggagaagcggcttaaaatgtgtgagcaggtattttcggactcgtaccagaaagggaaaagctacaaaggttgacacagcgccgaagctgtgaagcaggaaagcttcggcatgttcgcagaaaagggaaccgacttaaagatgaaaaggccatttagacctcgatagagtgctatagaattatcaccaaatgtaaagggcatgtatgtaattttgtatgggttgtaccccgtgcctataaataggtgaacagtacccccgtactgttcacgttgacttggcatttgcttttgcgtcacacttccgccttcgcgtccgcccacgcgtccgcccacgctaccgatcgccagcaaagggagagcgccgaggtgagagagataatgtggtggtggtagctcatggtcgaatagaatagggggtgtcgggctatgcgcggttgacctccctcctgatacataccccttcaccgttggttgcctcgtgccgtggcctgagaagtcgatgactgctcatcatggtaggaggccccgaccgaccgtgcaatcgtgtgccgacgctgtggctgagcgccaatgaaatcacggtatcttcggatccaagtcggcatcacagtagaccagagtaatacgaaggttgatacagcgccgaatgtgtgagcaggaaagcttcggcgcgacaacaaaaagtgaaaccgacttaaagatgaaaaggctattcagacctcgacagattactatagaattattaccaagtgtaaagggcatgaatgtaattttgtatgggttgagtcccgtgcctataaataggtgaacagtaccc

SEQ ID NO: 156469 - DNA, 169 bp, Zea mays
  Clone ID: MRT4577_74280C.1
aattcggcacgaggctaacccttgctgttcgctcgctgttcgccccccagccgccaccgccagttcttccattcctccgcgctctttgagccttcgtctcccagtctcctcaactcaggtacggtgtccgcccgccgcacaccctcggcactgtcgatcgctggacgct

SEQ ID NO: 156470 - DNA, 874 bp, Zea mays
  unsure (1)..(874): unsure at all n locations
  Clone ID: MRT4577_74281C.1
tgttgttngaaatcgagaacttgattgttttagcctatgtttaacttatccaaacacatagaacttcggaaactcatatctcattcattataactccgattttagccattctcgaatccacgatctcgtagcaacgtgtagattattataatgcagtttatgcttatgtttgttgtgatccatatacaactttcagtccggaaaccatagcgggttctctcctgtagtggaactttgtaaaggcctcacaatgtaccctcgcctacttactttggcagtgtttaagggtttgatcaacccgaggcggcaaagggaaaacgtcttgtgggtaaagatgtgcaacctctgcaaagtgtaaaactggtatatcagtcgtgctcgcggacaagagcgactcaggactctcgcgtgattaacttataaaattaaacttaatgtgtcatatgtattacattgtggttttgttactaattttgatctattactttattgggatggtattaacttatacttagtaactgctaacaaaatttgaccaacttattaaaagtaatgttttaccttaaccattatttgttgatcagcctgacactatacatgagcccccaccgtaagtgagctcatgcacattattcccacacttgttgagcaatgaacttttgtgtgctcactcttgcgataaaactttcccccacatgtgaagagaaggtggccccggaggaagacaaatacgaggagttcgacgaggtctaggtgtcgtctcccaatcagtttgttggcgccatgggacaataatgttattagttcattttaattattatcatttatcttgtaagacatttcattatgtaataatgattgtgacattcgtctc

SEQ ID NO: 156471 - DNA, 383 bp, Zea mays
  Clone ID: MRT4577_74282C.1
ttatttttttttttttttttttttacatctatcttttggttttgggttggggacatctaaccactttttttatacaaaagccccccccaaaaagctaaatgggacaccagggtattatttatgggtcggaaccatcgtcccatcacccattttggacaacggcggtaccttaccatacccccctttttaacgggcccccggagtacccctttcttttatttagtttaggtgggagggggtaccaaatccgaggtcccccccggaaaaaaaaagttttggggcggggccaaaaaaacaaaaaaaatgggccctttgcaagggttcgggctcttggggccaacaaaaacaaacttggaaatccttcggggggggtgggggggggg

SEQ ID NO: 156472 - DNA, 129 bp, Zea mays
  Clone ID: MRT4577_74283C.1
gtcaccgccacgacaaccccgccgcaatgctgtcgaggggtccccgcctttgcccggggagctccagacctgtcctctcctcttctggggcgtgtcgtataaggtgtgggtcccatctattctctcaag

SEQ ID NO: 156473 - DNA, 198 bp, Zea mays
  Clone ID: MRT4577_74284C.1
gcttttcttacgagacatgcagtataacggcagttggggggtaactttagcgttatggcgtgaaatggcaatggaaattccctagggacagtcgaaggccctcgtcatacccgttcttgagaaccgaaagcgtcgaacttggtagcacccctgaaagaggtaaaataggcggaccaaggtcacatttcagacgggcat

SEQ ID NO: 156474 - DNA, 186 bp, Zea mays
  Clone ID: MRT4577_74285C.1
gggggcaagccctgatttaaccttttaaaacccgttcacccaccccgttaaaatacccccggtttaaattccagggggaaatttccccaaaaacccaaaatttcaatttgttcgggggggcggccctttgttccaatttggggggccaggccctggcccggtttttaacatttgggccttcccaaa

SEQ ID NO: 156475 - DNA, 589 bp, Zea mays
  unsure (1)..(589): unsure at all n locations
  Clone ID: MRT4577_74286C.1
cttgctcaccaacggaacgcctatcgagtactgtgcacaataccctaatgtctatccagacttctgactaggacatcgcaacgaggtcacatccgctatgcatggcaatnacttgacactaattatacactccgttcgtntacctacacaaccaattcatcgaggccctnatatacaagacagtctaccattatggacgcattctatatggcactaaagcatcatgccacaacaactacaacaacttgcgctaacanaaccttgctgcatactctcagcaacatcaggatcttccattcaaccaactggctgaattgaactttgactggttattatgcctcaacaactaccattctaccagatagctgctgactacccccagcaataacttgcatttaaccaactagccccaattaactctggttgtcatttacagtggcggcgccttccgccattcagccagctagctgatgtgagccctggtgccttcttgacacaacaacggctaatgccggtctacctacaccctttgcctaacgctgggaccctattacaagggccacaattgccctcattcaacccacttgct

SEQ ID NO: 156476 - DNA, 377 bp, Zea mays
  Clone ID: MRT4577_74287C.1
aaaaaaaaaaaaaaaaagaaaaaaaaaaaaaaaaaaaaaaaaaaataaaaaaaactctaaaaaaaaaaaaaaaaaaaaataaaaattttttatttatttccgtgtacccccctatgggtgacttctctcaatttccttacccctgggggccccttctgattcctttttactgtccccttttccccttttttcttctcttttttctgtccattgtcctccccttttccacccttgctccctgggatacccttccctgtttcccccctttttcgccttggaccaattgccccttttgccgggttggctaagagcatacagccctctccgttcgcccttctccacatttctgcagtctttttggccactgcttcccccct

SEQ ID NO: 156477 - DNA, 252 bp, Zea mays
  Clone ID: MRT4577_74288C.1
aaacaagggcctggtaacaaaatttcttatttgaccaaacatgaatcatagtgaagtcacctgccgcctttcactaaaacaaaaatgcagcctctctgaatttccttaagagacatgactgacaaatcttcaaaacatgggtccagaaaaacaaacagaactggatctttggggattataacacttagacaaccttgggaggaaaaaccagcatgtggctctactcatccacctcaagaggataatgaccac

SEQ ID NO: 156478 - DNA, 167 bp, Zea mays
  Clone ID: MRT4577_74289C.1
ccggccgggatcttgtattgaccgtacgtcctggggccatggtggcgcttatgcacccaggtaccattgcgccactcgatcaggggggtggactgtttgagttttccgtgctgccgagctccgcgcggatgtcgatgagtaggaatggaaacccctgagactttatg

SEQ ID NO: 156479 - DNA, 2194 bp, Zea mays
  Clone ID: MRT4577_7428C.1
aacgtcacacagggagtgagtggtaggcagcaagcctggacaagaaggtacaccaatcaacacatcagcaatgccgcctacgcatatccagcatagccatccgttccttctttccgtcagtactcgatgccgcctacgcatatccagcatagccatccgttccttctttccgtcagtactcggacggtgagatgacatcgtcgatcttcaggatcatcttcaccacctgggtggcaagcaagatctgttgctgcttgccaatcagggtctcgaagacgttctgttctttcatgtcggtggtgccaacgtcgttgcagtctatgccgcagtgggggttgctctccttgacttgttgagcttttaccgcagttaaggtatcaattggtgacaaaccactgttttcggccaacgctagtggaacagcatctaatgcatcagcgaatgacctgatagcatactgctcaactcccgggtgcctatctgcagcagtttcaacagcaattgagcaagatatctcggctgagccgccaccgtacacaattgagttattccggatcagattccttgccacgcaaagacctgcatgacaactctatcctcaaagattgttaaccgttgcaagcgggcgttggcagagattgctgtcaaagcagtacttgcggttgcagatttggagaggaaggatgttaacttggatctaattaaagtagaaggcaaggttggtgggaagctggaggacactgaacttgtatatggaattattgttgacaaagatatgagccatccacaaatgccaaagagaattgaggatgctaagattgccatcttgacatgcccatttgagcctccgaagccaaagacaaagcataaggttgacattgacactgttgagaaattccagacactgcgtgagcaagagcagaaatactttgatgaaatggttcagaagtgcaaggatgctggtgcaaccctggttatttgccagtggggttttgatgatgaagccaatcatttattgatgcacagaaatctgccagcagttagatgggttggtggtgttgaattggaattgattgccattgctacaggagggcggattgttccgagattccaagagttgagtcctgaaaagcttggaaaggctggattagtcagagagaaatcattcggaacaacaaaggaccggatgctttacattgagaagtgtgccaattctagagctgtaaccattttcatccgtggtggaaacaaaatgatgattgaggagaccaagcgcagtcttcatgatgctctttgcgtggcaaggaatctgatccggaataactcaattgtgtacggtggcggctcagccgagatatcttgctcaattgctgttgaaactgctgcagatcggcacccgggagttgagcagtatgctatcaggtcattcgctgatgcattagatgctgttccactagcgttggccgaaaacagtggtttgtcaccaattgataccttaactgcggtaaaagctcaacaagtcaaggagagcaacccccactgtggcatagactgcaacgacgttggcaccaccgacatgaaagaacagaacgtcttcgagaccctgattggcaagcagcaacagatcttgcttgccacccaggtggtgaagatgatcctgaagatcgacgatgtcatctcaccgtccgagtactgacggaaagaaggaacggatggctatgctggatatgcgtaggcggcattgctgatgtgttgattggtgtacctccttatccaggcttgctgcctaccactcactccctgtgtgacgttttgccgaaattggtttgtattgtgcacgataatatctggaaatagactctagacagtccttagttatctttttattataaaaaaagtcagtgccttctcgtcagggttgagatggttgcagtattgatgcttttgtagtgtttttatagctcagcttaagctgtcatttttgtttgatgatttgcaatagttggacgccctcatgaacaaaatgcaatggttcatcttttgacagttgaattaaaaaaaaaaaaaaaaaaagcggccaatcgtgtacgggcggtggctcagcagagatatcttgctcaattgctgttgaaactgctgcagatcggcaccctggagttgagcagtacgctatcaggtcattcgctgatgcatt

SEQ ID NO: 156480 - DNA, 490 bp, Zea mays
  unsure (1)..(490): unsure at all n locations
  Clone ID: MRT4577_74290C.1
taaaaaaaaaaaaaaaaaaaaaaagcttgaacctggcccgggtgggccgcttcgaaaagggcgaaatttctgcagaattatccatacacactgggcngtngccgctcgaagcagtgcattctagaaggtgcgcacaattcgccccttatgagtgaacgtcggtatttacaaaattcactgggcnactgtcgttttacaaacgtgcgtgaacttgggaaaaacacctctgggncgttaccccacaacttatnnatcgccttnnggcagcacaaataccccncnntttcgccccagcgtgtgcggtaannntagcgaaagaagnngcccgcnnaccgtattcgcgccttttcccnaaaacagttgcngnncagccctgnnatatggcgaaatggnaccgccgcctnctgtagnncggcgacatataaaagccgcggcggnngtgtggtggggttaccgccgccagcgtgaaaccgtnctacactttgccann

SEQ ID NO: 156481 - DNA, 271 bp, Zea mays
  Clone ID: MRT4577_74291C.1
ccgaaccagatcccgtttaatataaaagcttttccgacggattttatagataaataaaatagaaaaatgaaccatgacaacatacacactacattttcagcagagttcatcacattttcattcaagagaaaagcggacaacaaaaacacaaggcctgccggccgacgacaaccaccaaacttttttggttggttctttttcactttacgcctcaacaaatcccaattttgaaaggcttaggggggccttggggtaatcaggaaaaaaagga

SEQ ID NO: 156482 - DNA, 483 bp, Zea mays
  Clone ID: MRT4577_74292C.1
acgtctgctgccctcgttcgtctgctcggaattcggctggagatacctgccattgttctggacctccgtggtgccggctgtttacgggattgtcaattcgcatgaccgcggtctgcagtgtggccctctgtgtcatcaactggtcgccagccaccacagcgttctgttctaggctcaagcgcaatgccactttgaggcgcgccatggtcatggttccatccatcatgtgttgtctagcgtgcgtgtgcaccatgcgtgtgatctttgctgttgctccagcccctgtatggaactgcttagtcttttggggaggggggacgttacggaaaggggatcttccgtgccagtgttgtccaggttcacagttcgttgttggcgatccctagtacttcacatataaaaaggcctcctcgaactgtgagtggactgggttttcaatcatggaccctgctattgctcgccacggcccgtggttgatgatca

SEQ ID NO: 156483 - DNA, 246 bp, Zea mays
  Clone ID: MRT4577_74293C.1
agcttagctccactccaactcgaatcacagtcatgacaaaatcccgagaacaagctaaagggccttaaaaatcccgattaataggatccccctgggaacccaccagaaggtgtacgacacgggcgccctcaaggcggcgttcgctgagttcatctcgaccctcatcttcgtcttcgccggcctacgctccggcatggacttcagcaagctgaccagcagcagcccgacgaccccggcgggcctgat

SEQ ID NO: 156484 - DNA, 558 bp, Zea mays
  Clone ID: MRT4577_74294C.1
cataccattaaaaaaaaaaaaaaaaaaaaaaaaaaaaaaaaaaaaaaaaaaaaaaaaaaaaaaaaaaaaaaaccaaaaaaaaaaaaaaaaaaaaaaaaaaaaaaaaaaaggaaaaaaaaaatttcttttaaaaacgcgaaggaaaaaaaaaaaaaaaaaaaaggtttttccttgccgggggggccttttaaaggggcaatttttgcaattttccttcaccttgggggccgttgggccttccttttagggggcccatttccccttttggggggtcgttttaaatttaatgggccgggtttttaaaacgtggggcttgggaaaaccttgggtttccccaatttattcgctttgaaaaaattccccttttccccggttgggttattaccaaaagggccccccccattcccctttccaaaaatttgcccaccctgattgggaattggcccccccttttaggggccctttaagcggggggggtgggggggttccccccagggggccctttacttttgccgggcccttagcccccgttcttttggtttttttcctttctttttt

SEQ ID NO: 156485 - DNA, 367 bp, Zea mays
  Clone ID: MRT4577_74295C.1
attcataaaagggttccccaagtccccatagggggggggggggggagagccccccctcttacaagacgaacagtcctggctttttagcctcgggggcagaggggggaaaaacccaaacgcccaagcccgcaaaatttttcagcgcccaagggccgtgttattttacagggcgacaacttgcttccaaatacccttctcgcgagactcgatgaacttgtgtttgtcgtccctccgggggggaattctggggctccatctccgggcggcccgaaagcagagaggttttttccctctttcattctttttggaaacctgggtcattccgtctttttcttaaacttggccctttctgccccccttttggggg

SEQ ID NO: 156486 - DNA, 1191 bp, Zea mays
  unsure (1)..(1191): unsure at all n locations
  Clone ID: MRT4577_74296C.1
cggacgcgtgggcggacgcgtgggcggacgcgtgggggttaatctccacacgaatcacggacacggagacttgccttccttttggtgcggaaaaagaaagagaagagaagcgaaggaggttctcagttggagcggctccctctccccgcgcgcgccaccgcctccgatccgagcagccgcctacaattaacccattcaacctcaaatgttccttgtgaggtatcatgacagaacagcaggaacgtgttagcaagagctcttcctcaagtattagcagcagcactcaggaaagtgaggaggaactgaccatcggtacccttataaccgaagcaacaaacacaacaaacagtgccaagagtcttggaaagcgcctttcacacttagattcgatcccgcacactccacgtgttaatgggaaaattccagattttaataatgcgacaattgatcatgaatcattattagaaagattaggcacttatggcttagctgaatatcaaatagaaggagatgggaattgccagttccgagctctggcagaccagatattccgcaatcctgactatcacaaacatgtgaggaaggcggtagtgaagcagctgaaggagttcaggaaacactatgaaggttatgtgccaatggaatataaggtttacttgaagaaaatgaaaaggtctggggaatggggagatcatgtgaccttacaggcagctgcagataggagctttggctaagtttctggtgtgaagtacactacaattcattgtatgcagttgaagatcttcctacacggaaaactaagaagaagcattggctgttctagctcgccaggctttgatgatttcttggcatgctattggttttctctttgccgtccagcagcatctgtaaacctgctgctttgggcctgtttctggtgtgaagtgcaacttgattcattgtatgcagctgtttagattccgcaaaggaaaactaagaagtagcattggctgttctagctcgccaggctttggtgatttcttggtaggatagtggtcttctctttgtagtccagcagcatctgtaaacctgcttagtaaggcctttgtttgttgtaagttgtaacttgacctggaatcaagttcatttaagatcaggccaaagacagtgagctctaaaaaaaaaaaaaaaaaaaacccaaggncggccata

SEQ ID NO: 156487 - DNA, 477 bp, Zea mays
  Clone ID: MRT4577_74297C.1
acgcctgcaggtaccggtccggaattaattcccgggtcgacgagctcactagtcggcggccgccctttttttttttttttttttttttttttttttttttttttttttttttttttttttttttttttttttttttttttttttttttttttgggggggcctttattgaaaaaccaacccctttttaaaaaaaaaaaaaggggccgggcccccccttaattttcaacaaaaacaaacttaccaatgaacaagggttgaaccccaaatggggccctggggggttttcttaaaaccctaacatgggttggctatttaagatctttccccccaaatttttcccttacaacatttctggcaattcccttaccattgaaatggcccccccagtttgcaactgttttggcgtcataggcccctgtaaccctccttgggacctttgaaaagtttaaaaagtcttttgttttgaaaggtgccccc

SEQ ID NO: 156488 - DNA, 753 bp, Zea mays
  Clone ID: MRT4577_74298C.1
gggaccctcgaggccggccgggatagctgttaagcgtagtggaggaagagagggaagaaaacgaagcgaagccaaagcaaggtctgagccgtagagcggtagaggtaggtgtccgggtgggaaacctctctcgcgcgtcaggcgtcacgtgagaactcccgatccaccgggacgacggattcccgccgctcccccgcgcgcggcttcttccggtgcggtccggcagccgacggcggaagctactggcccaagcaaagtgagtgaattgcgagtccaggcggcgatggcggggcgctgcgattgacgtgcgacgactatgggcatccaagggaacaaggcggcgacgcacgagcacgacttcctctcgttgtacgccgccgccgccgccgccgccgccggagccgtcgccgctgcccgctccagccgcggagatcaggcaccggcagcaggtggcggtcgccaagcagcgcgcgctgccccttcccctgcccggcggcgtcggcaccttcagcatcagccccgcgcccgtgtcggtcgcgctgccgtcggccgtcgtcaagtcggagccgccgccgttcgtgctctggggccaacctgcagcgacgctgcagccgggcgcgcgagggcaccagcagcagtgggcgctccccttcgccggctccttgcaggtcagtccgccgccgcagcaggcgcaaccggataggaagggccgcggcggaggcggggtcatggattcagggtccagatccagcg

SEQ ID NO: 156489 - DNA, 1239 bp, Zea mays
  Clone ID: MRT4577_74299C.1
tattgccgaccttggggtttgtttttttttttttgtacacacagagagaaaataactacgtccctgaaaacatgtttactatgtgttggaaatatttcagccacggacgaagcaggagctcactgtatcttgtaaatgattcagccaaggacgaagcaagagctcactgtattttgcatgatcttaaatgaatttgattccaggtcaagttacaacttacaacaaacaaaggcataactaagcaggcttacagatgctgctggactacaaagagaagaccaatagcataccaagaaatcaccaaagcctggcgagctagaacagccaatgcttcttcttagttttccgtgttggaagatcttcaactgcatacaatgaattgtagtgtacttcacaccagaaacttagccaaagctctcttgttggagtggcatctctggggactatctcaactaggcatgtgtctctaaacgatgtcaacagacatattttagcagcaaacctgtctgcagctgcctgtaaggtcacatgatcaccccattccccagaccttttcattttcttcaagtaaaccttatattccattggcacataaccttcatagtgtttcctgaactccttcagctgcttcactaccgccttcctcacatgtttgtgatagtcaggattgcggaatatctggtctgccagagctcggaactggcaattcccatctccttctatttgatattcagctaagccataagtgcctaatctttctaataatgattcatgatcaattgtcgcattattaaaatctggaattttcccattaacacgtggagtgtgcgggatcgaatctaagtgtgaaaggcgctttccaagactcttggcactgtttgttgtgtttgttgcttcggttataagggtaccgatggtcagttcctcctcactctcctgagtgctgctgctaatacttgaggaagagctcttgctaacaccttcctgctgttctgtcatgatacctcacaaggaacatttgaggttgaatgggttgactgtaggcggctgctcggatcggaggcggtggcgcgcgcggggagagggagccgctccaactgagaacctccttcgcttctcctctctttctttttccgcaccaaaaggaaggcaagtctccgtgtccgtgatgcgtgtggagattaaccgaaatgaccttgggatcccgggcgtccgcccacgcgtccgcccacgcgtccg

SEQ ID NO: 156490 - DNA, 268 bp, Zea mays
  Clone ID: MRT4577_7429C.1
aagcacacacatcccggcccccgatctccgatcccctcggcgatcgcgagatgcagatcttacctcaagactctctctggaaagacatatcaccctccaggtggagtcctctgacgccattgaaaacgtcacggccaagatccacgataaggaaggcattcccccgtaccagcagcggctcatcttcgctggcaagcaggtccaggcaggacgcccacctgccgactagagcatccagaaggagagcacactgcaccttgtttcccgc

SEQ ID NO: 156491 - DNA, 2456 bp, Zea mays
  Clone ID: MRT4577_742C.1
ggaccacgtgtacccgccaccgcgccgcgcggctccaccgttcggcggcgctcgggcacggcacgtcgcacggcacgccgtaaaaccctagctcttgcgccccctcctctccaccgcgccggcgagccgtggaggcgcggagctaaggatgccgcggacctccgtggtggagagtcccggctgcccgcagctccgcgcttcaacaatcaaggttcccgttgttgtaagaaaggcctaggagcacacttgggggacatcacatctagtagtaagacatggtctgctaaatctgtaagcactcattgacttctttaatttatctttgatactaatatacatacctccctcatttattaaatgattgtcttactgtgttttttatttgctgcagagcaaatagtgttgtcattttgatgctgccttggctgactggtgaaaccttcttgagcgtgaatgatcagggtataactgcagcctatagaacctgttgattggaatggctgcccccttttgtcattagaacctttttggattctaaacctaaaatagcatttttcattgatcccattttctagaaaaggcatcttcgggggtccattgcgaacaatcattaatgttctagatccatttttgtgccaatttgcatttgcgctcatttgctgatggtcaaaattatgtgatgtttggagggaaaggtatagaagtgagtttgtgggatattacatcttgtagtaagacatggtctgctaaatctctccaaacaaaaggtattggtagcttaatctccccccgcgaacagtctgggctggtttactcgaccgtggttcattgctggatcgtacctttgcaagaaagatcatcgttcaattgatgccagcctgcataatcatcaagtccgcccatatgtttctgcatttacaaagaagaactcccggcagttttggtttttgggagtcgtcatgatgcgtcgattgccacagggacacgggggcgtgctttctctattatgacagtaggagaggaccttgctcctgctgtcatgtgtcttctgggaaattgcttggagaacctgttcatataatattctgtagaatgttacgttagttcagtttctatttgttgtaatgttggatggtttcaactggcattgcaccttctgttccactgttgctacttagtttttttccagctagccagtaatctgcaaccaaggcagtattacaactaaaacaatgctgacctacatgtgtactgaactactgataggaatactcattgggggcaggatgaatatacaatataggctataattcgtgtaaaactgttatttagatggtagttaaggacagaaaataggctaccagtaacacttgtgtaaaactgttgtttagatgattgttaaggagaaaaaaatcattatcagaaacgctgcagcaggaagagaatggttgcaagaatcacatgtgcaagcagcgatgagctaccatttgacagctttattaattattatcagtattattattacgatggggaaatttgcagtcccaagagaagaaaatctggagaaagaagcaaatgcctgaagaagaggagcaagaaacagctggttgcctagtgcaagtatcatttctcattacccgccttcttgattttgcagaattactcaattttgtgtggtagtttgttcggaattgtatcccttttgaaaccctgcaagtgtggtgcttgattttcgtgtgcacatttttctactctggtgtagctaaattttgatgttgaagagcctggagagatgaaatccaagcaactggagtcttcagtggagactgagactgaagtccgaaaagaaaagaagaaaaagagtaaggcaattacagaggatgagactgaggcacaaatccgaaaagaaaagaagagtagaacaattgaagaggaagaacaagctggattggtcgaccatagcgatattaatgatgaagtatatgccagaaaagaaaagaagaaaaagaagagtagaggtattgaagggggcaaggagcgagacagcgacggggaaatttgcagtcccaagagaagaaaatctggagaaagaagcaaatgcctgaagaagaggagcaagaaacagctggttgcctagtacaagtatcatttctcattacccgccttcttgattttgcagaattacacaattttgtgtggtagtttgttcggaattgtatcccttttgaaaccctgcaagggaagtgcatcattttcgtgtgcgcatttttctactctggtgtagctaaattttgagacatacacgctggagtagttacagccaaaacttgaaactaatttttgagatagacatgtgggactaaatttcgagatatacgcgtaggagtttctactataaaagtagaaagttttttatgtcaaaaaaaaaaaaaaaaaaaaaaaaaaaaaaaaaagac

SEQ ID NO: 156492 - DNA, 232 bp, Zea mays
  Clone ID: MRT4577_74300C.1
ttggcttctcgtccccctccggttcgggttggggttcgagaggttctcgggggttcggtttcgtgggtgagcggatagagatggcggcgacggatgttgagtaccgctgatacgtcaggagcgtcgcctgaaccacggacgcacagtccctccacaacgccttgagcagataccgcgaggtcgtccggtcgaaggtgatgctcggtgggtcgacacagaggtcccggggctt

SEQ ID NO: 156493 - DNA, 819 bp, Zea mays
  Clone ID: MRT4577_74301C.1
cctcgaggccggccgggatagctgctaagcgtagtggaggaagagagggaagaaaacgaagcgaagccaaagcaaggtctgagccgtagagcggtagaggtaggtgtccgggtgggaaacctctctcgcgcgtcaggcgtcacgtgagaactcccgatccaccgggacgacggattcccgccgctcccccgcgcgcggcttcttccggtgcggtccggcagccgacggcggaagctactggcccaagcaaagtgagtgaattgcgagtccaggcggcgatggcggggcgctgcgattgacgtgcgacgactatgggcatccaagggaacaaggcggcgacgcacgagcacgacttcctctcgttgtacgccgccgccgccgccgccgccaaggacgctcctctcctgctccacgactccaagacgccgcctccttctcaaggtaattttctcttgaagacgcacgacttcctgcagccgttcgatcagaagccaggagcgccgccggagccgtcgccgctgcccgctccagccgcggagatcaggcaccggcagcaggtggcggtcgccaagcagcgcgcgctgccccttcccctgcccggcggcgtcggcaccttcagcatcagccccgcgcccgtgtcggtcgcgctgccgtcggccgtcgtcaagtcggagccgccgccgttcgtgctctggggccaacctgcagcgacgctgcagccgggcgcgcgagggcaccagcagcagtgggcgctccccttcgccggctccttgcaggtcagtccgccgccgcagcaggcgcaccccggataggaagggc

SEQ ID NO: 156494 - DNA, 358 bp, Zea mays
  Clone ID: MRT4577_74302C.1
acacatctgtcgtcattaattgatggcatagggcatacagacatatatatatctctcttttcatttctccttctttttgaaggatgtgtactgagatggtgctgctactatatgtatatatatacctactactactacggctacatgcaataccacacaggaggcacacacacccaagcctcttgtagcactcatctatatatccatcctgttatcgtcgaggcatttcgatccgcatcgctctccataacaataatatatatataatcttcctataaaacataatcaactaattgaacgaattccacatctgcgtgaagccactctcagcttagttctcaaacccatcctgagaaaa

SEQ ID NO: 156495 - DNA, 194 bp, Zea mays
  unsure (1)..(194): unsure at all n locations
  Clone ID: MRT4577_74303C.1
gccaccaagggcatgtnggcgccaagcctcttcgnannncggccgcagtcccaactcccctcaccgtctacgtactgggctctactagcgacgaggaccaggnnagcaaccaccgcttagcatcgggcgagcatggatgcgacagtcgaagaggggccatgtttgtctggctccttnggtggttatctacaaac

SEQ ID NO: 156496 - DNA, 201 bp, Zea mays
  Clone ID: MRT4577_74304C.1
agcctttttgggggaaaaacgacacaccaccgggggaggcgtaaaaccaagagggggggggcgcgctaaaacaaccaaaggaaagggcagtggttgggcaaaaggacaatttgacgaaggaagaagaagaggaaccaagaactgagaaccggaggggccacccacaaaaggggcacaaagacgggcaagtgggaggaaaaa

SEQ ID NO: 156497 - DNA, 511 bp, Zea mays
  Clone ID: MRT4577_74305C.1
cgacgaagcgcacggagggtaactgcacaggaggaaaccggcgaaggaagcggcggcggctccgggcgtggacatggacgagaagacgcaggataaagtggaggcggcggtgctggagatcctgcggggctccgacatggagtccctgacggagtacaaggtccgcaccgccgccgccgaccgcctcggcatcgacctcgacctccccctccacaagcgcttcgtgcgacgcctcgtggaggactacctcaagtccctcgccgaagaagaagaccagaagcagaagggcggctcccgcaaggaggggaaaaagaaacagcagcgtcaggaggaggaagagcaggaagaggacgaggagaaggagggggaagaagaggaggaggaggaggaggacaagggaggtgaaggaaagaaagagttcgacgataatggagacctcatcctctgccgcctgtcgaagaacaggagggtgacgctgcaggagtttaagggcaaaacgctggtgtcgatc

SEQ ID NO: 156498 - DNA, 182 bp, Zea mays
  unsure (1)..(182): unsure at all n locations
  Clone ID: MRT4577_74306C.1
gaagagtcaggccgaatgttctgcaatacaagaacgatgatcttgatgatgantccggtgggatgcgangntcaggcggcgaggtacgaaacncaccgcaaccggnaggtgaccaatttgtccgancaggaggagaagggncaggntcaatgagaaaatgcgcgccctgcaagagctcatcc

SEQ ID NO: 156499 - DNA, 297 bp, Zea mays
  Clone ID: MRT4577_74307C.1
aaagacgcgtggacggacgcgtgggcaattttagagcactgagcagagcacacatggactagtattctaagatgtacggtggacgtctattttgcactgacaaatttagaagtattctaccaaaaaaaaaaaaaaaaaaaaaaaaaagaaaaaagaaaaaaaaaaaaacaagaaaaggagagaaaacaaaaatgaaaagacaaaaaaaaaaggggggacgcgcgatatctaaaataaggccgcaaaaccaacccagttctacgggtctcccgcgttgcggggcaagccgggaaaagg

SEQ ID NO: 156500 - DNA, 206 bp, Zea mays
  Clone ID: MRT4577_74308C.1
ggccccgaagaaggggaggttgcgtggctggggatggcggtggctgcggctgccggcgccgccggcacggctgctgtcatgctgatctatcttcgccttaagaggagatctggtgctcggttgcgtagcagtgctggaagttgtcgtcgtgatgctgctattactaaactggaagatttcgtcgtgatgctgctattactaaactg

SEQ ID NO: 156501 - DNA, 212 bp, Zea mays
  Clone ID: MRT4577_74309C.1
catgttccacgcctgcgtctcgtgatgccgccgaaatcgaaggcgtccgccgccgcggagccggtggccgtcgaggacctctttgcctcgttccaccgccacattgaggcaggtgcttttaaacatggccgccaaggtcgccgaccaagttcttaaggcagcgccgggtgatgaggtcgcggagcgatgcaaggtggtggcatacattaagg

SEQ ID NO: 156502 - DNA, 591 bp, Zea mays
  Clone ID: MRT4577_7430C.1
gccaagatcaagacaacgtgaagtcgtacggagtgtagcgcttccacatagtaccacccgctatctaaaggaggatgggtaatccaacgagctataaaatggggtcagattcattttcaactcattctttttctcgatcttttgactaagttaaagtgtaatatttattcttaccggttgttggggcgaaggcgaagacgctacccttcgctcgatgccttcgccaatctcgctgcaccaacggaggcaagacgactggcagtctccacccttcgtccaacacgtcgcaggacgaaggcctacgacgaggtcgccccatcccgcggcctcgtccaacacgaaggcccacatgtgatttggcccattgtaacaggccccgtgtggccgctgtgcattacaggcctaatttgtaaagacttctctgtaattacagtctataaccctactttatgggaatattccggggataacctgggcgcgtgagggcacatgcgtccttaatccaagacgctgggcatccaggcacctataaatacccccgcacagtgcccttgggaggcgagattaacagagcaattgccttcttgagct

SEQ ID NO: 156503 - DNA, 305 bp, Zea mays
  Clone ID: MRT4577_74310C.1
cgcggcggccccggcggcaaccctcccaatgtggatattagactactatggaaatagattgacaatctgggcgatggaataaatgtccaggtttgcttaggatcccaagtgcaataggagccctatgcctcatgagcctagactgtgtcacaaataatactcacgcgataggcatagtagaccctagcctaaggacccgataactacataaatccatacgctcagagaattgatatatagtttaatctggaacaacgagaaaggacgtgttaagtagagaacttggtgattaatataattaggga

SEQ ID NO: 156504 - DNA, 2599 bp, Zea mays
  Clone ID: MRT4577_74311C.1
tgatcagcaggactggggcagctgatgataagtaacatggtaccaagcagaggccttggcctacatggcatcttggccatcctctcctgtgcgcgacataaggaagtggatgggggactttcgagatatcagaaatgtggcaaagtatgctgcaatacttgggcaatctttcagttcctcaacagaaactttaaaagtacacaaatctgaggtggaacgaattcctgatattacaaatggcacaaagtacatattctctgatggagttggaaagatctcagctaattttgcagtggaggtggctatgaagtgcaaattgaaacgctttgctccttctgtttttcagataaggtatggcggttacaaaggtgttgtcgctgtagatacaagatcaaatcataagctttctttgagaaaaagcatgtcaaagttccagtcagaaaatatcactcttgatgtccttgcatacagcaagtaccaaccatgcttcctgaatcggcagttgattactcttctctcaacacttggggttagcgataatgtctttgagctaaagcagaaggaagccttaaggcagttgaacagaatggtaactgaaccacaggctgctcgtgaagcagttgaacttatgcccatgggagaagtaaccaatgtagttaaagaattgttgtcatgtggctaccagcctgatcatgagccatatctttccatgctgctacaaacttttagagcatccaagcttctagagttgaaaacaaagtcaaggatattcatcacacaggggcgagcaatgatgggttgcctggatgaaacctgcacacttaagtacggccaggtattcgtccaagcttcttacagtgcagatgaccatcgcaaggtcgttgtaactggaaaagtagttgtcgccaaaaatccttgtctccaccctggtgacatacgggttctccaggctgttgatgttcctgctctgcaccacttgtttgactgtgttgtctttccacagcagggaccaaggccgcaccctaatgagtgttcagggagtgatcttgatggggacatatattttgtttcttgggatccacatcttattccaagtcgtttggtggatcctatggactatactccagcttcagcagaaacattagaccatgatgtcactattgaggagatacaggagtacttcacaaactacatagttaatgagagtcttgggattatcgccaatgcgcatgtggtctttgcagatcaggaacgtatgaaggctgagagtccgccgtgcgttcaactggccaagctcttctctatagctgtcgatttcccaaagactggagtgccggctctgattccacatgagctacatgtcaaggagtatcctgacttcatggagaaactcgacaaagtcacctatgaatcaaagggtgtgatcgggaagctctatagggaaataaagaagcacacaccacacataaagcacttcacgagggaagtggcaaggcggtcttatgacaccgatttgattgttgatggctatgaagattacattactgaggctatagagttcaaggaagagtacgatttcaggctgggtaatcttatggaccactatggcataaaaagtgaagctgagataataagtggatgtattctaaagatggcaaagaatttcaccaagagtagtgatgctgatgcaattagaatggcggtgagatctttgaggaaagaagctaggtcgtggttcaatgagatgagcacaggagaggatggccaagatgccatggaggccaaggcctctgcttggtaccatgttacttatcatcagcagtactggggcagctacaatgaagggtatgatcggccgcatcttattagcttcccatggtgcgtatatgacaagcttgtggccatcaagcaggggaggaatctcctcacgcagatggatcgaaacttgaggttccgttgagcattgccagcaggtttgctcctgtacatatccctgatcgtttgcaatcagcactgccagcaagtgtgcatgaacgatctgatgaattaagacgggcaaactgccgcaagctgacgctctggcgtacgtgcgtcttgaaactttcggatgctgccgtctagctaaatgcatgttccttgatttccactgggaccttgagtttgaagtgtgtaaatatatgctgcttatgatgtttttagtattggacctctatcaactgccgttctagttagtaacaatggttgccagtcatggattttaccaggtttcgccgagctcctgtatggacgacgaccgcgaaggtctatttgtttcgttacctcgtttgcaatcagcactgccagcaagtgtgcatgaacgatctgatgaattaagacgggcaaactgccgcaagctgacgctctggcgtacgtgcgtcttgaaactttaggatgctgccgtctagctaaatgcatgttccttgatttccactgggaccttgagtttgaagtgtgtaaatatatgctgcttatgatgtttttagtattggacctctatcaactgcctttctagttagtaacaatggttggcagtcatggataaaaaaaaaaaaaaaaaaaa

SEQ ID NO: 156505 - DNA, 328 bp, Zea mays
  Clone ID: MRT4577_74312C.1
aaagctttcgaaagcttttaacgttcttgcgctcattccagttgtgaagcaagtgttgacggaaggtacagtaagtgaaacacagttccttgcttcattagtatttgcggtgaagtcatgtatgtgaaccatacaggcgactaaaaagtccacagtgaattttggcactgtattagccagctaaagacatgtttacgaaacactcaaattccaatccaacctgagcagatcccaggccgcagacgacctttgggcttggaacatcttcccatgcctgagccaacaaagctctccttttgctttcaggcctgagatttcatgttcaagg

SEQ ID NO: 156506 - DNA, 302 bp, Zea mays
  Clone ID: MRT4577_74313C.1
cccacacttcctagaacccatcatcattctctttaacatccactccccaccacttcgcgcttacaaaaaaaacaccgccgggcctcccctaacctccttcatcactcttcaacacatctgtatttctaataactaatactactaacctttcccatcaacatttcatcataaatcctactaattcatcacaaattccttttctttaccttatctcaaattatctcctctacctcattctagctataacaaacagatctacctaataccttttttaaattccatcattccttactatttcatat

SEQ ID NO: 156507 - DNA, 227 bp, Zea mays
  Clone ID: MRT4577_74314C.1
tgggttttttcttaatttaaagggccatgcatcactcattaaataacaatgcacagacgggcacactggccaaacccataatcattttaggatacaccaacagaacacataggcatagctgattaatcattagttcaatttataagccataaacacctcacatatttttaacatggtcatcaaagtatcatgaaaatgatctgcatatagtgtcattttgctggaat

SEQ ID NO: 156508 - DNA, 440 bp, Zea mays
  Clone ID: MRT4577_74315C.1
gcacaaacagagagcttagttatagtattagcgatggcggtggtgcaggtcatcaaaactcagaagccgttaacgcaacgccggccggccccgtctctctacgactacgagaacagcagagcagcccaacgttccgagatcgtacacgcgttgcagggtttacacagccactggcaattaattaatgcgctactataattactactagtgtgcggtgaggggtgcatggagctcctccgtgtccgtccgtcagtgaacgcacttggacgacggcggcggtgcctcgacgccggcggcgacgtggtggccgccgccgccgccgccgagcgcgtgcttgccgtagccgttggtgccgccgttgggagccgaggtgaggggcagctcggcgacggccggcttgccgccgttgccgaggtggtccttgctcttgccccagatga

SEQ ID NO: 156509 - DNA, 202 bp, Zea mays
  Clone ID: MRT4577_74316C.1
ttgtttaatacacaaacacaagaatcatagggggagtgattcgatggaatgtgtagtactgcaccagacagagtacacatgactgctgggcagaccgaacgaatggatagcagtcagtactgacgaatgagaccaaggggtcaggcggtctataagaaccaagattacaaaaggcagcatgcgactgaaaatggataaaata

SEQ ID NO: 156510 - DNA, 717 bp, Zea mays
  Clone ID: MRT4577_74317C.1
aaataaaatctccccgcaacctccccgcagccttctttgcctcctctatctcaccggcgcgtcgtggagcgacccttgccggagtggcgccacagatcctcaactaaatcgaacatgtaaagattgttgccggcaactatggtgtcgtagcagctgctcaggctcaactcgcatgggagttcgttcccaatggagagcgacgaccatgccggagacaaggcggtggatgggctcggggcggcatcgcggctccacgccggcgtcgtgaccgccgcccagcaactcctcctctattgccaatttgcgatcgatttaggaaaagatgaggcgccgcggctccacgccggcatcgtccccgccgcctagcaactcctcctgtactgccattctcaactccaatttgcgatcgatttagaaaaaggatcgatctatgatatccagtagatgatatataatcccatgatagatgatgagtgatgcaagggtggaataggcatggctgtttgtagtaaattaagaggacatcgacgtatctgaggatgcaacgccggagtggcgccacagatcctcaactaaatcgaacatgtacagattgttgccggcaactatggtgtcgtagcagctgctcaggctcaactctgcgtgggagttcgttcccaatggaaagcgacgaccatgccggagacaaggcggaggatgggctcagggaggcatccg

SEQ ID NO: 156511 - DNA, 829 bp, Zea mays
  Clone ID: MRT4577_74318C.1
cactcatcacgcacgcacactcccccactccctctccaccctgcttccgttttcggccggcgatggcgacgaccgccgccgcatccacgtcgctccggccgctgtcaccgtccccacctcgcatcgcgagtttgccccgtcggtggtgttggggaatcccggtgcagtcctccgggcggagcgcattccatgctgaacggcggaggcggagcactttattatgcgctgctgataaagctcctgaagaatccctcaagaagaccattgaagtggataggcttattgatatgctgagggacgcaaatcctagagagcttgatcaaatagtggttgaaaatgttctggcattcgacgcaggtttctgggttcgactggcagctagaattgatctctgcaaatcagatgatgataaaaaagattatgaagagctggcggaaaatgtcatgaacattgttgatcggcttgttcacaagactgatcaaaagattgaacaatcaactgatgtgctgaaggcaattattagtcctgcaatgcatgaaggagatgtgaagtggccaccaagagatccagatacactcaaattgatggagaaagaaataacacgccgagaacaagaaggacaacttgatgagggatttctgtcagaagttagtgctcagttgaggcaagctaaacaagacggagataagccagggcttcaggctatgctgcaaaaggtgttgcagttatatgcttctaaatctctccaaaaacgtagttatgcatacaaaggggggcaagttgtagttcccgaaaagtttctcgaatgtgtaatacaggctcctgagaa

SEQ ID NO: 156512 - DNA, 1825 bp, Zea mays
  Clone ID: MRT4577_74319C.1
ctgactaacactttccaacctggaagtctctgccacattccatgagaggttgcacatgcactttttggagaggcctggtatgtattgtagcccaaggtagcggcagggaaaagtgcctctggctcccaagaaaggtgagatcacttgatcaaggtctatgtcctcacaacgaattgggtggatggagcttttagcaaagtttacatgggtctgacactttgctcacacgcacgcacactcccccactccctctccaccctgcttccgtttccggccggcgatggcgacgaccgccgccgcatccacgtcgctccggccgctgtcaccgtccccacctcgcatcgcgagtttgccccgtcggtggtgttggggaatcccggtgcagtcctccgggatgggacaattctgtcatgactgtcgctgtcgctctttaaatgaaggccttattctctgctgaatgaactggaagaatccttgctcgttttattgtttatttttaaatagtagttcagattaaagtactaatacacctttttttttgtaaacagcttgatcaaatagtggttgaaaatgttctggcattcgacgcaggtttctgggttcgactggcagctagaattgatctctgcaaatcagatgatgataaagcatgatttcacatatgtagaaaattttactttctatggatggtgttatcttttatctcaaattaatctaactttgcagttggtttctctcttttgccttctcagaaagattatgaagagctggcggaaaatgtcatgaacattgttgaccggcttgttcacaagactaatcaaaagattgaacaatcaactgatgtgctgaaggcaattattagtcctgcaatgcatgaaggagatgtgaagtggccaccaagagatccagatacactcaaattgatggagaaagaaataacacgccgagaacaagaaggacaacttgatgagggatttctgtcagaagttagtgctcagttgaggcaattatctttatatgtgtttaggctaaacaagacggagataagccagggcttcaggctatgctgcaaaaggtgttgcagttatatgcttctaaatctctccaaaaacgtagttatgcatacaaaggggggcaagttgtagttcctgaaaagtttctcgaatgctaaaagagatacatgctagacgagtggaataaggtgttgcttgacgggcttacagtaggaaaaggagacgtttcgccagatgatctgtatgccgttattaacaagagaattgagagagtcttgattcgtacggaaggtggttcttaccaacaacgcatactggttgagtatctaaaagagatacaggctagagcagaggaagttgtcaaagtgcttcaaggaccaacaatataacatctcctgatcttgtttacactacacatgatttcctgtttgcgcgtagtcggttgggacaatgacttaattttgttggagttgctcggcagacagctaagagcagtttcagacatgcctgatgcttggacctgatcaaacaaggagagcacaggaaatcgagaagagagaagccaggagagggttttcttacgtgggtattatttgatctttggtttggcaggccatttattaattcgtagtgattatgttatctttcctactcgatcatttctattttcaaaatagatttgcctatttgatgaatatgaatctacttcctggaggctccatctatcatgtatttgctgcagaatatgagttattaggcgtttggctgatgatctatctgatctgcacctatctatactaccgtgccttttt

SEQ ID NO: 156513 - DNA, 424 bp, Zea mays
  Clone ID: MRT4577_7431C.1
gaattccaatagcggtaagcaataatgttgacaaccattcataacgacgtccttaataacccagtggcaaagcggggtggacataagcagaaaggttcacaacattaggttgtgtataccacaacggggacaagagctgcacacaagcctgacgatgacagcattaggattcttcttgttctcatcaccattattacccttcttacgcttattacacttagctcctagcttctttttgtccttctcaagcgctggaagatccttacgggcctcagagaacgtggcctgctccataccctcacctacatatcaatgcacgaaggcacgcttggcctacatgagggctaacttgctgactatgctggagaacatcttcacaaatctggtagagttagagaatatgtacacagcgcgctgtaacttg

SEQ ID NO: 156514 - DNA, 347 bp, Zea mays
  unsure (1)..(347): unsure at all n locations
  Clone ID: MRT4577_74320C.1
gtactggattaatgtggggtgggaaatgtgttttttttatgtatttantgtttttatgaaagaatgaataccatagctcatttcaacaaccccattgcctaaagctccccacaaaattaccttttttataaaagactcccccttttttccaaaccacataacttaaacagcaactattattgtatcaggcctgaccaattgaaaatgtcagcccctgtataaaataaatagctccttaatgcatgtgatcttgaaataagactaggccttaattaaaacaacgacttaaccggggagtctatgctatccggcatccccaaagtatgatggcaaacatgctaaataaa

SEQ ID NO: 156515 - DNA, 965 bp, Zea mays
  Clone ID: MRT4577_74321C.1
gccactccccactcctcacggctcacgagggtacggcacctcgccgtggcccgcggctgtttccgaggcaagcggactcaccggcgtcctgcgcacgcgaggcgagcagcggctccgtcgacctgcgagccaatccgtctttatttctccaccccaatatccaaacataagataaaaatctatccaacactcatttcccacgcaccccactcccccactccctctccaccctgcttccgtttccggccggcgatggcgacgaccgccgccgcatccacgtcgctccggccgctgtcaccgtccccacctcgcatcgcgagtttgccccgtcggtggtgttggggaatcccggtgcagtcctccgggcggagcgcattccatgctcaacggcggaggcggagcactttattatgcgctgctgataaagctcctgaagaatccctcaagaagaccattgaagtggataggcttattgatatgctgagggacgcaaatcctagagagcttgatcaaatagtggttgaaaatgttctggcattcgacgcaggtttctgggttcgactggcagctagaattgatctctgcaaatcagatgatgataaggcatgatttcacatatgtagaaaattttactttctatggatgctgttagcttttatctcaattaatctaactttgcagttggttgctctcttttgccttctcagaaagattatgaagagctggcggaaaatgtcatgaacattgttgatcggcttgttcacaagactgatcaaaagattgaacaatcaactgatgtgctgaaggcaattattagtcctgcaatgcatgaaggagatgtgaagtggccaccaagagatccagatacactcaaattgatggagaaagaaatacacgccgagaacaagaaggacaacttgatgagggatttctgtcagaagttagtgctcagttgaggcaattat

SEQ ID NO: 156516 - DNA, 922 bp, Zea mays
  Clone ID: MRT4577_74322C.1
ggctcacgaggtacggcacctcgccgtggcccgcggctgtttccgaggcaagcggactcaccggcgtcctgcgcacgcgaggcgagcagcggctccgtcgacctgcgagccaatccgtctttatttctccaccccaatatccaaacataagataaaaatctatccaacactccacacgaggcataccacacgcacgcacactcccccactccctctccaccctgcttccgtttccggccggcgatggcgacgaccgccgccgcatccacgtcgctccggccgctgtcaccgtccccacctcgcatcgcgagtttgccccgtcggtggtgttggggaatcccggtgcagtcctccgggcggagcgcattccatgctcaacggcggaggcggagcactttattatgcgctgctgataaagctcctgaagaatccctcaagaagaccattgaagtggataggcttattgatatgctgagggacgcaaatcctagagagattttatagtgtgctcagttagagcttccatcctgtgttgtctgttcagaattttcaagaactcattgacaaatctatcaccggacctaagttttatcaactgctttgagtatagagctagatgacagcttgtttttttaacaaatggcaggagctctgcctttcaattaagattgaagagtttatgtgcaaaaaattccgaaggctacaggctcccataggcggcggcgcacaagcattaagcacacacccaactaaggcaaattgctcaacaccctcgtgtgtaggtcaatgttctccttggctctacaggccacctgccgtgcatctagcaagctgctttcaaagatccttctatttcttgctttcccaatgttgcaaactgtgtatatcaccaccccgttgaaatgtcgcccgcgttgccttg

SEQ ID NO: 156517 - DNA, 601 bp, Zea mays
  Clone ID: MRT4577_74323C.1
ctagcctccaggagaaccgagacgctagagtcagaaagggcgaaaggcagtaagctgtgggctgcggcggcggacggcggcacgctggcatgggcgcacggcgcttctcctgttctccaccacggcaccacggcaccaccagcagccacccagctgctcaactgctcaagcgcgcgtccggcagaccggcaccgtcaagcatctgcagcacgccacgcaagctgcagcacgccacacaagcatctgcagcacggcaccgtcaagctcaagcgcgcgtccggcatcaagattcaagacagaggcggcgtttctctagcacacggcgacggcgaccagaacagagtgttcctccaatatgggggacactgatgaaaccgttgcaaaccaagtcactggtgaaactgttgcaaaccaagtcactgaggtggtagatgtagagaaggatggagagtgcaagaaaaggaaagctattgctcaaagatctgatgcatgggagcacttcagcaaggttaaacttgataatggggatgaaagagtcaagtgcaagtattgtgcaaaattgtttcgctgtgacccaaaaataaatggtacgtcctccatg

SEQ ID NO: 156518 - DNA, 904 bp, Zea mays
  unsure (1)..(904): unsure at all n locations
  Clone ID: MRT4577_74324C.1
tcgaggccggccgggccggngaattcatttaaattaataaaaagaaaaatgtcctttttggctaaacttgtcagaagcaccaaccgcgctcccttgagaaatcaagttgctaaggttaagcctgccgactctgccgaacaagtcagaaaatggatgaccaccatgacctctaaggccgtcagcaacgaatccaagaactacgttgtccaattgagttccgttatcagtttcttcaacagacccgctcaagctgaagaaattcccgaaatcaactgggaccaatggagaaacgaaatctttactgaaggtcttgttgataaagttaaagccaactacgaaaccctcgccagcgaagaatacaacgttgaaaatgttataactcaacttgtttccactccctcaaaggaactcgaagaaattaccaacgaactcttctaccacggtgccgtctggatgaacgcttacactgattactctgtcttcctttacgacctcggagaatatggcaattccaacgactacttgatgcacgaaaattacgatttcttctacggtcttgaagctgaactcgaagaactcattgaaacacacaactatttccctggttccaaggatgatatcaacttgagaggttactatgctgcccaattcaactggggtaagaaggtcatttcatactacagacatcccgccgacgatttcaaggctggtagagctaccaagaacatcttgggtagataattcctctggttttgcttgcatattattcgtatacgtgtttggcgtttcctccatttcgacgaagttttctttcataaatatgggntatataaaccatgacccgtattaaaaggnataccccgataatngatgagcgaaaaaaaaaaaaaaaaggcccctaggg

SEQ ID NO: 156519 - DNA, 426 bp, Zea mays
  Clone ID: MRT4577_74325C.1
aaaccacaacgtattgaaaaaccaaaacgtagttttcgatacaatacatcataagtcaagtggaacgaggcacatacaaagcttctaatgaaaaactaaagattacaacggcatcagccatacgatgatcactatcatagtcaacaagatgataatgagaatcaacaaggtgtgaagacgatcccgtccgccatggctccactatgacacaacctggatgcggatatgatcctactcgaaatcctctggcatgaagtcgggatcctcaaaatgacgaaatctagtaaacttgaacaagtagtaatccaatggccttttaatcaatatcgtatcttcgttcactcatttttatgaactgatcaaccacagctccatttgtcactttcatcatctcttctttttccacatagccaataagcatattac

SEQ ID NO: 156520 - DNA, 366 bp, Zea mays
  Clone ID: MRT4577_74326C.1
cttaatcctggcagcaactgctagtgcaagcagaaacgcacaagagagagattctagcctgttctccctttccatcacgcacaaaagcatctcggattccttcctcattcgacgagagcggcgaagcagctccccgtgcgcgccagcgagctcccggcgccgctcgatgccacggccgcgacggcggagatgccaggggtggcgtcgcgcctcgggctgctcggcgtggagtgcgccttcctcggcgccggcggcggggacccgagcctgcggcgcatgagcaggcgcagcgcggcgatgaggtcgtcggcgcttcccgcgggcgacgccggcggcgtggacgccccgcgacagacgcgggcgtgc

SEQ ID NO: 156521 - DNA, 319 bp, Zea mays
  Clone ID: MRT4577_74327C.1
ggagctcatcttcaagttccctggctgcaagaccttaatcacgtcaaggtgcaagttccgggggggggttaaacacacgtatgagatccacttgctgcactagccggcggactctgaccgactgctgccgcactacggtcaccagcattgggttgcagaggccggcggacagacatggctcaagcaagtctgtgcagagctcagaggtctctatctagctctgatgtcatcggcgcgtcagttcaccaccagtcatctaagatttggattatcacccaataccagatgtctctacgagaggacatttctgactgtcatg

SEQ ID NO: 156522 - DNA, 181 bp, Zea mays
  Clone ID: MRT4577_74328C.1
acctgactcgctcgttttgatgcctataattggtaataaagggaaaaaaaaaaaaaaaaaaaagggcggcgtctaaggacacttacgacctgctgcacgcatacttttatggactaaacaatatggcgcgttacaacgcggactggaaaacctgcgtacccaacttaatgctgagacatcc

SEQ ID NO: 156523 - DNA, 129 bp, Zea mays
  Clone ID: MRT4577_74329C.1
gcgccatccgcgccgccggtgccgtgcgagtggtccggcgccgggctcgtctcctcggcgtgcggccttctttgcatggtgctttgcaccttcgctacctgcgtcttcgcggtcgtggggtcgttggtc

SEQ ID NO: 156524 - DNA, 364 bp, Zea mays
  Clone ID: MRT4577_7432C.1
ccggcccggaacgaccgactcgacccactcgatcacccactacgtagacggacaacgtgcctcaacttgtgctccactttgtgtgcctagggctatagttcaccaaaaagcgataaacccgctaactggcatcaaatctgcaacattgctggaatacgactgcattccatctacatccatccttggctagataggatggaaaggcatcatagtgatgaggctcaaaaatctgaacctgtacgctaacgggatatatatgcaagcgacttctatccatcagaagctcggtcctaagaatgctgcattcgcaactgacaagctgatggacaaccctgaatcgcatagtgatcttttcagcatattg

SEQ ID NO: 156525 - DNA, 673 bp, Zea mays
  Clone ID: MRT4577_74330C.1
ctcgaggccggccgggatcacacttcaccatacgaacagcaaccacgtagcaggtacagcaactagtacctgccaggggcgctagcaagagtgcacaatgtgcaccgcgctgtccttcaaggacttggaactgctcgcgctcctctccgtggccaccgtcacctctgttgctcgcgtcgagcaacagctcaagtacaacgccaacaccgcctcgcaggacagatccttgatggcctacaaaatagaatgtgtgccggccaaggacacctgccacaggaaccccaccgaagccggccccgaccaccaaggtgtggcgtgcgggttctagggcaccaaccactacccgatctcgaccatgacgtcctgtggcaaccagcccatcttcaaagactgcaagggtagatgatcatgctaccagataccgcggctgaagagtaaccacccgacctgctccggggtgacgcagacggtgatcaccatctgacatgaactactacccggtggccaagtacacacttcgacctgaacggcacgccgatctgatccatgaccagatggtgcctgaaccagaagctcccgcacgccgggatcatctacatgcaatgcacgaggttgacgtgcaacttccatagcctgaccatcaccttccccgtgcagcatggatccaacccat

SEQ ID NO: 156526 - DNA, 652 bp, Zea mays
  Clone ID: MRT4577_74331C.1
aacaattacaccgagaaagtacatcatccagtggagcatgtccaggatgttgtactagatgatatttctatgatactgagcaaacctaatgatgtttcagaagacgaagataaaatcagttcagggaatgctgatgatttgtctctccaccctaccaaattgaaccaagaggaaatacaggagttgaagacagaatcggaagaaggcagatctctagaatcaggaagttcacctagcaaagcatcattgccaaataaggatcatgtgtcgatgaatgatgtagaagccgacactgttacaattcctaaagaaactgttgcagatactgcaccaacaggtttggatcctgatggcatcgacgagcgtcaagatggagttgcaccgaaatattcaagcatccacaatagtgtactgtatgaatcatatgatgacaagattgctgaagacacacactctttactagatgatggcctatcaactactttcgatgacgataagcatgttgcagaggatcatcaaattgttgttcttgaacaaaggacttgtccaactagcctcacacatgcaaggatgattctatgcaaggatgtgccgtggccagggatttcactgatgctgaaaagctttcgggagtcgtttcaggtgtattagc

SEQ ID NO: 156527 - DNA, 433 bp, Zea mays
  unsure (1)..(433): unsure at all n locations
  Clone ID: MRT4577_74332C.1
ttttttttttttttttttaaaaactnacatttttaatttnattacgttacattggtttccaaaacaaacagtgtattggaatcaaaaagtgttacaaaatttaaccaagcaaatcatgtaatggcattcattgatttgaaatccaccgttttttaatttccattgcgataccattacccatggtgaaccaaacactaccttaatgcagacgagtatttgagcttgtaatcttcattctttgtgtttcatcgatcgatgagtagtaataaaatgtaggatctcttgtgttcatcaattgattaattaatcaattgatgagtaataatagaatataggatattacacataatacggactgaacctctataattgtctagctctcacttgtgtacaaatttaacacgtccaccatcctatgtcatgctcgacaaaa

SEQ ID NO: 156528 - DNA, 390 bp, Zea mays
  Clone ID: MRT4577_74333C.1
aagaaaaacataaagggggtagcatacataaacccactggggtctggggggggaactttgttcgtcctagggcctactaccggaccgagaatccatggccaactttaccccctccaaaaaaacccccccccccccaaacaaacaaaattctttggcaacacatggagcaaaccaaaccccataaaaaaacatggaaaatagggctggcaaaaataaaaatacggtttaatttacatcccccggccctgggaatatttataccgccgtggccgaggacaccaagagcgctggacacaagacttggtgaacgggaaacgagatggtgacattctgacaataaaagacccctgccgccacggtgggctcttgatcctaaaaaatccgttggcc

SEQ ID NO: 156529 - DNA, 696 bp, Zea mays
  unsure (1)..(696): unsure at all n locations
  Clone ID: MRT4577_74334C.1
agctttggcttccccgccgcctgctcggtcgcagatgagctcctccagtccgctcccctgcgctgcagagacaagccttgctgggttggaggcgactcctcatccactcccccgcactgcggtcggtcggaggcgctcccatccactccatatctgacttccacccgtcgctccgtcggaggcgcctctcgactctcgagggtgacgtgaggcgtgtgagctctcctgtttgcttcccgccctggctcaatcggaggacggtggtgcgctcgaggtcataggagatcgaacggatggtgatttgacgaaggacacgaaggtatccaaattggagccagtccattattcgttttttctctgaattcactacgcaagtaagcattcgacacaatctatcaagaaagatcgcagagatcaacttaaggcttgaagacatcattaacaataaggagaaatacaagattgaagctgcacccaatgattttccattggtgacatggaaaccttctacggacatctctactgtggcaaaaagtttgtaagttcccacaacactactttctanagtgtcattcgaggagttgagtgtaaatagaacttcgttaatgaccactcaaacatgtacaaatattcaaaccatcatgtcgcgtcgatatgacaacataagtgatctaaaagactgtcgtttattgcttt

SEQ ID NO: 156530 - DNA, 461 bp, Zea mays
  Clone ID: MRT4577_74335C.1
ccgctacagctcataaatttcggatcttttttatgcccaccgactatgaccacgacgactacgacacgactagggttcctcataactaatcacccctccttattttggtaccactagtcttttttactcgtctaaataaatgctctagtagccgtatactagtatggtacttcaataaataattgaaagcataaactgtcatcctaacaatgtcggcatggttttaaatagcaggttaaggggtttagcggcgtgtttctcaaaagcgtaaataacagcggaacatagcgggctaaatgagactatagcacataacttttccaaatagctatagcgaaggttataaccggttatttaaaaccttgagtgttgacacctaacaaaatggagaaaaaaagtaagcaaggagatgacatccttaaattgactcccgagatgctgttactactaaaacgaggaag

SEQ ID NO: 156531 - DNA, 817 bp, Zea mays
  Clone ID: MRT4577_74336C.1
cattgggtaggtcgaccccggccgggatattgaatgtcgagcagggagtaggcacacaagatagctagctagggacaatggaggagaaggttctcgtcgccgtgggcgtggccgtgctactcgtcgtcgtcctctccaagctcaagtctgtgctcgtcaccaagccgaagcttaacctgcccccagggccatggacgctaccattaataggcagcacccaccacctggtcaccagcccgtcgatctaccgggcgatgcgtgatctcgcgcaaaagtacgggccgctgatgatgctccggctgggcgaggtgcccacgttggtggtgtcgtcgccggaggccgcgcaggcgatcacgaagacgcacgacatcgcgttcgccgaccgtcacatgaacaccaccatcggcgtgctcaccttcaacggcaccgacctggtgttcggtccctacggcgagcggtggcggcagctccgcaagatctgcgtgctggagctgttcagcgtggcgcgcgtgcagtcgttccagcgcatccgcgaggaggaggtggcgcggttcatgcagagcctcgcggcgtccgccggcgccgaccgtgaacctgtcgaagatgatctcgagattcatcaacgacaccttcgtgagggagtgcatcggcagccggtgcaagtaccaggacgagtacctggatgccttcgacaccgcggtccggcagacgtcggtgctgaccgtggccgacctgttcccgtcgtcgaggctcatggcaggctgtgggcacggcgccacgccaacgcgctcaagtgccgcaacaggatcacgcgcat

SEQ ID NO: 156532 - DNA, 526 bp, Zea mays
  Clone ID: MRT4577_74337C.1
acaagcttttttttttttttttttttttttttttttggttttttttttttttttttttttttttttttttttgtttttttttttgttgttttttttttttttcaaaaaaacttggacgttaaatcggctaagggcaaaaaacagacaccggaaaacgttcgacggggacccgagcaggggaccaagcctggcggaaacaggggcaaaacgggggcccgggggaaaacgggaggcgggcaaaaaaacaaaaaaaacacgagccggaagcaaaaagggaagggcccggagagcccaaggagggacccaacagaaggaaaggcgcaaaagcccaggggccgcttggaagacgggaaacccgccgtgccaggaggaaaaaagaacccgccaacgaacggggaaaagcgggtggggaaatggaaacaaaaacccgcccccgggcacagagggggggaccccgagagggggggtgcggggagcggttccaccaaacccaaagggggaaaaaccggcatccacgggaaagggg

SEQ ID NO: 156533 - DNA, 363 bp, Zea mays
  Clone ID: MRT4577_74338C.1
tcggcacctcctctcgcccgggcagctgcttccatcccccgctttcagatttctagacactcgacagaaatggcttccaactacgtggacaccacgggggaggaggggaggctccacacccacggccaccacagcaacagcaccacgccgaccggtgaggcagcgtcgcccaagaatacacggaggaggtggcccgggtcggcgtcggcgccgtccggcgcaggccacgggcctgcttccaagtgcgtctgcgcgccggccacccacgccgggtccttcaagtgccgtttccaccgcaccaactctcagggccacggccacgggcaggggcagggaagccgcccttcttcgcctccttcaccg

SEQ ID NO: 156534 - DNA, 462 bp, Zea mays
  unsure (1)..(462): unsure at all n locations
  Clone ID: MRT4577_74339C.1
tttttttttttattttttgnactatctcttttttttcaattacatctttttgtgctgttttttgatttttaaaacctgggggaaaaccattttttagaaaatactatttatgggggtgaagaacaaaccccaccccggggggttttacaacccccccgcccttttttggaatcattttaaaaaacaaccccctctttttggaaaaggggggcccataaaaaaaaaaatgcctccctatcccaccctccgggttccgcccaaaaggaaggggccccccccccccccccggggtttaaaaaccccccccggggaaacccattttcggaataaatagacaaaaatttttccgagtgggaaaccagggggggcctttaacaaagattggggaccaatggggatcccaaaaacacggtttttcaaatgggggaaccctaaaaaaagggaaccccccccaatgttttt

SEQ ID NO: 156535 - DNA, 306 bp, Zea mays
  Clone ID: MRT4577_7433C.1
tttttatcaagtttattttacgctgacaaattattcattggtattttttttgatttttttttttttttatttatttttttttttttgtttcaaccaaaaaaggctgagggtcttttaaccaaaaaaaaagacttttaggaaatttgggatattaagaagacgttaaaggcagaaaccgcggggaaaaggttattgcgtttgtgattgaaacgaccgggcttataaaagtgagtttcaagtggggggggcattatagaaagtaaaaatgtttatcagaaaaagtgttctaatgtggagtttttttga

SEQ ID NO: 156536 - DNA, 835 bp, Zea mays
  Clone ID: MRT4577_74340C.1
gacgacgtggcttccgaatcgatcgatttcgaagcgtttcttttctcccatttccaagttccgggcactcccatggcgcatggcgccggtggccatggtccgccccacactggcggcgagggtcgatctcccccgggccacaggcggctggcagtgccaagggagaggactctttgcacgcggtggccgtggccgcacatagggccagggcacagctgaaggagaccagtggcgtttggcggctgtatggcagcgatggccggcgaccgccgactccaagatcctgccccctgatgggcatgacatgcaatgttggcggtttcgacgacgcacacagaaatcccttcggcggtcagtgcctccctgactcactcccatcggtgaccgacggctcctggctcactcccatcggtcagtgggcatgacatgcaatgttggtggcttcgacgatgcacaaccatcgattcttcaatatactacacctacgaaggcaattactatcaaattgctgcaatacgcggtagtgaattggtaggattataatttggttaatcgaggctagctaccgattgatagttggtactaatgcactttgaagaacaaaccagtggatcactgtaggtgttgtattaagaaaattactaaaagatatatttggattgatgttggcaggtagagagaacttggttgaatttaggatttgtttggttgctaattaaacagtactgtcctcccataaccatgccatggtttttttcccagtacgtaagataatgtttggttgtataaacagtcacattacactcctatatggctatatgtgtcaccctgtttg

SEQ ID NO: 156537 - DNA, 435 bp, Zea mays
  Clone ID: MRT4577_74341C.1
gaaaccctagtgcccctgactccattacgcaggccgttcgccaatgccctgtcccgtagctaccgcaacgcgctgcagtgtagaagaagcagatggcgcggcgaagggcgatggtcccggtctatcggcatcagatctcggcacgacgtacctcttgcggtcggcgtgtggcagcatcgaccgcgtcgagatcattgccaacgaccagggtaaccgcaccacgccctcgtgcgggggcttcaccgactccgagcgcctcatctgagatgcggccatgaaccaggtcgtcatgaaccctcatcaacaccgtctttgatgccaagcgtctcatcggctggaggttcagggatcgcgtctgtccacagtgatatcaagattgggccctccaaggccatgtttcggtcctgctgagaagccaatgttcgttgtccagca

SEQ ID NO: 156538 - DNA, 455 bp, Zea mays
  Clone ID: MRT4577_74342C.1
agtccgccgctgtcggacctcctctcgcccgggcagctgcttccaccccccgctttcagatttttagacccgcgacagaaatggcttccaactacgtggacaccacgggggaggagggaaggttccacacccacggccaccacagcaacagcacgacgccgaccggcgaggccgcgtcgccgaagaatacacggaggaggtggcccgggtcggcgtcggcgccatccggtgcaggccacgggcctgcttccaagtgcgtctgcgcgccggccacccatgccgggtccttcaagtgccgtttccaccgcaccaactcccagggccacggccacggccagggaagccgtccttcttcgcctccttcaccggtcgcggccaacgcggtgccgcggcacccggcctcgccgtcctcgtcctccggcaccgtcacgacccagtgacgcaactcaagcatc

SEQ ID NO: 156539 - DNA, 225 bp, Zea mays
  Clone ID: MRT4577_74343C.1
tgagtctgcttccattctggtccaagttagcggcgctattccgctccctattcaccatccaatccaatcggcttcccccaggcacccatggcgacggcggcggaggcccccgcggaggcgccggcgaggacagcgaaggtcaccaacgtgtctcctagcgcacttgcgctctgagattaaggagttctttttctttacaggagatatttgagtgctccggagctg

SEQ ID NO: 156540 - DNA, 210 bp, Zea mays
  Clone ID: MRT4577_74344C.1
gcttctcccgacctttgctcaatgcaaaggaggcggcccacaaggacgagcgatggtgactcacaggacatctgcttcctgctgctcgcatccgtgctcctcgccgtcgcttttcccgtgtctgctttgcggcagcaggtgaagaagggcggcggcggtgaaggcggagcatgagccagtgttagcggaagcggaggcggcaacctgaat

SEQ ID NO: 156541 - DNA, 899 bp, Zea mays
  Clone ID: MRT4577_74345C.1
acgtgctggtaagagcggcattcggcgcgaccatgaacaccgagtacctcagggtgaagaagctccagcaggaggccgcccggtgcctgagcttgcacaagacaatggagctgcagccggagctgtcgctcggccctgtgtggccgggcttcgccgccggtgacctggccgccaagagctcctcgtccgagtctgacggaacctcccggaagaagaggaagcactacaccgccagctgggaggagcctcagcagccgcccgcgagcctggagctccagctcaacgacccactgcctctcgactgggagcagtgcctcgacctccaatctgggaggatgtattacctcaaccggaagacgctgaagaagagctgggtcagaccccaggtgcagagcgtgaacctggacctcaacatctccacggctgccgccatcgacaactgtgccgccaacggtgctgctgccgctgcttccgacgacgaggacgagccaaggaaacccgctggcactttgttctctggaggcagcatggtggccgtgccgtgcgccaactgccatctcctagtcatgctgtgcaagtcctccccgtcctgccccaactgcaagttcgtgcagcctctggcacctgctgtgccgcctgcggcggtggcccattggaggatcgatgccgccgtcaagccgctggagaccctgagccttctccattaggcacatgcacttcaccggcagcagattgtagaaaggaaatcgtagttacgtagtagtggtgcatgggttagtattactattacctgggtaatgcatgagcggtcgaatgaaaattggaaatgtgaaactaccgtgcatgcatggtgacatgacaaaatacaaaatggtgaagccagcctcaaattaaactgc

SEQ ID NO: 156542 - DNA, 299 bp, Zea mays
  Clone ID: MRT4577_74346C.1
cgtctcgtgctgatagataggaatgggactcttcattagcggcctgccgatctattggggcaccatagggcaaccacgcttaaccgatgatgcggcattactcgttgctctgattattcagcattcgcctctgtcttatttctagtgctctactttgctgcgtatattaccatctttggtaggactgtcggattaaatccagaacctgtataacactcgggaaagtgtgcctaagacctgatgggtacctggaatggtaaaggtcgcgcgaagtggattccagcgcattggacattgct

SEQ ID NO: 156543 - DNA, 175 bp, Zea mays
  Clone ID: MRT4577_74347C.1
accacacatgcatgatatagcgctcgaggaatgtggtgtccacgaagctcagagggcgggatccgaggacatttctgacagtacaagatggactcacctacaacgggagcttcaagcgcgtgatccactggcagcctgtcacgaactaggaggatatcgtctacatgcgcaacat

SEQ ID NO: 156544 - DNA, 203 bp, Zea mays
  unsure (1)..(203): unsure at all n locations
  Clone ID: MRT4577_74348C.1
gaccactagaaacggccgccaagagcaggaaatcgctctgagcgnggncgcgggcgggggacgcggggcaacncgngccaccgcngagcaaccaagnagcncnggcaaaccccccncccgacncncagcaacaacaagngcggccagncaaccaacggacgacaccgaacccngccgngcagcaacccagcgnnggaggngcc

SEQ ID NO: 156545 - DNA, 439 bp, Zea mays
  Clone ID: MRT4577_74349C.1
attcggctcgagctgtgagacacgacactttttctgcatgaagatctgacagttcatgtctttgtgcgcaccacaaacgaacatgctgaaaggtttgacatgtccgcagagacagaacactgcattcctaagggagtcaaggcacctcttatcaatgcacatgggaaatacagacgcatggagatctgacagttcctgcttctggttcaagcgggttgaacattgaacacagcagcatctgggcatgcattagatgtatcgtggtactgcatttcgccccgttcgttttttggtttgttttcctccaggacttacttgttttcactatctgacactgacttttctgtgtcctcctgatgagagcatgtacaacctcattttagggctgagtgaaaaaatacatactacgggctctcctcgaagaatacgacttatcatg

SEQ ID NO: 156546 - DNA, 298 bp, Zea mays
  Clone ID: MRT4577_7434C.1
acaagctgtacagccacccgtcacctctctttttgaatctattcaggatgctagaatggatgggatcattcacctagatactgaggactctattcatcaagctggtgcccgagagtactgtcctaaggcgattgcttttacatgtccctgacaaccttgacatggttatcttccccacttatcaaagcaacattgaccgtatgacattaatgatccacttactgaggcctttataattgcacctacaggaactcatgaagatatggggacccggtcacacccttagcccctcgtttac

SEQ ID NO: 156547 - DNA, 300 bp, Zea mays
  Clone ID: MRT4577_74350C.1
accacgcgtacgccctacgcatccgaccacgcgtacgcccacgcgtcctcccacgcgtgcggtacaattcatccgatgttttacagctttaaaaacaaaataaaataaaaacaaataaaataaaaaaaaaaaacaataactataatacaaacgaagaacaaaataacaaaacaatacaaatactgctgtaacggagataaggaacctaaagagcgccgtcagcaccgtcgccgacaggcgcaccgcctgcaactggctcaagaacgccgacagaggcgtcaacggtcttaacgcctgtaa

SEQ ID NO: 156548 - DNA, 663 bp, Zea mays
  Clone ID: MRT4577_74351C.1
ggccgcttttttttttttttttttcctttttttttttttttttttttttttttttacttaaattttttggtttactttgttttttttatccctttgtttttccaatttttggcaaacaaaaaaatggggtaaccaaacataagcccacctggggttaaccaactgttaataaaaaaaaaatttggaaaacaaaaaaaatcccaacaggctctaaaacaagggaattggcagggcaagcaatcctgggccaaaaatcacaacactctttgacaatggggccaggggtggggaaaccttctatggcaccatggggataccaatttccccagggttatttgggagggacatgtttaccccgcccttggggggccacgaattgccctggctgtacgaggacggggggcataacctccttcctggggggggccttccctttcttgaggggggccaggaccaggtcgccacccctttcggaggggaggcaatcgaggtggccctggtggccctcgccggagatgacccaaaggttctgggcgccggttttggccccccctttaacccttggggccattggaagacccagtccctggcggactttgttccccgccaaaccacccggggctggcttgaaaaacccgggggctgggggggtacccaatcccc

SEQ ID NO: 156549 - DNA, 371 bp, Zea mays
  Clone ID: MRT4577_74352C.1
ggaaaaacggtcctttaatttggggggcaaagaaattaaggacgacccatatttaacgggcatatcccaggggttaactggccccaaaaaaacatcacaaatttctcgaacttttatccacgccccccatccatataataaccgaataaaaaaagctggaaaaacaggacccctgcccacccacgatcaaaaaagttcggcggaaaggacggggtcgccggccctgcctgccaagcccccttctaagtggtttcccccccccccttggaaacaccctccgaaggggccatcgaagcggaacccccctcacggaggcccttggccgaaccctcacgcaggggggccaacttgccccccaccgtggccccctt

SEQ ID NO: 156550 - DNA, 744 bp, Zea mays
  Clone ID: MRT4577_74353C.1
gccggccggttcgggagcgctcagtgggggtggatgcagagcagttggatcggggacacttagagagagggagagagggggctttgctttccgttttcctctccaaatggctcattagctcttgaccggaagagtggagggtggtggtgcgggcagaaatagatggcactcgtcggtgtggacagtgctgggttccttggagcttagcgtgacttcatcagaagacgccgtttgcttgcctgcctgcttggtcttgggtcgacgaccggagccccctccctcgtgctcggcttcttcctccctgtccctgtccctgctaccgagttccgggcgctgaccagtgggcaactacagctgatctccttcttcattgactcttagctctgccgcggcatggaggtggaggctctggagaagaaggggcacgcagcttttgccaaggcgatgaaatctttcggctcttccgagcggtacaagcgatccacgagatattttgaggatatgtatgctaccgacgctctgcgttcttcagacaagacgattgttctacctatgccggaagtggtaaaagctaaggtcaaatgtgatatcactaaggaagctcaacccgggaggggagcacaaagcaccttgagaaaggagattcttcagctcgagaagcacctcaaggatcaacaggctgtgcgtggtgcactggaaaaggctttagggcctaacgctggccctgtcagcttgtcgccagag

SEQ ID NO: 156551 - DNA, 304 bp, Zea mays
  Clone ID: MRT4577_74354C.1
aaagaatcacagcacaacaacttccacaacgggtgctttcaacaattaatcaagtagttgcagcgaaccttgcgtggttaccttcaacaacaacaatttctttcattcaatcaactaactggggggaaccctggtggttacttgcaagcgcaacaactactaccattcaaccaacttggcgggaaccctgctggcattttaatggaacaacaagtgctggcattccggctaccaagtggtgcaaaccttggtggtttcttgcaacaaccaccattggtggcattttaaccacaaggtgggggaa

SEQ ID NO: 156552 - DNA, 912 bp, Zea mays
  unsure (1)..(912): unsure at all n locations
  Clone ID: MRT4577_74355C.1
cccagcgtccgcacctcgcgnattgcgatccctttccaacaanatcaccggcaccaccacttgcattggagtcgtgtgagccacatggacatggaggaacagttgctgcacctggagcacttcatgcccagcagcccgggcttctttgacgtcggcagtggccacgaccccgcccacttcccgaacggcgggttattcgtcgagcaggtcggcgccaccgacgacggcgggtgggtggaggaactcatgcagctgggcgaggagctgttcggcggtccgggcgatggcggcatcatgggcgacgccgacgaccactaccagcagtggcagtgcgacgacgacgtcgacggcggctccccagacggcggtccgccaccgagcgtgtccttggacggcgacgacgcgagcccaggggagcaaggcgccggggagctcgcctccgagccgcaccgcgaggacggcgacgacgtgtcgggcgcgacgcggaagcggagggaccggtccaagaccatcgtgtcggagcgcaagcggagggtccggatgaaggagaagctctacgagctcaggtcgctcgtccccaacatcacaaagatggacaaggcgtccatcatcgccgacgcggtggtgtacgtgaagaacctccaggcgcacgccaggaagctgaaggatgaggtcgccacgctggaggcccggccgagatcgcctacccgacaggaccagccgcagcacggccggcgcgcggggcccggccgacgacgccagcagcagcagcagcaggtggagcgccgcgacgcggggagcgcgggcgccggcgcccgggtgacgcacgtgggcgcggcgcaggttggcgacggcaggttcttcgtgaccgtggagtgcgagcggcgggacggcgtggcggcgccgcnctgc

SEQ ID NO: 156553 - DNA, 469 bp, Zea mays
  Clone ID: MRT4577_74356C.1
caaccaaaaaaaagaaaacacaaaaacaaagattataatggcttcctcaaccatggcttgggcctcccctgccttcgccggaaaggctgtgaagcctgccgcatcagatgtcctcggaagcggccgtgtgaccatgaggaagactgtcgccaagccaaagggtccatcaggcagcccatggtacggatctgaccgagtcaagtacttgggtccattctccggcgagcccccgagctaccttaccggtgagttccccggtgactacggatgggacaccgctggtctatccgccgacccagagaccttcgccaggaaccgtgagctagaagttatccacagcagatgggccatgctcggagccctaggctgcgttttccctgagctattggctaggaacggagtgaagttcggagaagcggtttggttcaaggccggttcacagatcttcagcgacggaggattggactac

SEQ ID NO: 156554 - DNA, 738 bp, Zea mays
  Clone ID: MRT4577_74357C.1
atggcgatggtcaccattgacaacgccgccgccaccatagccgccgcagagaagccgcaggacgccgagaagccggactacgctccctataacggcgcttccacggccgcagatggcggcacgggcgccggcgtccgcggcggcggcggtggcggccgcgtcgtggactcggtggtggcgcggtggcggcgggaggacatgctcgacaagagccccctcgcgctgcatggcgcggccgccgtctttgccttagtcgctctcgtgctcgtcgcgtccaaccagcacggcggctggatgcagttcgaccgctacgaggagtacaggtacctgcttgcaatcgtgtcgctggggttactctactcgctggcgcaggcggtagttgcatacttgctgatgtccgcgctgtcggctgccgtccccatcactaaccgcatgagatctgcagttgtcaataactttacagacgcaaccgctgcagcaatcagcatggccttctttgcatttgtagctcttgccttgtcagcagtggtttctgtaggttctatgtgtgtacatagaattatgcgtggcattcctgaatatgattgttttcctttcttagatattgttgtcatgatgagaacatttaacttctatgaacataagcagaagttgagttgtacgggtgatccgatgggtgacccatatccatgtgggtatgggtatgggggtggatcaagcatgttcggcgcgcactag

SEQ ID NO: 156555 - DNA, 160 bp, Zea mays
  Clone ID: MRT4577_74358C.1
ctgattcctgggccgacgcgtagtcggggcgcgtttctaacacgtgggcggactcgtacttcctcatgaaagcagtgctgatttgcagcagccatttgcactacctaaggtagatgcgcatctctcactttatttttaactagccgatgatgatcattca

SEQ ID NO: 156556 - DNA, 927 bp, Zea mays
  Clone ID: MRT4577_74359C.1
ctcaacttctgcttatgttcatagaagttaaatgttctcatcatgacaacaatatctaagaaaggaaaacaatcatattcaggaatgccacgcataattctatgtacacacatagaacctactgcaagcaacaacaatcaccttagcacataacagatgacatccaagttgaagagaggcatcagaggcttctcttctttggattagcaatccataatgaatattccacctaatgggttttacttctagaacgatgattcacatgtatgtttgtttggagagcttgtaaccagaaaccactgctgacaaggcaagagctacaaatgcaaagaaggccatgctgattgctgcagcggttgcgtctgtaaagttattgacaactgcagatctcatgcggttagtgatggggacggcagccgacagcgcggacatcagcaagtatgcaactacctggtcaccgacgaaatcgagaagcctcccagatgctgaggagacggggtcggcgccgccgcgcatccggtacgcgcgccgcaccgcctgcgccagcgagtagagtaaccccagcgacacgattgcaagcaggtacctgtactcctcgtagcggtcgaactgcatccagccgccgtgctggttggacgcgacgagcacgagagcgactaaggcaaagacggcggccgcgccatgcagcgcgagggggctcttgtcgagcatgtcctcccgccgccaccgcgccaccaccgagtccacgacgcggccgccaccgccgccgccgcggacgccggcgcccgtgccgccatctgcggccgtggaagcgccgttatagggagcgtagtccggcttctcggcgtcctgcggcttctctgcggcggctatggtggcggcggcgttgtcaatggtgaccatcgccatcgcttagcggttgatgag

SEQ ID NO: 156557 - DNA, 286 bp, Zea mays
  unsure (1)..(286): unsure at all n locations
  Clone ID: MRT4577_7435C.1
nnntttttttttttttcctttttttttttnttcccccccttntccttcttttttcgcttttcctccccccctcccatcttttctttctctccgcttattttcgccggtcgcgccaccgtgccgcccaccccgcggtcgccgccatcgccgctcgtcgtgagcttatcttggcccggatagtatgttattggtgcctcgcctgtggggcgggtggtgtatacggctcgggaggtggggagaggccgattggagcacttcttgcgactcagactcactaaaatacgaa

SEQ ID NO: 156558 - DNA, 351 bp, Zea mays
  unsure (1)..(351): unsure at all n locations
  Clone ID: MRT4577_74360C.1
cttaaaaacaaccccctccaacactacttcatggtctcaacacaccaaggcgttcacgccaacccggactaccccaacatgggggggggcctcggaaacaggtgaaacgaggctaacctcactgaaatgtcaggggaacgaaacaaggagcacgactacctctgcacccttacttcaatgatcacnactctgcaggacacggcccggagcatatccaacaaagcatgcactctgcctttcacctgcttatgcggaatggacccccatctgtnacatcnaaaacctgcttccnactgcttacacaactcctgctntcctgtgtcttccctacctccttctccatttttttat

SEQ ID NO: 156559 - DNA, 490 bp, Zea mays
  Clone ID: MRT4577_74361C.1
attcggctcgagcccaattcccaggctggcttgtcggcgaggagggcacgaagaccgaggaccgatcgctgcgggggctcggaacggcaacgggacaggaccccaaaatctacacatccttcctgcccggccgcccgggcccgacgactcgtgaatcttgccggcctgcccccacctacatcatgtccttctgcagggggatcggatacgccacaggctgaccgacggtgctgggggtatgcggctacggatccctgatgaggaaccccggctttgacttcgacgacaaaatcctcggatctatcaagggctacaagcgcacctttaatctatgcttgcattgaccacataggcacacctgagcatccggctaggacctgcacgcttgaaaccgacgactaggccatatgctgtggaattgcctattgtgtctagggtggcccagaaaaagagctctgagcaatacagtgcttggagaagagagagtgtg

SEQ ID NO: 156560 - DNA, 809 bp, Zea mays
  Clone ID: MRT4577_74362C.1
agaaaatttccgacagtaatgaacgcagcgcaaagttgcatgttacaattagggcagcaaacatttcgcttttcagaggtaaaggaaaatcatgagccctgattatgacagcaatatcttagaaaggaaaacaataatattcaggaatcctataattctatgtacacacatggaagctactgcaagcaacaacaatcaccgtaacacataacagatgaccttcaagttgaagagaagcatcagaggtttctcttctttggctaagcaatccataatgaatattccacctaagggcttgttcggtttgtaagggattgaaggggatcggagcagattaaatctctttctagtcaaaattaaacaagaatggatttaattcccctcaatcccattcgatccttgtgcaaccaaacaaggcctaatgggttttacttctacgacgatgattcacatgtatgtttgtttggagagcttgtaaccagaaaccactgccgacaaggcaagagctgcaaatgcaaagaaggtcatgctgattgctgcagcggttgcatctgtgaagttattgacaactgcagatctcatgcggttcgtgatcggggcagcagccgacagcgcagacatcagcaagtacgcaactacctgatcaccaacgaaatcaagaagcctcccagatgctgaggagacggggtcgacgccgccgcgcatccggtgcgcgtgccgcgccgcctgcgccagcgagtagagtagcgccagcgacgcgatggaaagcaggtacctagggagagagaatatgcagcaataatccataa

SEQ ID NO: 156561 - DNA, 283 bp, Zea mays
  Clone ID: MRT4577_74363C.1
gatgcgctccatggcatctggaggtggtgttcccactgatgaagagcaggcgactgggttggagagggagatcatgctggctgcaaagaagggactggacccatacaatgtactggccccaaagggagcttcaggcaccagggaagaccctaatttagtcccctccatctccaacaagagaatagtaggctgcatctgtgaagaggaaaacagcgtcgtctagttttggctgcagaaagggcgcgaccccaagagatgcccccgctgtggagcccagtacaag

SEQ ID NO: 156562 - DNA, 317 bp, Zea mays
  Clone ID: MRT4577_74364C.1
tcctccggatgaagcaaacgcaaacaagaagcataccagcactggcccgagcctgcgtcttcctcgtcgcgctcctactaaccgccgacgggatggcgcctttcgcgggcgccgcgcgcattgacgttgtttagggcaggtccatggcgttcgcggacgcaccggaggctgccggcgtctctgccgctcctgctactggacccgacttttactcgacccgcgtgccgggaccctccagcagcatatcttccgactagccgaccggcatgagatatctacggacgacgatcagtctgtgacgccacctattacctatc

SEQ ID NO: 156563 - DNA, 392 bp, Zea mays
  Clone ID: MRT4577_74365C.1
acgatgaaatatttgacgctggacatgttgcagccctagcgcttgctggtggaggaaaaatccgcggaggacaacgtcatcaacttccgttttacgaccttctggaacatgcgtcgtaactggcttaatatcaaaatagggctgcctatcattatgataagagtgtaaccttcttacactaaactttcaagtattagctgatgcgcatgtaatcaagatcgacaccacagagaagcccggtcagttaattaaccagatcgacaagcatgacatcattgcatggtagtccctagaggcctaaaaatcaatgcctgtttactgcacacgcccccgcatatgaagcactaagcattctgtcttttttctgagggttgtgttttttcactatcagg

SEQ ID NO: 156564 - DNA, 509 bp, Zea mays
  Clone ID: MRT4577_74366C.1
gggtacggtacgacctgcctacacggatgattaatatgacatcagcaactatgggtacaactatcgtgtacaatacgaatgcgtaactctaaggagcagcgcgcgggcacatatgtagagcaccaaaaatcaagtgggcactgcacatatcactgatggtgtctaacacaactacattgaccacatgagcagcacagattaggctcaaaatgctcgtgtcgagcaatgacctgaacccgcaacatcatggcactgcgggcgacgcatacaatcttccgtgcattgaggctgattactcgactggctcggagacgctgaacaaaatagtgtgctcgaacattccaccatccgaactgccctccgatgtattggacccggcctgagggagaactacaaactcagccgtaatcaggctgacccgcgcgatatcacagaactcgcccatcaaatcttcacgattagaccagccagatatgtcaatgtgctcgttaaaccaggactgattgccg

SEQ ID NO: 156565 - DNA, 403 bp, Zea mays
  unsure (1)..(403): unsure at all n locations
  Clone ID: MRT4577_74367C.1
nttgngaagcacgacacnacacnacaccacagggggccgacgacgagcacacacgcggaagaccccgcccgcccgancgggaccgngacgcacgaagctaaaagcaagccaagacaggaataaaaatggcggcgtcgacggtggcgagccactcagtcccggagacgacgacgaccttcgcggcggcggcggcagcgggcggcgccgacgtgctgatcgacgacccgaggagggcgggcgcagggcgcgacaggatccccgcggcggcgcgccgcggcggcggcagcgggcggaaggacgccgagcggaccagcgggccggccacgccgccggagatcaccgacaaggtgccggagagcaacaagcaggcggaggaaacgtgcgcggacgaacagaagggcga

SEQ ID NO: 156566 - DNA, 251 bp, Zea mays
  Clone ID: MRT4577_74368C.1
ccggccgggatcgccatcgcccctcacgctccgatcccttcgcctcctccgcgcctccctccccgtccccctccttacccccaaacccatcggcgtaagtctcgctgtccgcgacgaccctacccccgatcctccactcggtcgcgacacatacacctccacctcgaccatgtacgacacagattatcgaaaccgacgacacaactccgattaatacgaccccgatataaaggaagatggataaggagaag

SEQ ID NO: 156567 - DNA, 475 bp, Zea mays
  Clone ID: MRT4577_74369C.1
aaaacaaaaaaaacaaacagccgcatacatttttttgcccctttttgccggggccccatttcagggttcatagcgaacccagcgggaacagtcgcaacgtcggggcggtttttaagggtcaaaacgggttaagcaagtccaaaattttccagcagcatttgccgtttttaggggaaaccccatcggggctccgaaaagaacaagcctgaaaaattgacccaacccgtttggaaaccccacttttttctctccagggaaaactaaccccgggaaagaccccatgccgggggccccttaacaggggggcatgtaaacaacatttgcaaagaatttttggcactcgatcaacttcacggggctggggccaaggggggaggcatgcttgtttttgccaatccaacccaagcacaaaggcccgcgccaaggatcacccatccacaaacattggaccaaaactggggggccttcttttttt

SEQ ID NO: 156568 - DNA, 152 bp, Zea mays
  Clone ID: MRT4577_7436C.1
ggctgtctgacattgtgcagggttcagacttctcaagatcgctcggaaaagtgacacctgaaactctgactgcgcctgcacatgcttggatggaaaatatctccaagctggacccactgattgaagatcccagctatgcccaggacagccac

SEQ ID NO: 156569 - DNA, 411 bp, Zea mays
  Clone ID: MRT4577_74370C.1
tttgggctcgtttatgtgcttgtggctgtgcgggtggatgtgcgggggtgactcgcctcagggtcagggagagcgatggaaagtgatgtggtgtgagtgaggagggttaaggtgaagaggggaagtattgtattaggatttccgcctgatgttgttgttctcgactcttgtgaggccgctaggacctaacacgctgattagtatacctgtcatccttcgtatgtcgccgggtaacgccagaataatgtaggttccttagatagtggcgaagagtttcctgctctcaagtcctcctagttaagccatgaaggccttaagttcgaagattcttaagaaatcggacgctcttgttacggtcgcacataaggcgaagtccgctgggttcgaaggcgaagagtatgagcccgacgt

SEQ ID NO: 156570 - DNA, 397 bp, Zea mays
  unsure (1)..(397): unsure at all n locations
  Clone ID: MRT4577_74371C.1
ggaaaaacgggctcaaatttttatttttaaaaattctaactgggggccggttttgaaccaggcaaatacagaaaaaaaattgttctcctccgcaacccgaacagggggggagggctttctgctactagtccatcgaacaaacataaacccacttgcctttttgttatggggtggncgtcatattggacaagggacattggtatgaacactgaaaaggggggtacatccaagcaaaaaaagggctgcaaaatccctgggggattcatgaactgaacgcaccggggcaaactcaaggacacagggggggggggggcttcccatacctaaatcatgacaacgggtcagcgaaatgaaaaggcgatttcctctagggttcttcccttgggctcaggccccc

SEQ ID NO: 156571 - DNA, 1513 bp, Zea mays
  Clone ID: MRT4577_74372C.1
ggccatgtttgtgtgactgagccggccagctccgccaatcccgttggcttggctgcaactaacgaattggctataaatatcagcagctccgggcgccggtccggaaccaaagctagctactttgttgctgtttttattcgtttgtcacataagcagtggtggtcggtcggccggcgacaatgagcggccgtgtgttcgtcctggccgctgccttcggcgtgctgctcgccgcagccgccgtgtcctcgaggcccgtcctgactccgctgggtactagccgccctgctgccggcgacctgtccgtgtacttccacgcggactcgtgcccgcagctggagacgatcgtgcggtccagcgtggacgcggcgctccagcagaacgtccgtctgacggcgggtctcctccgcctcttgttccacgactgcttcccgcagggctgcgacgcgtccatcctcctggacaacggcgagcgcggcctcccgcccaacgtggggctgcagcaggaggccgtgcagctggtggaggacatccgcgggaaggtgcacgcggcgtgcgggcccaccgtgtcgtgcgccgacatcacggtgctggccacccgcgacgccgtgagcctgtccggcgggccttccttcacggtgccgctggggcggctggacagcgcggcgccggcgtccagcaacgacgtgttcacgctgccgccgccgacggcgacggtggacgagctgctgacggcgttcgggagcaagaacctgtcggacccggcggacctggtggcgctgtcgggcgcgcacacggtggggaaggcgcggtgcagctcgtttggcgacgtggcgggcccggccaccgacgacgtgacgcggtgcgtgacggcgacgtgctcggcccccgggagcggcgacacgctgcgggacctggacttcctgacgcccgccgtgttcgacaacctctacttcgtggagctgacgctgaggaagaacaagggggtgatgctgccgtcggaccaggggctggtgagcgacccgcgcacgagctggctcgtccagggcttcgccgacaaccactggtggttcttcgaccagttcaggacctccatgatcaagatgagccagctcaggggaccccaggggaacgtcggcgagatccgccgtaactgcttccgcccaaacaccaacggcatcgccgcctctgcttgagttgactgaccaggcaccgatccattacttcactttcactgtgtgtaataattaataataataaaacaaaaacaacgccagcccgtacgtgccgtgtgaggggggcacgtggttgtggctatactgtagccgtcaccaccatgtcggcgtcgtccatgcatgtcgcattaccgatttttgttcatgttccgatctcatctcatcatctcgctatcaataacaattataatagtgtttattagtagtaaaaaaaaaaaaaaaaccaaaaaaacaacaaaaaaaaaaaaaaaaaaaaaaaaaaaaaggcggccgttcgcgaa

SEQ ID NO: 156572 - DNA, 761 bp, Zea mays
  Clone ID: MRT4577_74373C.1
gctgacggcgttcggagcaaagaccctgtcggacccggcggacctggtggcgctgtcgggcgcgcacacggtggggaaggcgcggtgcagctcgttcggcgacgtggcgggcccggccaccgacgacgtgacgcggtgcgtgacggcgacgtgctcggcccccgggagcggcgacacgctgcgggacctggacttcctgacgcccgccgtgttcgacaacctctacttcgtggagctgacgctgaggaagaacaagggggtgatgctgccgtcggaccaagggctggtgagcgacccgcgcacgagctggctcgtccagggcttcgccgacaaccactggtggttcttcgaccagttcaggacctccatgatcaagatgagccagctcaggggaccccaggggaacgtcggcgagatccgccgtaactgcttccgccccaacaccaacggcatcgccgcctctgcttgagttgactgaccaggcaccgatccatccgccggtgactgtcactcatgactcatcacttcactttcactgtgtctgtgtgtaataattaataataataaaacaacaacaacaaccccagcccgtacgtgccgtgtgaggggggcacgtggttgtgccgtcaccaccatgtcggcgtcgtccatgcatgtcgcattaccgatttttgttcatgttccgatctcatctcatcatctcgctatcaataacaattatactagtgttttattaaaaaaaaaaaaaaaaaaggccccta

SEQ ID NO: 156573 - DNA, 359 bp, Zea mays
  Clone ID: MRT4577_74374C.1
gggatagcctcaactaactagtactcagacgccgtattgaggggcatgtagtttgagcgcgctctcaacatgataagacgcaactcggcccaagtgtaagatgaagaggacgcgtagtgctcaagatgaagcgccggtaaatgatgcatatatctaagtaggcacatcttgtgaccgaggatggcgagcttctcctgcaccatgtgtgacacgcgcagcgattattgtatgcctttgtagacgtgctttgctgtagacgtaagcgatgtaaaccggccttacagattgaatatagtatgttctctaactgagtttatgttgtaatttaaggataatgatatgatgctctaagttgactg

SEQ ID NO: 156574 - DNA, 630 bp, Zea mays
  unsure (1)..(630): unsure at all n locations
  Clone ID: MRT4577_74375C.1
cgtatctccccccaccccccccccccgtggggcgcggggggcaacccgacccgagacgagttcctccagatcagcgggcagagggtgccgtagcaaggatctcgccgggccccggccatgaccgaggtcgccgacgcgtcccctccccctccgaccgccggcggcggagaccgcaagggggggggggcctcgcccgtgcccccgctgccgggccagcacaagaggcgtagggaggagggcggcggcggcttcaaccggcgccggctcggcccggttggcggcggagggcacgagcaggacgacaggaggtatggaaatggtcttggtggcatangaggaagaggtggtgatggtcgatatacaaatcgtgcaccagattctggacgcggtggatggaatgagggttctgggaacagtcgtagggaaggactgatgtcatacaagcagttcattcaggaacttgaagatgatgtttcaccagttgaagctcaaagcagatatgaggagttcaagtcagagtacatcacaactcaaaagaaagcttactttgccctccataagatgaagattggttaagaaataattccatcctacaaaccttgaaaatgtctttgaaagaaggaatgaact

SEQ ID NO: 156575 - DNA, 293 bp, Zea mays
  unsure (1)..(293): unsure at all n locations
  Clone ID: MRT4577_74376C.1
gtagtatgaaagngtangtaagatagggaattagggtagaggagaggagtgagaattatattatgagagatgaaaatgtggagggggaggaatgtggaagggagaaggagttgaaatgattaagtaaagtatagaagaagagnttgataggtagatatttgatggataaggttatgatgattgtattgaagnaagtgagttagaaaaatatttggtagaatatataataaaggttggtaaaagtaatnaananaattttganatattagnatggtggaaagnaganaaagaag

SEQ ID NO: 156576 - DNA, 149 bp, Zea mays
  unsure (1)..(149): unsure at all n locations
  Clone ID: MRT4577_74377C.1
agtcagtgaggtacgaaagaagtcgcctaattctttcgactgatatcaacgcacaatcaactcctcggcccttttcgtcagttaatgccgcggaaattgttggatgccgatgatatcctgaccctcgtccgccacatccnaacttccat

SEQ ID NO: 156577 - DNA, 2294 bp, Zea mays
  Clone ID: MRT4577_74378C.1
cctatttatgattcgtttggtgatccaactatgcatggcgccttccctccagatattcctgctccccctgttctaatgcctgtgcctggtgccggtccgcttggaccgtttattcccgcaccgccggaagttgccatgcatatgttgagggatcagggtgcgccacctccttttgagcccagtggaggtccacatcctaggaaagcagggacgggcagcggcggtcctccaatgcgtggtccgtccccagtcttcagtgctccattgcctcatcatgggaatagatgcgaagagggtgctgggaacagtcgtagggaaggactgatgtcatacaagcagttcattcaggaacttgaagatgatgtttcaccagttgaagctcaaagcagatatgaggagtacaagtcagagtacatcacaactcagaagaaagcttactttgccctccataaggatgaagattggttaagaaataaataccatcctacaaaccttgaaaatgtcattgaaagaaggaatgaactggcaagaactactgcagatgatttcttcctacaattgcaaagtggaagtctggacaccggtccaggtttgactggttcggcagtgagcaaatcaggaaataacagcagtaaaaatctagatgctgtggaaggggatggtaaaaaggggaaacttggaaaaggttccgatgattcatattatgctgctcccaaggctcacccagttagttctgaggttcgtcgaattcgaattgatattgagcaagctcaaggtctcatttgtaaacttgattctgagaagggtattgaaaacaacatcctctcaagtagtaatcatgaaaagtcagacagggataagtcacatggttcaatggggccaattgttatagtacaaggatcatctactgtgaagggtcttgagggtactgagttgctggacactcttgttacttatttatggcgtatccatggtgtggattattatggtatgtctgagacaaacgaacctaaaggcctaaggcatgtgaaagcagatgcgaggacatataatggggctagctcaagtgccaccgaatgggagaataagcttgattcattctggcaagatagaattcaaggtcaggatccattagaaatattgaaagcgaaggagaagatcgatggagctgctactgaagtattggatccatatgtgaggaaaataagggatgagaagtatggatggaaatatggatgtggagccaagggctgcacgaaacttttccatgccgctgagtttgtccagaagcatattaaactgaagcacacagacttggtggttgatctaacttcaaaagcaagagaagatatttactttgaaaactatatgaatgacccaaaggcgcctggtggtacgcctatcatgcagcaacctgctccaaggggaaaaggcagacaaaggccaccaatagagagtcggctgagggatgagcgtggtaatcataggctcgacagtgatgggtccggtgaaaatcccgacgatcctgtttatgattcgtttggtgatccaactatgcatggcgccttccctccagatattcctgctccccctgttctaatgcctgtgcctggtgccggtccgcttggaccgtttattcccgcaccgccggaagttgccatgcatatgttgagggatcagggcgcgccacctccttttgagcccagtggaggtccacatcctaggaaagcagggacgggcagcggcggtcctccaatgcgtggtccgtccccagtcttcagtgctcctccgcctcatcatatgcatgaccctcgtcgaatacgaagctaccaagacctggatgctcccgaggacgaagtgaccgtcatggactaccgaagcttgtaggcttgcctccagatactcgtttaggtaaacattacagtgcgaaatcaaaacatcttgctctgtctaaaatcaccgcggaggaaccccagcaggcatctcagcacctgtgtctcgactcctgagctgtcatcttctcactgtttgtgaaacgaaacacactacaggacgctcgacaaaaataggccaccgtgaaacacggtgttagctcagtctgtgcaatgcgaaagattttcgtccatgtttgagcactgtaaaacactgttcccaacataacgtccagctggacagagtagagtttaaatatggttagtgagatggatagtttgatggagataagatttattaggggattaaaaaaaaaaaaaaaaacaaagggcggccgcctaaggtccaagctacgacgcggc

SEQ ID NO: 156578 - DNA, 2670 bp, Zea mays
  unsure (1)..(2670): unsure at all n locations
  Clone ID: MRT4577_74379C.1
aattcggcacgaggccgaggcgggcgcgcggcagactgtagggtgccctagcaaggatctcgccggccccccagccatggccgaggccgccgacgcgtcgcctcctcctcccaccgccggccgcggagaccgcaagcggggccgagcctcgccagtgctcccgccgccgccgcccgggggcgcgccacccggccctttcattaagcgtagggaggagggcggtggcggcttcgaccggcgccggctcggcccagtcggcggcggagggcacgaacaggacgacaggaggttttaattctacacatgggttttctgtttcaattttggaactctaggcagtgctataactatgagcagaaaggatggagattctgtgacgagttttcttaaaacagtccccaatttttcttgcacatcttttgagcactgtgtcagtttttttgaagtttctgtgatttgtttcctaggtatggaaatggtcttggtggtgtaggaggaagaggtggtgatggtcaatatacgaatcgtgcaccagattggtcggattctggacgtggtggatggaatgagggtcctgggaacagtcgtagggaaggattgatgtcatacaaacaattcattcaggaacttgaagatgacgtttcaccagttgaagctcaaagcagatacgaggggtacaagtcagagtacatcacaactcagaagaaagcatactttgacctccataaggatgaagattggttaagaaataagtaccatcctacaaaccttgaaaatgtcattgaaagaaggaatgaactggcaagaactactgcaaatgatttcttcctaaaattgcaaagtggagatctggacatcggtccaggtttgacgggttcggcagtgagcaaatcaggaattaatagcagtaaaaatctagatgctgtggaaggggatggtaaaaagggaaaacatggaaagggttctgatgattcatattatgctgcttccaaggctcacccagttagttccgaggttcgtcgaattcgaattgacattgagcaagctcaagttctcattcgtaaacttgattctgagaagggtattgaaaacaacgttctctcaagtagtgaccatgaaaagtcagacagggataagtcacatggttcagtggggccaattgttataatacaaggatcatctactgtgaagggtcttgagggtgctgagttgctggacactcttgttacttatttatggcgtatccatggtgtggattattatggtatgtctgagacaaatgaacctaaaggcctaaggcatgtgaaagctgatgcaaggacatataatggggctagctcaaatggtgctgaatgggagaataaacttgattcattctggcaagacagaattcaaggtcaggatccattagaaatgttgaaaggaaaggagaagattgatggagctgctactgaagtcttggatccatatgtgaggaaaataagggatgagaaatatgggtggaaatatggatgtggagccaagggctgcacgaaacttttccatgccgctgagtttgtccagaagcatcttaaactgaagcatgcagacttggtggttgatctaacttcaaaagtgagagaggatatttactttgagaactatatgaatgacccaaaggcgcctggtggtacacctatcatgcagcaacctgctccaaggggaaaaggcagacaaaggccaccaatagagagtcggctgagggatgagcgtgggaatcataggttcgacaggaatgttgattcaccaaaacgtgatgggtctggtgaaaatcccgatgatcctatttatgattcgtttggtgatccagctatgcatggtgccttccctccagatatccctgctcccccggttctaatgcctgtgcctggtgctggtccgctcggaccgtttattcccgcaccacccgaagttgccatgcatatgttgagagatcagggtgcgccgccacctattgagccaaccggaggtccacatcctaggaaagcagggaagggtggtggtccttcaatgcgtggcccatccccaatctttggcgctccttcccctcatcatatgcatgatcctcgcagaatacgaagctaccaagacctcgatgctccggaggacgaagtgactgtcatggactaccgaagcttgtagacttcctccagttcttgtgcatccagatacctttgtagtcaacatttttagcgcgagagaaaaacaccttgctctttctagaatcgccgcggaggaaaccccggcaggctttttgtgtcgcgaccactgagatgtcagcttctcagtgttttgtaaaacgaaacacaggaagtacattacaacttctccccattaaacaaggtgaaagatttccatcagtgttttgtttttttggtcagcccagcattgatgtacatgtacgtaccttggcaaatagggcgggggttcgtttgtcgctgcanaaaaaaaaaaaaaaaaaaaaaaaaaaaaaaaaaaaaaaaaaaaaaaaaaaaaaaaaaaaaaaaaaaaaaaaaaaaaaaaaaaaaaaaaaaaaaattttaaaaaaaaaaaaaaaagggggccgttttaagggacccaagtttacgtccccgggcttgcaacgtaatagtttttttttggggcccccaa

SEQ ID NO: 156579 - DNA, 680 bp, Zea mays
  unsure (1)..(680): unsure at all n locations
  Clone ID: MRT4577_7437C.1
gggtacacctcnggnccggccgggaacccatgtgcgtttagcagcaattcatcagctagaagttcgaaatgggggtcaagtttttagtccttctcggtgttgtcctggcctctcttgtcttccaggacgtggcatttgctagagagctcactaaggccaataatgaggatgagggaaagaacatgaaacaaggaggaatgactgaattaaaggatgagaaatggggaggtggatataatggaggatacggatatggaggtgggtatggtggnggntntggncagntntntngngagcgcggnggngatagnngatnagngnnagaagatngagnagtanngnnanatnntngnntnngtnntntngtnttnnnnannnggaatntntnaggnnaagngnttnntngannanatggtttnggangaagttnngnttgtggtgtngngtnaattgttttagaagttngngnaggaaatagggaagntggagtngganggggagaaggaggttgnnnattangngtttangnagatnnagnngngtgtggttttttttgaggaggaggtggtagtgattanagagaagnttggaaagntatatgaatttgaaaaaaaatggtaaaaaanaanaaaaatggttaatgggaattgaattggatttaaggaattaagatgtttgat

SEQ ID NO: 156580 - DNA, 238 bp, Zea mays
  Clone ID: MRT4577_74380C.1
gcgtccggattgatggtgggggcgctgctggcgttcgtggcacacggggctgatgacgcgggccaggtgtacgttgtgcgtatgcttgcgcgcgctcgcttcgctttcgcggcaagtgcggcggggcggttggtggctgcttttttatgaggggggtgggtatgcttgtggctcccgtcatacgatgggacgtccatctcgtgatgagatgtcagatgtgtgtgaaagagttctccgt

SEQ ID NO: 156581 - DNA, 301 bp, Zea mays
  Clone ID: MRT4577_74381C.1
acatgttcacgcaatccatgatttacatttaccagtagatgccgtcaaaataagcgtgggttgatgtaaggtcaccatcggtttgcccaacgtaccgatgctcgacctgtaacaatactgcatcgccaatctccgtgccgaatctatagtactgatggaacatattccggtatgctcgcaagaactactcaaacaacaagattctgagccgtctcgaaattgtacacggaaaggctggcagctacacatggctcacttacaagcagctatactacaccgtgctcaatgttaggtctgccat

SEQ ID NO: 156582 - DNA, 360 bp, Zea mays
  Clone ID: MRT4577_74382C.1
aagaatcggcgacatgccgatgcaatattaatacttcaaaatggggacacaactctctagtgtctatagcgatgttaacaaaaagtgcacagttcaaatttaacagttttgtcgttaaacttcacaaccttgaacctgtctatcgaaggtgatctaagacctgggcggtactctctataatagagccgggcattactctctccctctagatatcaaggggtgtcatagccttggttcttcttcttcttcttggagaggggggggagcggcgccccacataccttttcaaccttgtacctcacaccaggggtattttccacagcatgggcctttctaccaaacccagcaaatagcacctca

SEQ ID NO: 156583 - DNA, 273 bp, Zea mays
  Clone ID: MRT4577_74383C.1
acatgcctgtgtatgtgcgatccatgtggtcgccgatgcgggcacatgctgcgatggctgtagcgttggtgatgcgtgattgagcggctcaatggtgcgtgctctacaggagtcttactaagcacgagcatcacaaccagctatagctcggactggctgtacactcatgcgactttgtatgccaagccgacggatgccagtctcgacgttagccgctgctgttgtagcttcaaggtcctgaacaagccctcgttccatagcatgtgctcatgc

SEQ ID NO: 156584 - DNA, 698 bp, Zea mays
  Clone ID: MRT4577_74384C.1
cccctcctcgagtttttttttttttttttttttttttttttttttttttttttttttttttttttttttttttttttttttttttttttttttggggaagggaacattatcgattacttatttggagaaaaaaggggaacagggcaacaaatggccatagcccatacataatggggaaaaaacaaggaattacatgaaaaaccccaaccttttggggttttggggggccaggggaccttttttttacacagaaacaaacccgcaaattataaagcagttttttacagccccaagtttttaaggggatacaaacccacaggaggaggccaagcccatgaggcaggaacatgaagaggcctaaggagccccatccttgatctcaaaaagggggatttcacttggataaaaagccgggagttccccctgaaggccattgggcccccttttgaatttttgggtggagcttgaaaaaaaaattttggttttcaccttggggggggggggggaccaaaggaaaaaaaaaaacctggttttttggacattttttggggggacaaaggcgaaatcataaatcgggtatggggagtcatttttggggagggtgtttggaaaaccctccaaactgggagggggaaccccgacctgggcccaaaaaaactccttgaacttgggggccattttaaaagttaagaaagggg

SEQ ID NO: 156585 - DNA, 257 bp, Zea mays
  unsure (1)..(257): unsure at all n locations
  Clone ID: MRT4577_74385C.1
atttcccttgtcgacgatgttcttatgtcggcggccgcccttnntttnnggggttttttttttgggaaattttggcttttttattccattcactgaaggggaaaaaaaggcttgatgattccattccctctatgctactccttacctttaatcattttgaaacaactttaccaattttttcccaaattaaacatatatattcttaacccattttgggttattcccgcccttttaaatttgaaaaccttttcgttttt

SEQ ID NO: 156586 - DNA, 376 bp, Zea mays
  Clone ID: MRT4577_74386C.1
tgccccgcgcacctagcctccgcccaatacctggatatagcctccaccacatgccccgcacctccctcgcacacccagcctctgtccagtctactctacagtggcggtcacggctcccccttccatagacggcacacgcaggcacaactttctccacccaatccacgcctccctcatggaaggaatacacgctgatgtcgagatgtatgggatccatgtggaagtcgtggaggggaagcgaaatccaagcctcaccactggccccttccatcctcggtgtcctcttaccatcgacggtgcccttcaacacaccatctgctcatgctatatattaatccaaagggagaacacagtagagttgattttgcaaaccgag

SEQ ID NO: 156587 - DNA, 426 bp, Zea mays
  Clone ID: MRT4577_74387C.1
aatatactatatttgtgaaatgaatatactaattttgaattctagcgctatcaccttatggaccgttcacagtgcaacgatacacgtaccaacactgagtgctcgcccgtatcaccacattaccgtaaatccctgggtagaagaatttaccaacattaccaatgagtaaaaactccgagcaacgcatagaacctgtgcagcagttaggaggcccagggttcctgtacaccgaggctgaaccaccaaatgcgtgcggggaaggtgattaggctacataaccacttcccgggaacgatgctgagtaaataccacgaggccgacctaggtgtatatttgtggggaatcgtgatggacttagccaacagaatgttggcggactccttggattggggccctgtaaaaaaccaaaccgcgacccctcaaaag

SEQ ID NO: 156588 - DNA, 355 bp, Zea mays
  Clone ID: MRT4577_74388C.1
gaaatcctgggtcgacccacgcgggcgcccacgcgtgcgggacccagtactactaaaaaaaagaaagtacccacgcagagcaagccaagaactgcgggggggggaagcatatcaaagcagcagcaaagctaaccaccggctggcgcccatggcccgcggaccctgaatgggggaagctaatggcggcgcacaagggccagcgaccagagggccaacaggatgcggaggcggcggggctcagagcctggaaccctagggattggcgggacaaaagggcgacgaggcgaaaaggccgcggaagaacagctgcaaaagccgacaacgagacgccgatcggagagatcgtcgaccaggg

SEQ ID NO: 156589 - DNA, 416 bp, Zea mays
  Clone ID: MRT4577_74389C.1
aggggttgacgcgtacagcatatcctgcgggtcctcgctccgcgcaactccatgttcccgagacccaaggagcggctgttcaacaaggtggtgtatgtggccaggcaggtggccaaggtgcaggtgccttcctaccgccgccatctggacgttgtggtggcctgtgaggatgccgatgacaatgacgtcgacatcccgcttgtgtctatttacttccggtaaagaggagggtgtcgctacctgtttacatgaaacctgtctgtgcgacgtttgtcagaaggatcgagtctataagttgcgcaagcaaccgagaactaggctgtgttcaatggaaacacatacttggttgtgttcaatgtaaacacatattgatgagtctataagttggctgggaatcgtcgccaagatttgggttc

SEQ ID NO: 156590 - DNA, 434 bp, Zea mays
  Clone ID: MRT4577_7438C.1
attgggtacctcgaggccggccgggaaaccctactactacgcttctgtctttggagcccccccggctgctggtgcgccctacgtctcaagccctgccaggccgacggacgtaaaaggacacgaatgccgcatgtcactgtgctccctgatgctctcaagcgcatgctgaatgctcaacacatagggaaacaacctctactgcatctgccgccatccaatgagatcatcaatctcctgactgccatgcacctgcatggttaccttggccatgtccaccacctggatgaccacagacctgctaagatcgagggtggagctgaacggaatactgaataaatgtgaagttattaccccacgatgacgatgtactagatgaacgagatcagatggatgtacgaggcattgttcttccatctcgccagattggatacatc

SEQ ID NO: 156591 - DNA, 2472 bp, Zea mays
  Clone ID: MRT4577_74390C.1
gtgaattgacacgattccctattgctgggtcagctgatgatgcacagaagctgatagatcttgctattggtattaatgaaactctgggtgagagtaagcttgaagaaattgacaagaagctcttgcagcatttcgcaagtggttccagggctgttttgaatcctatgtctgcaatgtttggtggtattgtaggtcaggaggttgttaaagcatgctcagggaaattccatccactttaccagttcttctacttcgattctgtggaatctctgccagttgaaccgttggagcctagtgatctgaagccagagaacagtagatatgatgcacaaattagtgtctttggggctcagcttcaaaagaaactggagcagtcaaaaatcttcatggttggttctggggctcttggatgtgaattcttgaagaaccttgcgttaatgggtatttcttgcagtcaaaacgggaagctgactgtgacagatgatgatgttatagagaaaagcaatctcagtcgccagtttctcttccgtgactggaacattggacagcccaagtccacagttgctgcaactgctgctatgacaattaatcccgagcttcatgtggaggcccttcagaacagagcaagccctgatactgaaaatgtgtttaatgatgccttttgggagagcttagatgctgttgttaatgcattggacaatgtcacggcaaggatgtacattgactccagatgtgtatatttccagaagccacttcttgaatcaggtactctgggtgccaagtgcaacacacagatggtcattcctcacctaacagagaactatggggcatccagagatccaccagaaaagcaggcacctatgtgcactgtacattcgtttcctcacaacattgatcactgcctgacatgggctagatctgagtttgaaggtctacttgagaagactcccactgaagtaaacgctttcctgtcgaaccctggtggatatgcaacggcagcaagaactgctggtgatgcacaggctagggaccaacttgagcgagttattgaatgccttgagacagacaagtgtgagacattccaagattgcattacctgggcccggctgaagtttgaggattatttctccaaccgtgtaaagcagctgacattcacttttcctgaagatgcaatgactagctctggtgctcctttctggtccgctcctaagcggttcccgcgacctctggagttctcatcttctgactcaagtcatcttagcttcttgttggctgcttctatattaagggcagaaacatttggaatacccatacctgattgggcgaaaaacccaaagaaactagctgaagctgtggacaaggtcattgttccggatttccatccaaagcagggtgttaagatagagatagatgagaaggctactagcctatcctctgcatctgttgatgatgctgctgtcattgaagagcttattgcaaagctggaagcaatttctaaaacattgccaccaggattccatatgaaccctatacagtttgagaaggatgatgataccaatttccacatggacttgatcgctggctttgccaacatgcgggctaggaattacagcattcctgaagttgacaaattgaaggcaaagttcatagctggaagaatcatcccagccatcgccacctcaactgcaatggccaccggccttgtctgcctggagctttacaaagtccttgctggtgggcacaaggttgaagactaccggaacacatttgcgaacctggcgatccccctcttctccatggcggagcctgtgccacccaagaccatcaagcaccaagacatgtcctggaccgtgtgggaccgctggacggtaactggcaacatgacgctgagggagctcctggagtggctgaaggagaagggcttgaatgcgtacagcatatcatgcgggacctcgatgctgtacaactccatgttcccgagacacaaggagcggctggacaagaaggtggttgatgtggccagggaggtggccaagttggaggtgccttcctaccgccgccatctggacgttgttgtggcctgtgaggacgacgacgacaatgacgtcgacatcccgctcgtgtcaatttacttccggtaaagagggacacactgcccgtttatatacatgaatcttgtgcgatgtttgtcagaaggatcgtgtctataagttgcgcatgcaacctccaggactaggctttgcttaaacgcatgctgatggatttcccgagctgggtagagctggctgggaatcgtcgctgagatttgggttcaccgttatggaattcttggaatgacagttactgcaaggcactgttgctgccaagtgttgttgtctttgtacttgggatcttcgatgcgtgcatgtgccggtgttatgcttgcgattttttcagtgttgtatatatgtcgcgctctctttagatttcggt

SEQ ID NO: 156592 - DNA, 2254 bp, Zea mays
  unsure (1)..(2254): unsure at all n locations
  Clone ID: MRT4577_74391C.1
cggactcgtgggcggactcgtgggcggacgcgtgggcggacgcgtggggtcgaatctctgccagttgaaccgttggagcctagtgatttgaagccagagaacagtagatatgatgcacaaattagtgtctttggggctaagcttcaaaagaaactggagcagtcaaaaatcttcatggttggttctggggctcttggatgtgaattcttgaagaaccttgcgttaatgggtatttcttgcagtcaaaatgggaagctgactgtgacagatgatgatgttatagagaaaagcaatctcagtcgccagtttctctttcgtgactggaacatcggacagcccaagtccacagttgctgcaactgctgctatggcaattaatcctaagcttcatgtggaggcccttcagaatagagcaagtcctgagactgaaaatgtgtttaatgatgccttttgggagagtttggatgttgtcgttaatgcattggacaatgtcactgcaagaatgtacattgattccagatgtgtatattttcagaaaccacttcttgaatcgggtactcttggtgccaagtgcaacacacagatggtcattcctcacctaacagaaaactatggggcatccagggatccaccagaaaagcaggcacctatgtgcactgtacattcatttcctcacaatattgatcactgccttacgtgggccaggtctgagtttgagggtctacttgagaagactcccactgaagtaaatgctttcctgtcaaaccctggtggatatgcaaccgcagcaagaactgctggtgatgcacaggctagggatcaacttgagcgagttattgaatgccttgagacagacaagtgtgagacattccaagattgtattacctgggcccggcttaagtttgaggattatttctcgaaccgtgtaaagcagctgacattcactttccccgaagatgcaatgactagctctggtgctcctttctggtctgctcctaagcggttcccacgacctctggagttctcgtcttccgactcaagtcaccttaacttcttgttggctgcgtccgtattaagggcagagacatttggaatccccatacctgattgggctaagaacccaaaaaaactggctgaagctgtggacaaggtcattgttccagatttccaaccaaaacaaggtgttaagatagagacagatgagaaggctactagcctatcctctgcgtctgttgatgatgctgctgtcattgaagagcttattgcaaagctggaagcaatttttaaaacattgccaccaagattccatatgaaccctatacagtttgagaaggatgatgataccaatttccatatggacttgatcgctggttttgccaacatgcgggctaggaactacagcatccctgaagttgacaagttgaaggcgaagttcatagcgggaagaatcatcccagccatcgccacctcaactgcaatggccactggccttgtctgcctggagctttacaaagtcctcgctggtgggcacaaggtcgaagactaccggaacacatttgcaaacctggcaatccccctcttctccatggcggaacctgtgccacccaagaccattaagcaccaagacatgtcgtggactgtctgggaccgctggaccataaccggcaacatcacgctgagggagctcctggggtggctcaaggagaagggcttgaacgcctacagcatatcctgtgggacctcgctgctgtacaactccatgttccccaggcacaaggaccggctggacaagaaggtggtggatgtggccagggaggtggccaaggtggaggtgccatcataccgccgccatctggacgttgtggtggcctgtgaggatgacgacgacaatgatgtcgacgtcccacttgtgtccatttactttcggtaaagaggggctcaccgcccgtttacatgttgatcctgtgcgatatttgtcaatgtttgtcagaaggatcaagtgtataatttgcgattgcaaccgtgaactagattgtgtttaagcacatactgatgatttcctgtgctgccatctgggtagacttggctgggaattgtcgctgagatttggaccactgttatggaattcttagcataacattatgatagctgttgcatgatactgtcgtcgctaaatgttgttatcttggtatttcaaaaaaaacaaaaaaaaaaaaaaaaaaaaaaaagaagggcggccgccgtatngtgagctc

SEQ ID NO: 156593 - DNA, 295 bp, Zea mays
  Clone ID: MRT4577_74392C.1
ccaggccagccacgggctggatgcaggcccagcttatcatgactgcaatggataccccatcccaacttggtccgattgcacgaatgtagtgaccaacacaacaggctagttttggagacaggagctgtcccacatggccattggcgggagtattctgctggtgaggtgactactgccgcgggagggcattgactgagggtggtagagcgcgcacagcacgtgctactggggtggcgactcggccggtacaatgggccgagcttgcagaggcaggaacctgtacagcacggtgtac

SEQ ID NO: 156594 - DNA, 224 bp, Zea mays
  unsure (1)..(224): unsure at all n locations
  Clone ID: MRT4577_74393C.1
aaagagaaanaaacagtgttgaattataaatgtaccgtggggggtgttcgnagaaagggggaaccgattaaagatgaaaaggccatttagacctcgatagatttctttttaattatnaccaaatgtatttggggggggggggggggtntatggnnagnaccnnnngcatataaataggtgaagagaagaattgtactgttgaagaggacttgaaatttgttttt

SEQ ID NO: 156595 - DNA, 1659 bp, Zea mays
  unsure (1)..(1659): unsure at all n locations
  Clone ID: MRT4577_74394C.1
ttgggtacctcgaggccggccggngaaaatttcaaaaaaaaaaaaaaaaaaaaaaaaaaaaaaaaaaaaaaaaaaaaaaaaaaattaatgatgccttttggggagagcttaaatgctgttgttaatgcattggacaatgtcacggcaaggatgtacattgactccagatgtgtatatttccagaagccacttcttgaatcaggtactctgggtgccaagtgcaacacacagatggtcattcctcacctaacagagaactatggggcatccagagatccaccagaaaagcaggcacctatgtgcactgtacattcgtttcctcacaacattgatcactgcctgacatgggctagatctgagtttgaaggtctacttgagaagactcccactgaagtaaacgctttcctgtcgaaccctggtggatatgcaacggcagcaagaactgctggtgatgcacaggctagggaccaacttgagcgagttattgaatgccttgagacagacaagtgtgagacattccaagattgcattacctgggcccggctgaagtttgaggattatttctccaaccgtgtaaagcagctgacattcacttttcctgaagatgcaatgactagctctggtgctcctttctggtccgctcctaagcggttcccgcgacctctggagttctcatcttctgactcaagtcatcttagcttcttgttggctgcttctatattaaggccaaactgaaacatttggaatacccatacctgattgggcgaaaaacccaaagaaactagctgaagctgacaaggtcattgttccggattttcatccaaagcaggttatatgaggctacttatcctctgcatctccatctgggtaaagattggctgggaattgtccttaagatttggccccctgttatgaaaaaaaaaaaaaatatgtcgacgtcccacttgtgtccatttactttcggtaaagaggggctcacggcccgtttacatgttgatcctgtgcgatatttgtcaatgtttgtcagaaggatcaagtgtataatttgcgattgcaacactgaactagattgtgtttaagcacatactgatgatttcctgtgctgccatctgggtagagttggctgggaattgtcgctgagatttggaccactgttatggaaaaaaaaaaaaatatgtcgacgtcccacttgtgtccatttactttcggtaaagaggggctcacggcccgtttacatgttgatcctgtgcgatatttgtcaatgtttgtcagaaggatcaagtgtataatttgcgattgcaacactgaactagattgtgtttaagcacatactgatgatttcctgtgctgccatctgggtagacttggctgggaattgtcgctgagatttggaccactgttatggaattcttaagcataacattatgatagctgttgaaaaaaaaaaaaaaaaaaaaaaaaaaaaaaaaaaaaaaaaaaaaaaaaaaaaaaaaaaaaaaaataaaaaaaaaaaaaaaaaaaaaaaaaaaggggagaaaaaaaaaaaaaaaacaaagttacggaccggttgcaggcaacaaaataactatttgtttggtgggacctaaattaatttttttggcggtaggttttaaatcagtgttgtcggggaaaaatcct

SEQ ID NO: 156596 - DNA, 769 bp, Zea mays
  Clone ID: MRT4577_74395C.1
aattcggcacgaggaatcaattctcctccaaggtgatctctctcgatcgcttccggcctcaccgtagcccgatccacgcaggctcggccacgacccgcggcctccgcacgacctggatctgacgcgcctccccctgcccccgccctccgcctcgtacttcctcgctgcggccgccgtgctcgcgctactcggcggactcctactctatatgcttccccggaagcggggggtcgacgccggcgaggaccaggacttgcacaacaaggcccttcgcgccgccgcagttgctcaggacaaggagaaggtggttgcggagatgggcggcagggcgccagagatcgatgaggacctccacagccgccagctcgccgtctacgggcgcgagaccatgaagcgcctcttcggctccaacgtcctcgtctccggactgcagggactaggcgctgagatcgcaaaaaaccttgtccttgcgggtgtcaagtccgtaaccttgcatgatgatggcaaagttgagctatgggacttgtcaagcaactttttcctctcagagaaggatgttgggcaaaaccgtgctcatgcttgtgttccaaagctacaagagcttaacaatgctgtcatcatctctactgtaactggtgatttgaccaaagagcaactttctaactttcaggctgtggtctttactgatatcagcatagaaaaagcagctgagtatgatgaatactgtcatagccaccacccgccaattgctttcattaagtccgaagcc

SEQ ID NO: 156597 - DNA, 673 bp, Zea mays
  Clone ID: MRT4577_74396C.1
cggagcctgtgccgcccaagaccatgaagcaccaagacatgtcctggaccgtgtgggaccggtggaccgtaactggcaacatgacgctgagggggctcctggagtggctgaaggagaaggggttgaacgcgtacagcatatcctgcgggacctcgctgctgtacaactccatgttcccgagacacaaggagcggctggacaagaaggtggtggatgtggccagggaggtggccaaggtggaggtgccttcctaccgccgccatctggacgttgtggtggcctgtgaggatgacgatgacaatgacgtcgacatcccgcttgtgtctatttacttccggtaaagaggagggtgtcgctacctgtttacatggaacctgtctgtgcgatgtttatcagaaggatcgagtctataagttgcgcatgcaaccgagaactaggctgtgttcaatgtaaacacatactgatgagtctataagttggctgggaatcgtcgccgagatttgggttcaccgttatggaattcttggagcatataaaacatcgtgatagttattgcatgtcaatgtcactgctagatgttgttgtcctaatgcaaaaaaaaaaaaaaaaaaaaaaaaaaaaaaaaaaaaaaaaaaaaaaaaaaaaaaaaaaaaaaaaaaaactcgagaagggg

SEQ ID NO: 156598 - DNA, 3759 bp, Zea mays
  Clone ID: MRT4577_74397C.1
ccccccgcgctcccgtcgtcctcgaaaccctaggccagaccacagctgaagccgagcggagttctgctcgccgcccatcgaatccagcttctccaagtccaaggcaccgccgcgacccccatcgtccgcacgacctggatctgacgcgcctccccctgccgccgccgccctccgcctcgtaccttctcgcggcgaccgccgtgctcggactcctcggcggccttctactctacatgcttccccggaagcggggggtcgacgccggcgaggtccaggacttgcacaacaaggccccccgcaccgccgccaccgtcccagtccaggacaaggacaagcaccaggaggaggttgcggaaatggccggcagggcgcccgagatcgatgaggacctccacagccgccagctcgccgtctacgggcgcgagactatgaagcgccttttcggctctaacgtcctcgtctctggactccagggactaggcgctgagatcgcaaaaaaccttgtcctcgcgggtgtcaagtctgtaaccttgcatgatgatggcaaagtcgagctatgggacttgtcaagcaatttcttcctctcagagaaggatattgggcaaaaccgtgctcaagcttgtgttccaaagctacaggagcttaacaatgctgttatcatctctaccataactggtgatttaaccaaggagcagctttctaactttcaggccgtgggctttactgatatcagcatagaaaaagcagttgagtatgatgattactgtcatagccaccagccgccaattgctttcattaagtccgaagtttgtggcctttttggcagtgttttctgtgactttggtcctgagttcactgttttggatgtcgatggcgaggaaccacatacaggaatgtggcatcaatcagcaacgaccacaatccagcacttgtttcttgtgtggatgatgaacgtctagttccaggagtgatctagttgttttctagtgcatggaatgaccgaactcaatgatggaaaaccaagaaagattaagaatgcaaggccttattcttttactctagaagaagacaccacctcatatggcacttacattagaggtggtattgtcacacaggtgaagccaccaaaggttcttaaattcaaaaccttgaaggaggcaatcaaggagccaggagaatttctcatgagtgatttctccaagttcgaccgcccacctcttttgcatttggccttccaagctttggacaagtttaggactgagttgacacgattccctattgctgggtcagctgatgatgcacagaagctgatagatcttgctattagtattaatgaaactctgggtgagagtaagcttgaagaaattgacaagaagctcctgcagcatttcgccagtggttccagggctgttttgaatcctatggctgcaatgtttggcggtattgtaggtcaggaggttgttaaagcatgctcagggaaattccatccactttaccagttcttctacttcgattctgtcgaatctctgccagttgaaccgttggagcctagtgatttgaagccagagaacagtagacatgatgcacaaattagtgtctttggggctcagcttcaaaagaaactggatgcagtcaaaaatcttccgtttggttctggggctctcggatgagaatttttgaagaaccttgcgttaatgggtattcttgccatttactttagtcaaaatggggctgactgtgactttagatgttgatgttatgcgatctcagtcgctgtttctctcgtgaggaacattggtccaagttgcgctactgacgctgaactagatggcgattaatcccgagcctgatgatttcatgtggagcccttcaggacagagcaagctgagactgaaaatgtgtttaatgatgccttttgggagagcttggatgctgttgttaatgcattggacaatgtcactgcaagaatgtacattgactctagatgtgtatatttccagaagccacttcttgaatcaggtactctgggtgccaagtgcaacacacagatggtcattcctcacctaacagaaaactatggggcatccagagatccaccagaaaagcaggcacctatgtgcactgtacattcatttcctcacaatattgatcactgcctgacatgggccagatctgagtttgagggtctacttgagaagactcccactgaagtaaatgctttcctgtcgaaccctggtggatatgcaaccgcagcaagaactgctggtgatgcacaggctagggaccaacttgagcgagttattgaatgccttgagacagacaagtgtgagacattccaagattgtattacctgggcccggctgaagtttgaggattatttctccaaccgtgtaaagcagctgacattcacttttcctgaagatgcaatgactagctctggtgctcctttctggtctgctcctaagcggttcccgcgacctctggagttctcatcttctgactcaagtcaccttaacttcttgttggctgcttctatattaagggcagagacatttggaatacccatacctgattgggcgaaaaacccaaagaaactagctgaagctgtggacaaggtcattgttccggatttccatccaaaacagggtgttaagatagagacagatgagaaggctactagcctatcctctgcgtctgttgatgatgctgctgtcattgaagagcttattgcaaagctggaagcaatttctaaaacattgccaccaggattccgtatgaaccctatacagtttgagaaggatgatgataccaatttccatatggacttgatcgctggttttgccaacatgcgggctaggaactacagcatccctgaagttgacaagttgaaggcgaagttcatagcgggaagaatcatcccagccatcgccacctcaactgcaatggccaccggccttgtctgcctggagctttacaaagtccttgctggtgggcacaaggttgaagactaccggaacacatttgcgaacctggcaatccccctcttctccatggcggagcctgtgccacccaagaccatgaagcaccaagacatgtcctggaccgtgtgggaccgctggaccgtaactggcaacatgacgctgagggagctcctggagtggctgaaggagaagggcttgaacgcgtacagcatatcctgcgggacctcgctgctgtacaactccatgttcccgagacacaaggagcggctggacaagaaggtggtggatgtggccagggaggtggccaaggtggaggtgccttcctaccgccgccatctggacgttgtggtggcctgtgaggatgacgacgacaatgacgtcgacatcccgcttgtgtcaatttacttccggtaaagaggggactcactgcccgtttacatgaatcttgtgtgcgatgtttgtcagaaggatcgtgtctataagttgcgcatgcaaccgaggactaggctttgcttaaacgcatgctgatggatttcccgctgggtagagctggctgggaatcgtcgctgagatttgggttcaccgttatggaattcttggaatgacagttactgcaaggcactgttgctgccaagtgttgttgtctttgtacttgggatcttcgatgcgtgcaaaaaaaaaaaaaaaaacggaaaaaaaaaaaaaaaaaaaaaaaaaaaaactcgaagaggggcgcggtcccttttaaagcttgtacctgcccgggcggccgctcgaa

SEQ ID NO: 156599 - DNA, 342 bp, Zea mays
  Clone ID: MRT4577_74398C.1
acaagtcaacgcgaacaatacagggctactgctcatctattgataggcacaagaccccgcctgcgtaaactacatctatgccctttacattgactttggtcctacggattatttatcaaggactagacaaccttttcccctttaggtcggtcccattttttgctgataacccgcaactttctccacaggttgctttccaactggtcgatccttttcccaatccgtgctttttataccatgtgttgctggataccaaggcccaaggtgcctggttctatatttgcacttgcatatcatgttagctgttttctcgaggaccttcacaagacaaatgccccatca

SEQ ID NO: 156600 - DNA, 350 bp, Zea mays
  Clone ID: MRT4577_74399C.1
gttactattgtccgtttaaccagtagcagcagtggacctaaactagacctatcttttacctggtcagcagaaaaagataggcaactactaggagtgtactggtgcaaggctcttgaatgtagccacattttcacagctgatcctaggggtgtgcttaagttgtggaacataagaaatgtcctgttctcaagtactgatattatcaatgcacctcagatgtttccacctgtagcagtgtttgaaccgtcctttggagctcgaattatgtgtctagatgcatctcctgaagaggagatccttatagctggtgataaaaagggtaacatcacagcctatcctttccctaaaat

SEQ ID NO: 156601 - DNA, 835 bp, Zea mays
  Clone ID: MRT4577_7439C.1
ggtctagctaggactagtaagtagcataccattaccatcctccccgcggctagctccggctggctttcacccataccatcccgcccatgcgccgcgcccggttcctgctcaagggcgtgcgcctttaccgcgagcgcgacgcggcgagcccggcgccggaggaggaggtgcaggagaacaggagcggcggcgtggccgccagcgccggcggctcagccgaagatgctgagcctcgtgcggcgtccgcgcccgcccccagccacgggcgccacagccgcagcctctccgagcacctcaccaagacgctgcccgggtggcacgtcgaggacttcctggtggacgaggcggccgccgccgccgcgactgacatcggcgtctccgcagcagaatagacgtctccggacggctaccctgcgtggtgttcggcccgggaggggcgccctgccggcctcgaatggggatgcatcgacgacaagcgggggctcctgcgctgcgaggcgcaccgcgccatcctgtgccgcgagtgccacgtgtcggtgcacaccgccagcgacctgaccatgcgccacgcccggttcctgctcacgggcgtccgcctctccgccgagcccgccgccgcgtgcccggcgccggaggatgaggaggaggaggacgacgagaacagcagcggcagcttctgctgcagcgccggcgacgcagccgcacatcctcctcctcttccgtcgtcggcgcccgccaccagccacgggagcgacagcagcagcatctccgagtacctcaccaagacgctgcccgggtggcacgtcgaggacttcctggtggacgaggcggccgc

SEQ ID NO: 156602 - DNA, 1094 bp, Zea mays
  Clone ID: MRT4577_743C.1
gtccttttcccacccggatacccccggcgtctccgccgcttaccccgagagttacaagctcgaggcggctatctagggcgcctggcggttctccctgctcctctataagtacaggttcattgtgggccgggccgggagctccatcactgacacaagagagcacgctactactcatcactcgccaacgtgcagagatcagggaggcggcacactccatccactgaccgctcatggcgaaggtccacctctacgtcgccgcggcctgcgccgtcgtcctcgcgctcgccgccccggccctcgccggcgaccccgacatgctgcaggacgtctgcccggctgactacgcctccccggtgaagctgaacgggttcgcgtgcaaggcgaacttttcggcggacgacttcttcttcgacgggctgaggaaccccggcaacaccaacaacccggcgggctccgtggtgacggcggccaacgtggagaagttcccgggcgtgaacacgctgggcgtctccatggcgcgcatcgactacgcgccgggcggccagaacccgccgcacacgcacccgcgcgccaccgagatcatcttcgtcctcgagggcacgctcgaggtcggcttcatcaccaccgccaacgcgctcttcaccaagaccgtcaccaagggcgacgtcttcgtcttcccgcgcggcctcgtccacttccagcagaacaggggccacggccccgccgccgtcgtcgccgccttcaacagccagctccagggcacgcaggccatcgccatgacgctcttcggcgccgtgccgcccgtgccctccgacatcctcgccaaggccttccgcatcagcagcggcgaggtggaccacatcaaggccaacttcgcgcccaagtagagatccaatgtctgcattcccttgattttctcaataataaatccccgcggtgtgcagttcgatttgttcgtcttcggttggtttggttcgagacattgctgaccacgcttgttactgctaatttgtgcggagcggagttgcttgtgctccgataaataatcaattctatcgtcgtctgggttgctttgaaaaaaaaaaaaacagggc

SEQ ID NO: 156603 - DNA, 567 bp, Zea mays
  Clone ID: MRT4577_74400C.1
atgaaggtggcgacatcagctcgagccacaacaccgacctttcagaggagcaggagttggaaggatgggttgctcgacccatcactcgcgacgctgctcgtgggtgtcacttccacgatgcgctcgacaccctgctgcaccaggcactcgaccggcgcacttggtctatcgagtatcgttgtgttgtctttcagcatagtcgcggggtttacccggacctgggaggcaacctgcttggtgcgccgtccggagaacagtctctgcggtgcagaggtctgctcagagcactattccatctctaagcaggactcagctgaggtggccatgcaagatgccacacggtgtgcgctttcgcactactgctcagtgctcggcggggtagctgatggtctcaacctgaagtattacccccttcatccatctggcagcacaagaggcatggttgtctcacctgttggtgaggacaatcctaggttgagcagcacagtcaatctagctgtcgcgctaaacacggagctggaccatgcattagacgagctaagtagggctcgtgctgagatcgcctag

SEQ ID NO: 156604 - DNA, 313 bp, Zea mays
  Clone ID: MRT4577_74401C.1
ttctttcgtccggatggatcgtggggcgtagtttcccatacgcatccggttagagcttggctcacaagcttgctcgagaatttgctggggactgcacacacagtagacggaaccagcggctatctgaaagacgctgtcttgaaggtcaggttgatgacaaacgttacatgcgccagcctgtggacgaacagcgacggctggcactcttggagaatctatctactctcatcatgtacatgtgatctttcacctcatgtaggcctttgtaggggctgctgacaatgagcaggagtctggaccgtcatgacaaggg

SEQ ID NO: 156605 - DNA, 225 bp, Zea mays
  unsure (1)..(225): unsure at all n locations
  Clone ID: MRT4577_74402C.1
gtgggagattataatcaccccttattagggagtatcttaaattttcttatagccaaatgagaagcaataaagaaaaaaccgagacaggcnatnnttttattcaaagcgatgcgcgcttgctgngaccaatcgagtcgatcgatgaataagaaacggttcttttgcaccgccactgaacgaatcacaaatgcaccaccaccaccgttgaaacaaacaacacaaact

SEQ ID NO: 156606 - DNA, 485 bp, Zea mays
  Clone ID: MRT4577_74403C.1
gctctctggcgcggcgcagccgcctctgccccgccacctcgctgcccgccgtacgtgcacctctctccttcgcctcctagctgccgtctccacctaccctctctcgattcccccttccagcgagtgagccaccaaccacgtaagggggagagagggagatggtgctgcggcgggcggcggtggagtcccctaagaaggtggcggctctggtcgacctggttaacctgccgacggcgctgcgggagttcgccgggggccggtcccagatgtcccacctctccttcttcctcggcgtctggtcacacatcaagaacaacaacctccaggacccgaccaacaggaacatagtaaactgcgatgagaagctgaaaactgtgctgttgggcaggtctaaggtggagctctcggaactcccaatgcttgtcaagctacatttcccaaaagttttcaagtcgtaagaataataagctgtcctttacaaaatc

SEQ ID NO: 156607 - DNA, 595 bp, Zea mays
  Clone ID: MRT4577_74404C.1
cattcacggttcgccaaggtcaacaagagtagtgatagatagaagaggccaccatcaccatggatcggcagctgctgaggacggtgaagcaggcgaccaagaaccacgccggcctcatgtaccaccgtctcgtgggccacatcccccacctcctcgtggtcacgctgctcgtcgtcgtggcgccgcagctctcgacgctgacgccggagaaggtgcgcgccctttggaacacagcagtgaacgcgccggcgctggccatggcgtgctgggcggcggcgctggcggcgtacacgtacgcgtcgtcccgccctcagccagtgtatctagtggacctcgccgggtacaagccgccggtggagctggaggcgtcgcgcgccaagaccatcgtgcacttctcgcggtgcgggcggttcagcgagcagagcatggcgttccagaagcggatgctggagcggtcggggctgggcgaggcgacgcacttccccatgtcgctgatccgcctccccgtggacatgtgcgaacggacgggcatggaggagtcccacgccgtgatcttcggggtggtggacgaggtcctccgcaagaaccggcgtgg

SEQ ID NO: 156608 - DNA, 159 bp, Zea mays
  Clone ID: MRT4577_74405C.1
cgctcgagaaaacctttttgggaaggccaacccccaaaccccatgctatcaaccagttgtcgggcccaccaactccaaaaaaccgcacctgatctacattaaagccggcgcgtacattgaaaacgtggaggtcgggaagaatcacgtcaacctcatgtt

SEQ ID NO: 156609 - DNA, 281 bp, Zea mays
  Clone ID: MRT4577_74406C.1
atacttggtaccatatcgctcttgcaatcaaaaaataattcgaggttttttaggctggaggcattcaggttatccttttgggcgatgctgcgctgatatacccgctttctctccacaaagtttatcattcattctacttggactgggctgttcactccttcataattaccaactgcgacatccaggacaccacccacaatccacacccacatgtgctactccaactttaactacatcatccactccatcatctacattggacgcggacgtgatcaccattg

SEQ ID NO: 156610 - DNA, 183 bp, Zea mays
  Clone ID: MRT4577_74407C.1
attcggctcgaggggagcttgcttgcgaacggttttcaagaggttggacagcatcatggatccgggagacgaatgcaatcgcttgaagacaatgttagctgcaagaataatgaacccatggaccactgcgcggatcccgttgtatgagcgttcagtcctaacgggagccagctgcaaaacctt

SEQ ID NO: 156611 - DNA, 210 bp, Zea mays
  Clone ID: MRT4577_74408C.1
cttttattctctattctatcctgggtctgcctcaaccgtgagataggagagtctctggtactagctgctgtagcagtgcccttcatccagggcagttaatggagtcttggaccctttctttctctgggatccctgcccagcaccttcctatagagatgactttaaaaggaaaaagggataaaaaaaacaaccccactggttttaaagggt

SEQ ID NO: 156612 - DNA, 243 bp, Zea mays
  unsure (1)..(243): unsure at all n locations
  Clone ID: MRT4577_74409C.1
aagatatgctactgagcacagatgtaccgtggttgtcaaaggatctaagctcagtgggtacatttctggcacctgatctctacgaagtacaactcgcttagcttctgaacgctgaaccgatggatgattcacgacgacgcgtaaaacagtgcagctgtgatcaatgagctttctanagagataacgcacatactgggttctcaccgcatcaatgcacatcgtgcagctgaggagaagaacatc

SEQ ID NO: 156613 - DNA, 594 bp, Zea mays
  Clone ID: MRT4577_7440C.1
gcgaaagagcagcggcgcaaaggaaagggagccatgctcgcgtcgccggcgctcgccggcgcccactccttcgcggcgtccgtgtatggaagcctcctcgtcccctcgcctcccgtccccgcgccggcacgtcgcgcggcgctgtccgtcgtcgccaaggtcaaggtggccacgccccaggacgaccgcatcgcccgccacgtccgcctccgcaagaaggaaatagcacaaaagatcggtgaggtgattgccaagtcttgtttggagaaagggatcaccaaggttgtcttcgaccgaggtggtttcctctaccatggccgcataaaggctctcgctgattctgccagagagcacgggcttgaattctgagtcgtccaggcgtttgttcatatctccaggatcacctgtaatcttctcttttttttctctctccatatgccaaacagagctgttttgtagtcactcgccttgttctacagggtgcaaagccatggcccatggccactcgttgaccatgtcacgtttttttcgtttggtaagagtcttgtgttctgacgcttctcgaattgatattataagctgatcgtggttgtt

SEQ ID NO: 156614 - DNA, 236 bp, Zea mays
  Clone ID: MRT4577_74410C.1
ctgacgcgtgggcacacgctcagatgcgtttcacatgcttgctggagcagcctccaagcaggtgatgtgcggcaagcacctgacagacacctgatggctctgctggtgctgcgcggctgcgccgtgccggcaggcgttcacgcggacccagcggagctgccgctgatgtgttcggagatgcctccgcgcagggtcgaggaagtagactcttctggctaacctgagccatccggaga

SEQ ID NO: 156615 - DNA, 924 bp, Zea mays
  Clone ID: MRT4577_74411C.1
gcacgagagaaaccacagttttatgtcaaggatgggaagaattatagctacaaggttgctggttcggttgctgtatccagtgctcgagaagcagctgtcatgaggcaaactcaaaaagagacaatctatggtctgggtcgtggtggaaatgttccttttggtgtcccgaacaggcaacatatagatgtggaggcagaggaggttggtgatgctgacaactcaggcagaggttcaaattcccgtggccggggaagaaaaggcggaagggaaggcaaccgtccggaggagaatgagagctccaatggacgaggctctggctttggtggtaaaagaggaggctggaatcagggcaatccggctgaggaaaactggaaccctaatggtcaacaaggttttggccgtggtggcagaagagggggctggaatcagggtggcccagcgaaggaagacggtaactctagtggcaggcaagaaagttttggccgtggagcaagacggggcagcatgaaccatgaccaatcagccgaggataatgaaggccataataatcccgcacaagactttactcgaggaccagctcctcgtggtggccatggaaggggaggtggccggaaccatcacaggagagatcgggcaatgaagaagcatatgcaaggattgacagggctttagctgctggtagccttatgcttttgatgtgccgtactgtaaatggcatttttggaggcactcctacttgaccatccaaatttttgtgcttgttctgtttttaaatcaaataacgccatgaagtaacccacatatgttctcgtaacatttgtgattgccctaaaaagggtaatagtgtatgtagttctaaacatgcttgtaactcgttaaatacataattaattctctagcgactgaaaagaaaaatcatgaaac

SEQ ID NO: 156616 - DNA, 316 bp, Zea mays
  Clone ID: MRT4577_74412C.1
atacgcgtccgaccttggcttggcagatgggggcatttacggatagctctcagttgtagacaagagagacggacttctaaatctttgcctgaatatcactgtaaacagggacacaaacaagagtagtaacagcgtctcttgataaaggggctggtggactaccctgctattgacagctggagtcgccttcgctaaatactttctgcgatacatactaaggaggaattttgtgtcactcacactttaaaacaatttacaacactatgacctgaggtaatgaatctcttctctctagtcctggatccaaccgatgact

SEQ ID NO: 156617 - DNA, 269 bp, Zea mays
  Clone ID: MRT4577_74413C.1
ggccgcttttttttttttttttttttttcacggtgtgtgatggtcatataacatacttacacatgtccaaacacagggctgcgtacattcctataattccatgccatcatatatcatccatagtccgcatttttggctcagacgttcacccttgtaccaagatgtagtgcactgacattcacacggaacttgtattaaggccactcatgagcctttccaatctaactaaactgaaaagagaagcatcacttgcaattccctctcatcct

SEQ ID NO: 156618 - DNA, 287 bp, Zea mays
  Clone ID: MRT4577_74414C.1
acaggattaccaactagtagacgaaagtgatgctttccatgacaaccttaggtctcttgacaggaatctgccctcagacagccaggacttctgtcaacatggattagaagaggattttatgttataaaagaggattttcccaccttgacaccaggcaatgtagttagcatattttatgtaccatggttatatgattaatcttgggacaaagaattttatagaaatttttaaacatctgaaaaagaagcttaagttttatcatccttttttttctcatgaattcttaa

SEQ ID NO: 156619 - DNA, 283 bp, Zea mays
  unsure (1)..(283): unsure at all n locations
  Clone ID: MRT4577_74415C.1
cacacggtactacnagatcctctgggtctccaaagacgcgtcccaagatgacctcaagaaagcctacctcaaggccgccatcaataactattctgacaagggcggcgatcccaagaagttcaaggagctatctcaggcttatgatgtcctcattgatcctgaaaagcggtagatttatgatcaatatggtgaggatgccctcaatgaaggaatgggaagttgtttagggattcacgatccctttgacatattccattcattctttgttggtgtaaaccctttt

SEQ ID NO: 156620 - DNA, 432 bp, Zea mays
  Clone ID: MRT4577_74416C.1
aaaggggcccccaaaaaaggggccacgggaaaactaaaggggaaaaaaaaaaaattcccaattcggggccccaaaccctttttaaaaaaattttggcccaaaaaaatttcccaacccccccctgggacagccgggcgggggtcccttaaaagcccgggcttgggtttgaaagtttaaagggggcgggggtaaaaaaaaaagggttaaataacgggggcccttgggacccaaatggggttttaaaaaaaaaaaaccagggtttccccaaacgggaaggaggggttttgaaaaggtttttaatccccttggggcccgaggcccaaccccaaaaaaaaacccggttaagggtttttcctttttttgggggaaaaccccccaactctcccgggggtggcctttttgaaaaaacccgcaaaaaaaaatttcccaaaa

SEQ ID NO: 156621 - DNA, 940 bp, Zea mays
  unsure (1)..(940): unsure at all n locations
  Clone ID: MRT4577_74417C.1
tatacccccacagccagcccacccaggcacaggtagagacaaccaggagcgcccaagaagcggtgcaggaggaatcccggcctctgtagcaaacaagaatccatccacctgtcctcctcatcgagatctcgcacggggcggctcgtggtgaggtgagtgagtcgaccggccatggcgttcagggcctgcctcccgtcccacaaggcctcgccgtcgccttccgtcgcgcagaggagggccagcaatggggcaccgccggtggtggccatggcctccaccatgaacgaggtcaaaactgccaaaaagccctatgctcccccacgcgaggtgcatctccaagtcatgcattcgctaccagcacaaaagcaggagatctttgattcacttcaatcttgggctagggacaacctattgaaccttctgaagccagttgagaagtcatggcagccacaggacttcctaccagacccttcttccgagggattttatgatgaagtaaaagaactgagggagcgggcaaaggaaatccctgatgactactttgtttgcctagttggtgacatggttactgaggaagcccttcctacgtaccaaacaatgctcaacacccttgatggtgtccgagatgaaactggcgcaagcccaactgcctgggctgtttggacaagagcatggactgctgaagaaaacaggcacggtgatctactgaacaagtacatgtacctttccggacgggttgacatgagacaaattgagaagactatacagtaccttattggttctggaatggatccaggaactgagaacaatccctacatgggtttcctttacacatcattccaagagagagctactttcatatcccatggcaatactgctagcatgccaagcaatttggggaccttaactggnccagatatgtggtacatagcagctgatg

SEQ ID NO: 156622 - DNA, 2338 bp, Zea mays
  Clone ID: MRT4577_74418C.1
ctcgaaaggccggccggggccggaaaaaaaaaaaaaaaaaaaggagctgactttaggacattggaggctttgacgccttcggtgtccttgcgtccgcgtcgtgtccgcgcgcctgctgcccgccaacccgcctctcccaaatcccatccaaattcctccgcgtctttcgaagatcggattttgggaggggcaccgcccccagatcggggaggaatccccattccgtctggtgggtcggtctcccctgtccgtttttggctcttttcccctctcacaagggcggctcttggatgggctgcctgccgtgcttcgggtcggctggtgagggggcggccaaggagggcggtgcgcgcaaggacgataaatcaaaaccacagggtggactagactctaagaaggatgcagtcattttgagggaggggaataatcaacatattgcagcacacactttcacttttcgtgaacttgcagctgccactaagaacttcagacaagattgcttattgggtgagggaggttttggtcgtgtttataaaggacgtttggagaatggacaggttgttgcagtgaagcaacttgatcgcaatggccttcaaggaaacagggagtttctggttgaggttctaatgcttagtctgttgcaccatgacaatctagtaaacttaattggatactgcgctgatggagaccaacgtcttcttgtatacgagtttatgccattgggatcacttgaggatcatttgcatgatattccacctgataaggaacctctggactggaatacacgtatgaagattgctgctggtgccgccaagggcttagagtacttgcatgataaggcaagtcctcctgttatttacagggatttcaagtcctcaaacattctactcggtgaagggtttcatccgaagctatcagacttcggccttgccaaacttggccctgttggtgacaagactcacgtttcaacacgtgtcatgggaacttatggctactgtgctccagagtatgcaatgacagggcagcttacagctaaatctgatgtatatagttttggtgttgtgttccttgaactgattactggccgcaaagcaattgacaacacaaaaccccatggagagcaaaacctagttgcatgggctcgtcctctattcaaggaccgcagaaaattccctaaaatggctgatccgtcacttcagggctgtttccccatgaggggactgtatcaagctctagctgttgctgcaatgtgtttgcaagagcaggctgctacccgcccctttataggtgacgtggtcactgctctttcatacctagcttctcacacatatgatccaaatgcgcctgctcaacataatcggagtaattcatctactccgagggttagccgaggtggtgggagcaatgaccaacgccgtctccgctcatcaaaccaccactctccagatttgagaagggaagtcaccacagcatcaagatacgacgatgaggttagcagggcaaactctggtactggttctggtcgccggtctggcttggatgatgcggatatgtcaggctcacaattgggtagccctgctcacactggaaggaagaggggatctcctaggacttctgaaagccagcatgctatagcagaggccaaaacatatggggaaaattcaagaggcagaaagtgaccaaactctcagagcagcattgaccgtatgagcagaatgctgaaccagatggttcatccattcatcattcatagaaaaaaaaaatgataagttccttgctagcgccagacaggaacattgcatcagtccatctaggtcccttggtctttgtgaatagagctttcctcttttccctttacgggctattgccactgcttcttaacttctccatacaaatatcattgccaccacaaccaccatcagaactcccattcctgtcatctattcctcatgaatgcgatcatcatgcttacgagccttcgtcgtcacggtgtataacaacattcggttcacaatgtggaggtaaggcaaacatctgctctggggagcacaggatctcatccagttgggcatcttctgttgctgttgcatgctgggtgtcagcagtcacaccattgtcgaggggtgtgatgttctttttcttgaatggtttgtacctggggttacagcagttcacctgtgtttgatacatctgccttgtgacatttttgtgttgagttgtcggaacacatctattatcatctctaccataaaattgttgtggcccttgcataaaaaaaaaaaaaaaaaaaacataaaaaaaaaaaaaaaatataaaaaaaaaaaaaaaaaaaaaaaaa

SEQ ID NO: 156623 - DNA, 239 bp, Zea mays
  unsure (1)..(239): unsure at all n locations
  Clone ID: MRT4577_74419C.1
cccggtcgccccctcggntggctcatcacctgggctccctagccatggcttctgggtgtcaaccccacagttgcggcacggactacagcttgcctcggccaggggtccgggatcctcgaggggcggagagacggctggctgtctcgtcccgcgggggggcacgggcgtcagctgtgtcctctgggtgcgtttgggactctgccgcgtggtgtccgcgttgggtgcgcgcccccttctgg

SEQ ID NO: 156624 - DNA, 477 bp, Zea mays
  Clone ID: MRT4577_7441C.1
aaaactaaaaaactaaaaatagccacagcaaaccaaacatccattccttcatgcccgtgaccgccgccggcgagtctacccagccgcggggctcggtgccctggccatccatcccctgctaatctggatccggcctcaaagggagtcaagcctcctccagcctttcctttaaaatgcggattgtgtcttgcatcaagtctgcgaagagggcataacgaggaccacagtctgcagactagagtgtgcatgctgcacataacttgactgacactgatggccgccattatacgcgtctagaaacagaaaacgaaaagcacggagcgcacagattacctatgcaccattgaatgtgagaggcacaggctgggatgaagatgatgtgggtatcactctggaagaacacgactataaggctgatgataaggatgacaaaagcctagctgattgcttaaacaagcgcttttggacactctggct

SEQ ID NO: 156625 - DNA, 268 bp, Zea mays
  Clone ID: MRT4577_74420C.1
ggggtaggcaaaactggaaggcttgtagccacaccgccatacatatgatttgctcccgttgtcgttgagcagccggagatccttatgtgctgtggattctgaaacttcagagtttccgcagttctcctgatcctctcgattagagctgggttgcttttgcagcaaaaagtcaggcctgacggtttttaggcgcaagaacagtgacaagcctggcctggtcctgttagccgaagtatgatgaagtatttgtttgcctatccttctgaca

SEQ ID NO: 156626 - DNA, 624 bp, Zea mays
  Clone ID: MRT4577_74421C.1
ctaaggttttttttttttttttttgttagaatgtgaactgtccgcatttcactatcagcttaaacttttaggttgaacttctctatcagcttaagcttttaggttgaacttgttgatacatataatccaatccaatatggtatcctctatctttgatctctctgtacgtacactgctttcatgcttcttcagttgacagttttacacgctgtcatgcttgctcggctccagcagcaggtcaaatgaggtgagggagtacggccccacggaagcgcccatctgctgccccgcgttcgccattgggctcgacactggcgccaccttctctggctgctggaaggagttctcgtcaagcggactgctggacgtcagaaccgtctgcttcgatccagacttcttgacgccggtggccagttccgcaacggatatgttcagatccacagcttggttgccgaaattcaccacctttatcctgaggtaagggctcttgtctttagcgttctgccaagggatggcagacgcaaccagctgatcgtagctggagacctgaatggctgtaggatggaggatggcgccgctagattccttgaaaaagtgtagcatccaatagttgggacacccata

SEQ ID NO: 156627 - DNA, 510 bp, Zea mays
  Clone ID: MRT4577_74422C.1
ggggtcaaattaaaagcatatattcgggggctgatttttggaggccgggaacatttaagttagggcgggatcaagggcagccactaaaggtataggcaggtcccacacatttgaggctagtttattggcccttactggacaggagtccaatccaacaacaggaaaaaacgggtacctgggggaaatatttatatggaaaaaacaacaacgttttgggctagtttgctgggggcagttcgctaaatttgggccagggccaccctcgcctttgagcaagcgcaaaaaccacagggccgatgttttcgggggcctgaacagcccgtttttgtagcccacgaaaactatgccaaaccttttggggtaccccattgcccattcaaagttgcccagaaacaaccacccaaagtacccggggacataaactccgtccttaatcgcttgcccaactgaatttgaggaacccttttgaagaaaccgaccctcgtcgggtcgttaagaacctggccaagc

SEQ ID NO: 156628 - DNA, 250 bp, Zea mays
  unsure (1)..(250): unsure at all n locations
  Clone ID: MRT4577_74423C.1
gcatggtgcactactgcactccgnatttnancacctctatacttatatcctactggcgtacgtggatcccntagtctccactcctacaaaatcctcttcttcnccaacttcgcgtccgccggcgtcggcatcctcaaccacaccgggcttcatttcgtacgtaacacactctatccatctcctgcctattcttcttgcactgntgatctcggagctctggacagctattcgcctatactaataatgcatt

SEQ ID NO: 156629 - DNA, 150 bp, Zea mays
  unsure (1)..(150): unsure at all n locations
  Clone ID: MRT4577_74424C.1
gaaaacccananangaagaacccatatagaggcgacaaaacccccaaaccccaaaatgcgaaacaatgatcaagtccacagcacttccagcacaggccccagatctgaacccggacaatccacccaccgtctacttcatccaaactaacc

SEQ ID NO: 156630 - DNA, 830 bp, Zea mays
  Clone ID: MRT4577_74425C.1
aaaaaaatcttaaaatttttttaatggatagtttacataggtattattgtaagctgtcgcaacgcaaagttataattgcatattagttattgccatcgacactttttttccgtcacttcgcgccctctaaaattgactttgttattaggaattgctttaaagacaagcttatcctccctaagtcgtccctcgataaacataaacataaactgtacagtctatataaacccgtcaccctcctcatagacccagccgcgtcgcgccgcacaagaggtgagggcacgcgcacggcgcataagagctgggggttgccaagtgttcatccacaaccacaaacatcacgaatggatgctcccgcggcggccgagggctgcggcaagcacattgtgctcgtccacggcgcgtgcctgggcggctggtcctagtacaaggtggccaccctactccgcgcggcggggtaccgcgtcgacgcgccggacatggcggcatcgggcgccgacccgcgggcgctgcgggaggtgcccacgttccaggactacaccaggccgctgctggacctcctcgcgtcgctgccggacggggaccgcgtcgtgctcgtcggccacagcctcgacggcgtgaacgtcgcgctggccgccgagacgttcccggacaaggtctccgccgtggtgttcctctgcgccttcatgccggactgcacggcgcggccgtcgcacgtgctggaaaaggtgaggccatcacgcagcagtcggccagctgctcatgctctcctctagatttgagaggtcccgctcatggtgtgtgactgtacatgtgtccggacgcgtggg

SEQ ID NO: 156631 - DNA, 312 bp, Zea mays
  Clone ID: MRT4577_74426C.1
aaaggggtgacattaccacccttttaacaaaacgggataaaaaaatttttttttaaaaaccttttatccatcaacccccctattaaatacttgggggcctttttaagggccaaaaaaaaaagagggggcttggaaattacatcctaattaagacccccaaccccccgcaaagggaattttccccaattaatttttaaaaaaataggtaacaagacatttttacattctttttggcggggggaaaatcttttttccaaggaaagaaaggcaattttcaacaaatttccaaattttttgaataaaaacccccaa

SEQ ID NO: 156632 - DNA, 451 bp, Zea mays
  unsure (1)..(451): unsure at all n locations
  Clone ID: MRT4577_74427C.1
cccacacgcaccgacaccagcaccagctctagacgccagctctaacgtctnttttgtatttattgttatctgtattgttagcagttgcatttgaagtaggaagtagctgaagacacacctgcacacacagatgctgttctagatgctgaactcgatagccgcacacaaaacctagcacaagaacttggcaggagaacttgaaagatcagagcagagatcaggacatatgagctacacatatggctacaggctgacgggaaggctatctggtgggctatatcgccggctgtgttgggccctgtggaggccctggtagactacgagctcgactacaagatccgccagaacagccaccaccaccgccaggaccacctcgcgaagaaccttttcaggaacgctcccgggctggaggatgggcacctagatctctacctaacacttttgaaatcaa

SEQ ID NO: 156633 - DNA, 515 bp, Zea mays
  Clone ID: MRT4577_74428C.1
acttctcacaatactccagcactcgagctctatatcaatggcttctgagggtgaccggcctaccgacgtcgagctatctataaggcacaagtcgacatagggcgagtcagtcatctcctacctaacgcccctgacacagaagagcgccgcgtagcttgacatgcctacggcgacttaccaccataggtaacgctgtctcatccgctgatgttctctcggcgctgtctctcccctcaaccaaactggcgttcctccgtcgagtgctgcggatcctccacgcagaggctgtgttcacagtgaacaatcatacgttgcagcaggagctgaatcgcatcattcccgtgttctacctgctggtggacggatatccctcacgatgagctcatgtacgacaccgctctgaagctcggctgcacctcgacaagatacttcgaggtggagataagtctgacgatatgaactcaagagagacctggtctgctcacggatttgaggaggtgcacgcatcgagtctg

SEQ ID NO: 156634 - DNA, 424 bp, Zea mays
  Clone ID: MRT4577_74429C.1
gacctttgtttgtgcggacgcttgtgctcgcctgcaggctggggtgctaccatctgcaccgatgttgatggcacgatcgatatcaagtacaaccagaggttcagagacgtcccaaatgaacattgccgttatcggccatgtcaactctggcaagataaccaccacacgacagactatctacgagcttgtagggattcacgagcgtacgaccgagagcctcgcgaaggaggctgctgaagtgaacaaggaggccgtcaagcacgcctgggtgctcgtcaaggctaaggcttagtccgagagaggtagcaccattggtattagtgatgggatgactgagactatcaatgactactgcaaggtatatgaggcccttggacattgtgactgtatcaaggacatgaacaccagcacctacaaggctgac

SEQ ID NO: 156635 - DNA, 698 bp, Zea mays
  Clone ID: MRT4577_7442C.1
tttttttttttttgtcacctgcaaaatttggaatatattcaagcatacttcagcatgcaagggtccttcaaaacaatttgtcaaaatacacataggtcagttcgcctctgataagcaggcaaagggtagctaactagtatatgatccatgtctgtcaggatcacattgctgtctcgaacgattatgtcgtgtaaataagtagtggctatcgtgcaacctatagggtgttacaagtcatgaagctcagggaccacgagggccatggccttccaggggacatctacagtgcttctgaagctccatgaacctctccatatcgaacttgtgcgccgcgcaaagcttcctctgcctcgacaggaacagcctctccatgaagtcctggtacgtcgggtccctcgaggtgatgaggaagtaggcgtagccgacgagcaggccggacgcggtggtgaagaaggcgatcggctccgtcacgtcccacgagaactcccagaacgtgaggcggaagaagagcccgacctggcacatgaagaaccctaggccggaccacaggatgcgccggacttgcttgtgtgccagcctgtcgatcgcttccttcttctctcggagccgctcgaactcctcttttcttgggtcgttctctggcgcgagcgcgagcggcacggcccttctaaccaggtccaccacctaaaacggtcagt

SEQ ID NO: 156636 - DNA, 1556 bp, Zea mays
  Clone ID: MRT4577_74430C.1
gggcgggctccaaaccctagtctcagagcagccgcatccacatcctgcctctctcgtcccctggcggcgtccgcggcaggatggcggaatctacggcgaggacggggaaggatgtcaacccgcgcgagttcgttaaggcctactccgcccacctcaagcgctccggcaggatggagctccctgagtgggttgacattgtgaagactgcgaggttcagggagcgtcctccttatggcgattggggccttcccacccggccgccggggggagcgtgagaaactcggctacacctgcaaaatggatatggcaatggcttccttcgtcgccgctacgcaccaccacggcagtcacctggccgccggcttcccctactccgcgcgagcaggcaggagcgttggccgcagcggcgtcaccatctccattagagcccagaagaagagtaatagcgactctgggagtagtagcggaggtggggacgtgcggaccagcagcgggaggcgagtgtggcgtcgtcggaaactgaccaaagaagatgacatgttgcgttacaagttggatcgtatccctttcttagaagagaaggtgagaaaggtaagggagaatgggaagatcatatgcctggatattaatcagctgatgttatctcaagagaatagatttgcgttcaccatggaggtggctgaagaagctaatgcctatcttgagaagaacaggcatgaatatgggttaaagaagcctatactgcatgttctcagtgatcgcatgaatgaatctgggttttctcggcctgagggttacctttatccttatcctatcaagcctggcccttatttcattaaagaggaaggaaactgagtaaatcacatgctacttggatcgtaatgcacaagctgggaggcagcctcttttcagaaggaactcaaggaagtagtcctgtagagcttagtcgtgttgtatacactattcactctacaattgggaggaacaaaaaattctctgaaatatattgcgtaatcaaatgctcgaagaacttgaaatcatggtggcaggcgtcagaaatgttgcaataatatcttagtattaatgcaaagcgaagacaacgggcctttcaatttgggcggttgtatttgttgcttcagtgctaacaggtgaccatattccttaagcaagcattaaaacgacaatctgcagtgagaaccatatgaaagctgggccagtagccattcctcgtcaggattttttttgataaaccttacctgtcatttggtctttgttattgtttccatttggtaggaatctatgcgaataataagtttagaaaggtgactttcctttctagtaactaaggccaaagtaaactaaaacctatcatgttttagtagttgatacaatgccttttgtattatacttttctgatctgtgccagattatgtaatggcaccttagtcttggaatgctacatagcatgaggtgtgcttgtagttctttggtcatgtatgcattaacttatatggatctctattattttttgagcattaaagcatttttctgtaaaa

SEQ ID NO: 156637 - DNA, 325 bp, Zea mays
  Clone ID: MRT4577_74431C.1
tgcttgtttatgtgcttgtttatgtgcttggctgatcccaaaacttgtatggctgaggcggagggtaggattgcaaagtcgtagacccgggatatagtacggtaggagtggcctaggattactatgagtagtcatcattgaggagtctatgggacaaccaccgcccacgatactatggatacggagagtcctaataatgcgaagtagcggtccgacgagactgattgacatgttaatgatagtgcacgtaagtcctctgccggcaataaacgcgactcggttgagaatagggtcgctgatatcctagcagtataggtccatgtcg

SEQ ID NO: 156638 - DNA, 3407 bp, Zea mays
  Clone ID: MRT4577_74432C.1
agctcggaattcggctcgaggtgaacagccccgctgtggattcccagagaagaatttatcagtgaatttggagaatttgacaggagggcagaggcaatggtgggaattcaaatcacagcacatggataaggttctgtttttcaagatgggcaaattctacgaactatttgagatggatgcacatgttggagcaaaggatcttgatcttcagtacatgaagggtgaacagccccactgtggattcccagagaagaatttatcagtgaatttggagaagttagctgagaagggttatcgagttctggttgtcgagcaaactgaaacacctgaccagcttgaacttcggcgtaaggagatgggtataaaggacaaggttgtcagacgtgaaatatgtgcagtagtcacaaaaggaacactaatagaaggagagcacctactggcaaacccagatccttcatacctcctgtccgtgactgaaagttaccaacgaagtccaaataagagccaagacacatgtaccattggtgttagcatagttgatgtttctacaagcaaatttattgtaggacagttccaagatgatccagagcgccatggattgtgttcaattttgtctgaaatgaggcctgtggaaattataaagcctagtaaaatgctgagtccagaaactgagaaggcattaaacaacaacacaaggaagcctttaataaatgagctggttccgtccacagaattctgggacgcagaaaagactattgatgagataaaacagtactacagctcagccaataaacagaaaaaagccgatgatatacaagactgtgtggactgtctgcctaacttattacgcgagttaattggagcaggtgataaaacatatgcactttcagctctaggaggttccttattttatttaaggcaaacccttctggatgagaaaatacttccatgtgctgagtttgagccacttgcatgctcggggttcatcaacaatatccgaaaacatatgatacttgatacagcagcattggagaatctagaacttttggaaaatacaagaactggtggcctctcagggaccctgtatgcacaactgaatcattgtgttactggatttggaaagagattgctcaaacggtggatcgcaaagccactgtatgatcgcagagaaatacttcggcgtcaaagtgctgttgctactttcaagggagttggccaagattgtgctgcacagttccgtaaggatttgtctaggctccctgacatggaacgcctgcttgcacgtcttttctcaagctgtgatgaaaacaagagaagttcatcagttgttctttatgaagatgcatcaaagaaactgcttcaacagtttacttctgcgctttgtggatgccagcagatgttccatgcatgttcttctattagtacattgatatgctcagagggatctcaacttattgatttgctgtcaccaggcaaaggcctatcaaatatttcatctattttagaccgattcagagatgcatttgattggtcagacgcagaccgcaatggtcggttcattccttctgaaggttgtgatccggaatttgatgccacttgcaatgcaatagaagagatcaaatccagtctaaaagagtacttgaaggagcaacgaaagcttttgagacctgcatcggttaattatgttaatgttggaaaagatatgtacctaattgaagtgcctgagagtttgggaggttcagttcccagaaactatgagttgcagtctacaaaaaagggtttctatcggtactggacgccagaactgaaagagctaatattagaactttcaaaggctgagtcagagaaagaatcaaaattgaaagccattcttcagaatctgattcagctatttgttgagcatcacactgagtggaggcagctggtttctgttgttgctgagcttgatgtattgacaagtcttgctattgcaagtggttattttgagggaccaagttgctgtccaactatcaaagaatcaaatggcacagacgatactcctactttccatgctagaaatcttggacatcccattctacgaagtgattccttaggcaagggttcatttgtaccgaatgacgttaagataggtggtccagggaatgccagttttattgttcttactggtccaaatatgggtggtaaatcaactctcttgcgccaagtttgtcttaccattatactggctcagattggagcagatgttcctgcagaaaaacttgagctttctcttgttgaccgtatcttcgttcgaatgggagcaagggatcatattatggctggccaaagtacattcttggtggagctcgaggagactgcctcagtgctttcatcagctaccaagaattctcttgtggtgttagatgagcttgggcggggtacatcaacttctgatggacaagctatcgcggcttcagttctggaatatctagttcatcaggtgcagtgtctaggcttgttttctacacactatcataggttagcaatggaacacaacgataccaaggtatcgctgtgccatatggcgtgcgaggtggtcgagggaggaggaggtctggaagaagtgactttcctttatagattaacacctggtgcttgccctaaaagttatggtgtaaatgttgctcgattggcaggaattcctactaaattgcttcaaagagcgaatgaaaagtcgagtgaatttgaggccaattacgggaagcgacacaagatgaccaacgataagcacgtcagtgcacagagcgatgataagttttctgccataagggatctgttccgaattgtgaagacatggcctcgtcctgaagaccaggaagcgagtataagcatgctccgtaaattgcagaagcgtgccaaggtataggctgtggaaggctaggtaggcgattgttacatggcatgctcgcctggtagagatggcctcgttttgctaccttggtggcatcttttttgttgttggattggcgtcataccgagaggggagaaaattacgtggacacgggttccaatcgaggacagcattgccctaggtttagtgtggaagcagaaaaaggctcagtcccatcggatgtgtcaggattcattgatgggacgtggattgagaattctgcgtctacagctttaccatcccttccaacaattttgtgccctcactaattcccctaccaggccaggagccccagggtattggcctgtcctggtttgttcgagctcggtagggtgttggatcagtgctgacctgagacgtggagaaacatcccggactgtaactttcctgaagggttaattatgattactagatgtaaatcagaactactctctcgaagttgcaaggcaacttaggattaattttagtgcctttttgt

SEQ ID NO: 156639 - DNA, 528 bp, Zea mays
  Clone ID: MRT4577_74433C.1
aacaccctgccactggcataaaacaaaaaagatggcatccgatacaacagtcatggcagcagggaaaatacccccaacacaacacaaatggggtcttcttttcaccccagcccgaggggtgcctactcaaaaaacacaggaccctccacacaaaaaggggcctgaaattcacccagctttgggttggctttacatacaggttggcccttttattttacacaatcctcttccccttacctatggaaacagatcaagatgccaatggcaacatggtccccaacatttacaaaaaagggatcggggggcctctttcctggctggatcaatcccagagggacacaaacaaggggctggttcttaacttcatggccttggtcttgccaaaaaattctcacataactagcattcaagtttcccaaccagcttgggcaggtttgacgccccctgaaacacagttgttcccccacccttgagggattcccgcagctcatcctggcttatctttgggaacccaaaacgctcagtcca

SEQ ID NO: 156640 - DNA, 404 bp, Zea mays
  unsure (1)..(404): unsure at all n locations
  Clone ID: MRT4577_74434C.1
tatattcngcacgaggggtctggggcgggtcgcgcctccgcccccttcctatggggggcgagtccgtgcccctataaacccctgccgcacgcgcgcgccggggaaatccccccaatcccaatcacaatccccgtgcctcgtgtcccgccgccaggacatccatgggcaccgccgtatccgggggcgcggacctgtctcctgggccgggcccgagacggcggggccggccgccgaagaaccccgcccccgcccccgccgtgggggaggtgattggggactacnagcgcgagaggggcgcgaggatccgggagaacatggagcggatgcggaagctcggcatcctcgacctcgcgcagaccctcagctactccggcggcggctcgggtcgagggaccggcagggga

SEQ ID NO: 156641 - DNA, 629 bp, Zea mays
  Clone ID: MRT4577_74435C.1
aaaggaaggggttaattaaaacgggaaatgacaaggagttttttttgttgggcccaggaaaaagggactatggggtttcgttataaaaacgtacctccacaacgggggggaaacacaaaaggcaacgttgggacaggacagtcttgatggccccccgggggggcccctttgggtcagaaaagaaaaatttttaaattttggggcctttggggtcccaaaaggaagcttatgggcaataagggtcgggccccggtccgctggaaatcccgaaggatttcctttcaaaaacaaagaaaaaaaggttgtttccctccaaaaggacttaaaaaaaaccactggtttggctcccgccccgtttccaaacaggcaatgaacccggggggttttcaaccttttaaggccccctttatcttttagccaaaaacgcaaaagcaaaaaccccccgggggggtttcccctccctcgcacaggaaaaaaggaaatcccttgggggggtaactcatttttaaacaaaataacctcgacgaaaaaaaaaatgggtttttttgctgaaagggcaacaatggcaatccgatcattagtatcctcccacacaaagggccgcatccctttaaacttgttgggggggg

SEQ ID NO: 156642 - DNA, 526 bp, Zea mays
  unsure (1)..(526): unsure at all n locations
  Clone ID: MRT4577_74436C.1
gggggggggttttttttttttttttttttttttttttgggttttttttttttttttttttttttttttttttttttaaaaataaacataccaaaaataaaattccagggcatacaataggggaccacactttcatccgggacaaatagctggggggggcgagggggaattttaaacagaagggacacgggacgaactggcttagcactgcccttatcataagggcatatcacaggggccttttcagggttaaagggagatccccaacaaatgggggggaaaagcaggctgccgggggggaccattttcccgggggaacgggcgttgggtggggacggcacaatcaacgcggaaaagggggggggaggcaaggagcccgtaagcccgggcactccgtccttggggggcgccggccgcaacaactgtgaagagaggggcccgggggacggggtccccctggctggggggaagctcgacgccctttgccaggagtcctgcccgttnccggccatgagggggcgcttccc

SEQ ID NO: 156643 - DNA, 321 bp, Zea mays
  Clone ID: MRT4577_74437C.1
aaggcacgtacaattgcaaggaccagtgttggaacatacgatgccccatctttaacaagcggagaggtttgaataggcatgcgaacttattcaaaatataacgctgcatttaatccaacttcatttgctatactctgtaacagactctctcacgtcctacatgcgcgatccctatcgaacgcaaccacgggaaaagtttaacaacatttggcactgtaagtgccatataacatagtctccatttcaattgccgcttcagtgctgctgtcacaatattatttcggcatgacatcatttatgtcaggcgggctgatggccctt

SEQ ID NO: 156644 - DNA, 464 bp, Zea mays
  Clone ID: MRT4577_74438C.1
ggctgccctggggagataccccggcatggcagctggccctgggatggcggagccggtggtcaccgggcccgaggacgccctggggctggacctgcagctcagccttgcgcccgccggcttgtgacttggctggtcccgtcgtcgatggagatcgcgcgcgcgagctgtgccctgccacgcaccgtcgccttggtaaaagagaattgatcacctactagcttgctactactaaaaagtttgtactaagatcgatctttgctggctagataattagcactagtaattatgtttagttgctgggaatgggatttggatagctgcatgcatgtaagccacctgtaagattccggttctagctaattgatgtgcatgatgatcgcaggatggctatgctggacgacagaccctgtaaatttttggttgatccgtccatccatcaatcaatctctgccattttcttcagt

SEQ ID NO: 156645 - DNA, 169 bp, Zea mays
  Clone ID: MRT4577_74439C.1
gattcataccccgtgccatccgtccatattgcccagctacacgattacaaagcgattgttttatattggttttgacagctcgccgtgtccacaaagtgtgacgtacaattcctcccccacaaatatatacattacatgcctaccagcagcaatccgcaaccctcactca

SEQ ID NO: 156646 - DNA, 731 bp, Zea mays
  Clone ID: MRT4577_7443C.1
atctccctatacggagacgaagagagctgaagcgaagagcagcggcgcaaaggaaagggagccatgctcgcctcgccggcgctcgccggcgcccactccttcgcggcgtccgtgtatagaaacatcctcgttccctcgcctcccgtccccgcgccggcacgtcgcgcggcgctgtccgtcgtcgccaaggtcaaggtggccacgccccaggacgaccgcatcgcccgccacgtccgcctgcgcaagaaggtaagtggcaccactgagaggccgaggttgagtgttttccgctcaaacaaacatctgtacgctcaagtcatcgacgacacaaagcaatgtactctggcttcagcttcaaccatgcacaaatctctctccaaggaatttgaatactcggctgggccaacgatcgaaatagcacaaaagatcggtgaggtgattgccaagtcttgcttggagaaagggatcaccaaggttgtcttcgaccgaggtggtttcctctaccatggccgcataaaggctcccgctgattctgccagagagcacgggcttgaattccgagtcgtccaggcgtttgttcatatctccaggatcacctgtaatcttcttctttttttgttctctccatatgccgaacagagctgttttgtagtcactcgccttgttctacagggtgcaaagccatggcccatggccactcgttgaccaaaaaaaaaaaaaaaaaagcggcc

SEQ ID NO: 156647 - DNA, 153 bp, Zea mays
  Clone ID: MRT4577_74440C.1
cgggattcggctgccaaccactgactctcggcgtctccgttttacgaggactcgcggccgtttcacccgtaggttctcctagatctcctgcatcatcagtaacaaatggctgacggagaggaccttccgccccttgcttgtgacaatggaact

SEQ ID NO: 156648 - DNA, 189 bp, Zea mays
  Clone ID: MRT4577_74441C.1
ggtaccctccgagatctcccgcgaatccccataatattttcagcattcaaaaaccactccagcgaggcgcactagccaacgacctaacaccaatgcctaccaagtattacccccctgcgcttttgctttttatgacgcaccaatgcgttcatatcccacagtgctcacttgttcctaatgccagtactc

SEQ ID NO: 156649 - DNA, 327 bp, Zea mays
  Clone ID: MRT4577_74442C.1
cggcacagcacagggaagagactgctcggcttcggctggcgcatcgtgaatctccaacggcgatgaaacagggaatccatggaagcgacaacatctcaccactccactccaaggcgtcttctgaagccctccccggcggcgacgcgacccagttcccaatcacgggcgtggctggtactggcagcggcaccggccatgcaaggggtcggaacaagctgacgcttttccccctcattttcctcatcttcttcgaggtcgccggcgggccatacggcgccgagccggcggtgcaggccggcgggccccttctggcactcatcggattca

SEQ ID NO: 156650 - DNA, 1583 bp, Zea mays
  Clone ID: MRT4577_74443C.1
cattgtacccctcgaggccggccgggaaaagcgaagcagcaaccagcaaagtgatcagtgtgatcgatcacacactgccatggccgtcatgggcaaggaggaggaggagcagcagcagcagcagcagcagcacaaggaggaggaggtggtccaaggagatgtgcgagtcgtcgtccagcaggagacggcggcggacgaggaggccgagtcggcgctggtgcgcaagatctccggcctggccgccgccatcgccaggctgccgtcgctgagcccgtcgccggaggtgaacgcgctcttcaccgacctcgtcacggcctgcatcccgcgcagcaccgtggacgtggagcgcctgggcccggagctgcagcgcatgcgcgcgggcctcatccgcctctgcgccgacgccgaggcgctgctggaggcgcactactccgacctgctggccgccttcgacaacccgctggaccacctgccgctcttcccctacttcaccaactacctcctgctgagccagctggagcacggcctgctggcgcgccacgtcccgggcccgcccccctcccgcgtcgccttcgtcggctccggcccgctcccgctcagctccctcgtgctcgcctcgcgccacctccccgccgccgccttcgacaactacgacatctgcggggacgccaacgaccgcgcgcgccgcctcgtgcgcgccgacgccgcgctcgccgcgcgcatggcgttccgcacctccgacgtcgcccacgtcacccgggaactggccgcctacgacgtcgtcttcctggcggcgctcgtgggcatggccgccgaggagaaggcgcgcgtcgtcgagcacctcgggaggcacatggcgcccggcgccgcgctggtggtgcggagcgcgcacggcgcgcgcggcttcctgtaccccgtggttgaccccgaggagatccgccgcggcggcttcgacgtgctcgccgtgcaccacccggagggggaggtgatcaactccgtcatcatcgcccgcaagcccctcccggtcgtcgacgagcacgccgtcgccggggtggggcacgcgcacgcgcacggcgccgtgctcagccggccctgcctctgctgcgagatggaggcccgggctcaccagaagatggaggaggtggccatggagcagctgccgtcctaggcacaagatggattgccccggccggcagcccatgcaatcgcattgcatctatctcatcgatctacttacgtgtctacaccacatgcgtgataataatctgcagattgacctggctactagctggtatattgtcaccgtgattatattaagtttttgtttaacaaaagggtagaagtcgaagtccaagccggcgaaagaaaaaatactggagaaaaaaaaagagtgcacgaaggagacggaggcagagcgaacaggctggcctaatttcatttgtatgctaatgttacgtgtgtcaatgatgatggagtggttaaattattagtaatttcgaaaaaaaaaaaaaaaaaaaaaaaaaaaaaaaaaaaaaaaaaaaaaaaaaaaaaaaaaaaaaaaaaaaaaaaaaaaaaaaaacacc

SEQ ID NO: 156651 - DNA, 1769 bp, Zea mays
  Clone ID: MRT4577_74444C.1
cattgggtacctcgaggccggccgggaccgtcatctgtgaccgcctacgacagtgtagtatatatatacactacacagtgtagctagtatacctcgcccactctaaagcgaagcagcaagcgctctgtgaccgactgtgatcacacaccacgcgtccatggtcgtcatgggcaagcacgatgacgatgagaagcagcagcagatggagatggagatggagatggaggacgtacatgaagtaggagccgtcgaggtgctgccgctggagaatgaggcggaggcggcgctggtgcgcaagatctccggcctggccgccgccatcgcgaagctgccgtcgctgagcccgtcgccggaggtgaacgcgctgttcacggacctggtcacggcctgcatcccgcgcagcaccgtggacgtggagcgcctgggcccggagctgcagcgcatgcgcgcgggcctcatccgccgctgcgccgacgccgaggcccagctggaggcgcactactcggacctgctggcggccttggaggacaacccgctggaccacctgccgctcttcccctacttgggcaactacctgctgctgggcgagctggagcacggcctgctggcgcgccacgtcccgggcccgccgcccgcccgcgtcgccttcgtggggtccggcccgctcccgctcagctccctcgtgctcgccgcgcgccaccttcccgccgccgccttcgacaactacgacatctgcgcggaggccaacggccgggcgcgccgcctcgtgcgcgccgacgccgcgctcgccgcgcgcatggcgttccgcacctccgacgtggcccacgtcacgcgggacctggccgcctacgacgtcgtcttcctggcggcgctcgtgggcatggcggccgaggagaaggcgcgcgtggtggaccacctcgggaggcacatggcgcctggcgccgccctggtggtgcgcagcgcgcacggcgcgcgcgccttcctgtaccccgtcgtcgaccccgacgagatccgccgcgccggcttcgacgtgctcgccgtgcaccacccggagggggaggtgatcaactccgtcatcgtcgcgcgtaagcccgtgcccgtccccgtcgccggagtggggcacgggcaacgcggcacgcccacgggcacggcgccgtgctcaaccggccctgctgcctctgctgcgagatggaggcccggacgcaccagaagatggaggaggtggccatggagcagctgccgtcctaggcaggcaggcacacggcacacaccacaagcaacaagcatggatgccagttttacatctatctgatcgatctagtaaatagtaatcccctactacgtctatgtgcccacaccgcatggatatggtaataatccgcacagggtgcgcctaatttatatccgctagctaagggcatgtacagtagagagacaccaaaacggttctccaagcacaggagacaactaagagactttattgtacaatgaagtgtctataaacgtagtctattaataaatacagaattaaaaaaaaaaaaaatatccatccatccatctatagcagtattatgtatgcatccacatggtaataatctggctgaccgcatccgcatatggtcgtctcatcgtccatctataccttgaaagctactaattaattactgagttattattaatactgtttttactactactacgtactattaatattactacaactacctcatctagctggtgtattaattgattttgtctgttactactgt

SEQ ID NO: 156652 - DNA, 240 bp, Zea mays
  unsure (1)..(240): unsure at all n locations
  Clone ID: MRT4577_74445C.1
nttttnnnnntttttttttttnnnnnttttttnnntnnnccccctgaacttcacatgctttacaacacaagtttttggcaaccaaacaaaaaccgggcccaaaggcctttggggcggaaaacttttgtccggccggaaccgggccgttttccatttccggggggttccttccccttttggccggccacccccaaaggttcctttacctggtttttattggccatttaaggcctccttttt

SEQ ID NO: 156653 - DNA, 522 bp, Zea mays
  Clone ID: MRT4577_74446C.1
cccccccctcgagtttttttaattcccttttttttttttttgtcaaagtgtcaaacgcgctttctatcaattcttcaaatgtttcctttcctgttcatcatctacagactacagaagcatctttacacgccacgccatcgataatcacccacacaaaaactgcacacgatcccttctttactcctaagtcctaaccctttgacacatgcatatactacttgagcagttgagccggccatgcccatcgatgctcatgctcagcgtcagcgtcagttgaggtgaaggaacgcgaggtcccttgtgagcaggtaccggaaggccgggttggggggcacccagtcgacgaccttgcccgacgacgccctgccgcgctgctggcaccgttgcacggccaccctaatggtctccgggagggggggctgaaccatgtccacgaggccctgcggggacagcctcacgtccttggcgtacgcctccaccagcttggggagaagaagtttttgctccttccacaccccggcc

SEQ ID NO: 156654 - DNA, 190 bp, Zea mays
  Clone ID: MRT4577_74447C.1
cttttccaaggggttcttttattttttttgggttttctggttcacaagggtacaaaaccctttaaagctccttgttggaactaggttattaatttacaactttacaagagtaattaaagacaacaaggttgataaattccaatttgaccctatctaaaactctgaacacttccctccccagaatcggggt

SEQ ID NO: 156655 - DNA, 678 bp, Zea mays
  Clone ID: MRT4577_74448C.1
ctcggacggccgccatgtgaggatactgcagaatcgccctttcgagcggccgcccgggcaggttacaagcttttttttttttttttttttttttttcttttttttttttttttttttttttttttttttttttttttttttttttttttttttttttttttttttttttttttccaaaaccccctttttccctaaaattaatcccggcgggggcgggacccccctaggggcaaattccaacacactggggggggttcctaggggaccccaacccgggcccaaattgggggaaaaaatgggaaaaggggttccctggggaaaattgtaatccccccacaattccacaaaaaaaacaaaccggaaaaaaaaaggggaaacccgggggggccaaaagggggaacaaactcaaattaattggggggcccccaccccccctttaaaagggggaaaacctgtggggccatttaaataaaaaaacccgccaacccccggggaaaggcggtttgccttttgggcccttttccccttcctccttaaatgactgggtgggctggggcgttgggggggggggagcggttaaaagtcactaaagggggggaatccggttttccacaaaaccggggaaaacccaggaaaaaaatgggaacaaaaggcccaaaaaggccaaaaacccaaaaa

SEQ ID NO: 156656 - DNA, 318 bp, Zea mays
  unsure (1)..(318): unsure at all n locations
  Clone ID: MRT4577_74449C.1
gttggaagtgaggcagtagggtcactatggaaatgaatagacggagaggcattggcagacataatatatgctagactttcgagttgccgtgtttttcgaagaaacttagaatcttgtattattaggccttgctagcaacaaggtgcagatgcctctccgtttgctgttgtactttagtgtaacttaccttccgaatgtattattaggcgttgctagcaacaagatacggaggttatacatttgattttcagtaaaaaaagtagactctttgttggngaaaaaaaaaaacaaaaaaaaaaacaaaaaaaaagggcgggc

SEQ ID NO: 156657 - DNA, 893 bp, Zea mays
  unsure (1)..(893): unsure at all n locations
  Clone ID: MRT4577_7444C.1
agggatgggacagggggggggctcattaggggccttttttttttttttttttggaccaaaatgagtgattgcacatgatatgtcctcataaacgtcagaacacaagactcttacgaaatggaaaaaaaacgtgacatggtcaacgagtggccatggctttgcaccatgcagaacaaggcgagtgactacaatctgttcggcatatggagagaaaaaaaaagaagattacaggtgatcctggagatatgaacaaacgcctggacgactcagaattcaagcccgtgctccctggcagaatcagcgagagcctttatgcggccatggtagaggaaaccacctcggtcgaagacaaccttgttgatccctttctccaagcaagacttggcaatcacctcaccgatcttttgtgctatttcgatcgttggcccagctgagtattcaaattccttggagagagatttgtgcatggttgaagctgaagccagagtacattgctttgtgtcgtcgatgacttgagcgtacagatgtttgtttgagcggaaaacactcaacctcggcctctcagtggtgccacttaccttcttgcgcaggcggacgtggcgggcgatgcggtcgtcctggggcgtggccaccttgaccttggcgacgacggacagcgccgcgcgacgtgccggcgcggggacgggaggcgaggggacgaggatgtttccatacacggacgccgcgaaggagtgggcgccggcgagcgccggcgaggcgagcatggctccctttcctttgcgccgctgctcttcgcttctgctctcttcgtctctctccgttatgggagattttttttttttttttttttttttttgaatttttttttcnccggccggctcgaggtcccaatg

SEQ ID NO: 156658 - DNA, 230 bp, Zea mays
  Clone ID: MRT4577_74450C.1
ttcccggggatcctatcaattagctatcggggaactcaagcctgttcaataacttttcactcccatacaggagtacgctggatagcttaaagttgccgccgcctcaagacaaaaatgatgcacaggtaccctctacgttttgggacccacctcgcccctgaagtataactttccatgttgctctttgtccagaggggacatctcacagggccctccatcctggactcatc

SEQ ID NO: 156659 - DNA, 350 bp, Zea mays
  Clone ID: MRT4577_74451C.1
ttttaattaaaaatataaaaaacaaacagacggactaattttaaaaaaaaacggcggtataaaacaacaaaaccaccatacatcctatagaactacccttctttccgggccttctctctaaaatcacccctcttcctaccccctccctccataccattctcttttctttgctatcccctaatttaaactttccgcccctggcttttccccctttcctctggcacaaccttgccttccccaatttaatcctgcttgagccctttcccccttttcctaactgggtttctatcaaaaagcccagccctcttcccctttactcatcatcttcccaccctaatgacccatctccc

SEQ ID NO: 156660 - DNA, 490 bp, Zea mays
  Clone ID: MRT4577_74452C.1
cccccaaagctctattcctaagcttaatatacatataaataacattgcgcaataataaataaaacatttggctataacgtgcatctctgatatttggctttcatacttgatgcgtcttggcatctttcgtcacggcggcagggcccctcggtgagtctgtgtccctctcctccagcgccctgccaatagtctcgatgagtctccggtagaggaaggactgcttggaacggggcttgcaaatacccaagtggtcgtctggtaatttataataatctccgaattcgattttggccgatttctcagtcacaacttcgtagctcaacttgaacggggtcaatacggtcggattgccctcagctatgctcaccacctccaattgcctgctgatccgcttgacggtcctcaagaagcggtcgtgtagtttcagcagcgaactggagttctcctccatctcgcgcacctccacggagggcgagagcagcatctgcat

SEQ ID NO: 156661 - DNA, 343 bp, Zea mays
  Clone ID: MRT4577_74453C.1
atatatatatatattttttttggttgtaaaaagaccagaagcaacctttgtcattaactaaattaattcaaccaacataaattttgaaaagaccagaagcaacctttgacattaacttaattaattaaaccaacatgggcgtggcaaaaattgagttttaacattatttttgcaatgccaccaacatatgtgtaagtgccataaatagggatacccaaataacaaccgtaaaatgcttaaacgcttgatttgaaaaggattataaacaaatatttatacaattttacctaagtaaggaaattttgatttacaatcctgaaaaactgtaattagagggtaaaaa

SEQ ID NO: 156662 - DNA, 627 bp, Zea mays
  unsure (1)..(627): unsure at all n locations
  Clone ID: MRT4577_74454C.1
aagaaagctaacatatttcctttttttttttccaacaaaaaccaatttacaaatttggggggggacagcacaaaaagagcattgggtcccccccccaaagtttttacagatcccgggctttcccaaaagcagggttcaactcggaggaagagggacgggaatcaatttacctagcgggggggggggattaaactgacaaaggggttgagctggcggacaaaactggaaaaattgttgggcttaaagggcccggggagcaccgtttggaaaaaaacaaaggggtcggcaaaaacaaaactgttgttgccgttgccccagccgatcaccccgtggcgggccccgggggtgccccccccccccccggggggggggggggtttttcccaaaaaaaaaggggggggggggaaggattttcttcccgccgggttaacaaaaagggggggggggggtgggggcgccccccccccccgngagggcgggggggggaggggggtttattaaacccccccccccccccccggcgcgttttatcccccgggggggggggggctttttttttttttaatcccccccccccccccggggggggaccctcatcttcttttttttttttataaatctgggggg

SEQ ID NO: 156663 - DNA, 402 bp, Zea mays
  Clone ID: MRT4577_74455C.1
cgtgcatatacacctgttacctcttgggttgggtacggtcgggaaaaaactgacacttgtttatactggaccgcaggacacgtactatgtgcattgacaatgtcatagaacatggttacatgcatgaacataacctttcgtaggagcgaacatacaatgtggcactgcctttcgcatatctgtgacatcattttaaaatctgacgctagagggcggagctctggatgcaacagcacaaaccaaagacttgtacatgttcagaagcctctatattggctgggatctttgtatacatagtctgccggctgggactctaccacttatgacgatttgggcaagacatagaccccgccttggttatttactgctctgccctttcggcaacccttaaaaatgctcaaa

SEQ ID NO: 156664 - DNA, 520 bp, Zea mays
  unsure (1)..(520): unsure at all n locations
  Clone ID: MRT4577_74456C.1
aaacaaatatgataggattctaatagataagcagagttacattattataggactaggttaccatattagatctatcatataaccgcacaccttccagcctatataaatacatgccaccataacacctcaagccatcaaccatagacttatctcctctatagcctcgcagcagtgccgctgccatccaagctacaacagtctgcagccaactaagctcgctgccataagccaccatgaccatctcgtcaaagttcgactccctccccaactctagcgacaactccgatgagttaatttgtcaccgtccattcatcttctgagacaacgtagaacatcattatgaccggctcgacgagagctttgtcatcgcgcttctggttcatcgatcggatctccgattcatgttaatttgcgaaaaaaccgagatgtctagcagcagcgcgagatcgaagggcttggttggaaggtnngttgttggtaggttnggggtntttccctgcgtgntaggnttgnccctncc

SEQ ID NO: 156665 - DNA, 401 bp, Zea mays
  Clone ID: MRT4577_74457C.1
cccacgcgatcgctcgcggtctcgactgcactcacgaccggggattcatgccaggggctataccgggggctcatggggggattcaggcatgtcatacgccaactctgaccgatgacttcggagatcattccggagtacaaactggaggacgaacttgaggacatgctcggggagctgcacctggtgcagcagctaaacaagcgggtgtacaagcctgtgtccaagctcgcgaccaagggcgcgatcgtgctgaagaaggcaatgcaactatcaaagcaactggcaaacggaccgctgcacgagccacatgtagggagatctggaaggagagcaactaagctggggtcaccgcggcggataccaaagcataaaaaaaaaaaaaaaaaaaaaataacaataac

SEQ ID NO: 156666 - DNA, 399 bp, Zea mays
  Clone ID: MRT4577_74458C.1
cccacgcgtccgcccacgcgtccgcccactctttctcccacgcgtccgatttgcaaaggaatgagtttttcatttgccaatcgaccttcttcaaccctctagatcgaaaggccaattttttttttcttttagtttttgttattatttcgcattctttttaccttttcaattcttcaaaaattctctcgactgaattcacgtcagaacacggaatcataaagatcaattttttgcatcgtttttattaaaatttgtttgctaacaaaacatagaaataaaaaccaaaaaattgaaattccttatccgttttggcgaattgaactgcttgttcaattgtgtttgttgaattctatgcttatggaacctcttttgtactatgatattcttattcttcttgtt

SEQ ID NO: 156667 - DNA, 455 bp, Zea mays
  Clone ID: MRT4577_74459C.1
aggacaaaaaagtcccatgggggcccctctcggccctcccattttaaagggcaacctgaaacaatacttgggtgtttttggctcaatctttggccccaaacccaacaacccaatttggggggcttatttcatcccggccttttattggaacccaacccccaaaaacaccccattgcacctccggcacccaaaggtttgggagtttcatttcaacaaaatatacctccctggggcccaaaaacaaaagggcagacccccccaaaaaaattacaggcatattttttaacgggctcacaggacccttacaaggggagcgggatggccccagaattacaaaagggaaacctcagtgggagggaattgggttggctgctcctattgacaaaaccttgggaaaaactggtgaccgcaagcatagcttaaaaaacctcaaggcccatgacattctttttttc

SEQ ID NO: 156668 - DNA, 1300 bp, Zea mays
  unsure (1)..(1300): unsure at all n locations
  Clone ID: MRT4577_7445C.1
acactcctaagggcgattgggtccctcgaggccgcggccgggccgggatctcccataacggagacgaagagagcagaagcgaagagcagcggcgcaaaggaaagggagccatgctcgcctcgccggcgctcgccggcgcccactccttcgcggcgtccgtgtatggaaacatcctcgtcccctcgcctcccgtccccgcgccggcacgtcgcgcggcgctgtccgtcgtcgccaaggtcaaggtggccacgccccaggacgaccgcatcgcccgccacgtccgcctccgcaagaaggtaagtggcaccactgagaggccgaggttgagtgttttccgctcaaacaaacatctgtacgctcaagtcatcgacgacacaaagcaatgtactctggcttcagcttcaaccatgcacaaatctctctccaaggaatttgaatactcggctgggccaacgatcgagtttgatattggcttccaggaaatagcacaaaagatcggtgaggtgattgccaagtcttgcttggagaaagggatcaccaaggttgtcttcgaccgaggtggtttcctctaccatggccgcataaaggctctcgctgattctgccagagagcacgggcttgaattctgagtcgtccaggcgtttgttcatatctccaggatcacctgtaatcttcttctttttttgttctctccatatgccgaacagagctgttttgtagtcactcgccttgttctgcagggtgcaaagccatggccactcgttgaccatgtcacgttttttttcgtttggtaagagtcttgtgttctgacgcttctcgaattgatataagtatccatctctccccatgatatcaaaaaaaaaaaaaaaaagcggcccctataagttatcagctccttttactttgcttgagaaactctggtcttggttgaaatgtcaatagcacttcaaagacagtcagtaacagagagtttactggttcctttgcttattgtatcattcggttcccccatatagaagtgcaagattgctctagtgaaaatgcatgttctttccacttgtagcatcattggaaactaggtgataaattatctggtaagggctaaggacttcaatgtgcaattaattatctatgacccaatcagatgtatatactctgtaacgacaatttcagattaccatggtttgatctcctacttcaatcacgccgattgtttctactagattgtgtaatcactacnaatatgcatggcattcctgatttctccacaagaatagacacgggcttatgnctctgatca

SEQ ID NO: 156669 - DNA, 2628 bp, Zea mays
  unsure (1)..(2628): unsure at all n locations
  Clone ID: MRT4577_74460C.1
cgggatcccactcgcagcacgagcgctcaccgtctcgtctcctcctccccacaaaaagccgctgaattgctccgtcggcgtcatgtgtggcatcttagccgtgctcggatgctccgactgctcccaggccaggagggctcgcatcctcgcctgctccagaaggctgaagcacaggggccccgactggtcgggcctctaccagcacgagggcaacttcctggcgcagcagcggctcgccatcgtctccccgctgtccggcgaccagccgctgttcaacgaggaccgcaccgtcgtggtggtggccaatggagagatctacaaccacaagaacgtccggaagcagttcaccggcgcgcacagcttcagcaccggcagtgactgcgaggttatcatccccctgtacgagaagtacggcgagaacttcgtggacatgctggacggagtcttcgcgttcgtgctctacgacacgcgagacaggacctacgtggcggcacgcgacgccatcggcgtcaacccgctctacatcggctggggcagcgacggttccgtctggatgtcgtccgagatgaaggcgctgaacgaggactgcgtgcgcttcgagatcttcccgccgggccacctctactccagcgccgccggcgccgggttccgccggtggtacaccccgcactggttccaggagcaggtgccccggacgccgtaccagccgctcgtccttagagaggccttcgagaaggcggttatcaagaggctcatgaccgacgtcccgttcggggtcctcctctccggcggcctcgactcctccctcgtcgcctccgtcaccaagcgccacctcgtcaagaccgacgccgccgaaaagttcggcacagagctccactccttcgtcgtcggcctcgagggctcccctgacctgaaggccgcacgagaggtcgctgactacctcggaaccacccatcacgagttccatttcaccgtacaggacggcatcgacgcgatcgaggaggtgatctaccacgacgagacgtacgacgtgacgacgatccgggccagcacgcccatgttcctgatggctcgcaagatcaagtcgctgggcgtgaagatggtgctgtccggggagggctccgacgagctcctgggcggctacctctacttccacttcgcccccaacagggaggagctccacagggagacctgccgcaaggtgaaggccctgcaccagtacgactgcctgcgcgccaacaaggcgacgtcggcgtggggcctggaggtccgcgtgccgttcctcgacaaggagttcgtcgacgtcgcgatgggcatggaccccgaatggaaaatgtacgacaagaacctgggtcgcatcgagaagtgggtcctgaggaaggcgttcgacgacgaggagcacccttacctgcccgagcatattctgtacaggcagaaagaacagttcagtgacggagtgggctacaactggatcgatggactcaaagccttcaccgaacagcaggtgacggatgagatgatgaacagcgccgcccagatgttcccgtacaacacgcccgtcaacaaggaggcctactactaccggatgatattcgagaggctcttccctcaggactcggcgagggagacggtgccgtggggcccgagcatcgcctgcagcacgcccgcggccatcgagtgggtggagcagtggaaggcctccaacgacccctccggccgcttcatctcctcccacgactccgccgccaccgaccgcaccggcgacaagctggcggtggccaacggcggcgggcacggcgcggcgaacggcacggtcaacggcaacgacgtcgctgtcgcgatcgcggtgtaatagtaatgaactggaggataaggacgaacgaacgactggtaggtgtggcgtgcctgcagctatagttgcccaccggccggccatatatatcgatcccggcccggcgcggcagcacgtgctattgttacgttgtcaccagcgtacgtgtctgtgtagtgcctcgatcgtatctgtacgtctttaggaaaaggtgtgtccgtgtgtattgtatgtgtgtgagcaagcgtgcgtgacgcgctctgcctgtgtgacaaagcagagcagtacaagctcaggcattttctgtccgagcgatgatttgaactggatctatcatgtctgaattgaactcggccggacgacgacctaccgtaactaaaattattcccagctggatttcggtacgtgtccccgttgttcgttctcgcggctgtgactgtgaccgtgaccgaacctgctgctacaagtgcgcgtagaggatctggttccacgtgtccggcacgccgggcacgcaccagtggatgcagtccgtgtgcgtctgcgggtcggccctctgcgcgtcggtgagcagctcgccgccggtctcggtgtacacggagacgtgggcgtcgacaaaataacaccgtgagctgcgtgacgttgagcagcgtgacgggcacccgcatccggcccaccacgtcggacatcacctccatcatccgccggtccgcgccctgccccagtaccccttccgcgtgacgngcaacgtctcgttgtagcaccggatgccgccctcccggccccagtcctcgctcctc

SEQ ID NO: 156670 - DNA, 123 bp, Zea mays
  Clone ID: MRT4577_74461C.1
attcgacatcctctggcaacttacttaaggtagtgccaacatatcaatggggatcgctcgggatagtggagttgcatcaataggggattggcggatcattctggtaaacagggggcttttggg

SEQ ID NO: 156671 - DNA, 224 bp, Zea mays
  Clone ID: MRT4577_74462C.1
cccacatgggaacttggatgcaaaatacgggaatggttttgggttttatgcaacatgcgagtaatgaatcctcctaataaatgcgtgggggtggatatatatacccctcctgggtggggaaaaaaaaatccggcctggaacggcctatttttaaattagctaaaagtcttcatcctgtgttggccttgggcaaggtgaggatggccttttacaggcggagtttt

SEQ ID NO: 156672 - DNA, 479 bp, Zea mays
  Clone ID: MRT4577_74463C.1
tttttgactccacccacccgcccgctgcctccgccggatctcggcggactcggatccgcccgaccaccccgcgccgccgccgcgcagcagcagcagcagatcagagaagatggccggactcgacaccttcctcttcacctcggagtccgcgaacgagggacaccctgacaagctcagccagcaggtctcagatgctgttctggacgcttgccttgctgaggaccctgacagcacggtcgctcgcgagacctgcaccaagaccaacatggccatggtcttaggtgagatcaccaccaaggccaatgtccactaccagaagattgtcagggagacatgccgcaccattggttccatgacaaacgatgggcggcttgacgctgaccactgcaaggggcttgtgaccatggtcccacacctgccctggctatattgagcgtagcgcacggccactgcaccacacgccccgaagagatcggaga

SEQ ID NO: 156673 - DNA, 783 bp, Zea mays
  Clone ID: MRT4577_74464C.1
gggcgattgggagccgcgaggccggccggggcgtccgcgtgctgcgtcttcaccaggctcccggtcgccaccgcgcctctcgtgcgcgcggcggtccggcgtcgatgctaagcccttcccgctccatcgcttccgcctctcgtgtaattctgaaatggaccaacctctccatctcgtgcacgtcaagattctcgccgcggaccttctctccttaaccgtacggcacacctctccgacgacgttcctccgctgcggccgtagggttgcgcgtgcggagctcgtcggagtcgtcgtctcgcgtgaccgcagggagaggttcctccgcttcctggtcgacgacggcactgggtgtgtgccgtgcatcctgtggctgaaccaccagtacttgaatgctaggacgtcctctgggccatcgtcagaccatgatcctactgcagagatggcgctgaaaatgtcagaggaggtgcgtctaggcacccttttgagggtgcgagggaagatcacctcgtatcgtggtgcgatccagattactgttagagatgtggttccggagaaggacccgaattcggaggtgctgcattggttgcagtgtgtccgcctggccaaggagtgctatgatctgccaccaccttctgctcaaggtcgcacttgaatggggtttaccatgtccatgtgtagtatgtacaagtttatctatctctgcacttgctggagacaatctcttaattctttgctcttattcaaaaaatctttacgaaacacttattcacatgttattgatat

SEQ ID NO: 156674 - DNA, 624 bp, Zea mays
  unsure (1)..(624): unsure at all n locations
  Clone ID: MRT4577_74465C.1
cggctttngatttcaacctggnaaaaggccgcgacggcatggtcgcggccctgatttcaatgtctggccgttcggctagatgcgcggcccgccgcgtcccctcaggccgcccaccagcagggagacgacgaacaggataacggcgatgatggcgatgaatttggcgatctcgaacgacatgcccgagatgccgccgaagccgagcacagctgcgaccaaggcgatgatgaagaaaataatagcccaacgaagcataggcgaaccctccgaaagatgttgacgggagcgggctttcgacctctcccgtcgatagcgtcgcttgcttgaaacaacgcctcggagacttggccgttcctttaacgtcggtttcggactctgcttttctcggtaaaggcggccgccaccatggtggccaacgcggggttgcgcaggaagatgaagccgccggccagagccgctgcggcgcccaggatcgggcgctgctggaacagccgcagggcccgcatgcccaggccctcgggctcgtcgtattcctcgtcctcgtcatcaccatgcgcccgccgcacgaacaccagggcgacgacggccgcgatcagggcgaacagcagggcggtcagggcggcg

SEQ ID NO: 156675 - DNA, 430 bp, Zea mays
  Clone ID: MRT4577_74466C.1
ggggcgctgcggacgcgtcggatctgagacgaggcgagactaccccccctcccctcaaccggggctcggtttaccccatctcatcccactgactccacccacccgcccgctgcctccgccggatctcgtcggactcggatccgcccgaccaccccgcgccggcgccgcgcagcagcagcagcagatcagagaagatggccggactcgacaccttccttgggggggggagtccgtgttctttggacaccctgacaagctctgcgaccaggtctcagatgctgttctggacgcttgccctgctgaggaccctgacagcaaggttgcttgcgagacctgcgccaagaccaacatgggcatggtctttggtgagatcaccaccaagggcaatggcggcctccataagattggcagggagacatgccgcaacatt

SEQ ID NO: 156676 - DNA, 258 bp, Zea mays
  Clone ID: MRT4577_74467C.1
gcggcgagcggtggtgttaccgccggtttgtaacggtttgatggaaggtcgcgcgccgaagaagagcgacaacatctagtactacgagatcctagtggtgcccaagtaggggtaataggatgaattcaagattgtctagcgccaggctgttttaacgaaccactctgacaagggcaggagaccctgacaagaccaaggagctcgcaccagcctatgaggtattgagagacccctagtaatcatttaagatatatcatt

SEQ ID NO: 156677 - DNA, 201 bp, Zea mays
  Clone ID: MRT4577_74468C.1
cccaacccctttttttccttataaataatcccttcccatttaaaggggtaattcagggaattgctcaccctgccccccggggggaggggggacactaccctactaatcgccgttaaaggagaaaactagcgagctagggagctagccaggggctccattacattattacagaccctgcccggggggccgttcaaaagggca

SEQ ID NO: 156678 - DNA, 309 bp, Zea mays
  Clone ID: MRT4577_74469C.1
cacctcaggggcgcatcagggtgcattgttagacacatttggcgacatttactaggagacagaccttatcgcccgagcatataacaaagggcgaccatgtaagctctacataccagagccaaaagagatacgacacgagacaatcgctatagcatgagcacgctcacatataacttgcatatcgaacccatgtcttccgagaaatgcatactagaggctgattaatgacagtgtgtgaaacgcgcaccctaaccaaaatggacagtacgcatattagttgagagaactactgacttggaacaggatggg

SEQ ID NO: 156679 - DNA, 135 bp, Zea mays
  Clone ID: MRT4577_7446C.1
ctgaggaagattccgtgacccggagcagcctcactgcggacggatcttgaggcatggagggccacctccagggtggtatggaagaggtcatccaaccatggaccttggaccacactgattaagagcagaagcttc

SEQ ID NO: 156680 - DNA, 334 bp, Zea mays
  Clone ID: MRT4577_74470C.1
tggtctcgtggggataagcacaggaagaactgccctatctctgacactagtaatagtgatgctgcctgtggcggccacatggccatcaaggtgcggccattggggaaaaggcacggagaggcactccatcataataaagccaagcggaaaaagtggatggatagaagtccaagaatccgggtccaatcgtttgaacaatggggacgggcagcctatgcactatgaagcagaagcgcacgactccttaaagaaaaacgaacagcctaagaaaaacagaagagcaacatgactgacttaagggacagaggcatctacgctatcaacacaaagtgct

SEQ ID NO: 156681 - DNA, 262 bp, Zea mays
  Clone ID: MRT4577_74471C.1
ataaacgatccaggctttcgttctcttgcatgcaaccctatagcttttctctagggccacctattttaatttcgcgggccggcgatctccaccgtcttccctgttaaacccctggcggtccccaccttattccccctcgttgcccatccccctattgcccgcgtagccgttatccctatcagcccctccccaatggcctttcccaacagtcgccccccctttacggaaaatggaaccccccctggggcggccctttcccccc

SEQ ID NO: 156682 - DNA, 192 bp, Zea mays
  unsure (1)..(192): unsure at all n locations
  Clone ID: MRT4577_74472C.1
tgttacagtacgcggaaaaagaaagatacngatgctacntgaaggcaaagtgttacagtacgcggaaaaagaaagatacngatgctacntgaaggcaaagtcccggtttgacagcttttgccgtgaaggaaaccatcatcataaccatgcatcatgctcactcaaacatcaggccgatcagcctcccctgcc

SEQ ID NO: 156683 - DNA, 296 bp, Zea mays
  Clone ID: MRT4577_74473C.1
gcgtgcagaataacaccagaccttatgccagaggtcgaaaacctgttcataggggacgtctgaaagctgcataacacgcctctgccaccacctaggatgcagcaagatcctctgccacatggccaatgatatcaaaatcgaaacctactgcttcaaggccaaatgttgcacgagcgccagacacctcacctgatgccgctgcttcataacctgctggtcctgaagattccacggctgcacatggtgttcgaaactccacaggtcctgatctcaccagccaattgacagcttcgaac

SEQ ID NO: 156684 - DNA, 128 bp, Zea mays
  Clone ID: MRT4577_74474C.1
acctggagaaagtttatggcttccctccaggtactcaaccgctccatgctccccttgcgacagcttgaacatgttgcggttcagtagctgacgcgagttcatggcttccctccactcgtcgaaagtct

SEQ ID NO: 156685 - DNA, 259 bp, Zea mays
  Clone ID: MRT4577_74475C.1
acaagcaaacacaacaaatgcttgatgttccttttatttgggagaattagaattttagaaacaaaaaaaaatgtcccgacgacggttacaaataaaggcgcgccgccggcagttaatgattggtaaaacattctatggccgttcgggaatgggaaatccatccatccatccatccatgacggaatttaccttaatcgtccttgggagggtcggcaaaaaaggatttgatggaggccatgatctggggttttttcccggg

SEQ ID NO: 156686 - DNA, 1515 bp, Zea mays
  Clone ID: MRT4577_74476C.1
cattgggtacctcgaggccgggggggaaattccagttgctcgctccactcccctcccccggtcccgttccgtcggcggccggacaaaaccgccagactctctcgtcccccggcccggccctcccagacccagttccatccttttgcttgcttgcggttgcgggcaaccgctgtgatagagcgagcgagcgacctgtagtacgggagagggttggaaggagcgaaaggagagagaggttggtggttgtttggtggaggagaatagttggttgtcttcagggagggagagagggaaagatggagcgcaaggcggtggtggtgtgcgcggtggtcggcttcctcggcgtcctctcggcggcgctcggcttcgcggcggaggccacccgcgtcaaggtttcggacgttcaaacaagcggcagtcctggtgaatgcatatacccaagaaccccagccttggcactgggtttaatatctgccgcctctcttatgctcgcccagtccatcataaacgcagtcgctggttgcatctgttgtaagaagcatcctgttccctcagacactaactggagcatagccctgatttcgttcatcgtatcttggtgcactttcataatctcgttccttctcctactgactggggctgccctgaacgaccagagaggcgaggagaacatgtacttcggtagcttctgctacgtggtgaagccgggtgtcttctccgggggagcggtgctggccctcgccagcgtggcgctagccatagtctactacgtcgcgctgtcatcatccaagggccctccgccggcgttcgcagccccgcagaaccagggcatcgcgatgggccagcccgtgatcatcccgcagcagagcagcgagccggtgttcgtccacgaggacacgtacaatcggcggcaacaggtcccgtgacctgaccacacagaggtctatggttggttcggttggttgtgcttggtctgtataggttgcaggttagaacagtagccgtcgccattgctgttatagctagatcctgttctttttgtttttgttctacttgtaccctcgtgtttgtcgagcatggaatgtttggttctgaatgaactgggtaatgttgaagagagcctgatggttcgagttctgtaaacgtggggaaaaaaagctgtttactcgcatgagttgccacgattatgctcttgaactcgggctgaccatctatgtagctgcctactgcactggccttctgttggctcgccgtgtgctcaagacccgtgtgttagatgaggaatatgaggacaatgttgcaggccactggtgaggatatctctggtgcaccagatgatgagaggaggcctttccgagctctcttgtatgttggtcttattaagactacaactgggaaccgcgtatttgaagtcctcaagggacctttgtatggtcgtctgatatatgcctcacagtcagaagagggttgctgctcccactgacggtgaccagcacttgactgctgatatccatc

SEQ ID NO: 156687 - DNA, 1339 bp, Zea mays
  Clone ID: MRT4577_74477C.1
gtcgcacgccaccacccagaggccagagcgcaaaacccacgaccccacctcgcatcctccccgtcgccgtcgccgtcgcaatcgcaacccacgccgtcgcacgccacctctccctcggctccgacgatgtcggcgccatccgacgccgcggcggcatccgcagctcccgcgcccgcgccgacgactgccgccgcctcctctagcggcgggttcaccttcaagctccacccgctggtcattgtgaacgtctccgaccaccacacccgcgtcaaggcccaggccgcctgctctgcggacagctcctccccctcgtccgggccgggggccgggcagccgccgagggtgttcgggtgcgtgatcggggtgcagcgcgggcggaccgtggagatcttcaacagcttcgagctcgtgctcgacccagtctccggcaccctcgaccgcgccttcctcgagaagaagcaggagctctataagaaggtgttccctgacttctacgtgctcggttggtactccactggaagcgatgtgcacgacaccgacatgcaaatccacaaagccttgatggatgttaacgaaagccctgtttatcttctattaaatcctactatcaacctctcccagaaggatctccctgtgactatttatgagagtgagttgcatgtcatcgatgggtgtcctcagcttatctttgtcagatcaaattatacaattgagactgtagaggctgagaggatatctgtggaccatgttgcccatctcaaaccatctgatggtggttcagcagcaactcagttggctgctcatcttacaggaatacacagtgccatcaagatgctcaatagcagggtccgtgttatccatcagtatcttgttgccatgcaaaaaggtgacattccaatggacaattcgctgcttaggcaagtctcaagccttgtaagaaggctaccggctacggaatcacagaaattccaagatgactttttaatggaatacaacgacactctcctcatgacttacctggcaatgttcactaactgttcaagcacaatgaatgagttggtcgagaaaatcaacacaagctatgagagaccgactaccaggagaggaggccgaggtgctttcatgtagctcacctgccatgatcctgctgctgctttcatctgtgaggatttttcgggagtagcttatgtccctggtcatttttttgcatgcaatctatcatgcgcaatcggctatacggcagctcttgagtcacttcaaactttctaggcaaaactgatgatttgctggaattgtatcagatcccacctgtgctgaagttgatatgtaaagttcctca

SEQ ID NO: 156688 - DNA, 1658 bp, Zea mays
  Clone ID: MRT4577_74478C.1
gcacgaggcctcacccagagcgcagaacccccaaccccacttgtcgggcttcggctcttcgcatcctgcccgtcccccgtcacagtcccaatcgcaacccccgcctgcagcacgcgtcacgccacgccacctctccccagggtccggcgatgtcggcgccctccgacgccgcggtggcagccgcagcgcccgcatccacgaccaccgccgccgcctccagcggtgggctcaccttcaagctccacccgctcgtcatcgtgaacgtctccgaccaccacacccgcgtcaaggcccaggccgcctgctccggggacagctcttccccctcctcgtccgccccgggggccgggcagccgccgagggtgttcgggtgcgtgatcggggtgcagcgcggccggaccgtggagatcttcaacagcttcgagctcgtgctcgaccccgtctccggaaccctcgaccgcgccttcctcgacaagaagcaggagctctataagaaggtgttccccgacttctacgtgctcggttggtactccactggaagcgatgtgcacgacaccgacatgctaatccacaaatcattgatggatattaacgaaagccctgtttatctcctattaaatcctacaatcaacctctcccaaaaagatctccctgtgactatctatgagagtgagttgcatgtcatcgatgggattcctcagctcatcttcgtcagatcaaattatacaattgagactgtagaggctgagaggatatctgtggaccatgttgcccatctcaaaccttctgatggtggttcagcagcaactcagttggctgctcatcttacaggaatacacagtgccatcaagatgctcaatagcagggtccgtgttatccatcagtatcttgttgccatgcaaaaaggtgacattccaatggacaattcgctgcttaggcaagtctcaagccttgtaagaaggctaccggctacggaatcacagaaattccaagatgactttttaatggaatacaacgacactctcctcatgacttacctggcaatgttcactaactgttcaagcacaatgaatgagttggtcgagaaaatcaacacaagctatgagagaccgactaccaggagaggaggccgaggtgctttcatgtagctcacctgccatgatcctgctgctgctttcatctgtgaggatttttcgggagtagcttatgttctcgaggcagttttttgcatacattctattatgtgcaacctgctatacggcagctcttgagtcacttcaaactttctaggcaaaactgatgatttgctggaattgtatcagatcccacctgtgctgaagttgatatgtaaagttcctcacccagttatgccttatttgactctaaggctagtttggaaacttcaatctcgggattagtatcgaaggagattgggggattaaatcttttcttaagaaaaattaaaagtttattttctcttgagaaaataagaatcattcggaaaaatgtagttcccaaactagccttaaacgtggaaattagttcatttctcctcgtgcccccttagatcctggaatggatttgagtttttaaactggtgtagtatggagactcaaatcccctacgggatcttcgggattgaaggggatttgaagaga

SEQ ID NO: 156689 - DNA, 273 bp, Zea mays
  Clone ID: MRT4577_74479C.1
ggggtaccggcgcccctctctcggtttttttttttttttttttttttttttttttttttttttttttttttttttttttggcatctatacaacatatccctttatagaaaaaaccactgatcctagtttaatgggcaataacatctttaaacaaatggggggttttaacaacgaaaatctaaagatgggggtacatatctgcttacatgggcccattggggggtctattgggaaagaaaaggcgtttaacacaaacttgtttcttaaacaaag

SEQ ID NO: 156690 - DNA, 134 bp, Zea mays
  Clone ID: MRT4577_7447C.1
cacaccagtcgctgcagcttccccggccgccgcgccgaagccccaactgcctcgatcgctcgagagcgaggacgaccactccaccagcagggcagagctggagggtggccgcagtcgcagcgatgaaggctctc

SEQ ID NO: 156691 - DNA, 1326 bp, Zea mays
  Clone ID: MRT4577_74480C.1
ggtaccctcggagtcggccgggccgccgggggaaccgtacctccagtggttagggatacagctcatggagctcggcggtaccgcaatgtcgctgctgctgctgctgctcgtgctcgccgcgtcgccattgcagcaggccagggcggttggcggcggcaggccgcgggtgccggccatcctggtgttcggcgactccatcgtggacacgggcaacaacaacgccgtcctcacgctcaccaagtccaacttcaggccatacggcaaggacctcaacggcggcgtccccaccggacgcttctccaacggcaggattccgacggacttcgtagcttcacggctcggcttgaaagatctggttccggcgtatctcggcaccgacctcagcgacgacgacctctgcacgggcgtcagcttcgcgtctgggggcaccggctacgacccgctcacctccactctcgtggcagttctgccgatgcaggaggagctcaacatgttcgcggagtacaaggagaggctcgcaggggtcgtcggagacgaggccgccgccgcaggaatcgtggccgaaagcctgttccttgtctgcgccgggtcggacgacatcgccaacaactactacctcgcccccgtcagacctctgcagtacgacatctcggcgtacgtggatttccttgtggagcaggcctgcgacttcatgaggcaactgtaccagcaaggggccaggaggatcgcggtcctggggatgccgccggtcgggtgcgtgccctcgcagcggaccctcgccggcggcctagccagggactgcgaccccgctcgcaaccacgcggcgcagctgtacaactccaggctgaaggaggaggtagtgctgctccagaaggagctggcgtgccagagaatcggctacgtggatatctacgacgtcctgcaggacatgatcacgaacccctgcaaatacggcttcgaggtctccacgagaggatgctgcggcaccggggacttggaggtgtcgctcctgtgcaaccagctgacggcgccgacgtgccctgacgaccggaaatacgtcttctgggacagcttccatcccaccgagaaagcatacgagatcatcgtggactacctgttcccgagatacatagagaacctgctataattacttctgctttaccgtcgcttctttaattcgatcgtatctagttgttgtcaagtttagacatgccgtctttgtttcccaatttaagcttttgctttaaaactcaagacatttcaaggaaatgaaatgacacctgctagcttgttgcaagctgtaaaaaaaaaaaaactcgagcaaaa

SEQ ID NO: 156692 - DNA, 128 bp, Zea mays
  Clone ID: MRT4577_74481C.1
tcgcttgcaaaatcgcttgaaaaaaatataaatgtcctgccaaatactaacaccaaagggatctgtctacaactactaacaagcaatcatctttctcatgcatcaatattcagcttaaaacatttaaa

SEQ ID NO: 156693 - DNA, 524 bp, Zea mays
  Clone ID: MRT4577_74482C.1
gttgtttctgtggaaccatgtggacaactgaaagttgatgtggtggcttcacaagtcgatgatgatagaaatgttgttgcacaaggtctggttgatttcacaccgaaaatggccggtgtcagtcatggtatatgtgacctaggcttctgtgtgctgagattcagcgttcactggtcccttccctgctatgctggcgagcatgtgggcctgattacaaaataaggttctctttggctctagcagtatatagggtcgtcgtaggtctggccacaacaaatgagcgccccagttttagcgtgcttcagcgcactagctgagcacaagtgtggcacaccgcattaccggaattgaagcaaacagcaagctaacgtctggcagaggggggctgattttcagcgagtttttcatgttctcctgtgtctgttttgatgaaatgtctatatttggcatttttggtggcacattataaagctatctgactgtttctgtactcaaatcatcagatgcatttgtattattaatat

SEQ ID NO: 156694 - DNA, 660 bp, Zea mays
  Clone ID: MRT4577_74483C.1
tttatcttcccagatctgctaaatgtcctacccacccttacccaccgaaggcacacgaggccccattcaagagcgccgactcccccctgtgcgacacggcaccggcttgggacatacgaccgccatgtgtccgcccagcgtcctctctactcccgatgggtataccgcccacgccaccgctcatgaccacaccgatgacatgaccgatcattcgacacatctcgacaatgtctgcgaaaacctccgagctatctctgacatcgatgacctatatgtacccacatatgaatcaggtacgcaccttgtgacagcaatgtacctcaatgattgcactcctcccctgtcaaaggatactcaatactctctagcgagagatgctgggtccgtggtttacctagcagcttacaataaagctcactgctgcatgacgatgccacagctcactaaatggtcgaatgaacatccctggtggtcaatgaaatcttcccggacgactctatcgacatatcgatacctgaaatcctaacaggctcgatgaaacatgagactactgcaagagcaaataccacaggaaacccgtctcacttaaccctaaagaccacgcctatatgtaagacccttggcacatcgcctagaatgttgtaacactctatgccgctg

SEQ ID NO: 156695 - DNA, 273 bp, Zea mays
  Clone ID: MRT4577_74484C.1
aaaacttcacatttttcggatttccagcaccgaatgttttgtacatgcaaactatgtttgggacaaaaaaaaaaatagcccattttttggttgccatgaaattgactaatcagggaaacaatcagggggcaaatcagccatcctgccatccttttgaataaaagaatgtaaaatgggttcggtcattggaagctgtctgtaaaaaagtaaatcaatggggaccagtttagtttagttattttggggggacccttgacatgttctatttattca

SEQ ID NO: 156696 - DNA, 569 bp, Zea mays
  Clone ID: MRT4577_74485C.1
aattcggcacgagggagagagagagagagagagagagagagagagagagagagagagagagagagagagagcgagggacaccctgacaggctctgtgacctagactcagatgccgttcttggcgcttgccttgctgacgaccctcaccgtgaggttgtttgtgagacctgcaccaataccaacatggtcatttgctttgctgagatcaccgccaaggccaatgttgactacaccaacattgacacctagacctgccgcaactttggttttgtctccaacgatcttgggcttgactcctaccactggatggtgcatccttaacattgagcagcattcccctgatattgctcagggtgtgcatggccacatttccaagcgccccgtggagatctggagctcatgaccatgtactcatgttcgcgtatgcgaccgcttatacccctgagctgatgcccctcagccatgtccttgccaccacgcttggtgctcgtctcaccgatgtccgcaagaactgaacctgcctctggctcatgcctgatgcgaagtcccaagtgacagtccagtaccgc

SEQ ID NO: 156697 - DNA, 451 bp, Zea mays
  Clone ID: MRT4577_74486C.1
aaaaaacatctttttacagcactaataagggatgctacaaactacccaacaactttcataaggctaagtctgctttacccagctggaccccaaattttttacataaacgtataaaattcctgaacacagttttgaacaaacaaccgggtaagccccccccctaatgggggcttgggggtctaaagtctaaacacacatgcatgactttttttcatcgtttaaggaaaacaaaaagcaagcctttggaccctttccctagcctgattttttgggaaacataggggatctccagtttgacttcgctctcgccaccgtactaaaaccccaaggagcccaccttaatttccggcgcctaaaacacaacctgattccttttactggccagcacattaagtttacctttaaatgacactgccccctttaggccaaagacggaaaacgaccccttgtt

SEQ ID NO: 156698 - DNA, 1830 bp, Zea mays
  Clone ID: MRT4577_74487C.1
ccggccgggatacgacagctccgcagcgtcggagagggtagcctcgctcctcactcactcccccagccagcgttacaataggaaggagggaggagcaacctagcggcagccacagcagcagcgtagctgtagccacagcagagcagcggcggctgcgttcagacgactactacttgttcctcctcctcctcctgctccttcccccaaattccacccccctcaaataataaacaaatcaaagcaagcgaggaggtgagcagcgtccgcaagggaacagggaccgcgggggttgcaggcttgcagccgtgggggaggggagcagatccgcgagatccggcgcgccgccgatgacgagcggcgccgggggagccgcggccgggatcgggggcaccagggtgcccacgtggagggagcgcgagaacaaccgccgcagggagcgccggcgccgcgcgatcgccgccaagatcttcgccggcctcagggcctacggcaactacaacctccccaagcactgcgacaacaacgaggtgctcaaggcgctctgcaacgaggccggctggaccgtcgagcccgacggcaccacctaccgcaagggatgtaaacctctggcaacagagcgtccagatccaattgggaggtctgcatcaccaagcccctgctcttcatatcaaccaagtccgcgagcctcatacaacccaagcgcggcatcctcctcgttcccaagctctgggtcctcctcccacattactcttggcgggagcaacttcatgggaggcgtcgagggcagctcccttatcccgtggctaaagaacctctcgtcgagctcctcgttcgcctcctcctccaagttcccgcagcttcaccacctctacttcaacggcggttccatcagcgcgccggtgacgcctccatccagctctccaacccgcacgcctcgcatcaagactgactgggagaacccgagtgttcagccaccgtgggctggggcgaactacgcgtctcttcccaactcccagccgccgagccctgggcaccaggttgctccggacccggcgtggctagccgggttccagatttcgtctgctggcccttcgtctccaacttacagccttgtggctccgaatccgtttggtatcttcaaggagaccatcgtcagcacctcaagaatgtgcacccctgggcagagtggaacgtgctctcctgtaatgggcggtgcgccgatccatcacgatgtccagatggctgatggtgccccagatgacttcgccttcgggagcagcagcaacggcaacaacgagtcgcctggtctcgtgaaggcatgggagggggaacggatacacgaggagtgcgcctcggacgagcatgagctggagctcacccttgggagctcaaagactcgtgcagatccttcctgatcatgctgcaagagacaagtcttcacctgttttttttttactttcatctttattcggacggtgctcctctgctttatgagttcaatgtttgtagaaagagggaagggattcagagaccttatcctgctcctctggagatgatatccatcctctttcaaggatatgaactttattctagcttaagcaaattgttaacttatttatttcattttttcttcatatccttttttttgtctccctcaagaaacgaaaaggaaaaaaatgcaagggaaaagagtgcttgcaggaaccttttagacaagtcgcagaacttgtcatctgtcagcagtagctgagattcctgtggcattcctgtggccttgtaaaaattagctccagttgtcattgatatgactattatcgttgtacttgtgtc

SEQ ID NO: 156699 - DNA, 131 bp, Zea mays
  Clone ID: MRT4577_74488C.1
cgggggggccggtcaaaccatttccattagctctataaaacaatgggctcttacattttaagcgagccggctgacgacgtgcaagccaaacatgcccatggcttccagggggcgggaagacaaacaccaaa

SEQ ID NO: 156700 - DNA, 159 bp, Zea mays
  Clone ID: MRT4577_74489C.1
ccctcgagtctcgtccggaccgcccgcgacgacacgatggcagcctcgctccagtccatgccgcgcaccttgatgcatccgtcaagatacgcggccgggcgccgtccgcctcgctgccgtcgtcccgcccgtcgtcgcaactcgccagggcgttcggcg

SEQ ID NO: 156701 - DNA, 548 bp, Zea mays
  unsure (1)..(548): unsure at all n locations
  Clone ID: MRT4577_7448C.1
cccacatgcaccaagggccacaggncaagccgagcaaggctcgaccggcccatccgaactagcacctgcccgcccgtggtcgctggtaccatcgcgcgcgccatcatgcccactgtgtcgccacaacacgacctgaaagatacactcaggtgcgtgcttcctctaaggtggacatgccactaagtgatagaagtcaccgcggcctacgaggccgaggctatgccgaccttccactttgcccagaacggccagacggccgcgaccatcccgggtgccaggaaggacgagctcctggcccagatcgacaagcatgccgtgcctgcgcctgcgtatgcgtctgcctaaaggagatcatccgtcctgcgcaataagggccaatacgtatggatgataatgttgtcgttatcagttctggttttgtcgatcagaggcgattgtgatactagtatcatgtttgtttattatacgagccggaggcgatactcaaccatggatactccaatgtgacttcctctctcgtcccgcgtgacttttgaaattaatcaacc

SEQ ID NO: 156702 - DNA, 429 bp, Zea mays
  Clone ID: MRT4577_74490C.1
agccacaaacatttattttatactgttattttaaagcaaatatcggtttttagagaaccattttttattcgacaagggcaaaacctgcctgaaacctacacaccgggtaggtattaggtgcgccgaggcaccgaacaggaggcctactttcgcgacatgcaaattacagccccctgagctttgggcagggaaattgaacagccccatccccaaattatcttaagagctggccatcaggttctccggtgaagcccggttgaccgtggcatccctacggctatgtgggggggaaacttgtgcatggctcaaaactccaaaagggaaaatggcggggccctcattcgggttgaaaccctcgaacatggaaggcgtgggcgaatggaagaacacaggcgtatgcatgtcacctggtggaatagggtagccaag

SEQ ID NO: 156703 - DNA, 688 bp, Zea mays
  Clone ID: MRT4577_74491C.1
attgggacctcgagccggccgggaaatgtactactaatagtacggtgtgtacgtacacgtgaatcacccggaggatacgattcgcgagcgtgcagcgtagcgtgtagtgtgtcaccagcagatggccatagcttacgctcacatgacgatccaggagatgaacaccatcctcatcgtgcactctaggatgaggggcctgaacaggcggtgttgagctcgcaatgctccacgatgtcaacgtcaagggcatccagaacgacaagggaaaacaccattgggtgcagcccatcaacgtccacccctttattgacagacactagacctcggacacatctagcccgcgcggggcgtgttacctctgcaacctctgggactaatgaagcgaggagtggcagctactgccaggtcttaaatcctgactcgctcatcggctacctcgtcgagggaccatcaagttcgctcgcggtcactacaccattgccgaggagattgatgacctgtgccttggccgcatcaggaaccttgcaaataagtgcactggtctccagatgtacctcgtcttctactctgttggaggagaaacgggctctgggcttggttctctcctcctggaacgacagactggtgactatggctagaagtccaacgatcgcttcaccgagtacccatccccccaggtgtccacatc

SEQ ID NO: 156704 - DNA, 442 bp, Zea mays
  Clone ID: MRT4577_74492C.1
gtactgctggggacggcgccgcgttggccgctgttgttctcgcaccagcggacgttacacgctggtggcggacatgtgtaccagtgaggtggccgcggatcggttgtacgaaccgtagtggctggtcacgaaattcctactgtaacaggactacactgagcccgggggtcctgccgatcaagttatcctacttgctaccatctagcatactctagtacacatactacatgtagtctcgagtggtgcttgctggtgtccatcatgaggccttacattgaagttcggtctgtgtcaggtgatagcgatggcttcatcctaggctgcatcagacctatgcatgaccctgcatgaacaggccatcgacgtgccctgttacccccgccaggctctattctaagttaaagactctggaataataatcgatggcatggtgctcgacccc

SEQ ID NO: 156705 - DNA, 186 bp, Zea mays
  Clone ID: MRT4577_74493C.1
gacggcaggaagaccgaagaccgagacgtgcggaggctctggatgggaacgggacaggaccccaaaatctcagatccttactgcccgcacgcccgtgcccgtagactaaacgttcttgacggttgcgcttaacctccgtgttatcctccaccagggggatcagatacgcaacaggctacgcgatgg

SEQ ID NO: 156706 - DNA, 290 bp, Zea mays
  unsure (1)..(290): unsure at all n locations
  Clone ID: MRT4577_74494C.1
attaactatatagatgttagtgtgatgctatactattggacaaatagcagcttttttctattttataagttgtatgcataaacataagatttgtaatgtttcatttataaactgccttcttcaacacatgttaatagtgttttctcaaagtattgatagtatgtcttccagaatttcacaatatgcttacagtaaatatttccttgtcttgntgaaatgttcaattctttggttggctttcttcttgaattctgtgtttggtgtataacaagcctgaaggacattgtaat

SEQ ID NO: 156707 - DNA, 695 bp, Zea mays
  Clone ID: MRT4577_74495C.1
accatatcgaaccctccccctccccgtcccgtctcaagcgccggtaaacttcgccacgccccaatctccattcgccacaaaccctaaccgcccctctgtgtcgcgccgccggccgccccgccaccctcctcgcccttccagggctccggtgaaggctgtaatccgcggcgagcggcggcgatggcatccacggcgaaggtcaccatcaccctcggccgcagcggtcaggttgtcaaaaggcgaactatttctgatattggtaatgatgatgaagtgccagtatcaggaagaaagcgacctgtcagagagaggttaggaaataatgtgactgattctgatttctatggaaaccagcagagtaacaaaagacggcaaacagaaagcagtagctcacagcttggagatgatggtttggttcgccagattggcagtgatgatttaaggctgaagcttatgaggaaaggcttgacacagaagagcaacagtgaggcagaacagaatggagtggatctccgtgaaaagctttccaggaagtcgaagaaactccagggatatgaggcaagaaggggtgatccagaatcaaggtctagctatgatgagggagaaatccagaatcaggatctggatatggttcgagggggagagttccagagtcaagagcctctacccttgtaagccaagtgccttcttcaagg

SEQ ID NO: 156708 - DNA, 336 bp, Zea mays
  Clone ID: MRT4577_74496C.1
atgacggcagcaatttctcgctaccagccatgggggtgctcggcgacggggctcaccagggcacggctagatggggtagatgctcgagaggatagcgacgcccgaccttattcccgcgagggcaccgcaacggtccgagaaaggggggggtctccatgcgtgcccgggacaatcggctggatctcccaagagttcggcgaagtctgttacgagctcggggaagcggacgaccaggcaatgggggccaccgtcagtgcctacgcggccagatgtgaacactactggcacaagggtcccaccgcgaagtcactgcgtgctggggatcaggagcgttga

SEQ ID NO: 156709 - DNA, 758 bp, Zea mays
  Clone ID: MRT4577_74497C.1
aagcgccggtaaacttcgccacgccccaatctccattcgcccaaaccctaaccgcccctctgtgtcgcgccgccggccgccccgccaccctcctcgcccttccagggctccggcgaaggctgtaatccgcggcgagcggcggcgatggcatccacggcgaaggtcaccatcaccctcggccgcagcggtcaggttgtcaaaaggcgaactatttctgatattggtaatgatgatgaagtgccagtatcaggaagaaagcgacctgtcagagagaggttaggaaataatgtgactgattctgatttttatggaaaccagcagagtaacaaaagacggcaaacagaaagcagtagctcacagcttggagatgatggtttgggtgaagataaacatttcatttccactatcagtatactaagatttcaaaacagagctttctgtctgacacttctttttgttttcatgcatatgttgggcttcataatattgaagttcgccagattggcagtgatgatttaaggctgaagcttatgaggaaaggcttgacacagaagagcaacagtgaggcagaacagaatggagtggatctccgtgaaaagctttccaggaagtcgaagaaactccagggatatgaggcaagaaggggtgatccagaatcaaggtctagctatgatgagggagaaatcccagaatcaggatctggatatggttcgagggggagagttccagagtcaagagcctctacccttgtaagccaa

SEQ ID NO: 156710 - DNA, 406 bp, Zea mays
  Clone ID: MRT4577_74498C.1
aataagggggggggtttttgtttaattggtggagtaattcatatgatttggggaccaattaattttatgggcaacaggagaaacaaggggctcaaccaacctgcagggaggaacaccttccaacaggaccacaaagactgacgccaaacaagcaaaaaggggtagaaaaccgaaaaacctgggttatctttttctcaaaacacaacaaaatacctatggggggaagccaggggggcccaggtaataattgtaccaccaccaccacccgatataaaaataaaaaccatctccgggggcggcgaccgaagggagcagtagatgcaggggccgcacctaactgtcaccaccaaaaaaggttacgggggcggacatggaggacttcgccgagccctaaacaagagggggg

SEQ ID NO: 156711 - DNA, 546 bp, Zea mays
  unsure (1)..(546): unsure at all n locations
  Clone ID: MRT4577_74499C.1
acttaccccggctcggtaccggtaggtagtacaagtatggacctcgccctcctaagaagaagccctgctgggcctgttcgccgcggctgtggtggccatcgccgtggccaagctgaccggcaagcggtaccgcctcccaccggggcccccgggcgcccccgtggtgggaaactggctgnnnngtgggcggacgaaccctgaacccacccggcaaaacccttggatgggccccaattgggcggaaaaacggggttttcggggggaaaaaatttttttttctttttttttgccccaaaagggggggccgtttgcgccacaaaacccttgggggggggggggggggggtttttcaaacccccccccgggaaattttttttccacacaaaaaggggggggggtttttttctacaaaaaaaaacaagaggggtggggggggaaaaaaaaatatttttttttttttctccccccccacccccccccccaaaaaagaagggggggggggggggttgtttttacaacaatatttttttttttctcccccccccc

SEQ ID NO: 156712 - DNA, 306 bp, Zea mays
  unsure (1)..(306): unsure at all n locations
  Clone ID: MRT4577_7449C.1
acggcagcnagagactggcagtggattaaaaaaatctaaccctancatccgcggcgctggtggatctttaggggtgttggcgacnnncaacnaggcancnnnngacggtgaagtggttcaacgacaccaaaggcttcgggttcatctcccccgaggacttcagcgaggatctcttcatacaccagtcgtctatcaagtcggagggcttccgctcgctcgcggagggcgaggaggtggagttttccgtctcggatggtgacgacgtcctcactaaggcccactacatgaccagcccctacaaatcct

SEQ ID NO: 156713 - DNA, 1146 bp, Zea mays
  Clone ID: MRT4577_744C.1
ccatcttaacagccggaagctggcgtcttgcttgtccttgttcttttcccacccggctacccccgtcgtcgccgccgctttccccgtggtttcagagctcaagtcggctagctaggccgcctggctaatctccctgccttctataagtagagggccggtaaaagctgggaaaacagctccatcactgacacaagagagcacgctactactcatcactcgccaacgtgcagagatcagggaggcggcacactccatccactgaccgctcatggcgaaggtccacctctacgtcgccgcggcctgcgccgtcgtcctcgcgctcgccgccccggccctcgccggcgaccccgacatgctgcaggacgtctgcccggctgactacgcctccccggtgaagctgaacgggttcgcgtgcaaggcgaacttttcggcggacgacttcttcttcgacgggctgaggaacccgggcaacaccaacaacccggcgggctccgtggtgacggcggccaacgtggagaagttcccgggcgtgaacacgctgggcgtctccatggcgcgcatcgactacgcgccgggcggccagaacccgccgcacacgcacccgcgcgccaccgagatcatcttcgtcctcgacggcacgctcgaggtcggcttcatcaccaccgccaacgcgctcttcaccaagaccgtcaccaagggcgacgtcttcgtcttcccgcgcggcctcgtccacttccagcagaacagggggcacggccccgccgccgtcgtcgccgccttcaacagccagctccagggcacgcaggccatcgccatgacgctcttcggcgccgtgccgcccgtgccctccgacatcctcgccaaggccttccgcatcagcagcggcgaggtggaccacatcaaggccaacttcgcgcccaagtagagatccaacgtctgcattcccttgattttatcaataatcaatccccgcggtgtgcagttcgatttgttcgtcttcggttggtttgcttcgagacattgctgaccacgcttgtcactgctaatttgtgcggagcggaggagttgcttgtgctccgataaataagataaataatcaattctatcgtctgggttgcttcgtaaaaaaaaaaaaaaaaagcggcc

SEQ ID NO: 156714 - DNA, 740 bp, Zea mays
  unsure (1)..(740): unsure at all n locations
  Clone ID: MRT4577_74500C.1
gaggttcggccggatcgcttatactctgcgcctctacatttcttctctctctgctgctccncctccgcctgatgcatgcgagacagggatcgccatgtcggactccgaggagcaccacttccaatcgaagggcgacgctggggggtgcaaaacctacccgcagcagggtgggaccgtgcgtgagaacggggttatcgtgatcaaaaaccgtgcctgcgagggggggggggggtctacctccaagactggggagcatgggcacgccaaatgccactttgtggccatagacatattcaatgggaaaaagcgttgaggatattgttcctttatcacacaactgtgacattccgcatgtgaaccgtactgaggatcaactgagtgagatttctgaggagggaggtgtgaggcttcttacttcatatggggacactaaggaggagcttatactcccaactgaggagactcttgtgggccagattaaggaaggggtcgaaagcgggaaggatcttgttgtgactgtgcactctgcgatgggggaggaggagatctgcgcgttnaaggatgttgggcccaagtaacttccttgggtttggagacggagccctactgtgtctcaacttaaatcggaaaagagggtgtcaccaaaggagtgcgaccgagacattcacctgggttgagctggcttttgctataacgtgcaagggggtgctggngtgtggtacctacctgacttatcatta

SEQ ID NO: 156715 - DNA, 367 bp, Zea mays
  Clone ID: MRT4577_74501C.1
gggcgacccacgcgggcggttctcatggttgaccaagatgagctctagaccgttatccttcatatcggtgggctggtgctgatatggaagtgggcttatcagagatcaaatgccatgttgttcttagtggacactgagaaattccttacaatattgcatttttataaatgtttttattatgtgaaggttcttacggcttactaatacgatgacattttcatgattatccttatgatatacagtgtcatccattccattttttctgttcatcaccaaatcaaacaatcactatgcaacccaatgtactatctcttccaattacatatcttataaatactgtgctttgttatcttttgtgatggaatat

SEQ ID NO: 156716 - DNA, 192 bp, Zea mays
  Clone ID: MRT4577_74502C.1
ggagaacaggtgaccaattatttggggagtcttgggtagaatttccgccacacattctccccagggctgcaggggtcttccgaggcaaggcggtggagcatgattcaggatgtggtgggaatagagtgaggggcagtgggtaggcagacctaggcgtcagaggtcctgatgggaaaggaggcaggggctacc

SEQ ID NO: 156717 - DNA, 257 bp, Zea mays
  Clone ID: MRT4577_74503C.1
atccagcccgcggactactgcctgatcacgagcatccgctagacactcacgcacggtccggtctcacgaaaggattgagactctatttgtatatgcacgtatatatccacatcaatgtatttcaatttacgtgtgttaaagtggattacacgaaaggaatcgctgcataataggtttgcagcggatcactgttcgtgtgctggagaataatacgaaaaggacgtgagacatatctatcttttacaaaaaaacaaact

SEQ ID NO: 156718 - DNA, 790 bp, Zea mays
  unsure (1)..(790): unsure at all n locations
  Clone ID: MRT4577_74504C.1
caaattgcaagcaaagcagctagcaaacgcacgtcgtagctctagcttaactaagctaacccagccaggtagccagccatgaacatgaactacggctccatgggtcctggcgcgatggtgcggtgcaggcagtgcagctcgagcatcacggcgatgcccggcgcccgcgccgtgcagtgcatgcagtgcagctgcgtcacccgcgtcagcgggcgtggccggcagcagcacggctacggccagggttacgggaacggcggcgggatgctgatgccgccgatgcgtcccaccccggccttcggcggcggccgcggcaagaagcgcgccgtgctgatcgggatcaagtacaccaaccggcgctcctgcgagctgcggggccccatcaacgacgtcaagtgcatgcgctacctgctcaccgagcgcttcggcttccccaacgactgcgtcctcatcctcaccgatgaggagaggaacccgtgcaggcagccgactaaggacaacatccgcatggcgatgcactggctggtgcaggggtgcagctacggcgactccctggtgttccagttctccggcctgggcgcgcaggtgcccgacgacgacggcgacgagctggacggcatggacgaggccctctgccccgtggactcgttccagcagggccccatcctggacgacgagatcaacgaggccatcgtccgcccgctggtgcacggcgtcaagctccacgccatcgtcgacgcctgccacagcgccaccgtcctcgacctcccctaccnaatgcacgtgtcca

SEQ ID NO: 156719 - DNA, 1476 bp, Zea mays
  unsure (1)..(1476): unsure at all n locations
  Clone ID: MRT4577_74505C.1
ccacgcgtccgcattgttccttgttctggttcctccaggagcaatttctccgggctttgcaggactttgtctctcctatgctttgactttaacttcagcacaaatattcttgacaaggttctattcgtacttggaaaactacatcatctcggttgaacgaatcaagcagtatatgcacctcccagtggagccacctgccattataccagatagtagacctccaacttcgtggccgcaggagggaaggatagacctgcaagatttgaagataagataccgtccaaatgcgccgcttgtcctcaaaggaatcacttgcacttttgctgctgggaacaagattggggttgtagggaggacaggaagtggaaaatcaacacttatcagctcattgttccgtctcgttgatccggcgggtgggaggatacttattgacaagttggatatttgctccattggccttaaggatctaagaactaaactaagtattatccctcaagaacctacacttttcaggggaaccgtgcgcaacaatttggatccccttggccagcattctgatgaagagatatgggaggccttggagaagtgtcaactgaagacagcaatcagcaccacctctgctcttctggatacagttgtgagtgatgatggcgataactggagtgctggacagcgtcagctcttctgtcttggcagagttctcctacgcaggaacaaaattctagttctagacgaggcaacagcatccatcgactctgcaacagatgcaatcctgcagaaagtaatcaggcagcagttctcaagttgcacggttataaccatagctcacagggtaccaactgtgacagacagtgacaaggtcatggtcctgtcctacgggaagcttctagaatatgaaacaccagccaagctgttggaagacaaacaatcagcatttgctaaacttgtggctgagtattgggctaataccaagagaaattcaacatgatctaccattattgcaggacatgataaaagatatgatcattttaatcaagatatcgaaagattcaagggttctcaaattgaatctttaacaagacaaggaatgccatcatgattatttgattgatgtggttactgggagtgaataagatatcaacagaaattcaattttggtaatggaagcaatttttggagtgagggctgatgttcgagagaactccagctggttgattgaacatgtggtattcaatgcaaaatgaaatggaggatccacttctagcatgatcaatggcatttttcatacataagcctttttgaataagagaagcgaagtaccaagtcgtgaattgcaatgaagaatgagtaaagtgcagtgctgagaagaataattttcatgtatcttgtgtactcaataatgataaactttatatgactgagaaggaaaaaaaaaaaaaataaaaaaaaaaaaaaagagcgatannnccgggaatt

SEQ ID NO: 156720 - DNA, 339 bp, Zea mays
  Clone ID: MRT4577_74506C.1
ccataattccctgggggggccactcatccttaatttgtgtagcttacgttcacatataactttagctggatatggagtacgaagttcaggcgttgtcttgagggttgggtcatgattttgtgagggtgttctcattcgtgtagcaaaaactgaagcctttatggttaaggaccatagatgataattgtacaagaatctctatctacctacgctaaaagatgaggtctggatgtttgaaaaaatatgaaaggatggcttatttcataagatgctgaacaaatctggtatatctacatgtgatgattttcttaatctcttagttcgggacctacatatatt

SEQ ID NO: 156721 - DNA, 139 bp, Zea mays
  Clone ID: MRT4577_74507C.1
aactcattcgtgacagcgttcgtcctgataatgccgtcccagtccaagcaggccctccacctttccatatacaaagtccatttagacatcaacctcaagatgcctatacctccgtcctacctgaaagtgaaatcaccta

SEQ ID NO: 156722 - DNA, 593 bp, Zea mays
  unsure (1)..(593): unsure at all n locations
  Clone ID: MRT4577_74508C.1
ggccgccgctttgtttgtttnnttttttttnnttttttaacatggaagcaggggacacataatttcgttccagaagcgtctatttatcaggaatgacaggccaaggggggaaatggggaaaaagaatatatatagctggagtcaccacgaccaccaaggggactaaggcttagacagggtgggcgtccgcaccggtgacgatctggaggatctccccgacgatcttgaactggcgctgtttgttgaaggcgatggaaaggttcttgcggggctcgatggcgttaaggggggcactgatcatggcactaatacggccggcaagctcgctggacagcgaatcctgtagggcacggaggatctggctgttgaggtacagcgggagcatgcgcgtccaggatctgcacggggtcctgcttaactgaccagggggagaagggctgcgtctggatcttcaccttctcgcgctccaggggagcttaccctccttggtggtgaggcggaagagcttgtcctccttggcgtccacccagaccccgttgacgtcccagatctcccccttggccgacatggggagcaacgtttggatgatgggg

SEQ ID NO: 156723 - DNA, 326 bp, Zea mays
  Clone ID: MRT4577_74509C.1
ttgaaacagacagaaaccatgttgacccaatgtcaacttggatacgaaaaaatgactaccaaggtggccacgtaaaactcctctatatagatcagtcctacaagcagaactcccactgataggctctcgacaagtatctatctgtgggttaaaccaaggacagcatttgctcatacgaaatctccacacctgatagagaaacaagacagcataacctgaagcgtgccgctgtacagaaccatctaccccaaatacctgccatagatacttgccaaatagaataaggagcagtttacgcccacatcaccttccggtgcaaaaggacc

SEQ ID NO: 156724 - DNA, 347 bp, Zea mays
  Clone ID: MRT4577_7450C.1
tttccggcgacgccgcctttgaccgcccgcgcagcgtctccgtcgatgcgggggtcaacttatacttcaccgaccttttctatggtgtcgttcttatgttttagttacttctttacacttttacaattttttgtatgttttctattttttaattaattatattaattcttttcttatttttttttttattcttttttttattaatatttattattttttattaatcttatttttttttttttatatattttttttttatttttttatttttttattagtgttatattattttttttcttttatttaaattatctttatttattttcatattttatttatttattttt

SEQ ID NO: 156725 - DNA, 606 bp, Zea mays
  Clone ID: MRT4577_74510C.1
gccggccgggcctggaggcgactacctcgccctttgcctgtgccttgtcgacctgacttgattttgttgcctggcgaaagccaactcgccctccgctaggtgtcatgctctggttagcctacgccttcacccgccgtccctgcccactgggtgactgcgcacagaacacatggagaccgcgcggatgaaacaacaggtatgcttcacgcgtaggggccgactagagcgatgcccggtaatatcgcgacctgagggtccacggcatctcgggctgctgaggccgctccacctactccccaagtcctcctcgcccgagagcatggcacagaagaacactagttatgaacgccacatgtagcggtcgtacatagagcagtggctgactgaagcgcgcatagtgacggctgaggtcagagagatacaaagctgtggccctgccatgtactacctgggctggaggataacgctatgctagatgatcatctggatggggaggaaaatcagtatagcacgcccacagattcctcaagctcttcccaaggctacaatagctgaagctacctagtccgacgataaaaaatgcaggagtgacgtcatctggctagt

SEQ ID NO: 156726 - DNA, 311 bp, Zea mays
  Clone ID: MRT4577_74511C.1
cccacccttccggagggggcacattaggattaatggttccggagcaaccgccgggtccatagcaaaccaaccttgattgcagggccagttaataatatataaaatcggagggggagcatatttatttggttgggtcctacaagcaggcttagtacgccgcctgcccgttcttcttataccacataacaaatttagccccttccttgcgggattgctggtggccgccgggtcaaatttggacctacaaggttccgtcaaacttgaatggttggttttttaataaaaccatgttggattaaacgtttttgggt

SEQ ID NO: 156727 - DNA, 438 bp, Zea mays
  Clone ID: MRT4577_74512C.1
aaaaacaaacgggggcttagtccccataaggaccaccacacaattggggtcttttgctttgattacaaatgacttgggaacaaaaaatggggaaaaaaaaaagcgatccaagcgcaagagctcaaaagaacacgacaaaactttctcttctagtcactaattgctttgagtggaattgggacttggaaagattttgattcaatctttttgtggcttgtattgaatgcactagctcttgtattgaatgtgtttgctgaaaacttgaatgccttgaagtgtgctggttggggggtatttatagcccccaaccaccaaagtgccctttggggaaggctgctgtcaaagcgcgcaccggacagtccggtgggccagccacgtaacccaaccgttagggttcgaccgttggagctctgacaagtgggaccaccggacagtccg

SEQ ID NO: 156728 - DNA, 315 bp, Zea mays
  Clone ID: MRT4577_74513C.1
ataaataacaataatgtatattgccaagccaccagattcttcacttataaaattccagcattagcatttataatccagatcagttatgacttatttcagtaaatgggccttttctcatttgtggcttatttactctagttgccagttgggtgccactgaggtgcttcatgtaaattctcactaagcttctacatttctgagcagaaggtatttatctccatgtataaatgaggtaatgaggatcatatgttagccaacttgccctgtcatactggtgatactggacatctgcttggtaactagctatgtctgact

SEQ ID NO: 156729 - DNA, 562 bp, Zea mays
  Clone ID: MRT4577_74514C.1
ctaggcaaccgttttcctataaatgatatcgtttttgatcgtggggggccctacttgaagcattttttttccccccccccccccccaaaaaaaaaaaaccttcgcccttttccttgggggggggggccctgaaaaacagttaaactagggggctaaaacagggattgtttttttttaaatcacagttagaaaaacatgggcctaaaaaaatacggggggggacaaaattgccaacaggcctatgatgattttttgagggaaagatccttgggaaaatccccaaggagggcaacaaaaaacagcacccctgcaaatttcaccttcaagggttcccccagcatgaaaatcggtttgatttcttagccccccgggaagggaacgttgggctcccctacaacatttttttttttaagaacaaccgtggtccttccaacaacggaaggggatgaataactagtctaaaaaggtttttttgccacaaaaggaactacaggctcgggatttttggacccttcaggaagcacaattttaactgtaagatcgtcaaccacagtttccaata

SEQ ID NO: 156730 - DNA, 313 bp, Zea mays
  unsure (1)..(313): unsure at all n locations
  Clone ID: MRT4577_74515C.1
aanaaaagaggcaggcggacgacacagagagaggctcggaacaaggaaagagtcgccggcggcggagaccccaaccgaaggcccccggtcgcttcgccgggcaaggcgtgtccgtgcccctcggacaccgggagtaaaaaacagtgaacgctaagctttgggaatggagttgacagtttctgctgaataacagaaaaaaaattactcgccttttcctgaatccatggaacttcttgataccaatggtcatgggaaaacaagagcacagaatgctgcaaatatgtgcacagtttctgttaagagtccagataca

SEQ ID NO: 156731 - DNA, 285 bp, Zea mays
  Clone ID: MRT4577_74516C.1
gaccgctgtcgccgtcctagctcgcggcgggcaccggcgttgtagttggaggaggaggagacgccttggaagccgccctgatggagcaacttgcgagcaggctcggcgtcagcgtgccttcgccgccgccatcgcggtacgcgtcctgccacggcacgccggcgggctcctcctccaagtcggcggctccgtgggtgctggccgaagactcggcgcctgcggagcgcgccacagggctcccgtgcttccctgccttctgtggagagctctcgcgcgtgcccagct

SEQ ID NO: 156732 - DNA, 689 bp, Zea mays
  Clone ID: MRT4577_74517C.1
cactccatagggcgattgggatcctcgaggccggccgggaaccttcaccaccgaactcgaagtttcagtctccgcccaacctgcggttaaagtgattgatttctcttgttctcgtcgactccaaacaaaccacattcaaaatgaagcacctcgcagcttaccttcttctcggcctcggaggcaacacctccccctctgccgccgatgtcaaggccgtccttacctcagtcggtattgacgctgacgaggaccgcctgaacaagcttatctctgagctcgagggcaaggacatccagcagctcatcgctgagggttccgagaagctcgcttccgttccttctggtggtgccggtggcgcttccggtggtgctgccgccgctggtggtgccgctgaggaggccaaggaggaggagaaggaagaggagaaggaggagtccgacgaggatatgggcttcggtctcttcgactaagcgatctctgtctagagattcgcaaagtaacgatacctcacgaatttcgaagatgctacgcacgggttgttcaccagttcttacacgtcttatgcgtggatggattggccggtcatggctggattgtgtttctctaaggaagggataacatacggttatggaaattaaaaaaaaaaggcggttcggctcttcaaaaaaaaaaaaaaaaaacccgcggcc

SEQ ID NO: 156733 - DNA, 630 bp, Zea mays
  Clone ID: MRT4577_74518C.1
accttactcgcagaaaccctagcagatcggtcgagccctccgccgccgccccgccttcagctctctccttccttctccgatccaagatgaagttcattgctgcctatctgcttgcttacctctctggcaacgccagcccctctgcagaggacctgacatccattcttgagtctgttggttgtgaaatcgacaatgagaagatggaactcatgctgtcccaagtgaagggcaaggacatcaccgagctcttggctgctggtagggagaagtttgctgcggttccatctggtggtggtggtgtggccgtttcagctgctgcccctgctgctggaggtgctgctgcccctgcagctgagtcaaagaaagaagagaaggtcgtggagaaggaagagagtgatgatgacatgggcttcagtctgttcgactaagttgtggggcaccttgtgtctgaagtatctatccttggccaggaaactagagtcaatgatgttttagcctttatttagctgagttgtgaaacactggcaagacaatgttttgatatgtaattcagcccctggttgctggttgatttactggtgaaccatacctttgctatccaatttggtcctttaacaatgcgttgttttg

SEQ ID NO: 156734 - DNA, 289 bp, Zea mays
  Clone ID: MRT4577_74519C.1
cgtacgggctgatgaacgcaatggcggcttctgagactaatttaaacccaacacccaccgagatgacggatacttttaaagagaagtgggccaccacaacaaggacgacaatccacgctctcactgtgctggatactacgacagacagactgctgatgcacaaccgtgctactatgcgcacgctgcttgaaaggatctacactcagcatacggatatcaacgcgtatgatgttacgaagcgtgttactggccatgcgagagtttcgagaacacaatgctacacatgttc

SEQ ID NO: 156735 - DNA, 849 bp, Zea mays
  unsure (1)..(849): unsure at all n locations
  Clone ID: MRT4577_7451C.1
aatttcaaaaaaaaaaattcttccagcttcctctcctccaccacggccgacggatgccgacgcctcctgccgccggccggagcctcgtcctccactgttgctgctgcctgatcttgcttgtcctcctccccgcctgccacgccttcccgctctgcaccgaccacagggcgccgctgccgctcaacgggacgctcgccttctgcggcaacgccggcgccggggccagctgctgcgacgccgccgccgacaaggccctgcgggaccagctccaagccgccaacgtctccgacgccgcctgcgccgccgtcctcaagtccctcctctgcgcgaaatgcaatccctattcggctgagctgttcgacgccgggccgaagctccgaacaatccctttcctgtgcaactccgcctcctcggcgacctctgctcatcagtccaagcaatcaacagtacaggactactgcaagcttgtctgggacacctgcaaggacgcaacgatgcgcaattctcccttccagcctcccctgcaaggaggtgggaggctgcctagctcatcgtcgaagctcaccgatgcctggcagtccgagagcgacttctgcacgtcgttcggtggcgcgcccagcaaccgatccgtgtgcttcagcgggagcacggtgtcgtttaacgctacccagccttcggcgtctcctaaaggggtatgcctagagaggattaacaacgggtcctacgcctacctcaacatggttcctcaccctgatgggtccaacagggtcttcctgggcacccaagccgngaagatagtgctggcaaccgtcccggatcaagggtccggcggcacgctgcagttcagcg

SEQ ID NO: 156736 - DNA, 506 bp, Zea mays
  Clone ID: MRT4577_74520C.1
cggacccgcgggccccggccccggaataattccgggctcgccaggccttttatctcggcggccgcccttcttttttttttgtactgtttatttgagctcttaattatttttagtttagaaatgaaataaaatagagcttgataaaaatgtgtttaaattattaaattttatagcgcaaaatttagagttcattaccatctctacatgtgtccacacgaccgggatctaaatctgccctttcaacaagtgcgtcatcggcttgggcaaagaaatgggctccatcttttgtaccactaacaacgaaatccgccaaacctcggatcaagttgttcggttcggattaaagccaactatttaaagtaatgtagctgtaatcgatcgaagtaaaaatactgtaaaatcaggagaagctgttatagattaaaggcaaacgaatactaagcacatgccagaagtaaaacacataggatttaaccattttattctctggtttggcagctttccct

SEQ ID NO: 156737 - DNA, 425 bp, Zea mays
  Clone ID: MRT4577_74521C.1
aagatattctcggaacttttatttctatagatgacagaattatatacacaaatgactcttctggagactcactaccacattcacttgtgacaatggtaaacaagtgacagcagattgacacatacattaaatctacattagttgaactagattcttgagcttctaatgatgtaagtttattttaatggaaataaaaaaactgtgctcgatgtcgcacaacttcaaataagacactgggtcttagttcttgtgtggttgagacttgagaatcatatccatgattcaatggtggatttatacttgtagttgtagggatttaatccatttacttgcgcaagaatgtcagatgtgtccagcatgtcctcttctttcatatggtcagtttgttcataatgttcatgactctgggagcctgattgcgctgc

SEQ ID NO: 156738 - DNA, 433 bp, Zea mays
  Clone ID: MRT4577_74522C.1
gggaattggccggtttttacaatggtccctgccacaaaaatttgccgttttgcaccccagccgggggccggccccagaatgaacaacaaaaaaccggttggcaccccggagccgcccccgagaatgaaccacaaacaactggtgggcaacccggagctggccccaacctgaaaaaaacccgccccaacccacccctttgcggggtagcccggagccaacacatgcctgaaatgacaaaaacccccccccttccacaaaaataaaaccatatgggctgctcgttagcccggagccaacccgagctgaattcactacaacgactttttcggcctaaatgcccccattttagcgaggggctaacccgggcacaaacttggggactttatttttttaaattttgggggaaaagagggcaattaggccttggcctgga

SEQ ID NO: 156739 - DNA, 353 bp, Zea mays
  Clone ID: MRT4577_74523C.1
tttttgagcctatttataaaacaatccctgggaatatttaggcaagtcagtgatactataggcaaaataaatcttaacatggtatacggttttagttagttacttttattctgataatacagtgttctacttgtaactcttatctttataataatatccattctaattctgcttgtaaaggaaatgttgtatattgaatttatatacacttttactatttccttatcctttcttatatttttaacatatataaattttttcaaagtatttatttataatattataattattaattaattatataataattaacacttaattctaattatttaatctattttattttaatcaat

SEQ ID NO: 156740 - DNA, 213 bp, Zea mays
  Clone ID: MRT4577_74524C.1
gcacctattctgctctagcccttcaatttattcacctctgacaccctcttaattctgcttccagttcctctgagtggtgagtatgatctcttctcactcccacaattcccacattatagtaatcctcatcacctgcttatttcgcataaattctagatcaaactccacaccctgatcctcccttttacttcttatggagcatgtatcaactca

SEQ ID NO: 156741 - DNA, 1654 bp, Zea mays
  unsure (1)..(1654): unsure at all n locations
  Clone ID: MRT4577_74525C.1
ggaccctcgaggccggccgggccgggatatccggaacgtcaagaacacacccctcatgacgacaagaatggctgacccctatcttctactcctcttcctactagtgttcgtcacctccaactccagctcgcaatccatggcgcagatcactgacgcaagcgagctagcaacactcctagcaatcaagaaaggctggggcagcccatctgcgctcagctcatggagctcccagaacgcttcctactgcagctgggcaggggtcaggtgcgtgaacggccaagtgtccgccctgtccttccagaacctcagcatagccaatccagttccagtcccagctgcttccatatgcaacctcaagaacctgtggtatcttgacctttcctacaacaaactcaccggccagttctccacagcgctctacagctgctcggctgttcggttccttgacctctccaacaatcgattctccggtgccctcccagctgacatcaacaagctgtcgtcggcgatggagcacctcaacctgtcgagcaatggcttcacaggcagtgtgccccgggcgaacaataacctcttcaccggcgagttccccgagaaggtatggtcggggttcccactcctgacgactgtcatgatccagaacaacagcttcactggcactatgcccagtgcgatatcctccaacatcacacggatcgagatggggaacaaccgattctccggcgacgtgccgacctccgcaccggggttgaagaccttcaaggcggggaacaaccagttctccggtactctgccggaggacatgtcggggctagccaatctcatcgagcttaacctcgctgggaacacgatatctggcgcgattccgccttccatcggatcgctgcaacgcctgaattacctgaacttaagcagcaatcagatatccggagcgattccgcctgggatcgggttgctgccagtgctcaccatccttgatctctccagcaacgagctcaccggagaaatacccgaggacttcaacgacctccataccagcttcctcaatctctcctccaaccaactcaccggcgagctccccgagtcgctgaagaacccagcatacgaccggtcgttcctcggaaaccgtggcctctgcgccgcggtgaacccgaacgtaaacttcccggcgtgccgctaccgccgccacagccagatgtcaatcgggctgatcatcctcgtctccgtggtcgccggcgccatcctcgtcggcgcggtcgggtgtttcatcgtccggcggaagaagcaacggtgcaacgtgacgtcgtggaagatgatgccgttccgcaagctggacttcagcgagtgcgacgtgctaataaccaacctccgcngacgaggacgtgatcggcagcggcggctccggcaaggtgtaccgcgtccacctccccgctcgcgggcgcggggcgcggctgcgccggcacgggtggtggcccgtgaaaaagctgtgcagcaggggggaaggggccgaggagaagctcgaccggggagttcgacacggaggggtgaagatccctcggcgacatccggcacaacaacatcgtgagcctnctctgctacatctcgagcgaggacaccaagctgntggtgttacgagtacatgggagaacggcag

SEQ ID NO: 156742 - DNA, 118 bp, Zea mays
  Clone ID: MRT4577_74526C.1
caagattaggggtttttaaaataaacctccttttccaacacagaacaaacttgaaatgacaccatcaggaccagggtaacaacaccgagcttgacctaatctttacaaaatatatagg

SEQ ID NO: 156743 - DNA, 621 bp, Zea mays
  Clone ID: MRT4577_74527C.1
cggacgcgtgggaacgcagcctccgtgcatatcaccagcctcctcgcgcacccggtcccgcttgcctttccccacctactcgccgtcgcggtgccgtgcgccggtgctgttcagtctagggtttcggccctcgcccgccgatccgtccccccgccggccatgtcgaagcaaggagggaaggccaagccgctgaaggcgcccaaggtcgacaagaaggagtacgacgagagtgatcttgcttatttgcagaagaagaaagatgaggaaaaggcactgaaggagctgaaggccaaggcacagaagggcgcaattggaggctcgggtctcaagaaaagtggaaagaaatgagcctggcccacccacccacccatctctaaaacaccttggagaacgataaggcagctgcttagtatctgtgttgcgcttcactatatgtggctgtgagacaatgctgcctcttgtattccgtgttacgcggtgttccagttggtttgcttgatccgaagatgtttcagcctctcatctgctagctttgatacatgagctatttgctattatataaaaaaaaaaaaaaaaaaaaaaaaaaaaaaaaaaaaactcgagggggggccgcgggtaccc

SEQ ID NO: 156744 - DNA, 394 bp, Zea mays
  Clone ID: MRT4577_74528C.1
aaggggcaagctcttgaatttaacacttttggaggccctgggaaaacagggcacattatgggtttattgggtgccaaccctacgggatccgagcgtcttaacccgccgcaaaaaccctagccccatttaaatgtgaagggaaacccctggctcacaaaatttcggattgcaccgtctcgacttaataaataaacccccttgcttaaaactaatggaagctcattaggcaggtttttatgggggccccctactacagacccccgggtggttttattccgggggtgctaagggcgagggaagggcaacaagttcccggcttccccgcagtttccccaatagcttatttagcccggggggggacccccccccacccaccccttcgagaaactgtggg

SEQ ID NO: 156745 - DNA, 754 bp, Zea mays
  Clone ID: MRT4577_74529C.1
gaaattattcccacgggctcgccgctcgcatctcgccagcgcgaacgcagcctccgtgcatatcaccagcctcctcgcgcacgcggtcccgcttgcctttccccacctactcgccgtcgcggtgccgtgcgccggtgctggccagtctagggtttcggccctcgcccgccgatccgtcccccccgccggccatgtcgaagcaaggtgcgttcgtgtcgtcgtttcctctcttttcccctcttgcgatcgggtgggggttgtttcgtgcagattggttggttgaggttcttcgttaccgacggttctgacgcgacggctgggtccggggtgcaggagggaaggccaagccgctgcaaggcgcccaaggtcgacaagaaggagtacgacgagagtgatcttgcttatttgcagaagaaaaaaaatgaggaaaaggcgctgaaggagctgaaggccaaggcacagaacggcgcaattggaggctcacgtctcaagaaaagtggaaagaaatgagcattgcccacccacccatctccaaaacacctaagagaacgataagacagctgcttatctgtgttgcgcttcactatatgatatatgtggctgtgagacaatgttgcctcttgtattccgtgtttcgcggtgttccagttggtttgcttgatccgaagatgtttcagcctctcatctgctagctttgatacacgagttatttgctattatgatattcatttgaaaaaaaaaaaaaaaaggccct

SEQ ID NO: 156746 - DNA, 208 bp, Zea mays
  unsure (1)..(208): unsure at all n locations
  Clone ID: MRT4577_7452C.1
acacataaactcaccnccaacgatcggtcanaaaactacgtgtgtgcgcncacncacacnaaacccacctcctacacactcacattctaaatatccaaacacttaaaaccaagcttatctctccaaccattccaacccttataaacttaccccaaagtttttaacaccaatccttaaaactgtttttaacttttttctgaaccaattt

SEQ ID NO: 156747 - DNA, 365 bp, Zea mays
  Clone ID: MRT4577_74530C.1
gtgtgggcgaaacatttgctcaataacttatccaaacaataaagggtgatgcttaggggaaggcaatagcccccacctcaaatttgcttgagtaaaaaaaatatcttttatgacaacaaatacaaaacccccccccgcccctatttcttttatgacaacaaatacaagccttgagtaaagcaagttcaagcaaccattttaatatcacaggatttttgtttcttttattcgatgcatacatagggccctctatggcttccttggtctatgggaccttagcgacgcaacaaccagcgcaagatctttttggtggcaaaaacaaaatgggtggggggggcgcaaaagcggggggaggagcaacaaca

SEQ ID NO: 156748 - DNA, 379 bp, Zea mays
  Clone ID: MRT4577_74531C.1
aacaaaaaagttcaaatcacaaaaaaattagataatcattttgcctatgttattgaaatgatccaaaagtgaaggaatcttaaaatctttaaagtttgagtgtaaaatagtattacatatagggtaaatattgagccaaacaaagagacatgggtattacaatcaaggaaggcatacaaaagtgctctccccgcagccgccatggaggccatgcgggcgacacaaggcggtgtggaggggcggacgagtggccacgtgagggcctccttgcctccacgctggatcgccaccccacctcctcgtcgagccgcaaccctaaaccctcgttggacccgtcgcgggcgattgactacgcctatcgctttggggtgccgtggtc

SEQ ID NO: 156749 - DNA, 563 bp, Zea mays
  Clone ID: MRT4577_74532C.1
ctgtgcggcgctcgaggcggccgggttccatcgctcacgcgaacgcagcctccgtgcatatcaccagcctcctcgcgcacgcggtcccgcttgcctttccccacctactcgccgtcgcggtgccgtgcgccggtgctgttcagtctagggtttcggccctcgcccgccgatccgtcccccccgccggccatgtcgaagcaaggagggaaggccaagccgctgaaggcgcccaaggtcgacaagaaggagtacgacgagagtgatcttgcttatttgcagaagaaaaaagatgaggaaaaggcgctgaaggagctgaaggccaaggcacagaagggcgcaattggaggctcgggtctcaagaaaagtggaaagaaatgagcattgcccacccacccatctccaaaacacctaagagaacgataagacagctgcttatctgtgttgcgcttcactatatgatatatgtggctgtgagacaatgttgcctcttgtattccgtgtttcgcggtgttccagttggtttgcttgatacaaaaaaaaaaaaaaaaaaggcccctagggcc

SEQ ID NO: 156750 - DNA, 713 bp, Zea mays
  Clone ID: MRT4577_74533C.1
atccctgtgctccaaaagcccataccagaaaaaggcccttcccgtcccgagttccaccgaccaaaagattcccacgggctcgccgctcgcgtctcgctcacgcgaacgcagcctccgtgcatatcaccagcctcctcgcgcacgcggtcccgcttgcctttccccacctactcgccgtcgcggtgccgtgcgccggtgctggccagtctaggttttcggccctcgcccgccgatccgtcccccccgccggccatgtcgaagcaaggagggaaggccaagccgctgaaggcgcccaaggtcgacaagaaggagtacgacgagagtgatcttgcttatttgcagaagaaaaaagatgaggaaaaggcgctgaaggagctgaaggccaaggcacagaagggcgcaattggaggctcgggtctcaagaaaagtggaaagaaatgagcattgcccacccacccatctccaaaacacctaagagaacgataagacagctgcttatctgtgttgcgcttcactatatgatatatgtggctgtgagacaatgttgcctcttgtattccgtgtttcgcggtgttccagttggtttgcttgatccgaagatgtttcagcctctcatctgctagctttgatacacgagttatttgctattatgatattcatttgaagtggattcttcggcattgtttgaatgcactagcatatagttagtagct

SEQ ID NO: 156751 - DNA, 611 bp, Zea mays
  Clone ID: MRT4577_74534C.1
gaaacacctaaaaattggcagggggattgaagagtttccctaccctcggttgggggggaagcaacatcacatttttccaaggtcagtttggaccccccaacttccatccagaaacgaaacattattccgggagccagcccaggttgtaaaactcctcggccacctgcacccgggggtaagggataacctgttcggcctaaccccaaaaaagggccgtttttttttcaaacacaaagtgtccgagggacttgagcgaggacaacaacctggggaggctcctgaggcgcaagcactcccccatgttaattttttccaggctcgtaagggggcccacctcctcggggaggccccccaggttgatccactggaaaatgtccaggtacttgagccgtttaagggtgaacaccgaccccgggagcccccaaagggccgggcaggcttacacccggaggattctgaggcaacccaccccccccaatttttatggcaactcggggaggtcggggcatttggaaatggaaatggtctccagggacccgatttcgaaaacccttgggggaagttccttgaggtctatgcaggggccaatcgtcaggttggacaggcccgga

SEQ ID NO: 156752 - DNA, 114 bp, Zea mays
  Clone ID: MRT4577_74535C.1
tgccgctttgaagttgatcttgttgaaatttgccacccgaataactgcaactgtggacggcttgcatacctccccgtggccggagtggttctcactgcgaaggatcttgacgct

SEQ ID NO: 156753 - DNA, 1012 bp, Zea mays
  unsure (1)..(1012): unsure at all n locations
  Clone ID: MRT4577_74536C.1
ttcgaaggcaacaggcacccacctcttcctcctcttcctcctcctagcacagctagcgcctgctccccttcgtctgtgatcatgtcttgcagcagcggcaagtgcaactgcggctccagctgctcctgcggcagctcatgcaactgcatgtcccctgacgtggagaccgccgccgccaacagcatcaagaccatggtcctcgctgcgccgaccaccaaggccagcgccggcggcttcgaggcggccaccgagggcggcggctgcgactgcaacacctgcaactgcggcaccagctgcggctgctcctgctgcagctgcaactgagccggcccgccgggccggggtctcgctcacgcgaacgcagcctccgtgcatatcaccagcctcctcgcgcacccggtcccgcttgcctttccccacctactcgccgtcgcggtgccgtgcgccggtgctgttcagtctagggtttcggccctcgcccgccgatccgtcccccccgccggccatgtcgaagcaaggagggaaggccaagccgctgaaggcgcccaaggtcgacaagaaggagtacgacgagagtgatcttgcttatttgcagaagaaaaaagatgaggaaaaggcgctgaaggagctgaaggccaaggcacagaagggcgcaattggaggctcgggtctcaagaaaagtggaaagaaatgagcattgcccacccacccatctccaaaacacctaagagaacgataagacagctgcttatctgtgttgcgcttcactatatgatatatgtggctgtgagacaatgttgcctcttgtattccgtgtttcgcggtgttccagttggtttgcttgatccgaagatgtttcagcctctcatctgctagctttgatacacgagttatttgctattatgatattcatttgaagtggattcttcggcattgtttgaatgcactagcatatagttagtagctanaattagttgagacatccaaaaaaaaaaaaaaaaaatttgcggcc

SEQ ID NO: 156754 - DNA, 233 bp, Zea mays
  Clone ID: MRT4577_74537C.1
tcgtgagcggccgctcgcgatctaaaccaaggcgtccgacattgttgtccaaacaggaccagttcttatcacggtggcctatctcgtcgttctaacaaggccacatattccttaacctagctagctaacagttgactagttagatcgatccatcagatggcagtcattattatgatcaggatagtactgtgccagttcttcgtttgactcctgtttacggatacagtcttttt

SEQ ID NO: 156755 - DNA, 300 bp, Zea mays
  Clone ID: MRT4577_74538C.1
tttttcagggtgttcgtcatcgcgtgaaagctgacgctggcctgaactccgacggatctgccggccggcttgtgtgtgagattgccatctttcttcttcttctccggtcgatttttggtttgtgcgtctgagtctgaccatgttctgccattctcttcttcgtgaaactgaatttgcggtggggggggggggaatgaaaaatccgcagaattggattggctatgtcgaggggggacatgtgtttccacggcaaacggaaattctgggactcgctcacacgccttggttggtttgtcctct

SEQ ID NO: 156756 - DNA, 440 bp, Zea mays
  Clone ID: MRT4577_74539C.1
ctctccgtctctatttgtaatctgatagctgacatgatcatatcaatgtatcatgcactgctgtgtcgggttgctaagactgcggtgctggcgttcttgctgagctgcgcatggtgcggtcctaccaaagtacccccaagcaagaacatcactgccacctatggcaaggactggctggacgctaaaccgacatggtatggcaagccgacaggtgccggtccctactacaacggttgtggctgctgctacaaggacgttaacaagccccccttcaatagcatggtctcatgccgtaacatccccatcttcaaggatggtctgcgatgtgggtcctgcttctagatcaagtgcgataagcctgttcagtgctccggcaagcccgtgttggtgcacatcacggacatgaactatgaacctatcgcggcgtaccacttcgattt

SEQ ID NO: 156757 - DNA, 498 bp, Zea mays
  Clone ID: MRT4577_7453C.1
aggtagccaaaaaaaacatcgctcatacttatctcggaacacaatcatagcgggcagccaacagagaggcaacaacgggggcacgaacacccatttcaaagggtgaacggacactaacaaggtgacagaagtgaacggtaccctgttactatcgataggcaagataactccaacgaagccaggaggggccccatacatgaaaccatcaaatcgccgacgcctgcggcgcagacttcaacaccagcctggttccgaccgccggaactagctacgtctgcggagcccccgccaccaccttcgtgacgaccagaggaggcggcaccttcttcttaacctaggtcactgggcccgccatgatacccttcttcttctcgagcgctggcggaataagtagccgcaccggcaccaggaccggactggggctagctaacggggaagcttcggcctgtgagcttgttggcggtcatgttttggatagcgcttatcatggagttctaa

SEQ ID NO: 156758 - DNA, 781 bp, Zea mays
  Clone ID: MRT4577_74540C.1
cccacgcgtccgcccacgcgtccgctactatatataccaaacaaattcgttcggaggggagaccggcaggccatggctcgacgccgcccttgagtcctgcccccaagatgacgatgatccccctcgccggcttcaccgccctatctgccgccggcctcctgctcatcttctcctccttcctgctgcaaactcaagttataaattccaacacgaggcccgcctgacgagctaagaaactgatgattaacgagcaagcaggaggagccagaagcagcgaggaggagcggtacgtgccggtgcgcagggtggtgtaccggtccatgacaccggcggcggcgagtgcggcgacgacggcagaggcagcggcagcggcggcatcgtacgagccgttcgaggtgtgcgaggggtgccggtgctgcgcgccgtcgtcgtcgtcgtccaacggcagcagcagctgcgtggacacgagctgctgctacgccatcgactgcgacctccccggcaagcccttcggcacctgcgccttcaccccgcaaacctgcggctgcggcggcgccagcagcaactgcacccagccctcgtcctgatgatgactcctctttcctgcaacttggctacttcttctggatcatccatcgtcttacgttacgttacgattagatcgcagattagatgactcacgtcacgtactccatcatgatggatagattatccagttaattcccagctagcgttctgcgtgaagttaataatacaatgaataataatgtgtgttcgtttc

SEQ ID NO: 156759 - DNA, 462 bp, Zea mays
  Clone ID: MRT4577_74541C.1
aaaaaaacatttgtcaacagtgggaaacacacaaggaggacccagggggaaccacaagaaaaaaaaaaagaaaaaaaagaggagacaaaacggggaaaaaacaagaaaagaaagcagagaaacaaagagggggggaaaacaaggggaaaaaaggaaagatgcgcggaagcagggaacaaaaggggacaaaaaaaccaaacacaacaggaccccacccgcccgaaacggcccgacccgagcaacccgcgggaacaaagggggaagaagaagccagaaatagacccggacacaaaagcccgggaaaaaaccgcagggggaccaaaaagggacaaaagggaaaaaaaagaaagggctcaaaacgcgggggaaaaccggggacatcgggggactcggggacaaggcaaccgcccccaaaaacccaaagcctaccaaacgaagggaaaaaggggaaagacagggggg

SEQ ID NO: 156760 - DNA, 542 bp, Zea mays
  Clone ID: MRT4577_74542C.1
gccgccggcctcctgctcatcttctcctccttcctgctgcaaactcaaggaggagccagaagcagcgaggaggagcggtacgtgccggtgcgcagggtggtgtaccggtccatgacaccggcggcggcgagtgcggcgacgacggcagcggcagcggtgctgcgcgccgtcgtcgtcgtcgtccaacggcagcagcagctgcgtggacacgagctgctgctacgccatcgactgcgacctccccggcaagcccttcggcacctgcgccttcaccccgcaaacctgcggctgcggcagcaactgcacccagccctcgtcctgatgatgactcatctttcctgcaacttggctacttcttctggatcatccatcgtcttacgttacgttacgacctgatgacagaggatgacatgattagctagcacgcagattagatgactcacgtgtactcgatcatgatggatagattatccagttaattcccagatagagagttctgcatgaagataataatacaatgaataataatgtgtgttcgtttc

SEQ ID NO: 156761 - DNA, 744 bp, Zea mays
  Clone ID: MRT4577_74543C.1
cactcctatgggcgattgggtacctcgaggccggccggggaccggcaggccatggctcgacgccgcccttgagtcctgcccccaagatgacgatgatccccctcgccggcttcaccgccctatctgccgccggcctcctgctcatcttctcctccttcctgctgcaaactcaaggaggagccagaagcagcgaggaggagcggtacgtgccggtgcgcagggtggtgtaccggtccatgacaccggcggcggcgagtgcggcgacgacggcagaggcagcggcagcggcggcatcgtacgagccgttcgaggtgtgcgaggggtgccggtgctgcgcgccgtcgtcgtcgtcgtccaacggcagcagcagctgcgtggacacgagctgctgctacgccatcgactgcgacctccccggcaagcccttcggcacctgcgccttcaccccgcaaacctgcggctgcggcagcaactgcacccagccctcgtcctgatgatgactcatctttcctgcaacttggctacttcttctggatcatccatcgtcttacgttacgttacgacctgatgacagaggatgacatgattagctagcacgcagattagatgactcacgtgtactcgatcatgatggatagattatccagttaattcccagatagagagttctgcatgaagataataatacaatgaataataatgtgtgttcgtttcagaaaaaaaaaaaaaaaaaaagctgcggcc

SEQ ID NO: 156762 - DNA, 344 bp, Zea mays
  Clone ID: MRT4577_74544C.1
aaaaaaaaaaaaggggtacaaagaaaggtttaaaggggcccgaaaatttagggggggggggcccatctttttccaccctcaaaaggtgcaccaaatccagggggaaaaaggtgttccaaaaaaggggaactcaagggtttaccctaaaaaaattaaaaaaacgcgggggacaatttttggtaagggtaaagacttatgatcctttttcacttaaagaaagctcttggggtaaaaggaagggggggggaaaatgtataaaaaaggtaaacttaatgggggtggtgaaaaaaccattgttatgggaactttgggggggttaagaggaacaatttaaaaaagggggg

SEQ ID NO: 156763 - DNA, 713 bp, Zea mays
  Clone ID: MRT4577_74545C.1
cctcgaggccggccggggaccggcaggctatggctcgacgccgcccttgagtcctgcccccaagatgacgatgatccccctcgccggcttcaccgccctatctgccgccggtctcctgctcatcttctcctccttcctgctgcaaactcaaggaggagccagtagcagcagaagcagcgaggaggaacggtacgtgccggtgcgcagggtggtgtaccggtccatgacaccgacaccggcggcggcgagggcgacgacggcagaggcagcggcggcatcgtacgagccgttcgaggtgtgcgaggggtgccggtgctgcgcgccgtcgtcgtccaacggcagcagcagctgcgtggacacgagctgctgctacgccatcgactgcgacctccccggcaaacccttcggcacctgcgccttcaccccgcaaacctgcggctgcggcggcgccagcagcaactgcacccagccctcgtcctgatgatgactcctctttcctgcaacttggctacttcttctggatcatccatcgtcttacgttacgttacgacctgatgacatattagatcgcagattagatgactcacgtgtactcgatcatgatggatagattatccagttaattcccagatagagagttctgcatgaagataataatacaatgaataatattgtgtgtccgtaaaaagaaaaaaaagcgaaaaaaagcgggc

SEQ ID NO: 156764 - DNA, 1263 bp, Zea mays
  Clone ID: MRT4577_74546C.1
atggccatgcaggaagagctcaacaacttcaagagaaatgaagtctggagcctggtgccatgtccaaagcaaaatattgtgggaaccaagtggatgttctgcaacaagcaagacgagtatggggtggtgacaaaaaacaaggctcgacctgtgacaaaaggttatgaccaattcacagcctatgttgttcaccattcctttaagctctttcaaatggatccaaagagcgccttcctcgattggccaatcaaggaggaggtgtacgtggagcaaccccctgacttcgagtatgaacggtatcccgaccatgtttacaaactctctaaggcgctctatgggcttaagcaagcaccaagagcatggtacaaatgtcttagaggttttcttatttctaatgctttcaaggttgggaaagttgatcctactcttttcactaagacttgtaatggtgatttgtttatatgtcaaaattatgttgatgacataataactgattctactaatcaaaagttttgtgaagagtttagtatggtaatgatgcaaaaattcgagatgtcgatgatgggtgagctgacctactttctcagatttcaagtaaaacaactcaaggaaggcatcttcatctcccaaacgaagtatacgcaagacatcctcaagaagttcagaacgaaggatgtgaagcccatcaagacaccaatgggaataaatagacacttagacctcaatgcaggaggtaagtacgtatatcaaaaggtataccaatctatgataggatcattgctttatttatgtgcaaagaaaccgaaaattatgctttctggttgcatgcatgctagatttcaatctggccctaaggaatgtcaccttgtggttgtgaagaaaattctaagatacctggttcatacgcctcatttcgggctctggtatcctaaaggatccacctttgacctaattggatattcggatcccgattacgccgggtgcaaggtacataggaagagtacatcagggatatgtcaatttctatggaggtccctggtgtcttggatttcaaagaaccaacatttcattgccctatccaccgtcgacgccgagtatattgtcgtaggccagtgttgtgcgcagttactttggatgaggcaaacactccgagactttggctacaatttgagcaaagtcccactcctatgtgacaacaagagtgtgatccgcttggcagataatcctattgagcacagtcacacaaagcacatagacatctag

SEQ ID NO: 156765 - DNA, 817 bp, Zea mays
  Clone ID: MRT4577_74547C.1
cattgggaccctcgaggccggccgggattgtcaattcgtcttcaaactcgaagcactcagcacggtctgcgtcagtcggtcacattttcgcgcgcaacagcagcagcagaagcagccatggtcaggaagctcgcgctcgcctccctcttcttcaacgccagcgagggaagccagtgcctttcctcctcggcctccttcagcacggcggcgtcgtggcagtggccgtcttgcacgcaggcgaggacgcgctccttccggggcgagatcgtgtccatgcgccacgtcgacaccagcagcaagcgagaggagcaggaggggtacaagacgagcatgaacccagcctacgtcgtccacgactgctactccagctccctctccgactcctccgcggcgccagcagagcccgctgcggacgaggacgaggccatcatccacggcctccgctcgtccaccacccggcggctcctgttcgagcccgagtccacgagctccatcgtgaagaagacgaaaaaggaggcggcgttcagcggggccacggcgctggccatcgagtccgccgatccgtacggcgacttccggcggtccatggaggagatggtgctgagccacggcgccggcgacgactgggcctggctcgaggagatgctggggtggtacctcagggccaacggcgagaagacgcacggcctcatcgtcggcgccttcgtggacctgctcgtggcgctcgcctcctcctctggtccctctcgccttcgtggacctgctagcttgaagcagagcagccatcttattcttgaggctgccaacatagagtcat

SEQ ID NO: 156766 - DNA, 1021 bp, Zea mays
  unsure (1)..(1021): unsure at all n locations
  Clone ID: MRT4577_74548C.1
gcgattgcctccctcgaggccggccgggagaccggcaggccatggctcgacgccgcccttgagtcctgcccccaagatgacgatgatccccctcgccggcttcaccgccctatctgccgccggcctcctgctcatcttctcctccttcctgctgcaaactcaaggaggagccagaagcagcgaggaggagcggtacgtgccggtgcgcagggtggtgtaccggtccatgacaccggcggcggcgagtgcggcgacgacggcagaggcagcggcagcggcggcatcgtacgagccgttcgaggtgtgcgaggggtgccggtgctgcgcgccgtcgtcgtcgtcgtccaacggcagcagcagctgcgtggacacgagctgctgctacgccatcgactgcgacctccccggcaagcccttcggcacctgcgccttcaccccgcaaacctgcggctgcggcggcgccagcagcaactgcacccagccctcgtcctgatgatgactcctctttcctgcaacttggctacttcttctggatcatccatcgtcttacgttacgttacgattagatcgcagattagatgactcacgtcacgtactccatcatgatggatagattatccagttaattcccagctagcgttctgcgtgaagttaataatacaatgaataataatgtgtgttcgtttcagagattgtgactgcagttggttccatgcattttcagagtcggcggctgctgtcagggtcggcggcctaacctgttgtcgtcgtatacctactgtacgttaggtatagattgaaacattattttatactgtatgactattacaaaactataaagcaatacactcatttattattgcaaacttgtacacaattatgtagcttgagaagcttgtttgcttggggaatattgcaaaacctactccagttgnaaaaaaaaaaaaaaaaaaaaaaaaaaaaaaaaaaaaaaaaaaaaaaaaaaaaaaaaaaacccccaaaaaaaaaaaaaaagggggcc

SEQ ID NO: 156767 - DNA, 1073 bp, Zea mays
  unsure (1)..(1073): unsure at all n locations
  Clone ID: MRT4577_74549C.1
ggcgtcatcaaagagcatcgtggtcgtccctctctctctccactactatatataccaaacaaattcgttcggaggggagaccggcaggccatggctcgacgccgcccttgagtcctgcccccaagatgacgatgatccccctcgccggcttcaccgccctatctgccgccggtctcctgctcatcttctcctccttcctgctgcaaactcaaggaggagccagaagcagcgaggaggagcggtacgtgccggtgcgcagggtggtgtaccggtccatgacaccggcggcggcgagtgcggcgacgacggcagaggcagcggcagcggcggcatcgtacgagccgttcgaggtgtgcgaggggtgccggtgctgcgcgccgtcgtcgtcgtcgtccaacggcagcagcagctgcgtggacacgagctgctgctacgccatcgactgcgacctccccggcaagcccttcggcacctgcgccttcaccccgcaaacctgcggctgcggcggcgccagcagcaactgcacccagccctcgtcctgatgatgactcctctttcctgcaacttggctacttcttctggatcatccatcgtcttacgttacgttacgacctgatgacagaggatgacatgattagctagcacgcagattagatgactcacgtgtactcgatcatgatggatagattatccagttaattcccagatagagagttctgcatgaagataataatacaatgaataataatgtgtgttcgtttcagaggttgcgattgctgctgttgttcgtttcagagaattgtgactgcagttggttccattttcagagtcggcggctgctgttggcttgactcttgcgacacaccanacttgtactgtcagggtcggcggcctaacctgttgtcgtcgtatacctactgtacgttaggtatagattgaaacattattttatactgtatgactattacaaaactataaagcaatacactcatttattattgcaaaaaaaaaaaaaaaaaaaaaaaaaaagaagctggtttgcttggggaatattgcaaaacctactccagttg

SEQ ID NO: 156768 - DNA, 466 bp, Zea mays
  Clone ID: MRT4577_7454C.1
ccgacctgtccgttccattctgggtaacatgcattagtctgcaggagtggggatacctgtggcggttcccgtagcagcagcctactgccgctcctactgcctttccaagccaccgacggcctccttcggccgtgcgaggtccaccagccaggcgcaccaggcgacggcctggatgaactgcacagcgtcctccttccttggcggacacggatgagaccaaccgtccgtggtcgatctccttccagcccgaaccactacatggcgcttccgggtacctggccctctccatggcatgtgccagttctagctcggcccgctgtagcctgtgcgcatgggcttcttccatgggctagctgcctgcaaacttcatctagccgacagccgagtttctttggtgggagcttaccgagactacaggacacagctagctggcattccactgcacacatgaaggagcctgtgaaag

SEQ ID NO: 156769 - DNA, 276 bp, Zea mays
  Clone ID: MRT4577_74550C.1
acaccatacaaggggcagcttaaaaagccacagcgggaaatcaacgacgagacgaacaccgaggaagggaaggacccccacataaacacagcagaagccacacaaggccaggagcgcgaaaccaccatcacgccaagagaccgcgcaccaaaccacggcgaaggaacagccgctgaaatacgccgaaagaacgcagccccaacacgagcaaggagagcaccacgggacgcaggcaaagcaaaagcacccacgcaccccgaggacagggcaccacta

SEQ ID NO: 156770 - DNA, 565 bp, Zea mays
  Clone ID: MRT4577_74551C.1
cattgggtacctcgaggccggccggggatctcttccacgagtcctcgagtctcgattccgtcttcatatctgccaggagagctagacgactgggatcgtatctaggatcgtatcaaatgcgtccaagtacaggagctcatctaggatgccgaggacaagctcaagatcttcgtcaaaatgagtgaatagataaccgtgagatgtatctgatgactacatatgtgaggggattgaagaccacaccacaattcctaaacatgttcctcaggaccttgccgctgcatcttcctgaagagtacttcgagacaatagatgccgacgaataggataccaccctataatgtgatgctcctcctcatgctaacgcgcatagatgagctctatcccggatatgtcttatgtcatttcacactttgctgcactatgcaggaactaccctattgtgtcatatgacatttgccataaatgttgctttatccgactagaataaatttctggctagcaccatcgaaaagagactctgaacgactggattcgacacagtaaatgtgatgttgatcataaa

SEQ ID NO: 156771 - DNA, 399 bp, Zea mays
  Clone ID: MRT4577_74552C.1
gccaaaaggccggggggaggctaaaaaccaggggggggggggccaggttttgcacacaggaaaaatccatgcccccccccagggtcctgccggggaaccccccgggggtagtttattccacggggcagttacccaggttttccactccgggaaaaaaacgctggggggtagtctgtccaacatgacattttaggggccgcaaggccccccccataagccttgggcattttccggggggggttcgacccccacgggcccctgttgaaacacggacaggaactccgggtcctgaaaaaccttgaccaaaaaggtggcccctgggtttttaaaaaccttcccggggttccttgggggcaggccaaccacgggcactccgggagccacaccggcccggacccc

SEQ ID NO: 156772 - DNA, 563 bp, Zea mays
  Clone ID: MRT4577_74553C.1
agcgagtccgacgtcgacctccgcgccgaggacctcgaggtggtgctccgggaggcgtacgcgcacccggccgtcgagggcgtcatcttctggggctgcatgcagggccacatgtggcgccaggacgcgtgcctcatcgacgccgacggcaacgtcaacgacgccggggagagattcgtcgatctccggagggagtggacatcgcacgcgcgcgggcagatcgacagcgctggacacttcaaattcagggggtaccacggcacgtacatcgtgcagctcgcgacggcgacggggaaggtgcacaagacgttctccgtggagaaaggggacacccctctcgtgctggacatgaacctttgacgatcacttctaccgttccctagttatatacagacacatatggcattgatttgacccaatggaacgcaaacagaaagcagcactccgattgctacatgtatctatctatgattggtattgtaaggcaaacttaaggtattgtactccttaagaattattggtgatggtgaataaagtgaacgagctattcctcgttttgtagt

SEQ ID NO: 156773 - DNA, 268 bp, Zea mays
  Clone ID: MRT4577_74554C.1
atggtttactggaatattatcgactggaggtgggacaaccagacaccacagccacttcattcagctggtttcttcctgaaccctctattttttgatggaattcgaggtgacatatcaaatggaatattctcaggaatgctagactgcatagaaaggctggtacctgatgtgaaaatccaagataaagtacagcgagagctccacatataccggagtgaaacagcagtggattttcgtaggcagatggctgtccgatctagacgaactt

SEQ ID NO: 156774 - DNA, 434 bp, Zea mays
  unsure (1)..(434): unsure at all n locations
  Clone ID: MRT4577_74555C.1
tctaaaaaaaaaaaaaaaaaaaaaaaaaccgcacggttttaaaaaaaaaaaaagacagaaaaaaaaaaaaaaaaaaaaaaaaaaaaaaaaaaaaaaaaaaaaaaaagggccccccccttttaaaaaaccaaacttaacttccccttccttccaacgtaaaaattttttaaaaggccccccaaaatcaaattaactcccccccttttaaaaacctcgaacctgaaaaaaccctgcctttaccaaactaaaaccctttcaaaaaaatccccttttccccacttgcctaaaaaccaaaaaaccccccaccaatcccccttccaaacaattccccaccctaaatgccaaatggaacccccccttaacccccccataaaaccccccggtttttgtgttacccccaanttaacccttaaattttcaaacccccaaacccc

SEQ ID NO: 156775 - DNA, 215 bp, Zea mays
  Clone ID: MRT4577_74556C.1
cacattgacgatggtgtgaatagcggatttcatcacatcaagggttttacgaggcgtttcacccttgttatagaattccaatctctgagaagcttgttcaagcaactttcgggcaaatacagatgtgctaagccttcaagtatcatatcaatcggacgcgtagtcagacgcgtgaacggacgcgtggacatacgcgttatcttacacgtgaatca

SEQ ID NO: 156776 - DNA, 964 bp, Zea mays
  Clone ID: MRT4577_74557C.1
gttctgatgaacttggaatcaaggtaaattattcttgctcctgatataatgctaagctgggttgttgatttttttgatcacttcgtttctagatagtagtagttctgattaaaagtgagttatgccacagtgttttgagtctaaaataacttatgtgtaataaatataaatatttagtttctttaataaacatgtgttacatatcacttctgccatagttacaactgaatttgatatgagctacagatgatctaccatatcttttcaacttggttaaataatttctctatctttgtatataggctcaagtaacctgtctctttttggtcattgtgctccaacgtgacatcacaacaatcattgaggagtgtaaccggcaacctcagctctgaaagaaccctagagtaaacactcacatcaagacactccactgttcactcttgtgctgctcctaccaatggagcaagagcatctccacctggcaatggtccactcgttgtattcatcactaagtcagctcgattccaccaatgggtgttcatgctgttggatggaaaatgacaacccctctttgcatcatgcactgttttgtctttctaaaatatttctgtttgctcctagcggcttgaacccctacaagtgcacctggcattggttaccaatctgcagattcataacatctcatgaaaaggatacgtgttggacaaccagataaggtattacagagaatatgaataatctggaggttctactgatgcatgtaaattatggaattatggtttcaattctagattatttgataatggcacctctatatgctcattgggcaatgatcagaaagttggaggtcatagaaatactgagaatggtgaattttgtttacatttatgggcacttttgaaaagaaattattttgtatggtagtattgttgaaaagatcaataatttagaggatttgatgatc

SEQ ID NO: 156777 - DNA, 654 bp, Zea mays
  Clone ID: MRT4577_74558C.1
ccggattcccgggccattgttcactcttgggctgctcctaccaatgaagcaagagcatctccacctcgcaatggtccactcgttgtattcatcactaagttagcttgattccaccaatgggtgttcatgctgtaagtattgtcacaagtagtccatttatattatcctggctatcgattgcttatatggcatcgaccttgctgccatttcaacctatggtgtcgccatctcttgcaggttggatggcaagtgacaacccctctttgcatcctgcagtgtttcacctttctaatatttctgtttgctcccagtggcttgaacccctacaagtgcacctggcattggttaccaatctgcagattcataacatctcatgaaaaggatgcgtgttggacaaccagataaggtattacagagaatatgaataatctggaggttctgctgatgcatgtaaattatggaattatggtttcaattctagattatttgagaatggcacctctatatgctcattgggcaatgatcagaaagttggagatcatagaaatactgagaacgctgtatcttgtttacatttatgggcacttttgaaaagaaattattttgtatggtagtattgttgaaaagatcaataatttagaggatttgatgatc

SEQ ID NO: 156778 - DNA, 364 bp, Zea mays
  unsure (1)..(364): unsure at all n locations
  Clone ID: MRT4577_74559C.1
ttttgtaatagatgccgacgcgtcgcctacggggggccctgntcctaaccaagcctgcgggttctggggatggtgttgggcgccctnttcccttgtggaagtgtttatctactgtcgcgtgagaaatgtgggggggtgggggtgtttttttttttcggcnntcgctggagcctggggctgtgtgtgtgggcgtcgctggggcacaatgtccatgtggcttgggtctgctgctggctgggctctggccctgcgtggggtgttctttcgccgggtgtgggcgtttggcgttgggcgggtgctaccctgttgtgggcgttcttgcggtggacgctggcaggttcgggggttttcttttcttgttttt

SEQ ID NO: 156779 - DNA, 498 bp, Zea mays
  Clone ID: MRT4577_74560C.1
ctacgctagcttcgctcgcatcattgcatgatgagattgcgtggtgaacttgaacgggccggcgcgcccacgagacgtaccacgggtgagcgcatcgatccagctcccctgccgccctgcgcatgcacgcgcgatgccggccggctgctccggcagtccggccccttcccttcccttccctgcccgtgcctggcccttgagcccctgacgcgcgcgcatgcatgtggcgtacccgcccggcggtggccgtgcgtgccctcatgcatgctgccgcctgccgcgcgcggagccccgcgcgagccgcccacagaaccgagcgagggaggcaggcagagcagcggccagcgctgaagcccacggtggcagcaagcagcttgcgcatgtggcctgtctaccggccgccggcccgggtaggcgggcgagccccgtcgtcggatggatccgtcggctttcggtttcttcagccgtggagtctcgtgcgcgcgcgggacgggactc

SEQ ID NO: 156780 - DNA, 346 bp, Zea mays
  Clone ID: MRT4577_74561C.1
gggaaaaagaaatcacatttgtaagcattttctggagcaaaatttttcactgccaaagaggggaacattacatttgtaagtgttgtctgaaaacatttggccaaaaactggacatgcgatttacaatgcaaatctctttttcttaaccaaaccaccacggttggtttgttatggaacagcaaactttttatctcctgaagggtggaatttttaccatgtccccatcccccacttgatttaaaacaagtggaaacacccgctttccataactttttgagcttacaggctttagtattttgtttttgcccatatttggaccggcttttttttccactttatgtttttt

SEQ ID NO: 156781 - DNA, 352 bp, Zea mays
  Clone ID: MRT4577_74562C.1
gtcgcgatgcttttagactacacaaataattggaatgactcatgggttgagaaagacgggcggaaatggaaaatagcgtcgctgagagtgactgcggtttgctatctttctacatcgacctcatctggtgcgctcttaatgtggtttaatccatcccgtcatgactgcggtctaaatgtgttctttatagtcatgacactaatgcttgcttttgcgcacgcaatacacgctttacatgctaaggtgcatggaagcgtaatccctggctctgacatctctgtgtactgcgcatacctgtccttcacgagtctattgagtgaaccggatgactatgagtgcaacgggctttaca

SEQ ID NO: 156782 - DNA, 582 bp, Zea mays
  unsure (1)..(582): unsure at all n locations
  Clone ID: MRT4577_74563C.1
aaattcggcacgatgcaggagagctcgcagccgaggtccgagaacgacgaaggcttgcgccgccgagaacactgcggtacaaggaatgcccttgagcagcgcgtcgtgcccagctgcggcgggcccggccgcgcctcggcgagacagtctttcgaacgagcacccctccgcgtggagaacgcgcggctgcggaaaggaagtcgacaggatctcctccattcgccgccaagtacgtgggcaggcccatggtgcccttccccgtgctgtccagcccgctggccggggnccggggcacgcgcccccgcgttgccgccgctggacatggcgcccgccgtatggcgctgccgctgacatgttcggcggcggcggtgtcgtcgctgctgctggtgctgccggtgccggggacctgctgctgaggggcgcccgccgtgcagtcggacgccgacaagcctatgatcgtgnagctggccgnggcggccatggaggagctggntcggatggcgcagctggacagccgctgtggaacgcgcccgcggggctcgatgggtccgctgaggaggagacgcttaacgaggaggagta

SEQ ID NO: 156783 - DNA, 473 bp, Zea mays
  Clone ID: MRT4577_74564C.1
ctagtcctagacttgcgtgcggcggccctttttttctgagtttttatgtatgatacagcttacccgcttattgcttgtccaggcccagctgaagactatagaaggcgattttttgcatgagaatacaaggaccatagaggacacgacatccttgcccctccggaggatcctaggccaccccactcgtgtaactgctggccctgtcaaactgatgtcaaaggagacacacgtaaccatcacatagttcatggaggacgatcaggacagcggcaggcaaaccgttacaaagaaccaaaacctagaaggtgacacgatcttgcgacaaatagcttaaagggcgacaacgaggcaccattgactgacgaagaagcaccactcgtgagcactgccgaagcgtcaatgagaccaccacgattgacagatggaaagaggtgaggacccctcctgagactacctgcgcggaatacgtgagc

SEQ ID NO: 156784 - DNA, 354 bp, Zea mays
  Clone ID: MRT4577_74565C.1
aaaaaaaaaaaagccccccccaaaaatattttttggtcctggggcgggtggaaaaataaccgaacgggggcttatggggggggcagggttaaaaaaggggggccccggtggaaaaagaaacctggccgttgtagcgggtaaaggccccaaaaggggtccgggtttgaaaaaccctttatttttagacatgggggggcccccaagatgggatcaaggggggggttttggattcggaaaaaaggcgcttgggggaaaccccgccccaacgatggtggagattcttttccgagggggggaggggctctaaaagggcagggccagcaaaactttggtgagggggacccggggggccaa

SEQ ID NO: 156785 - DNA, 275 bp, Zea mays
  Clone ID: MRT4577_74566C.1
caactatagtagtgattggctcgatgcccatgcgacatggtatggtaagccaacatgtgccagcccggacgacaattggggcggatgtgagtacaaagacgtgaacaaaggcccttttaacaacatgggcgcatgtaggaaccgccccatcttcaaggatggtctaggttgtggatcctgattcgagatcaagtgctacaagccagccaagtgctctggcaatcccctagtggtgtacatttcaaacatgaactacgagcccattgtggcgtacc

SEQ ID NO: 156786 - DNA, 464 bp, Zea mays
  Clone ID: MRT4577_74567C.1
aaaaaaaaaaaaaaaaaaaaaaaaaaaaaaaaaaaaaaaaaaaaaaaaaaaattgaacctaaggaacgaaaccaccactaagggcaaatttctgaaaatatccataaaactagaaggccgtttcccccgtgggcgtaaccgggcctaggggcgacttttggggattccctttacattgggggggccgtgggtttccatctggggggcccattaccccctttgggggcccaatttacattcctggggccgcattttcctttcgccgggtgggggaaaaccctgggggcccccaccttattccctttccaacatttccccttttctgaatggtggatggacgcccaatgggcccgccccattaagcccttccaaaagtgggggctccccgcagggggaccggtccccccctcaacgccctatttaccgccgctgggggtgggtggcctccctttgtggcccgttcc

SEQ ID NO: 156787 - DNA, 725 bp, Zea mays
  Clone ID: MRT4577_74568C.1
gccggccggtcccatcaggtgagactagagtagactaaacacggcgcgcggccgggtcgcgctaccatgcttgccgccgtgcagccgccggcggcctccgccgtcatcaatcttgctcatgctcggcaggcagccacataaggaaggggaaggagaaggagaaaggacatggcggagaaggaagcaccacggtcctttctcgctcgtcttcctcctctagatcggtcagcggacattggaaatgaagagagaagcagctgcgtcgtcatcacgcatcagatccactcctcacagtatccccctgctgatccagtacagaatggcgtgagtaacaaacagcgctagcactactactactaccattaccaaagagagagagagctgaattctgacctcaagtcgttcgcgctactcatcacactctccatgctcccgcttcattaccgacatactcttcctgcatggaccaactgccaagctgaatcttctgactcttaagctctcggcgttctttgcgttcaccgccctcacatctgccacatgcgtcatgttccacaccttaaagctgaaggccgtcgtcaagccggaactattcatcaccaggagtcagctcagggtttctaagatcctcttcggcattgccgtggtttcgctcttttcgacaagcatatttcgatcagctatatattccctcctgcccaaaaaaaaaaaaaaaaaggccccta

SEQ ID NO: 156788 - DNA, 317 bp, Zea mays
  Clone ID: MRT4577_74569C.1
tcagaacagtcgtcttcctcgtggagaagcggcaaggcgagtttgtcggagtctcacgccccgttcgtcgtcgacggcggccacgggacgtgacagactccagctcggacagctcgtcggagaacttgtacagcccccgctacgagtcgagtcggctgctcgctccgagtcgggcgttcctagggccttcaacaccgagctggacagggagttaagcaccgcctctgccttcgtcatagcttcgccgcctctggcagaggcacaactgcacctctacgacctctacacaatcgccacttaggggcccttcaccgtgc

SEQ ID NO: 156789 - DNA, 404 bp, Zea mays
  Clone ID: MRT4577_7456C.1
atctagaaagagagacagaggggaggaaactgagaggcagaccgacagagagacgtatgtcggggctgatgaactgatgttatgcatgcttggggcataaacaccgttacttgcgtctgctgcgcctgctatctcatgcgcagggtgttatgctggactatgactcagaggcgtgcagtcttaacgccgcacaaatttgcttggcgctactgggtctgtaaccctagcgcgatgacgaatccggtgaatcaatggctgctctcgtacgttggtgaattactatctgcggcgccgttatacaccgggtatgactaacatgtctaactacggtgtacagggtgctgacatcctctattgttcggagctcgagccaccactgggtgattgtctgttacaatgacagg

SEQ ID NO: 156790 - DNA, 650 bp, Zea mays
  unsure (1)..(650): unsure at all n locations
  Clone ID: MRT4577_74570C.1
ggcgcgcggccgggtcgcgctaccatgcttgccgccgtgcagccgccggcggcctccgccgtcatcaatcttgctcatgctcggcaggcagccacatgatcggaggatatatggtccttttgctgcagagcgtgctatatattcatatttctatggcccgagttttttttgccgtggaacgtcgcgacagtgaccaagagatcgaccttctgtgtgccatgcatgaaaacggcggaaaagcaatgaagggaaggagaagaagaagaagaaggaggacatggcggagaaggaagcaccacggtcctttctcgctcgtcttcctcctctagatcggtcagcggacattggaaatgaagagagaagcagctgcgtcgtcatcacgcatcagatccactcctcacagtatccccctgctgatccagtacagaatggcgtgagtaacaaacagcgctagcactactactactaccattaccaaagagagagagagctgaattctgacctcaagtcgttcgcgctactcatcacactctccatgctcccgcttcattaccgacatactcttcctgcatggaccaactgccaagctgaatcttctgactcttaagctctcggcgntctttgcgttcaccgcgctcacatctgccaca

SEQ ID NO: 156791 - DNA, 362 bp, Zea mays
  Clone ID: MRT4577_74571C.1
gctccaaacataggctgtgcgcaagaatgcaaacgttttaaacgctgggtctgcaaaaagtactgggcaataacggacgcggaaaaccgaacataacaggtaatactgccttgtcttctgaccggacaaatcacatatatgctgccgattacacattaccatacttaagagtgagggatgaacaagcctctgccagcacgaagataccgtatagtggttacaaagagagaatatataagggagcgagatcattggaaagttctcacttgtgagggcgcaggactttggagacaggccaaataactgcaaatatacgggtgcttacacatttgaaagcgacctcctgaattatgagctggccc

SEQ ID NO: 156792 - DNA, 764 bp, Zea mays
  Clone ID: MRT4577_74572C.1
aaatgtgtatgtggtatgtatagttcgtaacttatttgttttaaaatgttccacctttctagaaaaaattctctctgtctataaaaaaaatatgattctgattttgagaatcttaatcaagttgacatggatggactaataatggaccagcaagttagcttgcttgtggtcgggcaagatgttttcaaatcaaaagctaaggtaataatatgtacttgtacttttcaagtgtctccataggttaatgtgtatgacatcagcatttacttcataagcatgtttgatttggtcttctaggtgggttcagtttgaacaaccctgacccatacctcttgcaaggatgcatatagcctgcttcagaacttgcacataaggtgacttctgctcatggatatcctgttagatacaagcaacctttccaagtagtgttcagagcaggtgaagggaagcaaccttacatccagtaggcctagctcaacaagaaatgttatgaaaaagagcccaccgtctatcgtggtgaagctttctaaaagcagatagcagtcaaactcgatacacacgttcatctgcctcaacagctattagtttgcttgttgcacatgttggagattctagagccattattttcaaaggacagggtaagtttattgtcgtaacatggcatatctcagtgtccgttcctatgcttccacttgtaccagaaactttctatatgatgtgtattttcctagacgagtttttcccatgcaaaatagatatattag

SEQ ID NO: 156793 - DNA, 616 bp, Zea mays
  Clone ID: MRT4577_74573C.1
ttgtgggcctgcagagcggggcatgtgggctgaagaccgtctccccaccatggtgggaagggacaaagggtggccctggcagatccggacgggcaggactgggtgtgtcccatgagagcacctccttcctggcctttcctgtggactttgtcccacaccacctgcctgggttccttcctttagtcacttccagctccaggcacagcagttggtgactccttggtgggagccgtgtcccacccggtcctgatactgccgtcttctctttcacagtcctccaggcttgggccagccttgggggcagcagagcttctggggtgagtgtcgagatcctgtgtcctgagagcggtagtcagggagagggctggtcggggcagggctgcccgggcaggacacaggatgcggccggccaggctggggccaaggtgttcagacctggactttgggctcgtgctttcttcatggttgcgccttgctcgctgtcccttggagtcttcatttggttttgctttttttgtttgtttgttttcacctaatttttgccagacttaagctagttttgctgccttttgaaactagtggaagaatcattttattcctggggataatttggggc

SEQ ID NO: 156794 - DNA, 609 bp, Zea mays
  unsure (1)..(609): unsure at all n locations
  Clone ID: MRT4577_74574C.1
aacttgcttgcaattgagtatcaagggattgaggcttacaagagcacacacgtacacagcagagcaaataggagtagtttacaagcggcaaattggaagagatcaacccaacacgatggccggcgaaggagacgacgtcaagctgctgggcgcggcggtgagcccgttcgcggtccgcgtgcgaatgacgctgcacctcaagggcgtgaggtacgagtacctggagcaggacctgttcatcaagggtgagctcctcctcgccaccaacccggtgctcaagaaggtccccgtgctcatccacgcaggcaggcccgtctgcgagtcgcttgccatcgtcgagtacgtcgacgaggtctgggcttatggcgcctcgctcctccctgccgaccattacggccgcgccgtagcccgcttctgggccgcctacattgatgacaagctgttccccgcgtggataggcatcctacgcgccgccacggaggaggacagagccgagaagctcgaggccgcgctcgcggtggttcggcccctggaggacgccctcgcccaatgctctggtgngaaggacttcttcgctggcgactccgtcgggtacctcgacctcgcgct

SEQ ID NO: 156795 - DNA, 346 bp, Zea mays
  Clone ID: MRT4577_74575C.1
aaatgaccaatgcatgcgtaactcaagcaggcgctaaaacgaatagtatatgggcacatgaaccgggatcggaaacaatacactggttatgtccttagacatttatttctaagattgactggcgctcatatcaaatacagggttaacgtccgcgtgcctgcgattatataattatcctatagcgccctctaagttcactttactggatgtcgctatacaacgtcatgattgctgaaaccttagcgtaccctaaatcaaactgcttgcggtaaatcctgcttcctctagctggcatattaacagataggtctcaaccgatcgcccttctaacagatgcagcatgctg

SEQ ID NO: 156796 - DNA, 772 bp, Zea mays
  Clone ID: MRT4577_74576C.1
taggggccttttttttttttttttttggggcggaaggacgtgttcatgtactaatagtctgggcaaaactgacaatcgaactgaactatcctttggacaggttaatcaactgactgactactactatttcaacaagaactcccatgttcccgcggggacttcactctccatggcctccggcctggaagcggcctcgaccgtcgacagcctggggctcagcatcgccgtcaacggcctggagctcagcatcgcgcccccttcccggtgcgtctgcggcggcgcggcgggggccatcaaggttctgtgacttggccgggacaccgagcgagctactcgcatttggctctcggcccctgcacgcatgcgtttcatcaagtattatcagcctcgtcaggctgccgcgcgcagccgggtttcggtcttgctggttgtgttggtgtgttgtgttctgttgtgttgtgttgtgttgtgcgcaaggaatgtttgtgaagtgcattgcgttgtaatactctaatgctagcagtgttgtggaatgtaattaggggagagggatcagctgggattggggggttgatgggtccctgtctcgacttcgagtgggttcgtttcgtgttccaatccgaggaggcgacgacgggcgcgaggcgtcgtgtggctctgagctccccgacccctcccaataattggaccgttccgtcgttggtaggcccgtgccgtccaaaacgtactccctccagtacaataaaggtagtcgtttaggacatgattgtgc

SEQ ID NO: 156797 - DNA, 820 bp, Zea mays
  unsure (1)..(820): unsure at all n locations
  Clone ID: MRT4577_74577C.1
agtacttccatctatcgatcggggtaggcagcagcagcgatcttgtccggtccgatcttgcttgcgcgaattccgacctctttattaatttctcctttgtgcctgcctctcaacctggtctctcgtcatcaatcaatcgagccatgcatcaatccatctctacttggtagtacaactagctcgctcgtggcgatcgatctccttggcaagcaacaacccaaaagttggtgagaattctattcctctgtaccagatagagagagaaacccagcacccagcagcagcaacaagcgcaggcaatggtagctagcttgtaacagggacaagcttcctctctaacctctttttctctttgttctcttcgcaggccgctttgttccctcgcccgccctctttagccagccaccagccccgatctccctcgatctcctctcctctttttaccctgtcactcattccctcccagccggcagggccggccttgatcctgccacatatggggacgggctagcaaagcggaactgcggacaccgagaggctttccatatcttcatccatccatcatcattaagtacgtggtggtggggcgcgggagtgccgtgtcggccggccatgacatggtgcaatagcttcaacgacgtgcgcgccgtggagaacaacctggcctccgccgcggccgtcgcggcggcggccgccaagaagcagcagcacaccagcagcaggcctcctcccacgtcagccntcgttaggacgtgccccgcctgcggccaccacgcgcagtatgaacagttgcaggcggcgtcgacgatacaggatctgc

SEQ ID NO: 156798 - DNA, 495 bp, Zea mays
  Clone ID: MRT4577_74578C.1
gattaacaagcaccggtgggtggtagaccattaactatccgcacaagtacggctgtccaagccactgaacagtcaacagggctgctaggtggtcacacacacacattgtctttttacatgcatgagcacatgcatcgggggggggggtcggacgcactgcccgccacacatacctatatatatgtatccatgtttgtgtgcacagtgcatggggcacacggttacataatcctatatctgatacagtgtgctgttaattctactgtgggtctccacacaactggattttgttattgctggcttgctcgcttgattacgtgcactggtgtgtccttacggggtggatgtcatcatgggattgaccttgttgcggtttgtggtcatgctgctggtgtaaggcacggttacgccactcttgccggggatggtggtgtcggcgtccatggggacacttttgccgctgtgggggaggcttttggtgtaccggttcgccgc

SEQ ID NO: 156799 - DNA, 1451 bp, Zea mays
  Clone ID: MRT4577_74579C.1
gtcgttgtagtatagtcgccagtacttcggggcccgcggcccaggggggcggggcaccacaggtactcttctcctgcttggcctcttgtgccgcaaccgcgagtgcggcctacggtagcctccaaagcagcacatccaaagcagggaccgaatggacatggaccggccggaggaggaggggcagcagcggagggagacgatgacgccggtgctcctcaggctgttcggcgtggacgtccaccggggtggcggcagcggggagccggaggagtcgccgatggacctgaggaagagctccagcatgcccgacctcaccatcaacccgctgctgtcgccggaggagaaagagggctgcaaggggtacgcctccgacgacgcggagctggcgtccggccagcagaagcgccgccgtcgcaaggcacaggacaggaagaaaggaattccatggaccgaggaggagcacaggaagttcctggacgggctaaggcagctgggcaagggggactggaggggcatctccaagggcttcgtcaccaccaggacggcgacgcaggtggccagccacgcccagaagtacttcctccggcagaccaaccccggtatgaagaagcgccgggcgagcctcttcgacgtcggtatcgcggactacaaggacaaccaggtgccaggccctcagagcatcgtcgctgccaaaccggcgcctacgcaggagataatccacaccgaccgcggcgacgtccccataccaagatatagaggcctcggagagattttaggcagtaacatgcaggttaatcaactgactgactactactatttcaacaagaactcccatgttcccgcggggacttcgctctccatggcctccggcctggaaacggcctcgaccgtcgacagcctggagctcagcatcgccgtcaacggcctggagctcagcatcgcgcccccttcccggtgcgtctgcggcggcgcggcgggggccatcaagggttctgtgactcggtggtaacaacgcagagtacgcgggcatttggctctcggcccctgcacgcatgcgtttcatcgagtattatcagcctcgtcaggctgccgcgcgcagccgggtttcggtcttgctggttgtgttggtgtgttctgttgtgttgtgttgtgcgcaaggaatgtttgtgaagtgcattgcgttgtaatacactaatactagcagtgttgtggaatggaattaggggagagggatcagctgggatttgggggttgatgggtccctgtctcgacttcgagtgggttcgtttcgtgttccaatccgaggaggcggcgacgggcgcaaggcgtcgtgtgggtgtggctctgagctccccgatcccgcccaataattggaccgtgccgtccaaaacgcatacgccaactaatcttcggaagaaagtcgcagctttacgttcaggggagagggatcc

SEQ ID NO: 156800 - DNA, 571 bp, Zea mays
  Clone ID: MRT4577_7457C.1
accagcgtcctggcggcggcctgacacccatcctgggcccattccttgcatctattactgcggctctttcaccagtgctgtgtaccttcaacatccgctccgagagcctcacggagctgatgccgacccaggagcatgcccacttgattgactgcttcatcaatggcattgacaatggcagaggccctggaaaaggtccttttgttgctgcatctgttactgcagcagatcctaaaactattcataagactatcgttctgcaacctatgctcatagctgataccagtgaggctgctgatgtcatccacagagccaaccaaggcccagaccgcagcacgcgctgcaggatgcctgtatttatgtcccgattcagctacctatgctgtaacatgcactgttacttgcaccgatactactgcaaacatgactgtcagactgactatcggactgcaactgggaacgccattgctaaggccaatcctgtggaagatggccaagaacctcgacaagcactgaggcagccattgggggagcgaattggttactatctcgtgctatctatcatgctgtc

SEQ ID NO: 156801 - DNA, 464 bp, Zea mays
  unsure (1)..(464): unsure at all n locations
  Clone ID: MRT4577_74580C.1
atgatacaaggaaaggggcacaaaacgaatngagggatattaacagtgagcaggcacgggtgatgaagcaaaacgacagaaacctcaaccagagccagcacgcgggcacggccgacagaacctgaatcagaagcgcctgccgcgatgcccgcacccagaacgaagccagaaacgggcggcgagaggccaactgcgaaacgggcggacatccgctgcctgaacacaggatcaacaagcccaaccagggcactaagaacacgagggtgatgacgaggatgacgatgatgatgggtcattatggagctgccacgcacaacattgtaatggctcccagccgactggccctctgaggacaccagagccaccaaagcagcgcctgccacgctgcctccagcaacatcgtgctcaggagcaccgcccaagctccggggagattcgttcgccccaaagacagacggagctga

SEQ ID NO: 156802 - DNA, 625 bp, Zea mays
  Clone ID: MRT4577_74581C.1
ccgggcctagccgctatccattctttcatttgccgtcgccgctcgtcctgtctgctgtcgatcgtacatcggcgcagaaggctctgccagtatgctctgccctaaatcaagacaggcacataccccatgcccagcactgacgcggtgaccctgaccctacgattacgatctacgatgctgcgatgacagagaatagggtgcgcatgacgtcccctactgcgtgacaccttgactgttgctagaaggagaatgcgtctagagaggctcttgaggctgccccgattggctgcaacatgtacatgaccaagtatgcacgaaaggctgccttacatcttcggtgccggtttcacccattgcatgtccttactctaaacaagatactgtcatgtgctctggcttgtaggatgcagactgcaatgaggtgtgccctggtcaagactgaaggcaccggtgctagggcaggacattggcaagtactccttcttgctgatgcatggacaacatggctgagcatgccagggaatctctgctacgcgccatgatcacgctcactgcccgccacaagattatcgtgagctgaaggaggtgctccaccaagatgatgcgtgccgagtacctgtggtac

SEQ ID NO: 156803 - DNA, 2524 bp, Zea mays
  Clone ID: MRT4577_74582C.1
gccgtggcagccggtttgacccgcccccgagcgttataagctgtttctccgggaacgtcttgtcgcgcaagtcgctcgcgccggccgcctccacctgcttgctcggtctcagattcccgcgcgcgaaagcgtggaccggacagccggcaggcgctcctttctttcattccctgtcgtggtctctcgtgctctccgtccgttctaacttctgcggcgcgcgaaggtactgtgggaatcgctgctctttccttgattccggcggcggcggaggtgcgcgggttccgttcgtcgcgccgtgggggtgcgagggaggcgccgcgcgcggcctcggattcgatcggacacagcgtccgtcgcgcggcggcggcggtggccgacgacggatggagtcggtgaaggggtgggtggccgccgactacgcggcggagcccatggcgtcggtgcagcactcgttgcgcgtcgcctacgtggtcttctccttctgcgccgccttcttcctcggcggcatcaaagcggtggtggtcgggcccgttgccgccgccgtgatgatagtgggcaacgtcggcgtcatactcgtgctcttcccggcgcacgtctggtgggcaatctactcgctcatcaagaccgaccgcatcaacgcgggcctgaagctagccgtgctcttggcgctacccgtgctgttcggcctctggctggggctgggcatcttgggcagcgcgctggtgggtctcgggtacggcttcttcacgccgtggatctccaccttcgaggcgttccggcaggaaagcgaggccaagaagttcgtgcacggcattgtggatgggacgtggggcacgatcaagggcagctgcacggtggtcagggacttcgcggacatctgcttccactcctaccctgtctacctcaaggagctgcgcgagggctcccagaatcgtgagccccattccataaggttgctggacgtgccctcatgcatagtcgtcgctctcctcgggctagtcgtggacataccactttacacggtgattgcgctggtcaagagcccctacatgctcttcaaaggctggcagaggctgctgcacgaccttataagccgagaaggcccgttcctcgagacggtctgcgtgccgatcgccggcctggctatcctgttctggccgctggtggtggtcgggagcgtcctgctggccatcgtctccagcatctttgtggggctctacggagcggtcatcgttttccaggagaggtcgtttcagaggggcgtttcgtatgtcgtggccatggttgcggagttcgatgagtacaccaacgactggctctacctccgtgaaggaacagttctcccaaagccgtcctacagaaagaggaaaccgtcgaactccacggaattctcggtgagaacaaacgcctccggcggcaaaggagctgaccaccctcctggccccagtgaagcaccggcaatgttggtgccgaatctggcgcctgcgagatcagtgagagaggctatacaggaagtcaagatggtccagatatgggagaacatgatgaagtcatgcgagcagcgggggagggacctcctgaaccagaacgtgataacggccgcggggctggcggagtggctgaggggggcgaaggagggcgggcaccacgagaccgtgagcctgggcctgccgtcctactcgctgctgtgcaccgtgctgcagtcgatcagggccgggtccgggggcctggtgctgggcagcttcgaggtgaaccagcacaaccggccgcaggaccggctgctggactggttcttccaccccgtgctggtgctcaaggagcagatacaggcgctgaggatgaccgaggaggaggtcaggttcctggagaagctgaccgtcttcgccggcaacgtcgcgggcgctggcgctggcgggtgggagaacggcgccgggatgatggtggtgccccaggaccctgtgaggctggcgcagatccaggccataagtagaaggctggttgggattgtgaggagcctgtccaagttcccgacgtacaggaggaggtacaggcacgtcgtgaagctgctcatcgcctactccgtcgagagggagagctcgggcaggtcgtcggcttcagggcgctcggcctcctactttgagataacacagctggacgtgtagtatagtttgggaagcgttctccgattgtaattaagctgttaatttctaggatcaggtagtagctgtcagtgccttcgtgtgtttgaagcctagctggtgaggtttttgtagaacactagtgcatggttacaggagaaaggcgctccattgcagatgctgatcaggcgcgttcacgtgccaaaagcttcagacaattgtacacattctcttttgttctgtatatagcctgtaggttcaatgcacatgtgttgttcttttctctcaaaaaaaaaaaaaaaaggcccctatcttccaaagctggagccttttgtgacacggccatcccctacaattttagcttgttgatttttttttcaccaacc

SEQ ID NO: 156804 - DNA, 2166 bp, Zea mays
  Clone ID: MRT4577_74583C.1
cctgcggttccgggccggacttcccgggcttgcctgccccccacttctccgttctccgccccatcggacttcccaagggtcggctaggtctaggtggtctccaagctttccgcctttccacgccaccattctccccacccgcgcgcctcagcaatccccatccagcatcgccgtttcgccgcggcaccgacacctcgccggccatgggcgcgtcctcctcgactggcaacccgtccccagaggcgcacgagcagcgggagcaggagactctcgcctccgccgccctctccctcccgctcctccgcgccgccttctcccgctccgccgccaacgcgctgccggatgccctcgcgccgccgcccgcctcctttcgtctgcccggatccccggcgccgccgccgccgcacttccacgacatcctcggggggctcggccccgccatcgcctcccaattcttcggccacggagctgccgcggtgacggacgggggcgccgggtgggtccagttcctcagggggttcaaccgctgctgcgcgcgcgtgacggcctcccgctcgctcgcactgctcctccgcgtgtacgctgccgcctgcgccggcgcgggggcaccttgcggcgtccagctccagccggacgagggcgatggtgacgaggatgggaaggtcgtgggggagctcgcgccggaggagatcgcagtgttcctctgggtgtgctgggtcatggcgtggagcgcttcggcctcgagggtggtcagtgacggaggagataaatcggagcccgtcacggtgctcctcccggacgtgacgcacctggtgctgtcggcgctcgtctcggcgggcgtcgtcacggatgatgcaggcgtttggggctgggacgtctccagcggtgggaagggggtgaaggtccaggagttcatgtcgtgggtgctgtccacgcctttcggccttgggaactgcctctcgcggtatgtgcgggacaaattccggtccctggctgctgactctgtggaggagagctctgtttcaactgttagcacaacctttgacacttctgatgtttatctgctaacacgggggagagcatgggcaattgccctcagcctaagaaacaagttgagtgaaaagctgctgtcagcttctgttattggaatggacacagaagacctcctttataggtcatctgttcatggaaaaggactgagccggttctggtcttgtgttgaggggtacaaagggccaatgctgattctactttcagcattctcaaaaggtggtggtgagaatgttgattctgatcgaagatgggtgattggtgtattgaccgaggagggatttgagaacaaagataccttttatggtagctctgggttcctttgtgccgcacatccaatattccgcatgctaccaccatctggcaaggaaaagaacttcatgtactgccacctacatcctcagataagagcttatgaagcgaatccaaagcccgttggcttagcatttggtggaacaattggaaatgagaggatctttcttgatgaagacttctcgggagttttagtacgacaccatgctgttgataaaacttatcaacatggctctctcatccccaatcagggttatttgcctgttgaggcttcagtgcttgatgttgaggtatgggggctgggtggagaagcaacgaaacgacagcagaatatgtacaagaagagggaggacatcttctcagagcagcgaagaaaggttgatctcaaaacttttgctagctgggaagactctccagagaagatgatgatggacatgatgtcggacccaaacacggttcgacgggaagaccggtgattttggtttgcagcctccggggatgtacagacgacagcgtttgttgcacataggagtattttgcttgcgcatttggctgggtcacacgctttatttaggttgaagtactaaaagaagatttgtacagaacgtaattcccaataaatgaaatggagattctggacaggtctatggtgtccaagcttgctgacatgtcttacggtaccccttttgctggggaggttcatgttgatgttggtgttgtgtggcacaatggctgccagatactgtaattgttatggctgaacgaactgatgaaacaatgctggatttttcatgagcggagctt

SEQ ID NO: 156805 - DNA, 277 bp, Zea mays
  unsure (1)..(277): unsure at all n locations
  Clone ID: MRT4577_74584C.1
ttttggtagtgtggcgcgcgagaccaggaacggancatgtggattttaactgccagcgcgacagttttaaagacacagagaccttagcgaggagaaacattacaccaaaggcatgcggtggcagaacaaactagagacttccggggagtcgacgaatcgggtcatctgatgtagtgactgtcgacatatgttgcatgctgtacttaagtcacaagatctgatccatctcagcatggactaataataaggaaattaatgtgccatgcatgacatgaat

SEQ ID NO: 156806 - DNA, 480 bp, Zea mays
  Clone ID: MRT4577_74585C.1
atgatgtcggacccaaacacggttcgacgggaagaccggtgattttggtttgcagcctccggggatgtacagacgacagcgtttgttgcacataggagtattttgcttgcgcatttggctgggtcacacgctttatttaggttgaagtactaaaagaagatttgtacagaacgtaattcccaattagggcttgttcggttattttcaatccatatggattgaaagggattgatacggattgacaggtctatggtgtccaagcttgctgacgtgtcttacggtaccccttttgctggggaggttcatgttggtgttggtgttgtgtggcacaatggctgccagatactgtaattgttatggctgaacgaactgatgaaacaatgctggatttttcatgagcggagcttaaaaaaaaaaagtaaaaataaaatataatgtaaaaaaaaaaaataaaaagaaatgaaaaataaaatccgaaaa

SEQ ID NO: 156807 - DNA, 512 bp, Zea mays
  Clone ID: MRT4577_74586C.1
aaaaaacaatttatagccccgaccggagtaaaacaagggcgggcaatttgctcaaatcatcaaagggttaccccctccggacaacctggaacggaaaccattcccgggggacttaaaaaaaccaacccccccggaatgccttacgggcttgcacatgattggactcagggttttctggagcccgattttatttttccacgcccaacctaaaggtggggtcttcagaacccccacttttatggtcgacgattatattattctattacaaaccctgggattttggcaggccctgggtccttgggaaaaaagcctttatggccaacccccttccccttcaaaatttggggtttttgggcctccccccaaccctttttttccccggtgtggacccaacctctttttttaaaaaaaggccatggccaagccctttcttgagggattaaacccctttttatcaaaaaatggtttaattggaggtccaaccccccacccccgggggggtgccccccttg

SEQ ID NO: 156808 - DNA, 563 bp, Zea mays
  unsure (1)..(563): unsure at all n locations
  Clone ID: MRT4577_74587C.1
ctctctctctctctctctctctctctctctctctctctctctctggagagagagctctgacacctngggaacccactctctnncatatctaatataatnaacncncnatatgagngacnnccanacnaagagaaaanaaggaagtgaggaggctacttaannaaacgaatacatcttcttctggtggtgctcaaatggncctggcaggtggcaagcnnnacctcctggaccttctgggccagtccagaaaatcagggcaaaatggtaatgggcaaaaattcctgggtggggagggtggacnnagtcaagaaaaactagaaaatgcaacgtccagcccttgggcctcgaaagaagaatccagtngaataagctgcnnagcggaannacctcttcgaaacaggngctnncttcacggaccaccttccatgaacttgtggnnttactntcgaaggnngagaagaagctggcgaacccatagnctctggggatatagattaagaatcatctgcccccacagccttgcnnnaaccctcattcnnacctccgccaaatcccttggaaaa

SEQ ID NO: 156809 - DNA, 359 bp, Zea mays
  Clone ID: MRT4577_74588C.1
atcgcccatgcagccggcctaagcccacagaccattctccatcatctactctcatccccacgatggtcgccgccgccacgacgccgcactcactcctcctccaacgcgccgcgattccgggcgcgccgtcgagggcgtcagccgacgccgctcccgtccgcctcccggtatgcgccgcaaggatctcgtgcgcggcggtggcggcgccatccacggccgcagccgccgcagatgactaagtggagcgcggcgtctataacttcgcagcgggtctagcgacgctcgctctctcagtgctcacgcgggcgcatgcggagctggtggacgacaacggctaccggatcagcatcgaggagatg

SEQ ID NO: 156810 - DNA, 542 bp, Zea mays
  Clone ID: MRT4577_74589C.1
ccggccgggctctttatcttagactagctggcgatccagcctttcgctagggttcattcatcgcgggcgcgcgctgacggaggaaagatggagcagcggctgacctaccgtaggcggtgcacatatgcacgaatgcagccgaccaggacgcaagacccttggaggaagctagagtgccagtcaccaggaagagagccagcgcacccaagggcaccatgaccgggaagaaaatgcagtgcattccccatcttgacgtcagtatgagtacaaaagggacaggttgaatacgaaccgaacatctgtgaaccgtccctatgggagagtgctatcatgtactgcacatggagaaaggatcatccgtgctttcctggatgaggagcagaagagcgccaggaaggggttggaattacataagacgaaggacattacattctcatgaaagtagctctgaacacaaaagtgagccactcttatgcaggatgggaatacatgtttgttgaaaggtatgatgaatggcttagactctgctagctgttatattg

SEQ ID NO: 156811 - DNA, 186 bp, Zea mays
  Clone ID: MRT4577_7458C.1
atcgaaaaaagtggaaaaaaaaatacaatatctacactggcctcaaagtacaaccacagggggcgcgggggaacaaagatctattcttttcctcactagaagatcatcaactagaggacgcgaagctgagcgccgacgccaacgtttgccttaaagactgagccattctgagtcagacgacattgt

SEQ ID NO: 156812 - DNA, 175 bp, Zea mays
  Clone ID: MRT4577_74590C.1
cacgctcgtaccctaccgcatattacgatgatcggcactaagccggggaaggtggacttggctctcgtcgtgttttgataaggcgggcggtcctgcagaagaatgggtggttcttacgatcgactgctcctagccagtggaggaaagatcatggagtgcctcgctgaaaatttct

SEQ ID NO: 156813 - DNA, 832 bp, Zea mays
  Clone ID: MRT4577_74591C.1
accgctcacccccgcctcctcaccgtctctgccctccgccgcgccaccggacctccgccgctgccccgtcccccccgtcccggtagaaaatggctgacgccgaggacatccagcccctcgtctgcgacaatggtaccggtatggtcaaggctgggttcgctggagatgatgctcccagggccgtcttccccagtatcgtgggtcgcccacgccacaccggtgtcatggtcgggatggggcagaaggacgcctacgttggtgacgaggcgcagtccaagaggggtatcttgactctcaagtaccccattgagcacggtatcgtcagcaactgggacgacatggagaagatctggcatcacaccttctacaacgagctccgtgtcgccccagaggagcaccctgtccttctcactgaggcgccgctcaaccccaaggccaatcgtgagaagatgacacagatcatgttcgagaccttcaacactcctgctatgtacgtcgccatccaggccgtcctctcgctgtacgccagtggtcgtaccacaggtatcgtgctggactctggagatggtgtcagccacactgtccccatctacgaaggatatgctctcccccatgctatccttcgtctcgacttggctgggcgtgatctcaccgattacctcatgaagatcctgactgagcgtggttactcattcaccaccactgctgagcgggaaattgtgagggacgtgaaggagaagctgtcctacattgccctggactacgaccaggaaatggagacttcccagacagctcttctgtggagagagctatgagctgcctgatgggcagt

SEQ ID NO: 156814 - DNA, 168 bp, Zea mays
  Clone ID: MRT4577_74592C.1
gaggcctggttccacatcattttttttagcccaaacaattggttttaggaagagtacagggtgcaattgcgtggattcctggtggtcgggcaattaataattagtttgctccaactggcaagcttagcaatttgtttaaatttttttacgcggaattagaatgagcaa

SEQ ID NO: 156815 - DNA, 226 bp, Zea mays
  Clone ID: MRT4577_74593C.1
tactacacgatacctttttcttcgatctatggggcgcgtaatgacagaacgggcttacatcaatccagatccgctcactgaactcttcctagatgggaaagctgcattgccatctggcacttgctatcggccacagcgcgtgaagaggtttacttcaacgtgaggcgctgtttcgctctctcattgcctgggtggctggggctgctccatctggcgccgttcctac

SEQ ID NO: 156816 - DNA, 363 bp, Zea mays
  Clone ID: MRT4577_74594C.1
gtccgaccataccaccgcgcctagactgtgcctgcatccctcatcgctcggctcgatcgctgatcagttctgcggccggcgacgtgtgctagctcacgacgacgacatgggctcggcggagaagatcgcgacgtgggtcctggacagcggcgctgctggtgctggcggcgggggccgggacggcgtcggcggcggtgagctgcggcgaggtgacgtcgtcggtggcgccgtgcctcgtgtacgcgatgggcagcgcgccgtctccctcctcggcgtgctgcaccgaggtgcgctcgctcaacagccgcgcgtcgtcggaggcggaccggcatgccacctgcaactgcctgaagagcatgtacg

SEQ ID NO: 156817 - DNA, 340 bp, Zea mays
  unsure (1)..(340): unsure at all n locations
  Clone ID: MRT4577_74595C.1
ggaagcagcaagcaatatactaatactgataaacatgttcctcgtcatgcattcataagacaaaagtagtgcttcctttggcagaaatcatgctggaataataaataacctacttgatattgaagcattcatagcttgttcttgctcttgctaactatctatttctaatacctctgctgcttcatgttgggtataattgcacatcgtgtaactgtagccctgtataagcacttcggatgatggagtgtgaggaagcgccnaggatggggaatgggacaagatcacgggggctggggtggcatctctgctgttaacacgaggcaacaagtgggggtgagga

SEQ ID NO: 156818 - DNA, 191 bp, Zea mays
  Clone ID: MRT4577_74596C.1
ctactgtttacggccatcactctaccattcgatctcataatgtttccattttttgtggataatcatcctgccatgatcatgtcatatttctcaacactgttatttatttcagttattgcacaaagaagctggcagccgcttgggaagcggaccaggcggcagtgacgaaatcaagaaccacaagtggttca

SEQ ID NO: 156819 - DNA, 316 bp, Zea mays
  Clone ID: MRT4577_74597C.1
cccacgcgtccgcccacgcgtccgaccacgtctcggtggccatgacgttcactatctcgaactactgcccccacccgatatggccggagacgctcgccggggccggcacgtcgcagctttccacgacggggttcaagctggagcctgggcagacggcccagctcgcggcgccggcggggtggtcggggcggatatgggcgcggacagggtgcgtgttcgacgcggaaggcgcgggcgtgtgccagacggacgactgcggcgggcgggtggagtgccgcgggtccggcgccacgcgccggccacgctgttcgaggtc

SEQ ID NO: 156820 - DNA, 228 bp, Zea mays
  Clone ID: MRT4577_74598C.1
cggatccgccctttctttttatatacttctgataactatccgggctgggcattataaagattaggggggcaaaccaaaaaaccatactaaatatacctatctgatcctatatcatacctaatcccctcaattccttcacccttatcacccacataaactttcattttacgatatcaaaaaactcaccctatattataatttctccaccaactagaatatatcatataa

SEQ ID NO: 156821 - DNA, 179 bp, Zea mays
  Clone ID: MRT4577_74599C.1
gtcactataatattcctataatacctgcatccccataatgaactattcatgtagtataacatctcaaacggttctccaaacaagacgcacttaaatttactgaatcacaacttaatctacctccactttttatatactgatattatacattacacactataccacataattaacatact

SEQ ID NO: 156822 - DNA, 538 bp, Zea mays
  unsure (1)..(538): unsure at all n locations
  Clone ID: MRT4577_7459C.1
aaatcatctgcttacgcccgcgggggggcagggcctggaaccataaagngaaggcgggagaacagcagacccggggctcagcttcatcatttcccaaagtcccgaagctagtagacgaagaggtgcgagtagatcgaatgctgtgagttagggtatggataccanggtctcatggggggggggggttcttcaaacaagaggaacatcaccatacttaagaatgaaaatggtatcctcaagccatccaggatgacgcttcttcttgggcctccatcctcagggaagagcacactaatgcgagcactcgctggcaaacttgacaaaaatctcaaggtctctggcagcattacgtattgtggccatccaatttcagaattctatcctgagaggactagcgcgtatgttggtcaatatgatctccacaatgccgagatgactgtaagggagacacttgatttctctaggcggtgcctaggcattggtgccagatatgagatgattacagaacttgctagaaaggagcgggatgccggcatta

SEQ ID NO: 156823 - DNA, 1164 bp, Zea mays
  Clone ID: MRT4577_745C.1
gtccaagctcggctgccccaagtacccggcatgcatgtgtagcacggcgcccacgctgcataaacaactctatctcaacggcgacgacgctcccatcttaacagccaggaagctggcgtcttgcttgtccttgttcttttcccacccggctacccccgtcgtcgccgccgctttccccgtggtttcagagctcaagtcggctagctaggccgcctggctaatctccctgccttctataagtacagagatcagggaggcggcacactccatccactgaccgctcatggcgaaggtccacctctacgtcgccgcggcctgcgccgtcgtcctcgcgctcgccgccccggccctcgccggcgaccccgacatgctgcaggacgtctgcccggctgactacgcctccccggtgaagctgaacgggttcgcgtgcaaggcgaacttttcggcggacgacttcttcttcgacgggctgaggaaccccggcaacaccaacaacccggcgggctccgtggtgacggcggccaacgtggagaagttcccgggcgtgaacacgctgggcgtctccatggcgcgcatcgactacgcgccgggcggccagaacccgccgcacacgcacccgcgcgccaccgagatcatcttcgtcctcgagggcacgctcgaggtcggcttcatcaccaccgccaacgcgctcttcaccaagaccgtcaccaagggcgacgtcttcgtcttcccgcgcggcctcgtccacttccagcagaacaggggccacggccccgccgccgtcgtcgccgccttcaacagccagctccagggcacgcaggccatcgccatgacgctcttcggcgccgtgccgcccgtgccctccgacatcctcgccaaggccttccgcatcagcagcggcgaggtggaccacatcaaggccaacttcgcgcccaagtagagatccaatgtctgcattcccttgattttctcaataataaatccccgcggtgtgcagttcgatttgttcgtcttcggttggtttggttcgagacattgctgaccacgcttgttactgctaatttgtgcggagcggagttgcttgtgctccgataaataatcaattctatcgtcgtctgggttgctttaaaaaaaaaaaaaaaaaaaaaaaactcgagggagggc

SEQ ID NO: 156824 - DNA, 494 bp, Zea mays
  Clone ID: MRT4577_74600C.1
atgacttctgccaattaggagcctgattctcactaatatggtaccatgaataacaacaggcatacaaataaaatacattctaggacattctgctagataaagcctaaaaataccctaaatcccgctttccacctcctgggctcctgctaagtaagtacggagtacaggtgtcaggtcatgcagttactcatccacctcactgctatcatcagtagctgctcggacgatatgcaccttgaaggtcgtgggcttaatcaactgaaaaacagttgaatctccatcctgaatcgcatggtatagcgcaaaaccagcccacccgccacttagccccttcttgtagcaaggtagattggtgtcgaattcttcatccttctcatccaccaaggtgatagtggcgtcttgcttcggatgtaagtgtcacaaaaatggctcgggagacccagccaaaagcctcgaaccacagggaatgcaacatcgccttcacgaagatggga

SEQ ID NO: 156825 - DNA, 1249 bp, Zea mays
  Clone ID: MRT4577_74601C.1
acacccgccccttaaccctccctccccaacccgcgaggccgcgactgccctgcccgccgccctctagcccacctctctcgcctcccgcgtacggcacacctgacccccccacccactccgttgaagcggtcgagtgcggcgtcgcgggagagatggaggcggcagtcgcggagacgcaggggatgtcgccgtacgaggcggcgcgggagcggaacctgcaggagaacaagcgaaagatggaagccctcaacctgcgccacctctccgccgtcatcaaggaggcccccaagaccccttcccccatgaaaccgaagaggcgcaggatcatcgaggacgcggtcgtggttccctcgcctcccaggaggtcccgccggcttgccaatgtccctgaggtcaagtacgcagagatagcaccacaccgtgcagatagaatgacaaggtctcctagaagaccagctgacctcatctacttggcaagacgcggatcaatttccatgaaagctaggctggaggcaacaaggaaggctgaggagctagaatcacaactcgatcctgaaatcccatccttcgtgaaggcgatgttgcattcgcatgtggttcgaggcttttggctgggtctcccgagccatttctgtgacacttacatgccgaagcaagacgccactatcaccttggtggatgagaaggatgaagaattcgacaccaactaccttgcctacaagaaggggctaagtggcgggtgggctggttttgcgctataccatgcgattcaggatggagattcaactgtttttcagttgattaagcccacgaccttcaaggtgcatatcgtccgagcagctactgatgatagcagtgaagtagatgagtgactgcatgacctgacacctgtacttcgtacctacttagtgcttgttcggttattcctgttgttttcctgtcacatgtggattagatgggatcatgaaaaaatatgaaggattttgacttgttcgggatttaaacccatccaatctcacccaatccacatggattgagaggaaagcgaacaagcccttagcaggagccaggaggtggaaagcgggattttgagtatttttaggctttatctagcagaatgtattttatttgtatgcctgttgttattcatgctactatattagtgagaatcaggctcctaatttgcagaagtcataacttgcaaaatgcattatgagctattttctgcccagctgcatgttgctgtccc

SEQ ID NO: 156826 - DNA, 814 bp, Zea mays
  Clone ID: MRT4577_74602C.1
attggtacctcgagccggcgggagttttcctcagatgcctccgcttctcctctgcgtccgcgtcggcaccggtctctcgacctcctgcctgtctgagttcgaggatcaactctgacagatgccgtcctgcttcgtgtataccgctgctacgtcgaggactctcgcctgggccacggacgacaagtccctccacattgccgttctatacctatcggtggagctcgctccgagtgccaatgatcattcctcccaccgccgagcacgcagagttcccgcgggttcgtcttcgtcgccttctcccagaggaggccatgcggaactacatcgagagcatgaatgctaagaacatggacgggcgcaacatctccgtcaacgagtccagtcccgcgacggtctggaatacgccgctctgagcacataccttgttgaccatggagtgccgctgctacgctggtttcgagagccgtgatgaggagcaacacctacggcggtggcgacggctacggtgctgccttcatccgctacggtgacgctgttgcggtctacagtaatgccaaccgtgctaggacttacggtaactccgattacaactggaagtaccgtgctgtgatctcggctggtcaaaaatgtcctgctcacttgcaagatactgaatccaccatcctgactgaccataaaagcttgtctcaactcaatgaacaacgccttcacacaccctggcagcacaaagtattcactaagctcttggggctgcattataagatactgtaccgtccagggactgacaacagggtagctgacgctctttctcgct

SEQ ID NO: 156827 - DNA, 531 bp, Zea mays
  Clone ID: MRT4577_74603C.1
aataggggttttttaaaaagagggggggggaaaaaaaagcgcccaaaaacacccacccagggaccaaagaccccccctatcccaaagcgccccccccccgggggggcgcgccccggttttaaaaaagctacaacgaaacacaagcgatttttacacccccggggcctacacacacgcggcggggcgcacgcgtgcacgcccactatagagatgcccccccaccccccgcttctcctcccccaaaacacacgcggggggggaccccgaaaaaaggcgcccccgcccccgggcgccccccctccccctatgaggggggggtataacaaatgggggcagaaacagagataggggtgatctgggggaaaaagatatccgggggcaaaatcacaccaaacacgaaccgcgggaaaaaaacaaacacccccgggggcctcaagagagggcgccccccacgaaaggggggggcacacccccccctctccaaagggaaaaacccccccccccggaataaataaaaccccccccccccca

SEQ ID NO: 156828 - DNA, 459 bp, Zea mays
  Clone ID: MRT4577_74604C.1
ccgggtccaggaaacacgaacgggtgacgatgaagagcttggacgaggcccggaaatcctttgggacagacgaggacattctcttggtttctctaacaggtaagagtgggatgaagctgtcgcgtaagctacttgcctgctccatgtagataaataaataggtcactagcaaccttgtgaatacgctgtacatgtccctgtagtagttatgactgtcgagtgccagccctgtacgtaggcgagaacgttctcgcagttacagctgatagcagcagtgtggtagtgagctaagtaggcaccctgtatgttggccgcgcaaaggggttcagcggcagcaaaaggctctgctgaccttgtaaacgagcaagtgttctatgtacgattgttaactgaacgtgtacagatctccggaaataagaattaaaatcgtgctccaaaaaaaaaaaaaaaaaagcggcc

SEQ ID NO: 156829 - DNA, 582 bp, Zea mays
  Clone ID: MRT4577_74605C.1
gcagagaggagcacgattttaattcttatttccggagatctgtacacgttcagttaacaatcgtacatagaacacttgctcgtttacaaggtcagcagagccttttgctgccgctgaacccctttgcgcggccatggtttggcgacggcatgggccaacatacagggtgcctactaagctcactaccacactgctgttatcagcggtaactgcgagaacgttctcagctacgtacagggctggcactcgacagtcataactactacagggacatgtacagcgtattcacaaggttgctagtgacctatttatttatctacatggagcaggcaagtagcttacgcgacagcttcatcccactctttcctgttaaagagacctgcaagagaagatttgtatgaaacgtcagtgcaccaccactagtttggacagcactaccaagtctaaaacacagagcatgacacggctgaaatgtaagcagcaaaccataccaagagaatgtcctcgtctgtcccaaaggatttccgggcctcgtccaagctcttcattgtcacccgttcgcgtttcctggtatagtaaaaa

SEQ ID NO: 156830 - DNA, 200 bp, Zea mays
  Clone ID: MRT4577_74606C.1
agggttacattcgagatttttttactaaaagaaacttgtttaatctatcacctaacactcattggaaattaggtacacgaaataactatcaaactaactgttcttattttctaaaaacaaatttattgtaagggcttcgtttcgccaacctttattaattatatacacttgacctggggactattcgtagatgctttgtt

SEQ ID NO: 156831 - DNA, 348 bp, Zea mays
  Clone ID: MRT4577_74607C.1
gaataattgcacatgaattgtgtcctatcacgtttcagctgaggacacttctggttgtagtcatcatgttcctcttgccaacgtgttgtattatgtagcctaaatgaacattctttaacattgccaaatgcaattttctgaagtgttgaggtgcaatggagcattatttgtcagcttcattccttgattgaagtgctacttcgagcttttgttcctgtttgaatttatagagctaatagtgacagctgctaaaattagttgaaggcatttaaatagtccagccgaagacatccaaacacccctcggctaatagttcaactaactatttattatttcattatctgattc

SEQ ID NO: 156832 - DNA, 515 bp, Zea mays
  unsure (1)..(515): unsure at all n locations
  Clone ID: MRT4577_74608C.1
gcctgcggnaccgggccggaatcctgggncgcccacgcgaccgtgctcttccccatccgcctccgacgncccgggcttccaccccaagaactcctcctcctcccgcctcgtgggctgacgcaacttttcctgccagagggtccactctgccgcgaacctcgccaccaagtgccggcgcgcttttgctgcggggttgccgncaactgccccgccgtcgtcagcaacgtccgcccgccctacgccgtgggctacggccccgtctccacagccggtctggtcatcgccgacaccctgcgcgcgccgggccgcgccgtccccggcttcgtcctcggatgcagcctcgagtccgcgcaccagccgtcggcgggcctcgcgggctctggccgtggagcgccgtccgcgcccgagcagttagggctcccgaaggtctcctactgccttctgtcccggcgcttcgacgacaacgccgccgggagcggctcgatagccctcggtggcaccggaggcggagaggg

SEQ ID NO: 156833 - DNA, 331 bp, Zea mays
  Clone ID: MRT4577_74609C.1
ggttgacccacgcgtccgagggcccgttggtgatcgatccgatgatactgatggataccttttgcttggcgtggaaccggataacaaacggtacaaggttgaatggtaaggctcagttccgcggtcatatttgaactgagcgggcatgatggtatgagatggaccccaccctccatgataaggagttggccatggcataggtgaccatggttatgtctatcaactgagccgattgattttattgcaatgcatgcctgaagttgtacatgtcatttttgatccattttgacctgctagggatgtcattccggctacagattatcacactggg

SEQ ID NO: 156834 - DNA, 3228 bp, Zea mays
  Clone ID: MRT4577_7460C.1
gttttttctttgttgcttccctcgcgctcaaggacggaagtttttattttttgttgtattttttttttctctaaagctgtgtattttttattttaggtgttttttttttttttttttttttttttttggatggaaaaaattgttctttttttttctttttgatggaagttcctaaattttggtgcaagccgtttctatctggatagtagccttttccggttcacgaaagcagtgtatacaaaatgacaggtgtgcaaaatcttcatcaggatgtacagcaacaggccagcagccacgccttccgctcaagcattggaacagattttctcttgtctggaactgctgcagcacaaccggtcatcatccacgtaagttgcattcagtcccatcatccatgaacctactgatatatcatcgtgtgcataactctgcagtgacgcactatttatgttgatgtagcgagccaaattttttgagaggataaacaaagaaccagaagcgtgtcgaaaatacgtttttgaatctccaaatttccaccactcaggttcataccattgttggccctcttcacttatgaccatccctgatttcatacaacccatgtacaatccttggctacctcgacggccttcgagcatctcaattaacccagctaagtcaagattaatgttatcttcaactttgacataaaattctgcatcccaggcttcaactgcagcactgaagaaaatttttgctttgctcggtaattcttctgcagcctcttcatgactttcaagaatcaagaagtcctttgtctgccgattttcatcatcaatattacggtccaagctatcacctcgatttgcactccgaccaataacaaaacgaatagctacacccttttcctcaagcttcttcagagcatcacctcttggcatccaggagccacggaagacgttcctcttgagacgggagccaaacccagtgtaaactccaatgacggcaagaagctgctgcttcttgtcggagtccacagctgcagtcctgttcccccacaggtacccctcgctcttggccttggtcaggtccatctccgcctcaacaattttccttccaatcgccttgcacccaaggttcctaagcttgtcctccaccgagagcaccttcgggacgctggtagagctcttctcgaggaggccggacaggatcgcccgggtctgcgcgtcctgccacaaacggccggcgacgtagagccaggcgaggcaggagaggaaggccatgacgagagggaccctgcccgaggcgagggcggaggaagcagaggaggagggcggggccttggaccggcggttctcgcgccgcatggcgctggccagcgtctccatggcggcggagatctccgacgctgggctctcggcgcctcctgtctgctcctgcttgctgccttaaacggaaagggaggactcactgaaggaagcttctccatagaaggccggaagcccggaccgcccgacgcttggagcaaataaaccgtgaagaagaccgctgcgcttcctgacgtgtgttgctggccgttggaggagcatcgtgcggcaaaaacatgaagagccgacgtggacaaacgggatgggagatttgctcccgtggttaatatatagaatgcgtatatacatggacattggtgaaaatatagctatatactaacataatggactaaaatgatgcaggttgagaaattaaaggtattggcgacttcccttgctaattcatcctccaaggcagagaagcgtattttggatcacagacgccagaaagaagaggctcttaactttcgtgctaaaaaggagaacgaagtgattgcttttgaaaaggatttgactgctgagatttctgaattggagaagcaaagggatgaacttgaggctcagttaaagaaggtcaacatttcactgaatgctgctgttggtcgactaaagcagacaagagaagagagggaccagtttggtgttgcaaacattcatatgatatttactttacaagcaaaggagaatgacctgtcaaaatctattgactcatgtaacatggaggccagtgtagtcaagacttgggtaaatttcctcgaggatacatggcaacttcagttgtcatacaatgaacagaaggaaactaaaacgaatgacgagctggagagatgcacaagcagttttctgaagttgaccaagcatcatctttcctatttcaaggaagttcttagcccatcaattgagcggatacgcacatacgtggataatttggcagtcttaaactctagggaggagtcaatagaacatggaggggatgatgagatttctgagcagacaagtccacaaaagtcccttgaggaggaatatttggaaactgaaaagaagatcgtgattgccttcagcattgtagatcgcatgaagaagatgttttattctgagcaagcggctaattctaggcaagatgatgcagaggtcaggaccttattttctgagattgagaaactgagggaagtgtttgagtcggtagaaaggccgacactagacattgaagtccgcaaggcaaaggatccaatgaaggacaagtctggatcgaatcgttcagccaaagacaaatctgaatcgagccattcacctgttcaggtgccctcttcacctaaagatgtgcccgtggagtctccgaaatctccagtgaaacctgagcagacgctggacccagattcagagtttgcaaagttagagctagaattcggaaaagttaacagagaccatgaggagataggcggttgggatttcgacgagcttgaagaggagctgcgagctgacatatctaaatcaaccaatccaaaataaccacgctcatcccgacatctgtgaacgcgcattccacctaactttccttgtgctggcttcttctgaaaatttgtagactttgaattgttgaatgtacatagtattgttgtttcattgtgtccatggacgttctatagattatactcactacatgggaggtggagattgttacactgtagcctgacatttcattagcttatttgtttggtcttgtcatgtgcattcatacatgaatgaacgaatagataaacattatgtagcattccacattttggacattggaacatatattaactataacgataaaatgctcttggtcttggatgtcccaaaaaaaaaaaaaaaaaaaaaaaaaaaaaaaaaaaaaaaaaaa

SEQ ID NO: 156835 - DNA, 987 bp, Zea mays
  Clone ID: MRT4577_74611C.1
ggccgccgcgactacctccgctacgccctcgacaacgccgaggcgttcggcggcaccggctgggccgtctccgagttcagctgggacatcaagtacgccggcctccaggtcctcgcatcccagctgctggtggaggccaaggaggagcggctgcggctgagcgcggaggaggtggcggtggtggagcagctgcggtccaacgcggagtactacgtgtgctcgtgcatgaaccggaaccccggcggcgcgaagcacaacgccggacgcaccccggcggggctgctcttcatccggccatggaacaacctgcagtacgtctccggcgccgccttcctcctcaccgtctactcggacgtcctcgcctcgctgggccagcccctacgctgcggctccggcgacgacggtggcgaacccgccgccggcgacgcgggcggcgtgctggctttcgccaagtcccaggccgactacatcctgggcacgaacccgatgcgcaccagttacctggtcggatacggcgcggcgtacccgcggccgggtgcaccaccgcgcggcgtcgagcgcgtcgtaccggcacgaccgggacttcatcggctgcctgcaggggttcgactcgtggtacagcgcgcggcaggagaacccgcacgacctcgtcggcgccgtcgtcggcgggcccaacggcgaggacgtcttcaacgaccaccgcggcgcgtacatgcagactgaggcctgcacgtacaacacggcgcccatggtcggggtcttctccaggctcatgcagctggaggggcagtcgccacgcccggcgccggcgccggcggaggatctttgataggagaggtcgttttccttgaaaggttcccagcgacaagtggtggtgcgaaataaacttttcaaaaaggattaaaaaaaagtgatattgatcgtttaggctggatgtatacatgatgattctttttgttgattcctagatactaccatatttgtttc

SEQ ID NO: 156836 - DNA, 769 bp, Zea mays
  unsure (1)..(769): unsure at all n locations
  Clone ID: MRT4577_74612C.1
aagggaagggtgggattctacaccaaacaattcggcacgagggtcgttaggggaacaacagaggcttggaatggctcgtttgtttttccatcatcctaagtttggtatcctggacgagtgcaccaatgctacgagtgttgatgtcgaagagcatctgtacagacttgcaactagcatgggcataactgtgatcacttcctctcaaaggcctgctttgatacccttccatgccttggagctgaagctcattgacggcgaagggaactgggagctatgtgcgatccagcagtgagtgatggtgcccattaggagttgatgccattaaatgcaccatcagctgcatgtacaaaagcaagcagctagcacattgccattgtttgtgtatggacaacgtagacagtggcagcgttgctatgttggaagatgctatattcttgtcatagtctgcctcaggttgagcagcaaagcattgtgatgatgtatgattgtgagccatgcatggtagctgaatcctgatattagcttttagatagtggacatgattgtgagccatgcatggtagctgaatagcagagcagaagggttgtgtgttagaagctgtacctattgattcattacattatattgattctgcgtagcagatgtatattacaggcaagcaaaatataaataaatacgatgtggaattgtggatgctgctgccatgcagacatcagaaaaaaaaaaaaaaaaaagcggaaaanaanaaaaaaaaaaaaaggggcggccg

SEQ ID NO: 156837 - DNA, 255 bp, Zea mays
  Clone ID: MRT4577_74613C.1
cgcgggcgaacaaagacaccaagcgaagcgcactagcaacattctaacaacaacggccaccaaaagggaccccgcggggcacaaaatgccccttgagcgatcacaacaaaggcgtgcatcaggccacagcgctcaccagcaccgagggccacaatcacacagatgctgccaccagatacgtgaatgggcgacgaacatccagccgtgcaagcatacaggctacaacgagcgctcgcggagagacggttacaacaa

SEQ ID NO: 156838 - DNA, 295 bp, Zea mays
  unsure (1)..(295): unsure at all n locations
  Clone ID: MRT4577_74614C.1
gggtacctcgnagccggccgggacctctctcgccctagtgtgacccgattcgaccctgctggtccacgaggacgagtcacgcaaaccgagatcaatctccagagtccagagttagctgctcgaagctccacgagatgtatcataagtctacctacggctgcaacgacgagcacctttccacccgtcagacgccgaccacgttggacctccagcttctacaagctgtttcagtgtagccagtggatcatgcaacatcattgcctcgagctgtcatgcggatgcgacctcgcaggac

SEQ ID NO: 156839 - DNA, 530 bp, Zea mays
  unsure (1)..(530): unsure at all n locations
  Clone ID: MRT4577_74615C.1
cgccccgcgnccgcnncccccaggggggggagggggaccgcnanaccagagaaacccgcccnncaacccgacagcagccagcaagcaancgcaacaagcaacnaaccgngagcacaccggngcgcgcaacaaccgccagcccggnaccnggcgcagccaacggcacaaaccgggggggggaacagnngcagcaacncgcgccaccagngancagccaagcagcgcgggcaaaccnnncccccgacncncagcaacaacaangccgnccaggcaaccaacggccgagaccgaacccggcngcgcagnngcagcaacaacaaccacgaccagccagccagcgagcggcggccgacgcccagcagcaacaagggccgccagccaacccaagggccgcaccgaaccccgcngccgcaggccagcagccaaaacgacgaccanggggccagcgagcnacaacaagccccgcgaccggcccgacacaacaacaagngcgnccganccaccagcagggnggggccaaccccgcaacc

SEQ ID NO: 156840 - DNA, 316 bp, Zea mays
  Clone ID: MRT4577_74616C.1
aattcccgggccgacccacgcgtcaggccacgcatccggtcaagcatagggaagggtcttgtgtagtacgtctttgggttcctcctcctcgtcttgatgctcctggctaatgtctgtgcggatgtttccctgattctaacgtatatgcaccagtgtgttgaggattggaagtcatggtggaaatcaggcttcgcagcaggataggtggcaatctacactatcatgtaccccagcaacgatcttgtattcgacctcaagagcttgactgggcaactgtatgctagcctctacatcggtaacgcaatcgtcatggtga

SEQ ID NO: 156841 - DNA, 347 bp, Zea mays
  Clone ID: MRT4577_74617C.1
attttatttcttttttttttttttttttttttggggttttttttggggtttttggggttttttttggaacccccgggcgaaaaaccttgtttttttaaaaacaggggggacagggaaaaaataactggggatccaattgggtaaaaaaacaacaacctttggatagagaatttctggggggtccccccctgaaaaagaccccgggtttttagaaacaacaaatcccatgaagaccccccgcctagttggacaccatatacttggggggggcactgaacttttgggagcccttggggaccttgggggcagcatcgaaaaaatccttttttggaaccggtttcctgggg

SEQ ID NO: 156842 - DNA, 850 bp, Zea mays
  Clone ID: MRT4577_74618C.1
ccggccgggcctgcccgtcctcgacggcgaggccaccgatcctatctatatatattcactcgtacgtaccatggaggaggaattccaggaggccgaaatcctatggccggcaggcgtctccggcaacagccaaggcgaggacggcggcggcgaggcggcgcctgcttgctcggtccgtcatcgtcccagggcagccacgccggtcgacatctctcggcagaagcggcggtgccgcccctgcccggtgtcgtcgtcggagcattattacgccaccacgctcgacgaccaggaaaccgacgacgtcggcgatggtgcaaaagggacgactgcgaaccacggctcggcagtcgtgccgccgcacgttcttgtcgcgcggcggaggaggctggtgcgcggccggacggcggcctactccatgtgcgctggcaaggggaggacgctcaaagggcgagacctccgcgacgtccggaacctcgtcctcaagatgacaggcttcatcgaggagtgaatgaatgcgtgccgtcgcatcgcatggatccagaggattcttttcagcaagccaatggaagaagcacccgtagcagtctagcagaaggatatacaactatacaagaagatgacgactgttcacgcgtaataattaatttgctagcttatgtaataactaggtatatgcccgtgcgttgctacggaatcaatatgataaaatccatatatatgtaaatgttgaataattagacaaattccaaattaaattccgaataaaaaaatattctatattcttgctagcatcactcatattggatgtttacatacttaaaaaaaataacaaaagtgtccgttcattgct

SEQ ID NO: 156843 - DNA, 525 bp, Zea mays
  Clone ID: MRT4577_74619C.1
aaaaaaaaaaaggggaattggttttttacccccccccaaagatttttttttttgccccaaaattttaaaaattttgccaaaaaaaaccccaaaggttttgggaatttttgaacggggaggggtaccccggcccaaaaaccccaaaaaaaaaaatttttgggagataggtttaaaaaaagggggggttaaagggggcccccaaaccttggggcccaaatttaatttttgggggaacaattgcccaattttcccccccccccggaaaaatttaatttttttggggataagggccccaaattttcccctttttgaaaaaaccaaggggaaaggccttttttgaaagaaccccgtggaaaaaataaaaagggcccggaaaaggaaaaccccaacccccccttttttttttaaaaaaaaaaaaaaaaaaagggtttttggggccggcaccccaaaagggcataaaaagggtccccccccaggactttctttggggtttctacggggaaccacccccgggcgccctaaaaa

SEQ ID NO: 156844 - DNA, 309 bp, Zea mays
  unsure (1)..(309): unsure at all n locations
  Clone ID: MRT4577_7461C.1
acgcgcacgctcacgcacccgnacgacacattcagatgatgcttagggtttccccgttctcggccgtcgcggtgccaacccagctctccggtgcgcccgcgacccctgctcccgtcgttagggtggtcggcgccgcgcggagttgactagccggccgctggcgccgcgtgcagggccgtgggcaaggggatggaggtgctcagaggggtcgtgttccattcctgtgagggaattaagggggagcttgcgcttgtgccctagtgcctcgacaaggtagttcgagtggcacaagttcgtacatgactgtga

SEQ ID NO: 156845 - DNA, 860 bp, Zea mays
  Clone ID: MRT4577_74620C.1
ttgggacccccacgcccggccgggctgcccgtcctcgacggcgaggccaccgatcctatctatatatattcactcgttaccatggaggaggaattccaggaggccgaaatcctatggccggcaggcgtggacggcggcggcgaggcggcgcctgcttgctcggtccgtcatcgtcccagggcagccacgccggtcgacatctctcggcagaagcggcggtgccgcccctgcccggtgtcgtcgtcgtcggagcattactacgccaccacgctcgacgaccaggaaaccgacgacgtcggcgatggtgcaaaagggacgactgcgaaccacggctcggcggtcgtgccgccgcacgttcttgtcgcgcggcggaggaggctggtgcgcggccggacggcggcctactccatgtgcgctggcaagggaaggacgctcaaagggcgagacctccgcgacgtccggaacctcgtcctcaagatgacaggcttcatcgaggagtgaatgaatgcgtgccgtcgcatcgcatggatccagaggattcttttcagcaagccaatggaagaagcacccgtagcagtctagcagaaggatatacaactatacaagaagatgacgactgttcacgcgtaataattaatttgctagcttatgtaataattaattaatgtacatagctagctaagaagctgagggtgaaataagttgaaaagagtaaatttaaaatgaacgccagctgctgtggtactgcacatcaatgttgtaattgtagacatgtagtaagcctgttaacattttctataatcataagacgaagaaaatttcaaaaccaataaaaaaaaattaaaaaaaaaggcgaaggc

SEQ ID NO: 156846 - DNA, 327 bp, Zea mays
  unsure (1)..(327): unsure at all n locations
  Clone ID: MRT4577_74621C.1
cagatacgcatcagttggcaccagcggcaaagctgcggcggcgaagagcgataagtagtagaccggggggcggtgcggcgtgcagcgcgctaataggcgaaccccgcacgcagacgcaggcgcagctagcttcgcaacaagtaaacgatacctcgcgtcgccaagagcttaccgacaccgagaagcagccacgcgctcgcggagctagagctagagcctagagctagagcgcgagagcgaccgtcggccactcgccatgtcggcgctagtggacgcgctgtgcgcgccgnccagcgacaccgagctcgtctacgacaccttcaacgc

SEQ ID NO: 156847 - DNA, 341 bp, Zea mays
  Clone ID: MRT4577_74622C.1
tcgttttttattttgttttttttgtccttttcggtatggcttcgaaaaaggataaagataaaaaaaaaaaaaggaagcccgccataaggatccaggcttcgaacagaagaagcgaataatggaatcttagggggggcgaatttaaaggtgctgatctaccaggctacctacgacaagttgtatatttttgtggtcagcccaataaaataacttcctgcatcctatcttatcgcctgaggatgaatgaatccctgggtcggaacaatattaatttcctgatagagcatccccttttacgggtggtgggaattcacttaaggccgcccatctacccctgtgca

SEQ ID NO: 156848 - DNA, 374 bp, Zea mays
  Clone ID: MRT4577_74623C.1
gggaccagacactcatagatgattattcccaagagtgaaagaaccaaaaacggacaacagcccccttattaagaagcgagcagccgatacaacacacaacagtagcaggggatgcatccacaaacctccataagaagagggcacgaaacgaaagcatacacatggctggaataaacgtccgaccaaatgaaggggcaccacaagagagcgcccacaaaatggatgggtgcaatatcgtcccgtggcgccagtatagagagaggtatatctctcaccgcgggtgatagccctagagaacttgacacgggaaagcggagcgcattgtattaaggagagtctcctcttgccccataaataggcgccccaagagaatc

SEQ ID NO: 156849 - DNA, 226 bp, Zea mays
  unsure (1)..(226): unsure at all n locations
  Clone ID: MRT4577_74624C.1
aaaccannacaaactttaaccagttcagggcaaggtttaaggatcaaaacatttcatcggggaccaattaatattttgttaccgcaaaccccattggatcaaccaacatgctttttaaccccccttcattagcccaaaaactgtcccccaacattccgaaagagatagccaacctaagaactctgttttttttttttttacacacaccccacacaattcctttttt

SEQ ID NO: 156850 - DNA, 680 bp, Zea mays
  Clone ID: MRT4577_74625C.1
ggccgcttttttttttttttttttcttttttttttttttttttttttttttttttttttttttttaaaaaaaacaaattgaaagtaatgggtagggggaagagcagggagatcctttggggccaccgccgcaaaaccagcggcagggggaaccgagggacaccaaaaaccaccaaactttggttcccgggggaggccggggcaaccacggccccaaaagccgaaaaacgccaccaccccctctaacggggggggggggggaaaaagaagggggggaagggggggcacccccaggagcgagaggaaccaaaaccaacaccggaaaaggcgggggggccgcaaacgccgggcgtggcccccaaaggaaaaagcccaaaaaccacggaatgcaaaggggggggacgacggggacccgggggcccaaaaaaacccccgggggggaggggcaaccccggggggagccgacggggcccccggaacccaaaaaagccccagggggaaaaagggggggagggaggaccggaaccaccccactgagaacccactgggggggggggcggccagggggaccaggagggcccccgggccaagggcggggaatcccccgcgggggggggcccccccgccagggataatgggggtgcgggcagggggcaccaatgtcaccgtacaaaccctacc

SEQ ID NO: 156851 - DNA, 408 bp, Zea mays
  Clone ID: MRT4577_74626C.1
ctccgatcaccatacaaccgtgaccggaggtatgatcctgcactgccctcactattacgcggcgggtgcacattcccactatgcctgatcacttaaacaccttgcttatctatgaccttctgcatcgtacagatccatctcggggctatagccctttgcaagcacgacgatgcatatttcccccttgcagaacatactacaccagggccctgctactaaccaacaccaacgcctgatgactgattcattcatgtattcccctggctatgacgcccacatggatgtacagtccctggacaagttctgaatttacgtccatgatattcatgacctacttaacgtcatgttcactctcacgtaaatagtcatgttcgctttcccggaaatggttcttctggaatgaatcct

SEQ ID NO: 156852 - DNA, 356 bp, Zea mays
  Clone ID: MRT4577_74627C.1
tttttattcttttcttttttttttttttttttttttggttttttttttttttttttttttttttttttcacaattttggtttcctttcctttctcagttacatatttgtaaaccaggggaaaaggatttggggtttaatgccaaccaatctgggaccactgggggcggtcgtcgaccacctgctattacatattgatcggcgtcgtcgatgtgctattactgatcgtcggcgtcgtccgaatccaactgttttagcaacgaggcccaaatgggcaacggcacctcctttaggttacccaaccggtttgcggggcccaagttttctcttattcccaccttccttgtgaagaagaacc

SEQ ID NO: 156853 - DNA, 263 bp, Zea mays
  Clone ID: MRT4577_74628C.1
cttttccctcgctcgctcgcggctcgtgcgtcgcccgcctgcctgccagtgcgcgccctctccctccctcatggcggactgcttcccgcccgagtcggacgacttccaccgccgctggctgccgcgggagatcctcgccgacattggcatcgccgaccccgaggccgtcggcgccgagaccccgcccgaggccgccgccgccgccgccgtggaggagctcgcggcgcagctcgccggcatcctcggcggcggcgccaaggcgt

SEQ ID NO: 156854 - DNA, 766 bp, Zea mays
  unsure (1)..(766): unsure at all n locations
  Clone ID: MRT4577_74629C.1
gagcggaagccccagtggccagtgcccaccaccttcacgcctcctcgcgtcgtcgcaaccgcagatctggccaacggcccccgaccgatcgacccccctccccctcggcgcggcgaggcgcagcaattcaagtgcatcaccgttgttacttccataacgtgctaacagtcaaatttgtcaagctactgttgatgctccagatatagtagaaaaccatgggagaagttagtgatgataattccaacatgtcctttctaaaaagaatcgctacaagtgacgtgccgctgttgaaagagtatggtgtgaacggagttgttgtcgccctgcttctggctgtagttactcctgtcctgctttccatgatgtttggtaagaagacaaagcaaagggcggtgcgagctgatgtgggtggagaggagggatttgcaatgcggaacaacaggttttcctccttagttgaagtcccatgggagggcgccacgacaatgtcagctctgttcgagatggccagcaaaaagtactctcgacggaggtgtcttggcacgaggaagctaattaagagggaatttatggaatcttctgatggtaggaaagttgagaaactgcaccttggtgaatatgaatgggatacctacactgaggcatttaatcgcgcatgtaatttttcttctggactttatcagatgggccacgacctagatagtcatgctgctatcttctctgatacnagagctgagtggatcattgctgctcagggatgcttccg

SEQ ID NO: 156855 - DNA, 471 bp, Zea mays
  Clone ID: MRT4577_7462C.1
aaaggggaccaacccccccaaaaaagcaaaccaaaaatttattcgggggggcattccccccccccaagcctcagggaaaaacaaggggcccggggtttgctaaaaaaccaatggcctcaacaaaacaaacaaaaaacggcccatcagcttaaaaatcccggggttgaggggggccaaaaatgtttgctaaaagggcaaacttggaaaaaattggcgggcctcttcccagggggggaggcaaaaaacccttggccggggaaaaccctgggcgtatggcccccaaggccccccccaccaaatgggaaaccccaaccgggccccccgaggagggcggacggaaaaccctttcccttggaacccaaaacaaaggctccggaaaaaaacccccccacggccccgttgacaaaatccccctttttggcctggttttgcacaagctgttcaaccccaatgaaaaggccccccaggggg

SEQ ID NO: 156856 - DNA, 467 bp, Zea mays
  Clone ID: MRT4577_74630C.1
aaggatagaaatagttagtcatattttctttagtgtttagatacaagtcacatgagaacaaggtgaacaccaaagctacttttagtgatgacgtggtctaaaaaatcgaggggatcgcctccgcctcatcctactttaacctcaaaactaaccaacctcgtccgtcttcccattacaaatcaatagatggcgatatagagtaccattaggtgatgtgcccagggcctatttattgggtctatataaaaaaacatcatttacaatatgcttagtgtcataactgacccgtaacggacgtgaaattgagcatcctctgtgctatgacaaaattaaaatcccatgacgtgaagctattacaaatcaagatcattccaacactgggtttatttttcctcagtcacagtcacagaagaacgaagcttctgtgtattagcagcttggatacacacacacacaccactcgtgca

SEQ ID NO: 156857 - DNA, 493 bp, Zea mays
  Clone ID: MRT4577_74631C.1
ctctcgtgtctccactcgccctcgagctctccctctccgtctccagtcgccgtgagctagggtttggagctaggacgtcgtcggccgggccaggggcgccgccaggaccgcgctcgcggagtccctgcaggtcgccgagcacgccagcaagacctccttctccgccgggaggatgtcggtcaaggacagcaagccgaggcccctgtcgcgtagcctcgaggccgccgcgccaggacaggtcggtttcggttcgccgctgcaactcttcgtctgtctgtcttgttgctcctgggaatcttttttgtgtttgctcatgcggttcctgtgttcttgtttcacttgcaatattcccccatttttgttttagattcagttctcgccgtgagaataatttggcgctcataattttttcactctctctctcttgtttgctcaaccttggaatttctttcttctggctgctgcaaatgaacctgtcgttccccaagccatg

SEQ ID NO: 156858 - DNA, 867 bp, Zea mays
  Clone ID: MRT4577_74632C.1
ccggccgggaatggaacgagtacctctattcggtacgagtgcttcttcctgcgcgattcgacacggactcagcccctcacacgcctcctcaccggctcacgacgtcgccacctcagatccggcgaccgatcccctcctcctcggcgaggcgtagcccgcagagccgagccggacaacacagccacgaccacgaggcgtcgtcgcggagtagtcggagccgtttctgctgcccccctccttcccgccaagtttgtcaagttacgtccgatgctccagacatagtagaaaaccatgggagaagttagtgatgacaattccaacctgtcctttctaaaaagaatcgcaacaagtgacgtaccgctgttgaaagagtatggtgtgaatggagtcgtcgtcgctctgcttctggctgtagttactcccgtcttgctctccatgatgtttggcaagaaaacaaagcagagggcggtgcgagctaatgtgggtggagaggaaggatttgccatgcggaacagtaggttttcctccttagttgaagtcccatgggaaggcgccaccacgatgtcagctctgttcgagatggccagcaaaaaatactctcgacggaggtgtcttggcacgaggaagctaatcaagagggaatttgtggaatcttctgatggtaggaagtttgagaaactgcaccttggtgaatacgaatgggatacctacgccgaggcatttaaccgcgcatgtaattttgcttctggacttgtcagatgggccacgactagatagtcatgctgctatcttctctgaacaagagctgagtggatcattgctgctcagggatgcttccgttgaaggttttcctccttagttgaagtc

SEQ ID NO: 156859 - DNA, 609 bp, Zea mays
  Clone ID: MRT4577_74633C.1
atggtgaggtgtgggtggaggatggagaagagcaacgatctagcgtggtcgtgtgcatggttcgcggaatcggtcgacaaatccgaccagcgccggctgataaatcgggatgtcggaccagctcgatctgatttgggaacacggggacaacatatatcccggattcaaatgcaagtattgcaagaaacaatggaagggaggtggaactacacgtttcaagcaacaccttgcatcgcgcgcgcggtgggagggggggatgtgcaaggttgtcgcaacgttctgccggacattgctgattactttcgtctggagattggcaaggtccatgataaaaagaaagcaagagtagtggaagaagcacgaaagttgcaaatagcgggtccgcattgtggtttcgatgatcatgatgatgatgttgagttacaagctgcaataagagatgaggagattaggaggcgtgctcacgtgactggcggcacgtatgagacaagtggtggcttgtcccaaggtggtgttcgtgccgcgtttgggagaacatcttctaggaaggagaaaccacgtatggtgcagacaaggattgatacgagaccattctctaaggcggtgtaa

SEQ ID NO: 156860 - DNA, 1066 bp, Zea mays
  unsure (1)..(1066): unsure at all n locations
  Clone ID: MRT4577_74634C.1
ctcgcgtcgtcncaacccaggggggggggcgggccccgaccgatcgacctcccctccccctcggcgcggcgaggcgcagtcaaatttgtcaagctactgttgatgctccagatatagtagaaaaccatgggagaagttagtgatgataattccaacatgtcctttctaaaagggaatcgacaagggacgtgccnctgttgaaagagtatggtgtgaatggagttgttgtcgccctgcttctggctgtagttactcctgtcctgctttccatgatgtttggcaagaagacaaagaaaagggcggtgcgagctgatgtgggtggagaggagggatttgcaatgcggaacaaccggttaaggaggttcagcaatcactatcgaaggccgcgaaagcagcgaggctggagagattcgaggtgccggcgaagatcgagctgctgcctgagccgtggacgccggagtccgggctggtgacggcggcgcttaagctgaagagggagcagataaaggccaaattcaaagacgatctggacaagctctaccactgaagaaaagcggggcttgcacccacgcgttcaggagcttgcgctgccaaaacgctgcctggatgcggaatggaacctactgacctgcacgagaccacgagtggtgtgtgtgtgtgtgtggatgtgtgtcggcgtcggtacagcaggagctgcttcttgtgtgatgaaaaataagccaaagtgttggttggaacgatcttgatttgtatagcttcacttaacttgcatgaaccctagctcgaaatcagttgaatctggatggaccggtcgataagagttgccgctatcggttttgatgcctcacgatggttgaagccgggcagccggcaattgtcggggcgttctctgagatggccatagtcgtcgcaatttgacctgtggatttagatatttgttggatatctaatccaatagataccagagccgggtatggatacatgtttttaccacagttttgatgtttttaccacagttttgatctgtggtcagactttaataaaatggctccctgtgctctgattg

SEQ ID NO: 156861 - DNA, 297 bp, Zea mays
  Clone ID: MRT4577_74635C.1
tgcaccacaggaaagcgctgccaccggcaccatgccccacccatacccagcactgaccccggaccatataaaggagcttgctgacatcgctcaccgcattgtagctccgggcaagggcatcctggctgcagacgagtccactggaagcactgccaagcgcctgcagtccattggcagcgagaacaccgaggagaacaggcgcttctaccgccaactgctgctgactgccgatgaccgtgtgaatccctgcattggaagggtgatccttttccacgagacactataccagaaggcaga

SEQ ID NO: 156862 - DNA, 4028 bp, Zea mays
  Clone ID: MRT4577_74636C.1
aattcggcacgagggcggagcggaagccccagtggccagtgcccaccaccaccttcacgcctcctcgcgtcgtcgcaaccgcagatctggcaacggcccccgaccgatcgacccccctccccctcggcgcggcgaggcgcaggtgaggctcgtcctgttgcgcggcttcttctgctttgcaattcaagtgtatcaccgttgttacttccataacgtgctaacagtcaaatttgtcaagctactgttgatgctcctgatatagtagaaaaccatgggagaagttagtgatgataattccaacatgtcctttctaaaaagaatcgctacaagtgacgtgccgctgttgaaagagtatggtgtgaatggagttgttgtcgccctgcttctggctgtagttactcctgtcctgctttccatgatgtttggcaagaagacaaagcaaagggcggtgcgagctgatgtgggtggagaggagggatttgcaatgcggaacaacaggttcagcaatcgctatcaaaggccgcaaaagcagcgaggctcgagaaattcgaggtgccagcgaagatcgtgctgttgcctgaaccgtggacgccggagtccgggctggtgaccgcagcgcttaaactgaagagggagcaaataaaggccaaattcaaagacgatctggacaagctctaccactgaagaagggacagatgacggtttaatttgcacctactgcttccaaacgcttgcggtgccaaaagctgcctggatggaacttttactgacctgcacgagtggtgtgtgtgtgtgtatcccagctgctgatacacaggagcttcgttcttctgtgactgtgactgagggaaaataaacccagtgttggaatgatcttgatttgtaatagcttcacgtcacgagcggaagccccagtggccagtgcccaccaccttcacgcctcctcgcgtcgtcgcaaccgcagatctggcaacggcccccgaccgatcgacccccctccccctcggcgcggcgaggcgcaaatttgtcaagctactgttgatgctccagatatagtagaaaaccatgggagaagttagtgatgataattccaacatgtcctttctaaaaagaatcgctacaagtgacgtgccgctgttgaaagagtatggtgtgaatggagttgttgtcgccctgcttctggctgtagttactcctgtcctgctttccatgatgtttggcaagaagacaaagcaaagggcggtgcgagctgatgtgggtggagaggagggatttgcaatgcggaacaacaggttttcctccttagttgaagtcccatgggagggcgccacgacaatgtcagctctgttcgagatggccagcaaaaagtactctcgacggaggtgtcttggcacgaggaagctaattaagagggaatttatggaatcttctgatggtaggaagtttgagaaactgcaccttggtgaatatgaatgggatacctacactgaggcatttaatcgtgcatgtaatttttcttctggacttatcaagatgggccacgacctagatagtcatgctgctatcttctctgatacaagagctgagtggatcattgctgctcagggatgcttccgacaaaatttaacggttgtaacaatatatgcatctcttggtgaggatgcattggtgcattcactaaatgagacacaggtttcaactctgatatgtgattcgaagcaacttaagaagatacctgcaatcagctctaaattgcagagtcttaggcgtattatctatattgaggatgaacctgtcgaggctgagacactgaaccaagtgaagcatttgacaacattgtctttcactgaagtagaggagcttggcaagacatctcatgttgatgcaaggttaccttcaggctctgatactgcagttatcatgtatacaagcggaagtactggtcttcccaagggtgtaatgatcacacatggcaacatggtggccacaactgcagcagtcatgacaatagtcccaaaccttggcatgaatgatgtttatctggcttatcttccattggctcatgtctttgaactagcaggggagactgtcatgttagcttctggcagtgccattggatatggttcagcattgactatgactgatacatcgaacaagattaagaagggaacaaaaggagatgtttctgtactgaatcctactcttatgatttcagttcctgcaattttggatcgtatcagagatgcagtatttaagaaagttggtgagaagggtggcctgacaaaaaagctgtttgatttttcatataagcgaaatattgcagcaattgaagggagttggtttggatcttgggcaccagagaggatgttatgggatcacattatttataaaccaatacgggcaatgcttggaggacgtctaagatttgttctttgtggtggtgcacctctgtcaagtgacacacaaagatttatgaatatatgtctaggtgtcccagtgggtcaaggctatggattgactgaaacttgtgctggagcagctttcactgaatgggatgatacaagtgtgggtcgtgttggtccaccacttccttgctgctatgtgaagcttgtctcatgggaagaaggtggttacaagatttctgattctccgatgccgagaggagaggtcgtggttggtggacacagtataacaaaaggttatttcaacaatgaagcaaagacgaacgaagtatacaaggttgatgagaggggcatacgctggttctacactggtgatattggtcagttccatcctgatgggtgccttgagattattgacaggaaaaaagatatagtaaagcttcagcatggagaatatgtgtctcttggcaaggttgaatcggctctagcaacaagcaactatgtggagaacatcatggtttatgccgatccatttcataactactgtgttgccctggttgttccagcgcaccaggccttggagaagtgggctcagaattccgggataaactatgaaggctttgcagagctttgccaaaacgaccgagcaattaaggaggttcagcaatcgctatcaaaggccgcaaaagcagcgaggctcgagaaattcgaggtgccagcgaagatcgtgctgttgcctgaaccgtggacgccggagtccgggctggtgaccgcagcgcttaaactgaagagggagcaaataaaggccaaattcaaagacgatctggacaagctctaccactgaagaagcgacagaggacggtttaatttgcacctaccgcttccagacgcttgcggtgccaaaagctgcctggatggaacttttactgacctgcacgagtggtgtgtgtgtgtgtgtgtgtctcccagctgccgatacacaggactacaggagcttcgtttttctgtgatgactgaggaaaaataaacccagtgttggaatgatcttgatttgtaatagcttcacgtcatgggattttaattttgttatagcacagaggatgctcaatttcacgtccgttacgggtcagttatgacactaagcatattgtaaatgatgttttttttatatagacacacaataaataggccctgggcacatcacctttatgtctaggaatacaatgagaccaaggctaagagctgactctgaatgggatgatacaaattttcactgtgttggtccaccacttccttgctgctatgtgaagcttgtctcatgggaagaaggtggttacaagatttctgattctccgatgccgagaggagaggtcgtggttggcggacacagtataacaaaaggttatttcaacaatgaagcaaagacgaacgaagtatacaaggttgatgagaggggcatacgctggttctacactggtgatattggtcagttccatcctgatgggtgcttgagaaaaaaaaaaaaaaaaaaaaaaaaaaaaaagacggtttaaaaaaaaaaaaaaaaaaaaaaaaaaaaaaaaaaaaaaaaaaaactaatggtactctatatcgacatctattgat

SEQ ID NO: 156863 - DNA, 197 bp, Zea mays
  Clone ID: MRT4577_74637C.1
cacaggccacgcgtcctgtggctttacaagtgctctggacctggtttgtcgcgcttttggtttcggcttcttaaatcttatccgaattcctttgctgtttccattggaaacttcttctttggacttactaatacaaaacattgggccatccgagcatttatgactgcaggccttcaccgggtgcataatctggccat

SEQ ID NO: 156864 - DNA, 261 bp, Zea mays
  Clone ID: MRT4577_74638C.1
gtcaagagcgtcgagcgtccgtcctacaatggctggctcggtggcggaacgcaaggagatcagggctctcctgctacaagacgaagagatccacaatgttcttgcttgggctcttctgaagtcgggctgctgctgcataaaacttcactaggcggggaccaacgcccatgccacacagcgccttccatatggcaacaacctctcgcagctacgacctcatgataaacgactggaaaatttcccgcattgaacggcaaaggg

SEQ ID NO: 156865 - DNA, 447 bp, Zea mays
  Clone ID: MRT4577_74639C.1
aaaataaacccttaaaacaataatcgaacccaaataaaaaaaggtgggtccggggtcacacaaaggacaaaggggcatttgggaagaccctaagggaaaatgaaataaggaaaaatgccgtacccgaaaagcccaatccggggacgagcctttaaaactttgcattggggggggaaaaaggaaacccaaatccggggacgagcctttaaaactttggatttgggagggaaaaaggaaacccccctgggcccccctggggagaagggaaaaaaaggaaaggagtcgtttaagggcatttgtagccgggggggaccccccaaccgcagttgacgagcccccccagcgcgaggggcccctaaacggaaatgtccacccccttggccttgatgggggggcaaaagcaccccccccgggaaagcccggcaattccctttacgagggggcaaa

SEQ ID NO: 156866 - DNA, 168 bp, Zea mays
  unsure (1)..(168): unsure at all n locations
  Clone ID: MRT4577_7463C.1
cgggactcctactattcttcggtcagatccccactgctctcataagaaagggccttctggtggagagatgttacacaattactcacctacttcagaggatatgccatgcctcgtgtgggtgatggaagcattatcctcttttggcangatgtttggaacaatcacgcc

SEQ ID NO: 156867 - DNA, 307 bp, Zea mays
  Clone ID: MRT4577_74640C.1
acccaaacgtcaagagaaaggcaaggaaattgggaaggtaggagagagagggagacagggaaagctctcttcatcctcatcatcatctcgaattccgtctcttgtccctgtcgtgggcggggggtttccacggtttttgaaaggggaaagaggatgcggaggagagggatggggagggacgagaggttcccggtgtgggaggccgcgctcggcgcctgagtcgccgccgccttcgccgctggactcgtctgtgtctagctttccatgccggactcacactacagattcctcaagtttccacgtaatc

SEQ ID NO: 156868 - DNA, 740 bp, Zea mays
  Clone ID: MRT4577_74641C.1
cattgggtacctcgaggccggccgggagacttacatgccgggaaattttccgctcgctcccgccgccgctctcccgtgtatatcccagtcgcctgagacctccattcctctttcccagtcgccccccagtccatcaccacttctccattcctctttcccagtgcccccagtccatcaccacatccgttcaaatgggccgcaaccgcaagggccgcaaggctagggtttcgcacgacgccgactccgacgccgatggctgcgaggatgagagggccaccactgcgggcaggagcctctacgagattctaggagttgagaagaccgcttctcaacaagaaataaagaaggcgtatcacaaattggctctgcgcctccacccagataagaatcctggggatgaggaagccaaagagaagtttcagcagctgcagaaggttatatccattcttggagatgtagagaaaagagctttatatgatgagactggcatcactgatgatgatgcactggtgggagaagctgcaaacaatcttcaggagtacttcagaacataagggcaacatgaacaggcttttctgcgcaatgatttgctcagaaccaaagcttgattctcaccgcttcaaggatataattgacgaggcgattggtgaaggtgagctgaagtcaactaaggtgtatgagacatgggctaaaaagatctccaggatggagccaccaacaaatccgctagagaggagagt

SEQ ID NO: 156869 - DNA, 1153 bp, Zea mays
  Clone ID: MRT4577_74642C.1
acttggagaaatgtgtaataataattgtcgcagtaaaatatgttatgatactttcaagtcaaatagagcttccctcccggcaaggtgataagccgataaccatacaacatagtgtaccgtgagaggacaagagatatgacacacaccctgacacactcaaactgggtcttagaaacatcacttgcatgctggtaaattcaggtcacaccaaaagcttcagacaatgttcaacatagggcaagaaggctggcagcagcatcacttgcgcctcttggcccttctgctctccagcctctgttgcgcctgctcaagctcttcttccgtgggctccgagctgctcgccttggagtcacacttggacatgatgttcgagaggatggagttgaactgttttttccgctcagccctgcgttcgctctcctctctagcggatttgttggtggctccatccctgagatcttcttagcccatttctcatacaccttagttgactttagctcaccttcaccaatcgcctcatcaattatatccttgaagcggtgagaatcaagctttggttttgagcaaatcattgtgcagaaaagcctgttcatgttgcccytatgttttgtgtagagttccttcaagtccgttttctcagaatttgaccctctatatttagcttcaaattcttcaatgtcagcctccgtgactttcttgtgcattgttctgaagtactcctgaagattgtttgcagcttctcccaccagtgcatcatcagtgatgccagtatcatcatataaagctcttttctctgtatctccaagaatggatataaccttctgcaactactgaaacttctctttggcttcctcatccctaggattcgtatccgggtggaggcgcagagccaatttgtgatacgccttctctatctcttgttgtgaagcactctcctcaactcccagaatccttgtgtgtcagatgagtccttgttattgccctccgttgcctcctaaactcatgatcgctgtctggttcctttgatagatgctctagggtcagtctacagcgtccaagttgtcatgtttattttaaccccaagcatatctcgaaccccatatgggcgccatgctctctactggtgctaatttcgcattcaacatgaatatcc

SEQ ID NO: 156870 - DNA, 320 bp, Zea mays
  Clone ID: MRT4577_74643C.1
aaaaaacacacaaaaaggggttttttttagctaagggggggcgaatggtttttttaaacccccatttggggggggtttttacagggtggttttttaatttttctactggaaaatttaacctggttttcacccgcttttctaaaaaacatggccccattctgggggacaatgggggcccacctggagggacccggggggccccttttttcttaagttgtcaaaaaaaaacatgcctgcccttggggcctccctggattggtggaccacaaacccgcagggttcctggaagccccaccgaattttggtggttcttggtcaac

SEQ ID NO: 156871 - DNA, 891 bp, Zea mays
  Clone ID: MRT4577_74644C.1
tggccgggtgttagagaagtgcaggctcgtaggtccgatcgccggagtcacatgctctgggctggcttctgctgccaggcgccagctgcctcgctagcccaaccgcaatgcgcgccatcgcctccccactcgcgcctcctcgcccagagccacccattgccgtccgatcaagatccaacgccctcgaacgcgccactttaccaccagtccccctcaccgccgcccgtctccgcctccgccgacaaccggagccagggccctcgccacccacccgattgagccaccccatgcctcctcccactgcgacgatgtcccccgcagctggcggttcctttcctgagctcacctgtcccgcggactttgccaccgtcgccgcccccggcggccgcttctccgtcgtcggcttcggatccctcctctccgagcggagcgcgaggagcacgttcccggagctggagggcttccgggtcgcggtgctgcgggggttccgtcgagtcttcgcccacgctgcccccatcttcttcgagcgcggcatcgccatcgaggccaccaaggaattctcaagcttgagcgtggagccatgcgacagtgaactgatagtagtcacggttttcgaaatcaaggaggaagaggtcccggcatttattgagagggaacatgagtttagatttcttgcggttgtccctgaaggattggatggggtaccttttacaaatcgagcagttgtctgtgcacgctacagcaatgaagaatatttccaagagagatgccgaggaagccaggaaatatataacaagtactttggacggtacaatattgacaaaatatggagagatgatatcttaccatgtcgcttatacctcaagcattgtgttattgctgcgaaaaatc

SEQ ID NO: 156872 - DNA, 1525 bp, Zea mays
  Clone ID: MRT4577_74645C.1
gataaacatggggatgggatttgcatcggtacttgcaggacttgatgctgttgtaaacctcgacattaatggcaattacacctcgtgaggactggattataagccacagcccgcctgttgtccgcccttcaacacttgcatcctcgaggcctggagggcactacagctttcttcaaagaacataatcggatagctgctggcacgattacattatatatataaccacacacacactaaactacaactgcatagccattacccacgtatccatggtattgaagttcagagaaagcttccctctcggcaaggcgataaccacacgacctactgtcccagaggacacgagatatgatacagatcctgacacgctcaagctagctctcacaaccatcacttgcgtgctggtaaaatcagatcacacccaaagcttaagacgatgttcggcatagacgcatagggaaagaaggctggcagcaggcatcatttgcgcctcttggccattttgctctccagcctctgtcgcgccagctcaaactcctcttctgtgggctcagaactgcttgccttggaatcacacttggacatgatgttcgagaggatggagttgaactggtttttccgctcagccctgcgctgtgagatggccaggatcagatcgttctcctcacttttcttcctactcttcgctctcctctctaatggatttgttggtggctccatctccgaaatctttttagaccatttctcatacgccttagttgacttcagctcaccttcagcaatcgccccatcgattatatccttgaagcggtgggaatcaagctttggttctgagcaaatcattgtgcagaaaagcctgttcatgttgcccttatattttgtgtagagttccttcaagtccgttttctcagaatctgaccctctgtatttagcttcaaattcttcaatgtcagcctcagtgaccttcttgtacattgttctgaagtactcctgaagatcatttgcagcttctcccaccagtgcatcatcatcagtaatgccagtctcatcatataaagctcttttctctgcatctccaagaatggatataaccttctgcagctgctgaaacttctctttggcttcctcatccccaggattcttatctggatggaggcgcagagccaatttgtgatatgccttctttatttcttgttgtgaagcagtcttctcaactcccaagatctcgtagaggctcctgcccgcagcggcggcaggagcggcggccatctcatcctcgctgccgtcgacgtcggcgtcgcgcgaaaccctagccttgcgtcccttgcggcccattcgaacggaaccggtgatggactgctggcggctgtggtggcggtgactgggagagaggtaaggacatctgtggcaattgtgattttatacacgcgagacgggagagcggcgggaacgagcggaaaattttgccgcccttttgagtgtgcgcgccgggaagtaatttcccggccggcctcgaggtacccaa

SEQ ID NO: 156873 - DNA, 1395 bp, Zea mays
  Clone ID: MRT4577_74646C.1
aaactgcattctcaaactggataataattaaggacccttgcacgtgggaccagcttctggcaggcagctcaccgtagaataaacattacattgcaatctactagtacttgccagatgctacgaaattaaaagttcagatagagcttccctctcggcaaggtgataagccgataaccatacgacatagtgtaccgtgagaggacaagagatatgacacacaccccacccctgacacgctcaaactgagctgggtcttagaaacatcacttgcatgctggtaaaatcaggtcacaccaaaagcttcagacaatgttcagcatagggcaagaaggctggcagcagcatcacttgcgcctcttggcccttctgctctccagcctctgttgcgcctgctcaaactcttcttccgtgggctccgagctgctcgccttggagtcacacttggacatgatgttcgagaggatggagttgaactgttttttccgctcagccctgcgctgtgagatagccagtatcagatcattctcctcactgttcttcttcttcttcactctcctctctagcggatttgttggtggctccatccctgagatctttttagcccatttctcatacaccttagttgacttcagctcaccttcaccaatcgcctcgtcaattatatccttgaagcggtgagaatcaagctttggttctgagcaaatcattgcgcagaaaagcctgttcatgttgcccttatattttgtgtagagttccttcaagtccgttttctcagaatctgaccctctatatttagcttcaaattcttcaatgtcagcctccgtgactttcttgtacattgttctgaagtactcctgaagattgtttgcagcttctcccaccagtgcatcatcatcagtgatgccagtctcatcatataaagctcttttctctacatctccaagaatggatataaccttctgcagctgctgaaacttctctttggcttcctcatccccaggattcttatctgggtggaggcgcagagccaatttgtgatacgccttctttatttcttgttgagaagcggtcttctcaactcctagaatctcgtagaggctcctgcccgcagtggtggccctctcatcctcgctgccatcggcgtcggcgtcggcgtcggcgtcgtgcgaaaccctagccttgcggcccttgcggttgcggcccatttgaacggatgtggtgatggactgggggcactgggaaagaggaatggagaagtggtgatggactggggggcgactgggaaagaggaatggaggtctcaggcgactgggatatacacgggagagcggcggcgggagcgagcggaaaattccctccgtgtaagtctcccggccggcctcgaggtacccaatg

SEQ ID NO: 156874 - DNA, 250 bp, Zea mays
  Clone ID: MRT4577_74647C.1
cccacgcgtacgcccacgcgtccgcccacgcgttcgcccacgcgtccgcttgaccctgtgggctgctctcctcttctccgatggctaccctgcagcagaaccacatcgtgcgggagaccaccgacgtggccaaagtacccaaattctacgaggccgagcctggattcgagcgcataccttaccccacctactttgccatacaggtttcatggctccggcctgtggggtttcgctacgtcctggccccaca

SEQ ID NO: 156875 - DNA, 810 bp, Zea mays
  unsure (1)..(810): unsure at all n locations
  Clone ID: MRT4577_74648C.1
cctcgaagccggccgggacccttctgtctgtcctgtggcgccatccatccgttcgttacaggtgcgccggcccggtctctcctcctcccagccggccggcggcctccgcttcgctcgcccgtccctgggttctcggttccgcggcaccaccgcgtgccatggggcctccgcggggctggacactgcctgccgccgccgttgccacggccggcgtcgcctcggtggtggccaccatcatcttgtccgcggcggcggccgatgtggtcgaggagaggctgacggtgcccatgacgatcgtcgctggcgccgcgtcggcgggggcagacttttacaactggaaccgtgtgaagctgcgttactgcgacggcgggtccttcatgggcgattcagcagtgtatataaacagctcctcggtgctctacttcagtggccagaggatatgggacgctattgtcgccgatctgctcaggaagggactggcgacagccgacaaggttctgctctcaggctgttcggcaggaggcctagctacgttcttccactgcgacggccttaagcagcggcttggagccgcagccacggtgaaatgcctgagcgacgccggatttttccttgatctgagtgacatttctgggagcaacaccataaggcaattctttagcagcctagtatccctgcagggaatccagaagaatttgaacatggactgcctgagttcaactcaacagacaatgcatacctgtgtttctttccacagttcgcgcttgcgaacatccgaaccccgnntttcatcttgaattcagcttatga

SEQ ID NO: 156876 - DNA, 630 bp, Zea mays
  Clone ID: MRT4577_74649C.1
ccggccgggacccttctgtctgtcctgtggcgccatccatccgttcgttacaggtgcgccggcccggtctctcctccacctcccagccggccggcggcctccgcttcgctcgcccgtccctgggttctcggttccgcggcaccaccgcgtgccatggggcctccgcggggctggacactgcctgccgccgccgttgccacggccggcgtcgcctcggtggtggccaccatcatcttgtccgcggcggcggccgatgtggtcgaggagaggctgacggtgcccatgacgatcgtcgctggcgcagcgtcggcgggggcagtgtgcctcgacgggagcccgccggcgtaccgcctgcacggcggctccggcgcgggcgcgcggagctggctgctccagttcgagggcggcggctggtgcaacgacgtgcggtcgtgcgcggagagggccgggacgcgccggggatcgacgcgcctcatggcaaaggccgagtccttctccggcatcctcagcaaccgtccggccatgaatccagacttttacaactggaaccgtgtgaagctgcgttactgcgacggcgggtccttcatgggcgattcagcagtgtatataaacagctcctcagtgctctac

SEQ ID NO: 156877 - DNA, 627 bp, Zea mays
  Clone ID: MRT4577_7464C.1
ccagcgtccggtgtgcgtgcgcggacacagcgccggggggggggacattccaccaattggcctgcgggggcgctctccatttgttggcggctcagcctgcatccaagagatgtttcggcgggtccgtgagcaccgtcacgggactgttgagctggacgtttttttttttttgtcctcctgtggggggtgggggggggggtttttcacctggggggcgcgtcccttgcgcggggggtgggcggattctctgcagccgcctagtgcctctggcacgcgctccggcgcgggcttaagagagctggtgggcgtagcgttctaggtcgtcatcaccttcgcgctcgtctgcactgtgtacgccaccgtcgccggccccaggaagggctcgctcggcaccgtcgggcccattgccttctgctttattgtcggcgccaacatcctcggcgcggtttctttttgtggtggttccatgaactccgcccgctccttctggcccgtcgtcgccgcgggcgattttgtctgttaacgggtctactgggtcggtcctcttcgttgtgggggggctccttgccctcggctgcggcgacttatttattgggggattttacttgccggtcctgggccgggact

SEQ ID NO: 156878 - DNA, 1292 bp, Zea mays
  Clone ID: MRT4577_74650C.1
cctcgaggccggccgggctccctcaggcctcacccaatgcggccgacgccggcgctcgacgccggcggacgcatggtaacaagcttcctatccgccactgaatggatgcttccgtctccggccacgcaagtccacaccatctccgtacttccctcccgtcgcgacttcgccttctccaacctcacgatgtcgctcaggaatagcggcggcaacgagggagagagtggcagtactaagttccacgtagtacgggacgacctcctccacccgctcgccaacggcaacaaggcgcgcaagctcgacgccctcctgcccgtcctccgccgctgcggcgctactgacatcgttacgtgtgggggttgccagagcgcccatgccgcagctatcgcggttcactgtgccgaatggggaatcaggccacatatactactgagaggcgagcaactggatgttcccacagggtataatctcatctcattgatgtttggcaatgtgacatatgtctctcggtctttgtatgcccaaagagatgagatgctttatgagcatgccataaaggttgcaggatatagtggcacagtgatgtgggcagatgaagttataggaaagggtttgggtgtagatgaggacaccactgatggaaatggttcaagaagagtgatgattgttaaggaaggggcaggtagtgttcaagcactgcttgactccagtggagggttactgctgttatgcttgctgacacacttgaaggatataaacagcgagagagatctcttgtatctgattttgagaaggttttcccggaaatctaccatggaatggaggaagatgctactcatgacaatctagttcaatgggtggagcggttttcacctagaagatttggcaaggtgctggatggtgaaatcgcaatgtgccgccaggtagctcaacagaccggtatcctgctggatcctatgtataccttggctgcctgggagcaagctgttgatatatgctgtggagacagtgaagccaaagtcttgatgatccatacgggtggcacccttggcctttttggattggcacaaaggtattcatcacagttcaacacaggcgaacaaccttaagcatgccaatgatgatgttcaaatgttacggtttgtgggtatggactatggaatgtgatctttgactttgaataatcaaaagtacaaagaggtgtttctcccttggggtgggggggggggggggctttgttaaaggaattggtctttatattgatttggaagctaacaccacgatttgcgttg

SEQ ID NO: 156879 - DNA, 395 bp, Zea mays
  Clone ID: MRT4577_74651C.1
ggatgaagccaaacaagggtgcgggaaaaacatgcgaaactcacctttgggaataaaagcccccaccgagagaaacccacacgatggcggggcggggtctgaaaactccaaacttacatgaacggggctcaaatgaaacccaatcaggacaaacccgcctactcaaattacccacaacgccacacagggatataaacagagagagtatggttgggcttgattattcccccgagacctcctcctccttgggcgtctagaacacaacctgaaagggggggtatggcatgacacggtaacacccaaccttcggatatttggccgcctccaaagtacctttggcaggactggcccacggagccggaaacaaccttgccggcccacgaggaacaagaccc

SEQ ID NO: 156880 - DNA, 258 bp, Zea mays
  Clone ID: MRT4577_74652C.1
acgcgcacgcgtggggcccaacacccccccggcaaccgtcgccatactaccccaggtggggcggacgatctcaggaaacgagcacacgccacatgtgagcagctcaaaccgagagatccaatggaggcggcagatgggcaatgtgtgctcatggcaacggatcggacgccgaaccacattgtacgacttaaatactcaggaaagcaggtctagatcctcattctacctatcaaagaatgttttaatttaacactacac

SEQ ID NO: 156881 - DNA, 1002 bp, Zea mays
  Clone ID: MRT4577_74653C.1
ctcgaggccggccgggccgggatgtcagataccactcctggcgccgctgacttcctcaccctatgcggccgacgccggcgctcgtcgccggtggacgcatggtaacaagcttcttatccgccactgaatggatgcttccgtctccggccacgcaagtccacaccatctccgtacttccctcccgtcgcgacttcgccttctccaacctcacgatgttgctcaggaatagcggcggcaacgagggagagagtggcagtactaagttccacgtagtacgggacgacctcctccacccgctcgccaacggcaacaaggcgcgcaagctcgacgccctcctgcccatcctccgccgctgcggcgttactgacatcgttacatgtgggggttgccagagcgcccatgccgcagctatcgcggttcactgtgccgaatggggaatcaggccacatatactgctgagaggcgagcaactggatgttcccacagggtataatctcatctcattgatgtttggcaatgtgacatatgtctctcggtctttgtatgcccaaagagacgagatgctttatgagcatgccataaaggttgcaggatatagtggcacagtgatgtgggcagatgaagttataggaaagggtttgggtgtagatgaggacaccactgatggaaatggttcaagaagagtgatgattgttaaggaaggggcaggtagtgttcaagcactgcttggtgtcatgcggctactgaagtatctttctggtttgacattatttagaaaggatgagaaagttcatatcgtggtacattctggaacaggaacaactgctgtggggttagctcttggagcggtatgtctaggactccagtggagggttactgctgttatgcttgctgacacacttgaaggatataaacatcgacagagatctctattatctgattttgagaaagttttcccggaaatctaccatggcatggtcgaagatgctactcatgacaatc

SEQ ID NO: 156882 - DNA, 686 bp, Zea mays
  unsure (1)..(686): unsure at all n locations
  Clone ID: MRT4577_74654C.1
cccacgctttcacattaacgaccgcgccggaangcaaccnacgagaggcnaagggaagcccgaaaagaaaggccgcgccgaacacacangcacnagagcaacaccangaaggncccaccgaagaagaaaggccgaaggcagaggctccccacggganncnacaagagnnnagggangcaaccaaagcaaacncagcggaaaggcaccccacagcacaacnnnnncacaagacgcngcncggnaaccgaggcgcgcngcncgangagaacnaaaacacaaaagaactccccaaggagatggcaaatgttaagcataccaagacccaaaaaaaggggagaaagccgaagaccgtggtgcacagagctgctgttctagacccatcaacgaaaacagaatttgtcaaggactataacaacacagatggcgacaatgttgacatgaagacgagggagcccaaaaggtacttgaagaaatattacccagaggacgagaaaaacatgaggagccaaaggccgcagggccccaatacccccgaagaacagacgagaagagagccggcgaacgcttaaccacaatgtggaaaaagaagggcggaacatgcaatcgcacaaaaagcaacccaaaaggcgaaagccccgccagagcgaacagaaaaggaaacaaacttggaggaccccaagaacccc

SEQ ID NO: 156883 - DNA, 476 bp, Zea mays
  Clone ID: MRT4577_74655C.1
cgtgttatgaaagcggcgagcgaattagaagatgctggacatgctgtgggacgacgtggtggccgggcctcgcccggagacgggcctcccgaagctccacaagggcaccaccgcccgtccgttcgaaatcaacaaaggctctacagggacgagaccaggaactaccaccgcttgatcggccgagatggatggacagtgaacaggccatggttgctggccctagcggttatctaaaacgcacgcatgctctattatagcttgtcatcactatatatatacttgagattgagtattgctgcacttgaccgctggtgactccgccgattaattagacctatgttgtggagtgagtgatataagtgccggcactcctaggatatagtaacgagtgactagttggtacgtgaagaactgcacctatcttttccccaatgcatgttttgcccgcccgtaatgaatgtaatgtcagacctggt

SEQ ID NO: 156884 - DNA, 517 bp, Zea mays
  Clone ID: MRT4577_74656C.1
cctcgaggccggccgggctcccgagcagtgaatcaatctagaagacccctctccctctctctctcttcatcgtccgaatgtccgcacccctatctaatcgactcctcaccgagatgcgccgccagttcttcgtcctcgcctactggaaatgccctgcgaaccatcagatcatgccgagaagattgacaaaaacctgaatgaacgcacaggttcccccttcatatgttgaggaggtcgttgtcatgcctccttatgtcttccttcctgtgatcaagagcctgctgcgccaagagttccatgttgttgctcataactgctgcccgaagaacgtacgtgctttcactggtgcaattcagagctgatatgctcgacatgcttggtgttccctgagacattcttgctacactctgaaaggatagctctgctgccacaatcccatgaatttgttgcatacaacgctgcgtatgccctgtctcaaggactatcggtccttgcatgcgtatgggatgacccttga

SEQ ID NO: 156885 - DNA, 329 bp, Zea mays
  Clone ID: MRT4577_74657C.1
gggttgggtttttttttttttttttattttttttttttgggaacacaatgtttgtttcctgttttaaaggggcctggttgtccaaagttttaaaaggtttaaaatttccagataccctgttgctttttgggcaaaaagaaaaaaaatccttttatttttgccccgccctttaaaatgaaaacaaagttcattgttttaagagggcccccacccggccgaccgggggggggttcaaaggcttaaaagggggtttggcgatcatttgttacaacctgaattatttttcccgggggggggaaattttttacataccccaccagggggtcttt

SEQ ID NO: 156886 - DNA, 380 bp, Zea mays
  Clone ID: MRT4577_74658C.1
actctcctcgacacgcctctgaaagttcggaaccgccggtccgtccgcctccctctacggctcccgtccccaaggtcaatagtgtttaagaggaaatgtagggaccacgctaaccaacccactgtccttcataagctcggtgggcagttccacctgcactcgatcatctctgaaagagtacgggaccataacatatgcccatctgtgtcatcttatgaaaggaaatttgacacgatgtactacatgacccagaaccttttgagcccttccatgattgtatgcgagcgcatcaatgtcccagtgatgctgactccgatctgtgctaatgctcctgtgtttgaaaggacgccaccacctcatgatcgatttcatgatggggg

SEQ ID NO: 156887 - DNA, 388 bp, Zea mays
  Clone ID: MRT4577_74659C.1
ccgcgctcaggacgttccgggtccgcgccgagaagaagctcccgggcatcgtcgactacttcggctggtgcacctgggacgccttttaccaggacgtcacccaggagggcgtcgaggccgggctccgcagcctcatcgccggcggcgcgccgcccaagttcgtcatcatcgacgacggctggcagtccgtcgccaccgacaccaacgaatcggccggagaggacaagccgcccctcctatctcggctcaccggcatcaaggagaacagcaagttccagaacgcggacgacccggccgccggcatcaagacggtggtgcgcttggcgaaggaggagtaccggctcaagtacgtctacgtgtggcacgccatcaccggctactggggcgg

SEQ ID NO: 156888 - DNA, 271 bp, Zea mays
  Clone ID: MRT4577_7465C.1
gaaacgtaattattgcgcttagtcgtatgtcgaaactaatattatcgtataaaattgtacaacgccttgccactaggtgtttaatacgctatcgtatagcactatttagatttgtgctattcttgtttatatgcattcatgtgcatcgtgcatctcaattaggtacgataattgatcgcgtgatgcggaagacaagccaagtggaccccaagcgcggactaattcgcaagatgatgctgatggattaacccgaagatagatggacgaagca

SEQ ID NO: 156889 - DNA, 335 bp, Zea mays
  unsure (1)..(335): unsure at all n locations
  Clone ID: MRT4577_74660C.1
gccccgaacagcgctggntttttgcaaaagcaaccggggccaggggcctcgccagggcacccccncnccccgggcgggcgcgcgccgccgccccncgnggnagcgcccgagcncacacaggnnggaaggagagagagagagagacagagggagagannggagggaggccccngnccaagggaagagaaaccgnggngcggggggggggaggaaggncagccgcagacgggcgaacccagagagggagancannannangcacaggggccaggccggcanccagggcggggccgcccgcggggagcnccacgggcccgagcacggnaccgagcgcg

SEQ ID NO: 156890 - DNA, 1135 bp, Zea mays
  Clone ID: MRT4577_74661C.1
agcgcgcggcagtcccccttctttcgagacctcgccaccccgatcccgtcccatcgtggcgtgtcccgctttgcctcgggggcttccccctcctccacgccaccacccccgccgcccatcttcaccctcgatgaccgctatgcctccgcagacttctccccggaccccaccgcctccgaccttctccccgtcgcgtcgtctccctccccccgcaccgctgccagccgctcgccgccatgggacctgtcccggggcaaggtggcgctctcggcaccaggatcccccatggctggggtcgtcgagccgacccggaaagagatgctcgctttgccggcccctgcgagccctggcaccccacctcctgccgcgacagcggaggcgcagtcaccggtgtcccccgcgcaggcacctaggacggagccggtggcgaacgcaggggaggtcgaacgggaggagtgggtcactgtatttggattctctattggtgataccaaccttattcttcgggaattcgagaaatgtggagtaatattgagacatcactctggtccaagagatggaaattggatccacatattgtacgagcgctcgtatgatgctcgcaaggctcttcagaaaaatggtatgcaactaagcaacagtctgatagttggagtaaagcctattgatgcagtgcaccggcagcagctggacaagggtttcgctcaaagcaatcaaggtggatttatggtttccttgccttcaaagtcactgggcttgaagagcgcaggtgcatcaaaccagttaggagccttgccccgcccatatgacccgaaagctaacacgaatgtcagccgagatgctggccgtcgtgcaactggcagcgttgctgcaccagcaaaatcaattgtaaccaatgtgatggatttgatatttggcatttgatatggcaatgagaaccaatcatccggaatcttctctgtttcttctgtttacttgttcgagaatgccagcattccaaagattcagcagcaaattttgatgaagtttgagagcttactgactgaacttccttttggcgatgtaacattaaaattattcaattttcacgtttaatcgaagttatgttgtctcaaaaaatgttcatatgtggtcc

SEQ ID NO: 156891 - DNA, 170 bp, Zea mays
  Clone ID: MRT4577_74662C.1
atactgagtcgtattatgactcgtactaatcaggatctaatgtgcacagtttgtaacatgccatatgtgttctgttgaatcctgatgaccaccgactggtcgcttctcaggtagacggatcggcccggagatgtgctgagatcggggttgctgaggttcttggcaatgca

SEQ ID NO: 156892 - DNA, 113 bp, Zea mays
  unsure (1)..(113): unsure at all n locations
  Clone ID: MRT4577_74663C.1
gncctgatgcataggaagagcttatgcacctttgcatggatgcacgcccttcataatgcattttgccttatctggcttgcctagtgcctgtatgcccttttgcctaaacactt

SEQ ID NO: 156893 - DNA, 332 bp, Zea mays
  Clone ID: MRT4577_74664C.1
tctttcacgcgtgggcaagggtctaggaccggggccctgatgcttagcatgcggcatactcggcactcacatggggcatccaatctctcagtgaggttactagatcagcatgacggggaactcatagagagcttcttggctgttctcgacaacttcgaaagaggaaaagtgcaaataaaggtggaaacagagggcgcggtgatactaactaatggctaccagagggtctattcgcactccatcgagattttgaattaatggctcactgaagattgtgacaccgtcgaagaacaatgcacccctatgcttaacgagggtattatgagagaaga

SEQ ID NO: 156894 - DNA, 213 bp, Zea mays
  Clone ID: MRT4577_74665C.1
gggctgtcttagccaatggcactcaccccttggagcgcgaacgccctaacgttacttgatacttgctgcgagcataggcgcctcttgctagcttggattctgacttacaagccttcagacataattcttgcacacggtatcttttctccactgtcttttcaaccaatcacgatgacctatcttgtgaatcaacggttcctcttttactatttt

SEQ ID NO: 156895 - DNA, 303 bp, Zea mays
  Clone ID: MRT4577_74666C.1
gcgcccacgcgtccggaagcagaggagagagcatctagctagcgctgtcagacggggctgcctcgccaccgaccgctcgcgaagagatcgatggctcatgctgctacgctcgctgctgcaaccgcagacggcgtcctaatcggcctctgctgctgctccgtttccgaggccgacagcaacagcaccaacacgaggcacgcgtcgatagcccacggcctgtccttggactatctacaaacggatctggctcatggccgagtgcggcacgcggatgttcgagcaagacaccctgcgcatggacac

SEQ ID NO: 156896 - DNA, 223 bp, Zea mays
  Clone ID: MRT4577_74667C.1
ctcttatcttatctgatctcgcgttctcccacctctgttcgccgctttataccgaccgcccagtctgccaccataacgacatacattctcctccccctggccctccaatggggaaccctccggagctgtaccacaagatgcttacatccccaaggacacctagccgcaggaacttcgcgccgcgtacaagggcctcctcaagaaatgggaccaccgacaagca

SEQ ID NO: 156897 - DNA, 308 bp, Zea mays
  unsure (1)..(308): unsure at all n locations
  Clone ID: MRT4577_74668C.1
accacattccctacaccgncgncgccgtaggacgcagtcgcatccgccatggaggcgtacaagtatgtctcggagtatggaggaggatagcaatccacgtgatgcgttcgtgcagtcgtgcgctcttggagtcaggcagcagcagcatcgtcgtctacaaggccaccgcccgactggcagcgctgttacaagcaacagagatgtgctacgactctctagcgtgcgagaaagcggcgaggtttttatggagcacacaggtcaccgtaaccaagacaagttctgttgatgctgcaagtgtgctagtctac

SEQ ID NO: 156898 - DNA, 600 bp, Zea mays
  unsure (1)..(600): unsure at all n locations
  Clone ID: MRT4577_74669C.1
gccggccggttccgggtactaccnggaagagcactgacaatggactagatctgatatttttattgcttctatatttatttttattttcttttgcttcgttctcttcaagagctctttgctttctttgcggttctcccaagagttctttgtacctatgtattacaaattctttatatgtataagatgaggacaattttggcaaaaaaaaaaaaaaaaaaaaaaaaaaaaaaaaaaaaaaaaaaaaaaaaaaaaaaaaaaaaaaaaaaaaaaaaaaaaaaaaaaaaaaaaaaaaaggcccctagggaacccgaccgcaacctaaactaaagggtcccccgacgtgggaggaatccggaacccaattctccctatccggagccccctaagggggggcccgctgcccaattcgccccaaagggaggcctgttaaccccccgtccgtggcccccctttttacaccgtgcagaacgggaaaaacccctggcgttgccccaattaatggagagggccgaaacccccctttttcccatagggtgaacaacaaaaagggcccccgcaaagggcattcccaaaggttggggccccctaaaggcgaaggga

SEQ ID NO: 156899 - DNA, 1056 bp, Zea mays
  unsure (1)..(1056): unsure at all n locations
  Clone ID: MRT4577_7466C.1
ggcaccagagtgaagctctgtcacgtgagaaggaagtnnnnnnnnnnnnnnnnnnnnnnnnncatcttgaggagaagtatttgtcacagtgcnnnnngtttgatgagacagatattagatgcaaggaagctnnnnnnnnnnnnnnnnnnnnnncagaattagctgatgtagctcgtgtagaagcttctgctgctcaaaaggataannnnnaagctcaacggctcgcaatggagaggtttgcactgatagaaagaatggagcgnnnnnnnnnnnnnnnnnnnnnnnnnnnnnnnnnnnnnnnnnnnnnnnnnnnnnnnnnnnnnnnnnnnnnnnnnnnngctgtgtccaaggtcgcattgcttgaaagaaatgtcggtgagcgagaaaaagaaattgatgggatgttgaagcagaacaacgagcaaagatccagcacggttcaagtgcttgagagtctgctggcaacagaacgtgaagcatgcgctgaagccaataagagggcagaggacctgtcattgatgttgcaagcaactcaaggcaaactggacatgctccaacaagaaaccacacttgatagcaagctcaagacctctgcaaggcgcttaaggggtgaaggtacagagtctgtacatgatatggatatcgacgaagacaatggtaggcgccggaaacgatcaaaaagcacaacaagccctttgaagagcaatcacacagaggatggtggatctgtatttattggcgaagatacttgcaacgggagtcagcaagggacagaaacagaagactacaccaaatttacagtgctgaaactgaagcaggagctgaccaagcgcgggtttggtgcccaactcctccagttgaaaaatcccaacaagaaggatattgttgccctgtatgaaaagcatgtcgtcggcaagtagtacttgtatgctttctagacttccatgtagtgttcaaacatgaatttacacgatcgtgattgaagcgaaacaatgcatgtaacttaatttaaatctcctgtatctgtattctccaatnggcgcagttcattttaac

SEQ ID NO: 156900 - DNA, 375 bp, Zea mays
  Clone ID: MRT4577_74670C.1
atttagtaaaaactcaattattggataaaccacgaattaacatgtccttaacctactggggtttcatgtagactgtcttaatccatagaagtcattgcatagcattattattttttcctgctgaattatctttgtcaaaatgttcagtgtgacaatcgttgttgcatatctcatgaagaagcatcaaatgagcctcgaaagtgccttgtcactagttagaagtaaacgacctcaagtggctcctaatggggggtttatttcccagctggagaagtttcagaaatccttgcaaggtaaaacacaaatagttgcctttgtcctcctttatgttaaaatggtttcagagcaaggtgacatgtgtatcttgcttaatga

SEQ ID NO: 156901 - DNA, 715 bp, Zea mays
  Clone ID: MRT4577_74671C.1
ctcggccgggctccgccccccaccgcgcaccgcccgaccagcgacgggaacccacgccgccccctctccgccccgtgcagtcgctccccagctcccgcgccgccgttccctgctaaccccatccccttcgcctcgcctcgtgctaagagagcgcggaccactgcggtgccacgccgacgccttctgccggccccaggtggattccgtccgcagactcctggaggtgctgctatctagccccttgatctgagctgaaattaggagctgaacctgccgggcgagccgatgtacggctcgccggtgtccaaggacctcaacctcccggtgcagccgcccatggcctcgtccgggctgctgaggtacagatcggcgcccagcacggtgctcggcgacctgtgcgaggacttcctctcttccgcgccccgcgccgccagccctgacgccggcgccgacaacgtcttctccaggttccttgctgaccaccacatccgggacgacaagccgtcgccgcttgcctccgccgccgtccacttcccgactgaaaccgacacggcctcccagcagcagcagcagcagatgatgttccactcccagcagcagcaggagatggtgagcgccaagtccggcctctaccgcaccgtgagctcaggtgtagaaactgggtccgctgctggtgccggcggggccagctccagtgccaacgctagcaacctga

SEQ ID NO: 156902 - DNA, 364 bp, Zea mays
  Clone ID: MRT4577_74672C.1
tgttcacccaaacccaccggtgattggggctgcccttcatgggtgacgcaccggatcgtattatgcgaaccgacgctggttctggtcgcaggcatggggaaaaatcacccagccgtaagcgccgagtacagagaggcccaggggaaggccaggtgcatgctccggaccctaatcgacgagaagagctgagcgcccctgatgctccgtcttgcgtggtactgcgagggggcgttcgacgtgtagacaaggaccggcggggccttcggttctaagaagtgcccggtggaactggcttacggcgccaacgtggggctggacatgtgggagcggatgttcaagcactgcaaggaggagtaccccaccc

SEQ ID NO: 156903 - DNA, 450 bp, Zea mays
  Clone ID: MRT4577_74673C.1
cgtcgactatcatggggggggtcttcccttggccgggagcccggcccaatgaccccacccacatgcccccgttccgcccccgtcactgacgcctgctccttcagcaccccgttgtccaccccccccctccccgccctcgacacccgggactcgctcgcccgaccgtgatgctcggtctacaacacccgccatcccccgctgtcgtcgctcgcgccatgcgtgtgatgccccgaccacgatagtcgtcgtgcctggtaccgcccgtcgagacaaccccctcctcgctcaccgaccgcggatgcccctcctcgatgcgtgcgatacctgggtcacgacagtcgtcgtgcctagtaacgcccgccgggacggtcgtgagcggggcggtgggcacacagaccagccctctagggctactaggtcattctctctccttttttgcgttgggtatgc

SEQ ID NO: 156904 - DNA, 245 bp, Zea mays
  Clone ID: MRT4577_74674C.1
ataatatacttgcatgttgctgtgatccaagtgacgtgaatatatatatgctactatgtcgtgctttagtttgttctgttgtgaaatgaatatgtaatcttcgattggaaggaacgatcgatttgctatcccaatctagtgtatgttttgacaaaatcctgaataaactatgccttctagtaacgcgcgcgcgctcttgtgcttgtgtgattcgtttattttgaatttattttttagggataaaa

SEQ ID NO: 156905 - DNA, 214 bp, Zea mays
  Clone ID: MRT4577_74675C.1
ccaaaaaatggggggggatcaaatttctgtcccggctttcccctcccaaaccccaatagagagggcctgaaggccccaatccatatccagtcttacccgtccgtaacctgtaaaagccaaccgaccggggggggccccccacccccaagaagcttatcacccccctgttaaacaaagcaccccgcccggaagtttgattctcccgaaggtgcac

SEQ ID NO: 156906 - DNA, 885 bp, Zea mays
  Clone ID: MRT4577_74676C.1
agtaatcaaattccaaagaatggtaatgcatcaactgttaattcacacaactcgtatcacctaatgcagcatataagtgataaaagtttttaaaacagcaaggaggtggcaaatgcactggggcttgcccgagataacactaggttagtgtggttagatgatgaccacttggtgagcatcttccatcctggcacttgatcagatcatccattcctctggtttatttgtcagcatcactttgagattaatccaacacttttcctccacatcgtgcgatcaattaacgtaccataacgaaaattttgattcggcacccatagacacagcgatgatccctggttggggtatatcatcgaacacctaagaagcgttgaacttaaccttcttctccacttaattctccagggatttttactccatatcgcacacataaacacacataaaacatcacatcagcatggtattaataagaacctatatgcacaagaaccactaaaacaacaaagggatatagagatcatcaccatagactccaaggagcagctgggcaccatggatgaaggtgttgttgttgttgtggggaggagttcggccaccagaaagaaaaaggagggctagcgtccagaacatggggcgagctccatggcagggagttgagggcgagctcgccatgggggaggagcgcgcgcaggggcgagcggatgctagggcgcgcgaccatggaacctgggcacctgctagggagggaggagatggaggaggggcggccatggtgggacagaactggacgcatggtggaggaggagatggggcgagctgcaggtggaggagcagaggacgcaccgagttgcagaggtgagggagagaggagcagctccctgctgg

SEQ ID NO: 156907 - DNA, 119 bp, Zea mays
  unsure (1)..(119): unsure at all n locations
  Clone ID: MRT4577_74677C.1
acgctcactctttattgcactcgtgcgctttatatataangacaaggggctagttatttgtcatgagtagttgctaggtgttgtagacccatacatctatagactggtgagtaagggac

SEQ ID NO: 156908 - DNA, 812 bp, Zea mays
  unsure (1)..(812): unsure at all n locations
  Clone ID: MRT4577_74678C.1
gggtaccctcgaggccggccgggaagctcctcatctcgcgcaggggggtcgcctgaggtatcggtcaatcagcaatcaccccaaatcctagggttctagtcgcttctcgtcgtttcgttcgtagatcacagagacaatggtgaaggcagttgctgtcctcgccggcactgatgtcaagggcaccatcttcttttcacaggagggggatggtccgaccaccgtgactggaagtatctctggcctcaagccagggctccatgggttccatgtgcacgcgcttggcgacaccaccaacggctgcatgtcgactgggccacacttcaatcctgttggcaaggagcatggcgcaccggaagatgaggaccgccatgccggtgatcttgggaatgtgacagcgggagaagatggtgttgttaatgtcaatattactgacagccagatacctcttgctggaccccactcgatcattggccgagctgttgttgtccatgctgatccggatgatcttggcaaaggtggacatgagcttagcaagagcacgggaaatgctggcggacgtgttgcctgtggtatcattgggctccaaggctaaagcagttaacctccgaggcaaacaccatagaaggtcgaagcgagcacctcaggatgttgctgttccatttcccctgtattggcaacacaatttgagtactccaaataagcgcctgatccatgatcagagagcactattcatgccattttgtatatgaacaatgttgcgctaaaaaaaaaaaaaaaaagcggcccttnaacttcaacttttgttcccttta

SEQ ID NO: 156909 - DNA, 841 bp, Zea mays
  Clone ID: MRT4577_74679C.1
ttgggtacctcgaggccggccgggcactctccatctattcctcacgagcgattgcggcggcggaagtaagaggcgatggggcactccaacgtgtggaactcgcaccccaagaactacgggcccggatcccgcgtctgccgggtctgtgcgaaccctcatggactgatcaggaagtacgggctgatgtgctgcaggcagtgcttccgcagcaacgccaaggacattggcttcatcaagtaccgctgaagtcagctgggcgggctatctgaatgccatctcttggacatggacagtgtagtagaggcgatgccacaattttaattactgtcatttagatgttccgttcagaactctgctatttaagtccgccatgtttgtgatggagaacttaagctttgtttgttatactgactatgagttacctgtgctttgcttaaaaaaaaaaaaaaaaacactgagaaccgcagagacaggcgtcttcgtactcgcctatctccgcgactcaaagctttccccaattcccccccttctcccatttctcaccaccgccgccgctccccccgttcaacaacaccatgagggagtgcatctcgatccacatcggccaggctggtatccaggtcggaaacgcgtgctgggagctgtactgcctcgagcatggcattcaggctgatggccagatgcccggtgacaagaccattgggggaggtgatgatgctttcaacaccttcttcagtgagactggcgctgggaagccgtcccccgtgctgtttttgttgaccttgagccactgtcatcgatgaggtgaggactgggacctaccgccagctcttccatcctg

SEQ ID NO: 156910 - DNA, 2487 bp, Zea mays
  Clone ID: MRT4577_7467C.1
cttcttttttttttttttttttttttttttttgggggtttttttttttttttttttttttttgaatctgaaaagatcgatggcataaaattacaccacaaaaccatggaatccgaatagattgtcgtcatagcattacaagaaaacctgtgccgggattggaaagacaaacatttcaatcacgactcctaactacaaacttgccgacgatgcatgctaaaatgaactgcaccattgttgcaatacacagaccagagatttaaactaagttacatgcattgtttgcttcaatccgatcgtgtcaattaaagtttcaacgctacagagggaagtctataaagcataaatacaagtattgccgaggaactacttgccgatgacatgcttttcatataaggcaacgatatccttcttgttgggatttttcaactggagtagttgagcaccaaacccgtgcttggtgagctcctgcttcagcttcagcacagtgaatttagtatagtcttcgctttctgtcccttgctgactcccgttgtaagtatcttcgccaataaatacggaaccgccatcctctgtgtgattgttcttgaacgggcttgttgtgctttttgaccgtttccgacgcctcccattgtccccatcgatatccatatcatgtacagactctgtagcatcaccccttaagcgccttgcagaggtcttgagcttgctatcaagtgtggtttcttgttggagcatgtccagtttgccttgagttgcttgcaacatcaacgacagttcctctgccctcttattggcttcagcacgtgcttcacgttctgttgccagcagactctcaagcacttgaactgtgctggacctttgctggttgttctgcttcaacatctcatcaatttctttttcccgctcaccgacatttctttcaagcaatgcgaccttggacacagcatccttctctgactgatgaagtctctcaatctcttctaccaacttagccttgtccctttctagagcttcaacctgtcgctccattctttctatcagtgcaaacctctccattgcgagccgttgagcttcccccttatccttttgagcagcagaagcttctacacgagctacatcagctaattctgttgctcgttttgcttccctttcagcttccttgcatctaatatctgtctcatcaaactttttgcactgtgacaaatacttctcctcaagatggttcttttcctgttccaggatcccaacttccttctcacgtgacagagcttcacttctaacagactccaggttatcagtcagtaatctgatctcctccctcaaagccaacgaatcagactcatggctcttcgacttcgcttcagtggcctcaagcctcgagatcaaacttgtagcatgaatttccatttgactacgttttgcatgtaatcttgcaatttcctcttccttctcagatagttggttagcaagctctaccctcaaagcatcttccctctcttgcactttcttatttgtgcgttcctgtgctaccgccgctctctgcagagctgttttggcctcactaacagcaacttcatatttgcgtttccattcggatgcttcctcttgagcagaatcagcctgttcacgtgttgccgataatctaccctcactgatactcaccctagactctagggaagcaatttgagattttaacttactctcatctgccttttgctgcaaaataccatgatcatatttgctcttccaatcattggattcttgttttgcagtttcaagagaagaagacaagctcaagcaccgttgttccaacttgctactcttggcctgaagttcagttatacgaatagaataatccttggaaattttctgtttatcattcagaacttcctcatagcgcctcacatactcagctctgtgactctcgcttgcttcaagctgcttcctcagcaatgccaacttatcatcgcttgaattgcatttcaatctcatggcgttcctttcagcatctatatgctctaactgtcttctgaaaaggtccagaacagggccagccaaacactgctgtaagaatgtggctagccttttccattttccaggaccataggccattgactcatactctgtgagtaggtcatcaaggagcctgactatgtcatctaattttgcattcgaacggttacatgctgctcgcacctttgattccatgttgtgaactttattagaacattgcaagtcagcctccagaaaagcattccttttgtagtcctcaaaggcctttttgagagaactgtgaagaagcttttcaaattttgaacgagctgacccagctccaacagcagaaacattaaaagcactgatagccttcctcatggcatcttcatgtgcttctctcaaagaatcctcttctatatgttttttctcgagccgaattccgagcttacgtacgcgtgcatgcgacgtcattgctcttctatagtgtcac

SEQ ID NO: 156911 - DNA, 1513 bp, Zea mays
  Clone ID: MRT4577_74680C.1
attcagtgcgtgcctggcaagtggcaaactcgagctgtctagtcctcggttcgcgaatcttccacagagaggcagacggcaggactcgcttcaagctcctcatctcgcgcagggggggtcgcctgagatcacagagacaatggtgaaggcagttgctgtcctcgccggcactgatgtcaagggcaccatcttcttttcacaggaaggggatggtccgaccaccgtgactggaagtatctctggcctcaagccagggctccatgggttccatgtgcacgcgcttggcgacaccaccaacggctgcatgtcgactgggccacacttcaatcctgttggcaaggagcatggcgcaccggaagatgaggaccgccatgccggtgatcttgggaatgtgacagcgggagaagatggtgttgttaatgtcaatattactgacagccagatacctcttgctggaccccactcgatcattggccgagctgttgttgtccatgctgatccggatgaccttggcaaaggtggacatgagcttagcaagagcaccggaaatgctggcggacgtgttgcctgtggtatcattgggcgcgtgcctggcaagtggcaaactcgagctgtctagccctcggttcgcgaagcttccacagagaggcagacggcaggactcgcttcaagctcctcatctcgcgcagggggggtcgcctgaggtatcggtcaatcagtaatcaccccaaatcctagggttctagtcgcttctcgtcgtttcgttcgtagatcacagagacaatggtgaaggcagttgctgtcctcgccggcactgatgtcaagggcaccatcttcttttcacaggaaggggatggtccgaccaccgtgactggaagtatctctggcctcaagccagggctccatgggttccatgtgcacgcgcttggcgacaccaccaacggctgcatgtcgactgggccacacttcaatcctgttggcaaggagcatggcgcaccggaagatgaggaccgccatgccggtgatcttgggaatgtgacagcgggagaagatggtgttgttaatgtcaatattactgacagccagatacctcttgctggaccccactcgatcattggccgagctgttgttgtccatgctgatccggatgaccttggcaaaggtggacatgagcttagcaagagcaccggaaatgctggcggacgtgttgcctgtggtatcattgggctccaaggctaaagcggttaacctccgaggcaaacaccatagaagatcgaagcgagcacctcaggatgttgctgttccatttcccctgtattggcaacacaatttgagtacaccaaataagcgcctgatccatgatcaggaagcactattcatgccattttgtatatgaacaatgttgcgcacctgcttaagtgtctgttccaaaaaaaaacttaaaaagaccctagtggaagtgtactatccgagtctatcagcagcctgagaaaaaaaaaaaaaaaagcggccc

SEQ ID NO: 156912 - DNA, 205 bp, Zea mays
  unsure (1)..(205): unsure at all n locations
  Clone ID: MRT4577_74681C.1
ctattttgaaccccacccctcaattcatccagcggcattccagcgccaagggagatcttctncctcccggcaagggattccccatcatttttttttcttttcctctaaaccgctcttctcaaaataaaataagggggggcggcgactttgggctttttaccccaaaataaattacaaaccggtacctctttgtccccaactttcc

SEQ ID NO: 156913 - DNA, 1203 bp, Zea mays
  Clone ID: MRT4577_74682C.1
gccggccgggccgggcactctccatctattcctcacgagcgattgcggcggcggaagtaagaggcgatggggcactccaacgtgtggaactcgcaccccaagaactacgggcccggatcccgcgtctgccgggtctgtgcgaaccctcatggactgatcaggaagtacgggctgatgtgctgcaggcagtgcttccgcagcaacgccaaggacattggcttcatcaagtaccgctgaagtcagctgggcgggctatctgaatgccatctcttggacagtgtagtagaggcgatgccacaattttaattactgtcatttagatgttcccttcagaactctgctatttaagtccgccatgtttgtgatggagaacttaagctttgtttgttatactgattatgagttacctgtgctttgcttaaaaaaaaaaaaaaaaaaaaaaaaaaaaaaaaaaaaaaactctccatctattcctcacgagcgattgcggcggcggaagtaagaggcgatggggcactccaacgtgtggaactcgcaccccaagaactacgggcccggatcccgcgtctgccgggtctgtgcgaaccctcatggactgatcaggaagtacgggctgatgtgctgcaggcagtgcttccgcagcaacgccaaggacattggcttcatcaagtaccgctgaagtcagctgggcgggctatctgaatgccatctcttggacagtgtagtagaggcgatgccacaattttaattactgtcatttagatgttcccttcagaactctgctatttaagtccgccatgtttgtgatggagaactgaagctttgtttgttatactgattatgagttacctgtgctttgcttaagctttcttgtcttcaaaaaaaaaaaaaaaaaaaaaaaaaaaaaaaaaaaaaaaaaaaaaaaaaaaaaaaaaaaaaaaaaaaaaaaaaaaaaaaaaaaattgtttcaagggggatcgcggggccaaggcccgggggttttaaaaaccccccggcaggggcagggagggttcctgcttgggaaggttttggaacgaacgggttttatttgcttccaagccagggccgggatgtggggaacaactggggtttgccaaattattatgagcagttgcgaattgaaattcagctgggctaccgggacattgttatgtataaataaaggctttgcttaattgagag

SEQ ID NO: 156914 - DNA, 951 bp, Zea mays
  Clone ID: MRT4577_74683C.1
accctcgaggccggccgggagcaatcaccccaaatcctagggttctagtcgcttctcgtcgtttcgttcgtaggtgcgcccctctcatctgcactaaacctgagtcctgattagggttctacataatcgcttctctttgcctgattgatttgataccctacatccgtggtcgccggttcttccggattagccggatctgttggtctccggttcgtgtgtgctgtaccggatttgggatcacagagacaatggtgaaggcagttgctgtcctcgccggcactgatgtcaagggcaccatcttcttttcacaggagggggatggtccgaccaccgtgactggaagtatctctggcctcaagccagggctccatgggttccatgtgcacgcgcttggcgacgccaccaacggctgcatgtcgactgggccacacttcaatcctgttggcaaggagcatggcgcaccggaagatgaggaccgccatgccggtgatcttgggaatgtgacagcgggagaagatggtgttgttaatgtcaatattactgacagccagatacctcttgctggaccccactcgatcattggccgagctgttgttgtccatgctgatccggatgatcttggcaaaggtggacatgagcttagcaagagcacgggaaatgctggcggacgtgttgcctgtggtatcattgggctccaaggctaaagcagttaacctccgaggcaaacaccatagaaggtcgaagcgagcacctcaggatgttgctgttccatttcccctgtattggcaacacaatttgagtactccaaataagcgcctgatccatgatcagagagcactattcatgccattctgtatatgaacaatgttgcgcacctgcttaagtgtctgttccaacaaatgcttaagaagacactactggaggtgtactatggagtactaccagcagcat

SEQ ID NO: 156915 - DNA, 231 bp, Zea mays
  Clone ID: MRT4577_74684C.1
atttctagtcaaaagttccccttcccttgcccacctcctctccctcacgaaccctcctactcttccaaaccctagcattttcccttcccgtttcgagcttcccatggccgacggcgagccggaggcgccggcagaggataaccatccattcccggaggcgtcgtcagccgatatggagaagcacccgccgccggaagcccccgaggcgtctccggccgagacgaagccaga

SEQ ID NO: 156916 - DNA, 533 bp, Zea mays
  Clone ID: MRT4577_74685C.1
tgggaccctcgaggccggccgggcactctccatctattcctcacgagtgatttcggcggcggcggcggaagtaagaggcgatggggcactccaacgtgtggaactcgcaccccaagaactacgggcccggatcccgcgtctgccgggtctgtgcgaaccctcatggactgatcaggaagtacgggctgatgtgctgcaggcagtgcttccgcagcaacgccaaggacattggcttcatcaagtaccgctgaagtcagctgggcgggctatctgaatgccatctcttggacagtgtagtagaggcgatgccacaattttaattactgtcatttagatgttcccttcagaactctgctatttaagtccgccatgtttgtgatggagaacttaagctttgtttgttatactgattatgagttacctgtgctttgcttaaaaaaaaaaaaaaaaaaaaaaaaaaaaaaaaaaaaaaaaaaaaaaaaaaaaaaaaaaaaaaaaaacccttccgaaaaaaaaaaaaaaaaaaagcggcc

SEQ ID NO: 156917 - DNA, 2211 bp, Zea mays
  unsure (1)..(2211): unsure at all n locations
  Clone ID: MRT4577_74686C.1
ttccgtcgtcgtcgtcagcagcttctgcttgctctggggggaaggagagagagagagagcgagagagagatctagtagagaggctagtaggtggtcctcgaacgaagatgttggcggtgttcagcgggcaggtggtggaggtgccggcggagctggtggcggcgggcagccggacgccgtcgcccaagacgaaggcgtcgcagctcgtggggcgcttcctggccgcgtccgagccggccgtgtccgtgcagctcggcgaccacggccacctcgcctactcccacaccaaccaggcgctcctccgccccaggtacgtacgtacgttcgtgtactgctggcaggcaggcaggcatcttcttatcctccatgggcactatcccctacgactacgagtattagtacttgtcggatctgtgttggatctcgcgtgctcaagcaagccgactgagatcttctactagttcttcctctcgcaagctaaaggacagtacangttccgttccatccttccaatttctggaaaaaatagaattccttagaagagaaatagagtttttcccccctactggatctggttcttctcgtgtaaattaatacgtcaggatgtattaattgtctgcttacgcgtgcctggcaagtggcaaactcgagctgtctagtcctcggtatcggccgggaagctcggcaggggtcgcctgaggtatcgatcagcaatcaccccaaatcctagggttctagtcgcttctcgtcgtttcgttcgtagccgcggaatccgtcagttataacccccccttctcgggtcgtgcgcagcgcccgcgggggcgttcactcgttgatcacacccacaatgatgaaggcagttgctgtcctcgccggcactggtgtcaagggcaccatcttctgttgacaggagggggacggtccgacaacggtgactggaagtatctctggactcaagcggggggtccatgggttccatacgtaactcgcttcgcgactcacgccaacggctgcacgtcgactgggccacactccaatcctcttggcgatgcgcatcgtgtgggcgacgattcagtcctctttgcaaggagcatggcggggcgaagggtcaggggcggaatgccggtgatcttgggactatgtcagcggcgagaagatggtgtttgttggtgtcaaatatttctgtcagccagatacctcttgctgggcccctctcgatcattggcgcagctgtggatgtccatgctgatccggatcaccttggcaaagggggagatgagcttagcaagagctccgggaaatgcgggcggacgtgttgcctgtggtatcattgggctcctgcgtgcctggcaagtggcaaactcgagctgtctagtcctcggttcgcgaatcttccacagagaggcagacggcaggactcgcttcaagctcctcatctcgcgcagggggggtcgcctgagatcacagagacaatggtgaaggcagttgctgtcctcgccggcactgatgtcaagggcaccatcttcttttcacaggaaggggatggtccgaccaccgtgactggaagtatctctggcctcaagccagggctccatgggttccatgtgcacgcgcttggcgacaccaccaacggctgcatgtcgactgggccacacttcaatcctgttggcaaggagcatggcgcaccggaagatgaggaccgccatgccggtgatcttgggaatgtgacagcgggagaagatggtgttgttaatgtcaatattactgacagccagatacctcttgctggaccccactcgatcattggccgagctgttgttgtccatgctgatccggatgaccttggcaaaggtggacatgagcttagcaagagcaccggaaatgctggcggacgtgttgcctgtggtatcattgggctccaaggctaaagcggttaacctccgaggcaaacaccatagaaggtcgaagcgagcacctcaggaagttgctgttccatttcccctgtattggcaacacaatttgagtactccaaataagcgcctgatccatgatcagagagcactattcatgtcattttgtatatgaacaatgttgcgcacctgcttaagtgtctgttccaacaaatgcttaagaagacactactggaggtgtactatcgagtactaccagcagcatctaaacttgacgaaaaaaaaaaaaaaaagcggccct

SEQ ID NO: 156918 - DNA, 267 bp, Zea mays
  unsure (1)..(267): unsure at all n locations
  Clone ID: MRT4577_74687C.1
ggggagttctagtacatagacaacanaaaactgaagagacaagaagtttaatttttttgggccatggatttgcggtagtgcgcagagcttagcagtggtcttcgttggcaactctcttatccttgacaagaaacctcagtgtcgagactgaaaacgttgtcttaaattttgtagctgctctgttgcaaatctggatttatcacattgccttaagttatcatctgctatcataacagaaacgtgggcaatgaaaaccatttctgatgt

SEQ ID NO: 156919 - DNA, 294 bp, Zea mays
  Clone ID: MRT4577_74688C.1
tttgtctcctggagctcgagcggtcgtacggcaataggaagcatgcatgagcgagtgatctacagatcatgtgacagcagtatctaaagcaggtatggatgcatacatgcgggccatgctcgcaactgacacctggaagtacgaccggagacacaattttaggaaaaatctacaaggtgtatacaaaaaagatgaacgcattggtgcgaacgattaccaacactgtggattacaagtcacactcaaatgagtggacaacaagggggatcttcagggccttcattacaaagcacg

SEQ ID NO: 156920 - DNA, 192 bp, Zea mays
  unsure (1)..(192): unsure at all n locations
  Clone ID: MRT4577_74689C.1
gtgcggtgactctcccttggcgcgccctccctatgcggttgttgcccgccggcccgggtctctggtcgccttcctcttccgcttcctcgggggaggggtgtgtgctgccgtctgtgttctggtgcctcggtgcgtgtggcttcngggcccgttcgtgccgcctggcctgccgctctgggtggcggggntggg

SEQ ID NO: 156921 - DNA, 304 bp, Zea mays
  Clone ID: MRT4577_7468C.1
ggggaaaacttagaactccagcttcatgatttcctccaccaacgaccatgcttgctaaaaatgtatcagatcatcattaactgcagccggctaatgaacccgagcaagcaaatcaatgacgttccatgttctcacatcacatgagaactgctacactctatatttccccccgaacccccttaacatgaccatgtcaaaggttgctcctatccagcacggatccagagctacagtaccttgacagaccaggaacgttgattgttgacaggagctgttgattatcccgtacattatctccttcctt

SEQ ID NO: 156922 - DNA, 143 bp, Zea mays
  Clone ID: MRT4577_74690C.1
gaacaagcaacatagaacgtggaatttagtagcaacaatagctcaacaaaggcggccaggatatattccctgcggatgctccttgctcgtgctgcatgcgatgctaacgcgacaatgatccctaaatgctaacaagcacctat

SEQ ID NO: 156923 - DNA, 281 bp, Zea mays
  unsure (1)..(281): unsure at all n locations
  Clone ID: MRT4577_74691C.1
ccctaaggaccagacggatccagccgcgccacgccggagggacttccgaaccgctccggtcgggacgagttccggcagccgcccaggtgctggctcgggacagccctcccaccctgagggggggggcttccctnccttctcggggcggggctgcgcgcgngccggctgccgcaggctcccntgcgtccctgcccggccggcggttctgggggtgggctcccccccgctggcgccccgttcttggggttccggcgctcgggcccctgcttcgcctgttcttg

SEQ ID NO: 156924 - DNA, 774 bp, Zea mays
  unsure (1)..(774): unsure at all n locations
  Clone ID: MRT4577_74692C.1
gtacagcctgcaggtttcggtccggaattcccgggtcgacccacgcgtccgagcagagtacctgctgctgtaagcttgtcgtctgggctgcaccgcccgtcttaacccattctcgacttaactactctcgtcgaacaagcatggaagtacagaaagaagcgcagcgcatcatgactctgtcggtatggaagatgtaccactctcgcatgcagcgaggtggcttgcgactccaccggagtctgcagctatccctcgttatgcgcagcgctcgagagctctacctctcagccaaggtagaagcccaccagcccgagttcccgccatcccgcagggctcttgaccctcgcctgcacccgccgcgggaagccgaagttgcagtggaagtagcgtcccccgaagccgtgcagcctccggagcccatggatacgcaagaggaagtgctgcgagtccaggagacccctgcgctctgtgacccgccccccgctagagtcagccgcaagcgccggagcagcagcgatttgagcgacagtagtgatgccggactggtaccaagcaagaaggcccgtctagaagaggtggagggggaggcgacgtcggaggttcccgatcgcctgcagcttcctccggcacaaagcgaaggtgccttccctaacctcgcccgcgtcctccaaaggcgcttctccagtctcctgaactgtggacccgccgtgcccccgncgacgccccccacgtgcgaagccaagccagcctgccgcccggccgacatatgctcac

SEQ ID NO: 156925 - DNA, 593 bp, Zea mays
  Clone ID: MRT4577_74693C.1
gccggccgggtcgggatgcgagttccacggacaggctctgaagaaaagaaattggggttttctccatgtcctggccatcttcgtctacatcaagccaaaatgccgacacggcataaccatggaagaaaccaaaatccaaagcgaaagcgaaagcaaaagacacggaaagggaaaggcggaggcaggcgagaataaaggcgggaattgagcttgaagcagctgcgccgaccaccagcttacttacgtacacaaagcttctcgccttcgattccttcccacaagtagcaagagctcgcattcttctcttccagttccaacagctctccacttgtcaccgaggcctctcggcggcggccgccggcaacgtactttatggcctcttcgtcgtcttcgaaccccgcgtcgccacagccgccgcctatgctgccgccgccgccgccggagccggcgtccgcacccacgcctcagccgctgctgccggaggctaggcccaggccgagccccaccgtagccgatagcttccgcgacctgctcaggcccggacatgccctcgaccgcgccagccatccaactaactctgcccactctcacct

SEQ ID NO: 156926 - DNA, 504 bp, Zea mays
  Clone ID: MRT4577_74694C.1
gtgtgtttttttttttttttttttttttttttttttttttttttttttttttttttttttttttttttttttttttttttttttttttttggggcaaaacagctattggggggggggggaaaacccaccccttacgacaaaaaaaattccgggggggaagagacgggcggggcccaaggggaaggaagggccaaacgcaaaccagttcaaaaggggccttgggggatatcaaattcagaagggggcctaacacatgggaagggggcgattgggagccctaactagaaaaccctgggttcacatagaactggggcccaaccgaggaattagggggcccaaggcggcccttaaaggaggcccatttgggggggaacatcaagagcatcaaagggggggggcagcttcacggaagccttttttttcccatcaggcctgaacaagggggggaccctctttggcggggggggaaaccctttttgggcgggaggccggaacctttttttg

SEQ ID NO: 156927 - DNA, 201 bp, Zea mays
  Clone ID: MRT4577_74695C.1
ctcgaattccgttgctgtcgaaactggaacctgcattaggaggttatgagattggtccttccgaattacctcaagaaaattctactcatgccgaaggctcagtactatctttaggaataaaagatgaactaactgactgtgagttacctggcttatgtgagaatgtttctttcagttcccgacaacgcagcgacagcaacg

SEQ ID NO: 156928 - DNA, 248 bp, Zea mays
  Clone ID: MRT4577_74696C.1
ttaactcacttcaattacctacctcactgcttacattctacaaaatattctctaattaaatgtttcgatcatattgcaaatgtgctacgctaaacttctatctcattatcatttcaacctatctacacacattattcaatatttttatttctctttattatattttaaaatttatattttttatatacacatatattcatctccttattatttactctatcttctctatttttctatcattatatttt

SEQ ID NO: 156929 - DNA, 324 bp, Zea mays
  Clone ID: MRT4577_74697C.1
gggggggaaagggggacgggtaacaaggggcccggaattatttgatccgggttataaaaacctgaaaaacaaaactttttttttttttccccagttattttttccccgtccaagttttccacattggcccgcgggttttttgtttaaaccatgggggggcccagggtaaacttgcattttatgggcccaaacaattttttttcaacccaggggaaaattaattccccagaggaacccgtggcaccggcagaaatttttaagggggtgggcggacttttttggttattggaacaaggggaaaaagaccgggtgggccttttaaaa

SEQ ID NO: 156930 - DNA, 605 bp, Zea mays
  unsure (1)..(605): unsure at all n locations
  Clone ID: MRT4577_74698C.1
ggaagagcgacatcataagccgtccgaggaacagcagccaggaggaggacgtggagaagcctcccagtgggctttgatccggagaccagcaatctgcatgcatctggccctgcaggtatggcagaatgcgtgaactcgtgtatccctacggagtgcgcagcagatccctctggcaggcaagggcggtgcgagaagaggtacgtgccgtcggtcacgtcggcgctaatagtcggttccattctcggcctgcttcaggccgtcttcctggtcctttcggccagattcgtgctcaacatcatgggtgttaagtccggatccccgatgcaagggcctgcggtgcgctacctaacgataaggtcccttggtgcccccgctgtgctgctgtctctggccatgcaaggggttttccgggggttcaaggacaccaagacaccgtcatggcaggcttccagatctgctgccagctctggctggccacgtctcttctcgccgatggattggccgtggcaggacaggcggtgcttgcaagcgcgttcgccaagaacgacagtaagaaggtcgcgngtgacgttctgcgtcacgcttggcggcgtccctggccgcta

SEQ ID NO: 156931 - DNA, 541 bp, Zea mays
  Clone ID: MRT4577_74699C.1
atggtattaaactgacatcctggcatgatacaacataaatcaacggagcaacgtaaactctccacgcaaggccacaagtcagacgatcaggaggggatagtcccatagctacatctacctccgatatccgaagctccaaagttgatgccatcaaacacgaaggccagggaattgatggtctgcgtcccggcgacaaacgggatgcctctgtgaatgacttggatcacgggcacgtcgcttgtgaaaatgccagccccgaacctcatagcaagtcccagcacgacggtgagacccatgcccaggacaatgctcagctgcaacacacgggatgtcgcggcagcgaccttcttactgtcgttcttggcgaacgcgcttgcaagcaccgcctgtcctgccacggccaatccatcggcgagaagagacgtggccagccagagctggcagcagatctggaagcctgccatgacggtgggtccatggcgagcggccagggacgccgccagcgtgacgcagaacgtcaccgcgacaacccttgcgagca

SEQ ID NO: 156932 - DNA, 191 bp, Zea mays
  Clone ID: MRT4577_7469C.1
cgccggaatagacccccccgaagacgaagagagcctgggggtggtgtgagaaccaccagctggaccatccatcgcgccaccaaccgacggccggcgggaggaagcgggagtggctgcggaacaggatggcgacaaacgccgggacaccgggcgcgcgcagaccgaaagaaacctccacgccttcccacgag

SEQ ID NO: 156933 - DNA, 595 bp, Zea mays
  Clone ID: MRT4577_746C.1
ccccacccttgagtttttttttttcttttttttttttttttttttttttttttttttttttttttttttttttttttttttttttttttttttttggcttttttttttttttcaggaaaggggctaattaaatggggctttccgccaaaaaaccattggcccaaaaggcaaaaaatttctccggttttgtccttttgttcctaaaaatatttgctttttttttacgggggcaaggctgcctgactaaacccttaaggatgtttttgaccaaatgttcggcacccgattttcctttttttgcagaaaattttgcccccaagggtctttggccagtttataaggcaaaccctgtttaaacgttgcaaaaacatcggcgtcatcaggaagtttcaatccctaaacaaaccagggggccttttaaaaaaaaagttttttttgtttttgcccctttaacaatataaagtctcaaaaaaaaaacctttgccacatttgggggacttttcccaaaaaaaactttacttgggtatggtttattcctcggagggggcttatgaggccggggatgtcattttcctgtttgcggcctgcaaaactt

SEQ ID NO: 156934 - DNA, 186 bp, Zea mays
  Clone ID: MRT4577_74700C.1
ctacaatgtagcgatagtaagtcggaattaagctcgatcagctcgagccttctccttggttgcaatgcgcctcgctcctgtctgcatgcgtgcaatcgacagcaaggcgcgggcgctcagaacaccacgaccacgacccgatggctttcatgcgctcccgctcaaatgcatcttctggcatgggag

SEQ ID NO: 156935 - DNA, 2580 bp, Zea mays
  Clone ID: MRT4577_74701C.1
ggttgccattctagaaatgcatgcagtgccattcgcattcccggtgacccaccgccgaagcagcgccgacgacgcgagggccgccggggaggtttaagttgggcgcgtcgtggtccgccggggccccgacatctccctctctcgctggtgcgagagcgcgcgcgcaagcaagcaagcaagcaaggagcgtcgtgtctagctagctgagcacctggttttggagcatggaggacaacggtgccgccgccgccgccgccgctcccgcgacgagcatgcctgccgagaagcgtgtggcggtcatccagggggacgcgccgccggagccggcggcggggctactgccctgcgggccgaggaaaacggggctccacctcttcgtcatgaacatcaggagcgtcttcaagctggacgggcttgggtcggaggtgctgcgcatcgcggtgcccgcgtcgcttgcgttggcggcggatccgctcgcctctttggtggacacggcgttcatcggccgtttaggttcggtggagatcgccgccgttggcgtttcgatcgccatatttaaccaagtctccaaggtctgcatctaccctctcgttagcgtcacaacgtcgttcgtcgcggaggaagacgcgatcatcagtaaggccgtccgaggaaacagcagccaggaggaggacgtggagaaagcctcccacgtgggctttgatccggagaccagcaatctgcatgcatctggccctgcaggtatggcagaatgcgtgaactcgtgtatccctacggagtgcgcagcagatccctctggcaggcaagggcggtgcgagaagaggtacgtgccgtcggtcacgtcggcgctaatagtcggttccattctcggcctgcttcaggccgtcttcctggtcctttcggccagattcgtgctcaacatcatgggtgttaagtccggatccccgatgcaagggcctgcggtgcgctacctaacgataaggtcccttggtgcccccgctgtgctgctgtctctggccatgcaaggggttttccgggggttcaaggacaccaagacaccgttatacgctactgtggttggcgacgcggcgaacatcatactggacccgattttgatgtttgtttgccatatgggcgtcactggtgcggctattgctcatgttgtttctcagtacatgataacgttgatactgctgtgccggctcgtccagcgagttcacgttatcccacccagcattaaatctctgaaatttgggaggtttcttggatgtggattcctgctgctcgcaagggttgtcgcggtgacgttctgcgtcacgctggcggcgtccctggccgctcgccatggacccaccgtcatggcaggcttccagatctgctgccagctctggctggccacgtctcttctcgccgatggattggccgtggcaggacaggcggtgcttgcaagcgcgttcgccaagaacgacagtaagaaggtcgctgccgcgacatcccgtgtgttgcagctgagcattgtcctgggcatgggtctcaccgtcgtgctgggacttgctatgaggttcggggctggcattttcacaagtgacgtgcccgtgatccaagtcattcacagaggcatcccgtttgtcgccggcacgcagaccatcaattccctggccttcgtgtttgatggcatcaactttggagcgtcagactacagatactctgcttactccatggttgctgttgcgtctgtgtcgataccatgcctgctgtacctttctgcgcataacggattcatcggtatatggatcgcattgacgatctacatgagtctgaggaccatagctagcacctggaggatgggggcagcgaggggaccatggacgtttctccggaactgatgatggattggcttggaactgatgatctgcggcacactgctgacagataaggctgcgccgcgctgcgcatgcgcctctcatgtagcatcagcgaagtatagtacgtgttctgctggtgtttaaagcttcggatatcggaggtagatgtagctatgggactatcccctcctgatcgtctgacttgtggccttgcgtggagagtttacgttgctccgttgatttatgttgtatcatgccaggatgtcagtttaataccatacatcggtaaagtgtctctctagtaactccattcttttcaaaaaaaaaaaaaaaaaaaaaaaaaaaattttttagctgtttgatgagaccttgcaagaactgttttactgcgtggaagcagcaaaataacagcgataaaagagacgtgtagtaccagagtccctctgagtgccagtccaggatgctttgataacgttaaccagacaatttgataacaatccatactccactaagcatatagtagtgtatacccgaaaactcccatcagttatttgtccctcactccctctctatcggctttcaaccaataatcaggaacacataatgctgaaagaacacgaaatccttctagtctttgacagcatatagccgatacatcttgcaaaaataaataaacacataaaaggctatacccctcattatagcgtcgggtgag

SEQ ID NO: 156936 - DNA, 544 bp, Zea mays
  unsure (1)..(544): unsure at all n locations
  Clone ID: MRT4577_74702C.1
atcagaaggaagtacattgggggttgcttgaagattctgttgaagagcaaatggagaaggcactagcagaatctgataaaatagaagctgaaagcaacgatgctgatgcagaagataacaagaaaaggaatacagaaggtggaaagcaaaatacttctcttgtgtggggacacttgctttcagctgcgaaggagcattgcttgcatcggggtcggctgactgtactgttaagctctgggatgtcgctttcagcacaaaagccctgaagacagaggacaccaaaggcagctcatcagctaaccgactgagactgcttaaatctctgcctacaaaatcagctcctgtctatagcctgcggttttctcggaggaaccttctgtttgcctccggtgctctcgcgtaagctgcgtgtttcgtagaatacagctagaactgttccggttttgacatggagtagtgaagttggcatttcgcagactccgctgtggatcctattgtagagctaatattttcgttagcaatctcaacggcccagcatgtntgc

SEQ ID NO: 156937 - DNA, 2809 bp, Zea mays
  unsure (1)..(2809): unsure at all n locations
  Clone ID: MRT4577_74703C.1
tgcggtccttctccagtatctccagaaagcattgaccggtgtggtacgtcggaagagcgacgcgcgccgccgcgttcgaggcgttccctcgtcgcgctcgcgccgtcgaccttcaccgctcgctgtcaggtctgcccgccacgacctcgccggccacactcgcagctcgccctcgctcctacgcctcgccggcgaggccttctgccttttcgcgccctctatctgctgcgatctttggagcatcgttctcttctctcacttgagatccagacccctaaaccctagagctcgccgcttccgctcgctcgctccgcgctggcggcgacaatggaggacgaggagatggagaagaaggtgcagcagtacttgcagcgcaagggtttccgcctcactgagcttgcgctccaggaggagcgcaaccgcctctccacctccgccatctccgacgttgcgcttgcacggtctgacaatgatccagcgagatactacgatggatatagcagattaagaacatgggcatacagttctcttgatcaatataagcacgaattacttcgcgtcctttatccagttttcatccatagcttcatggatctagtggcagaaggacatatgcaggaagctcggtcatttttccatacatttcgggaagatcatgaggtgatgcattcaagggatcttcagaagctggaaggcgtcctgtctccttcacacttggaggaaatggaattggcccggtcttttaggaaaaataaatttaaaattaaattatgtgagtattcgtatgaattgcttctccagtatctccagaaaacacaagcccttgtggtgcttggagtaatcaatgagcacataacttttgaagtatctcctggtcagccctcattaatctctgatgacgctgatgttgttgctctgattgggacaagtaaggacttggcaaaacagataaatcagaaggaagtacattgggggttgcttgaagattctgttgaagagcgaatggagaaggcactagcagaatctgataaaatagaagctgaaagcaaggatgctgatgcagaagataacaagaaaagaaatgcagaaggtggaaagcaaggtgcttctcttaagaaagccaaaaaggacaagcttgttggtgcgactggaaaaagcgtcagaactgaaacaagcatggtttctgtggcacctcgagtgaaaccggagctaactcttccagcaacgcctgttgaagttgaacaatcaattcttgaggacctacgaaaccgtgcacaactgaatagtgtggcattgccatctgttagcttctacacattccttaatacacataatggattaaactgttcctcaatatcacatgatggatcactggttgttggtgggttttctgattcgtcagtgaaggtctgggatatgtcaaagatgggccagccagcaaaaatatcaagatcacagggtgagaatgggccttcccagggtgagcgcatatcaacattagatgaggggaaacgaacctatacactatttcaaggccattctggaccagtttattctgcggcctttagcccgtttggggatttcctcttgtcatcatcttcagactcgacaattagactatggagcaccaagctgaatgctaatcttgtctgttacaaaggacacaactacccggtttgggatgtccaattcagtccagttggccattactttgctagtgcttcgcacgacaggactgctagaatttggtcaatggataaaatccagcctttgcgaataatggctgggcatctttctgatgttgattgtgtccagtggcatgtaaactgtaactacattgccactggctctagcgacaaaactgtaaggctatgggatgttcagacgggtgaatgcatacggatgtttattggtcataggagtatggttttatcactggcaatgtcacctgatggacgatacatggcctccggagatgaagatggaacaatcatgatatgggatctctcgactggccgttgtgtttcaccactactaggacacagctcttgtgtgtggacacttgctttcagctgtgaaggagcattgcttgcatcgggatcggctgactgtactgtaaagctctgggatgtcgcttctagcacaaaaaccctgaagacagaggataccaaaggcagctcagctaaccgactgagactgcttaaagctctccctacaaaatcaactcctgtttatagcctgcggttttctcggaggaaccttctatttgcctctggtgctctctcgctaagctcgtcgtaagctgtgtttttttttttgcagaaaactagaactggtcctgttttgacattgagtagtgaagctggcatttcagagactgcctattgtacagctaatattttcattagcaattccaacgaactcagcatgtactgccgaattgagcaccgcagattcgttgtagcgggttgtgatattgtaacaatattattaggtaattacgttctgtaaaattgttttttaggttgtgaccttatgaacgcaactaaatgtacaagtgctgacaggcgatagcgtgaatgcaatggtctatcaggtctggagtttggttttaaaaaaaaaaaaaaaaaaaaaaaaaaaaaaaaaaaaaaaaaaaaaaaaaaaaaaactcgagggcgcggtcctatgccctgataggaagatagcttgttaagggatgaccggatgatttggtgacaaacnaaccatctatntctttcaacaaaaaaaaaaaaaaggcgcccgctagtagctgcgaccgggattattc

SEQ ID NO: 156938 - DNA, 795 bp, Zea mays
  unsure (1)..(795): unsure at all n locations
  Clone ID: MRT4577_74704C.1
ccacgcgtccggcacatgattgatcgtttctggtgcttggtcgcagaaagggcaggccgattgatggggcaatcctcgcttggctaatctatctgaagtccaacacctgttaatgatggtcagccaaataaagagcttgcagtttgccggagcccaagtcttccaaatccgcttccaagggaaaatctgatggtgccaatgaacattgcctcataaatgtgtggttattttagtccagtgagtcagtgattggcataattaggaccacttcctcttctgcgttagtataaatgcatcaggtggagtagcactctggatttaaaaaacatagtgtacagtcgatatgtttcccactttctgtaatcaaggctaagcagtaaaaatatacacgcatattgttgagccctttggtattgaataccttgtgcactggtaatatgtagatttcactctcagtcccatcaagtgttctacatcaagttcctgaaggacatgttggggtatactgganaaggaggtgctcttctgaagacaatcacccctccagggtttcatctgaagctccctttaatcacacagtatgagccaatacaggttacacttcaaacagaccaggtcagagatattccttgcggaacaaaggtggtgttatgatcagctttgacagaatagagtcgtaaaccgcctcgcanagagtttgtgcatganaccctactcaactatggntgtgcactatgacaagacatggatatatgacnaattcatcatgagatttaccagttctgcagtgctcac

SEQ ID NO: 156939 - DNA, 937 bp, Zea mays
  Clone ID: MRT4577_74705C.1
accccctgtgaatactccaccagtatgaaaagttcttaatgttaattgagtccccggctccccaattgattgacccgcaataatacctacagcttcccccaattcgaccagatccccatgagtgggactccgcccataacataattgacagatccaagatgtgctccggcaagtaaagggggttctaatatatattggttgtgctcgaaacggttgtgctcgaaaggcagttatgaatcgattgactaatccaattccaatatcttgatttcgagaagcaatgcatcgtgaaccaatatatatatcgtctgctaatacacgaccaattagtgtttggacaaaaagtttttccgtcatcccattttgaggacccacagaaataccttggatagtaccacaatctcttctacgcacaataatatgttgaactacttcaacaagtctacgtgtaagatagccagcatccgctgttcgtacagcagtatctacaaccccttttcgggctccgtagcaggaaattatatattctgtcaaagaaagtccctcgcgtaaattgctttgaataggtaaatcaatcatttgtccttgaggatccgccattaaccctctcatacctactaattggtgtacctgagatgcatttcctctggctcctgaaaaagacattagatagactggattagaaggatccgttattcgaaaattcgaattcatttcttgtttcaaatattcacttgtagcataccatatctcaacggattggcgtatttttctaccgcgtgtacagctccataataatagtgtttctccaaaagaaaactctgttgttccgcgtcttggactaaccatcctttagagggtattgttaaaagatcctcgattcctaaagaaatcgatgtagtagtggcttgatggaagccccagagtctttatttga

SEQ ID NO: 156940 - DNA, 107 bp, Zea mays
  Clone ID: MRT4577_74706C.1
ccttatcgttagtcacgattcaaccttcaatgctagtgtgcagcaattggtgcctcctgcagttccttggtaccatgagcgcctgatgcatcagacgtcactgggat

SEQ ID NO: 156941 - DNA, 310 bp, Zea mays
  Clone ID: MRT4577_74707C.1
tcgcgctctccctgctctgtgctctctaccctgtccctctctggggcacaccgcacacactcgtcgctcgcaacatggtcaagcaggaacgcgtctcgacggtgaccgtcgcggccgtctcgacggtggcaccggcgctgcccatgcaggagcaccgactgccgctgtcgaacctggacctcatcctgccgcccatcgacgtcggcgtcttcttctgctatgacgcggaccccgcgggcggacgtagccaccagccggtcgccgccgccctcaaggcggcgctggccaagacgctggtggcgtactaccc

SEQ ID NO: 156942 - DNA, 235 bp, Zea mays
  Clone ID: MRT4577_74708C.1
acgtacacgcgtccgcccacgcgtccgggcggggacctacagtcggttacgacctgtagacccatctgagtcctgggctcctgctgttgctcagctatgcagccttgctttcataaaagcgcccagatgtgaggatgactttggtcaggaagcaggagagactctaagtgactgtgtgctcaggagctcaaagcagtaccgggcaatgatcgacgaacatgatacttctgggggg

SEQ ID NO: 156943 - DNA, 436 bp, Zea mays
  Clone ID: MRT4577_74709C.1
tggcgcctcagcgggaatgggttcatcggcgtgggcaaacagccagttcaacgtctgctcgtcgtcggaattgtttacagtcagcgcatatcggacccgtgcagcgtcaaagcccattcccacaaagttggcgactttagcttcatcaaccccacttgctgcaggtgcggcggcatttcggtcgtccggtacgccggcatcgtcatcgtccatgtgcgccaacatccaattcatggcgtcttcggtacctttattctccactgcaagagccgctcgttcggcacggttttgaggaaaacccatcgcaacgagatcgttcacaatggtggcatcgggctgacgcgacggcgctcctccggctcctgcgttttggagtttctcagtgggcttgggaccgtgtccgcggatagcgtccaggtcgtgagccttatccacg

SEQ ID NO: 156944 - DNA, 408 bp, Zea mays
  Clone ID: MRT4577_7470C.1
acatctctctatttctattatctctagctccctcatcttttttatccactacttacctacaccattcgtgctacttttataactctgtgtggcgtgacactctaaattcaattcactattccctctttctacaacattcttacttttaaaaccctttctttacccaacttaatctccttttatttcattccctcttctccaactatcattatattctacattccttcacctatctcctctcccaacttcttctcatctctattataactatatcctctctctctttatcttccctttaacctctatcttttctttttttattcttaacctttctcctactcctttcctaatatccttacctttcctttattttttactctctattccatcactttctccccctctttt

SEQ ID NO: 156945 - DNA, 328 bp, Zea mays
  unsure (1)..(328): unsure at all n locations
  Clone ID: MRT4577_74710C.1
cagggctggaattctgcaattctacctggcggcgctcggctgcttaagggcccttgcctatgggtgttactttcctggcgcgtttctcgtcggctggattccctgcgttccacttatcgctgcgccatccctttgcgctgcgggtggcgtgaggccgcccgtcgccttcccgttgcgcacctgatgggttggacgcccctgtgcgggcttngcgcgggggtggggttcgcgcgcggccgctccttgccgcccctgcgccgctctttgcttcttccttctttctcgcccgctcgcggtttcccgctggctcttttcggggctcctttgg

SEQ ID NO: 156946 - DNA, 114 bp, Zea mays
  Clone ID: MRT4577_74711C.1
tccgcatcccggtcgccccgcgtcgcagtatttgggactctttctctggcaagagaccataaagttgccctttgtgtgaaccaagtcgccatgaacgtcgttccggttgtgttt

SEQ ID NO: 156947 - DNA, 2184 bp, Zea mays
  Clone ID: MRT4577_74712C.1
atgaatactgctattgcacgtcgtcggctaattgcaaaggcagtggtccttgtagcagttatgtcagcctggttggatgcatggttgagacaccgactgcatgctaggaggtgtatcacttatggcccaatgcaccaaagagaccaagagaggcaaaacaacctgagattcatttatgaatccactgatgttgagtgtattgacttactcaggatgagaagagccccttttatgcagttgtgtgacctttttcgcactaggcaactattgagagatagcattcatagctcagtagaggagcaggttgccatgtttttacatgtggtaggtcataaccaaaggtttagagttatacacatgacctttcgaaggtctattgagaccattagcagatacttcaaggaagtattgtttgctgttggtgaactgaggaatgagatgatcttgccaccttcaactgctacaccaaccaaaattagagatagccacagatggtacccatatttcaaggactgtattggtgccattgatggcactcatgtgctagcaagagttcctagaaatcagagggctgccttccttggtaggaaacacaccacaacacagaacatcttagctgctgtagactttgatctaaggtttacatatgttcttgctggctgggagggatcagcacatgatgcccttatccttgctgatgcccttgagagagaagatggtctaaaagtgccccaaggtaaattttaccttgtggatgctggttatgctgtcagacctgggtttttacccccttatcgtgccacacggtaccacttgagtgaatatggggggaggaatccacagaaccccaaagagctcttcaaccttagacattcatcactaagggtgacaatagagagggcctttggtgctttgaagaacagattcaaaatattatacaacaaacctttccatccatacaagacacaaaaacatgggctgcaaatcaagttcatgaggaagctccccatgaccttatcatggacaatgctgcatggtctgctaccagggacaattgggctcaacaaatgtggcagaatagggcctcacataggggataatgctatggctgacatggtctctgaggttgctggtcagggggctaggcctgctcttaggtggactgctgtaatgtctgggtttgttctccgtcgttttgttgacttgataggaaatggggttaagactgacaagggttttaaggaaatccaccttaactctgttgctaaaaatgtatctgagttctgtggccaagaagtaacaggccaacaagtgtacaatcaccttcgtaagtggaggtctaggtgggtcaaggtttgcaaactgaaggacattagtggcgctctttgggatgaggataactttgtcataagcttagaagagggtcattatgctgcttacaaatgtccttcacttggcaataaccataatgcgtaatcaaggatcacccaaaagatgctgattacctcaataggcccatagagaactatatgcctatgcaaatcatatttggaagtggggttgccacaggtaggtttgcaatgggttcaaatgagcctttgggcaagccaactgacattgttgacatcctagatgatggcattgaagtgacctcagagtttgttgatggttccaatctaactggcaaggggaagactgttgacaagggtacccctggtgactccaatgatagcaagcctatgtccaacttagggaagaggaagaggtacatgactgatgaagatgttgttgtgttcaatgggatgaaagaggctgtatctgatgttgctgctgctgtccgtgaaagcatccatgctgaagcagcacctgagatctacaatgctgtaatcaactgtcctggattctctagggaggctctcatgtatgccctgaaccacatgatggagcacaaggccacctccctggtgttcctagacatgactcctgatgatcgtgacctatggctcaagactttcctagccaagcactaccacatctgatctaatctgtcatttatactgtttaagaatagatttggtacacttcctctattccatctatcctagatgctacttaagaacaattatgtttccctgagttctatggatttccctgtttaagaacagatatgctacacttgatttg

SEQ ID NO: 156948 - DNA, 363 bp, Zea mays
  Clone ID: MRT4577_74713C.1
gggtagaggcaaccccccctgcaggccacacaggacccctaaaaaaaaggcccccaggccagggaacacaaaaaaagggcggggaaaaaagcaagcagagcccggcaaaacaaaaagccggaggggacgcatcccccgggcaaaacacccgggcaacgcgcggggccggcggggaccttagggaggccgatggacctgggcggggcaacttaaacgggctgggcacactcggggggaaagccgagggggaaccccacggggacgccacagttgccgggggggggggcgaaggggcccaagctcaccctctgaaggccttgggggaggcgctcgacgcctggggaccccctctggggggccccg

SEQ ID NO: 156949 - DNA, 462 bp, Zea mays
  Clone ID: MRT4577_74714C.1
atgagcatcctggttgtgcacgaggaatctcgtctaaggatggatggaaggaaggcttcggaccacagcgggaagatgaccactccacatatgcaaataattccagcagctcaaccgtcgtcttccactgatcatacgactgttccaagctatgtcgcgtcaacgggaaataaggtccgctatctactagatgacatcacaaggcttgtggcgtgcacactaattataaaatatgaatgcaacatgattagcgggagatcctttatggtaccaatcccaatgctagtgctggtaaaagggtcggataatgaagaattaaaaggaaagaaggacgaagaagttgagaagcatatacaggatatgaagaaagattttgaagctcgatacgccacctacataggacatgcaatgcttcaatttcaagacagggaagccatagttgcctcgtacaactttaagtaa

SEQ ID NO: 156950 - DNA, 531 bp, Zea mays
  unsure (1)..(531): unsure at all n locations
  Clone ID: MRT4577_74715C.1
gccgctgaaaactctagctggctncatggggggaaatggctccagcggggcggccagcnctgaaccacnctncccatccagtgcttanaagccatctangacccaacaatgagagtgtctcacgacaccacctatcttcttcaccgcgaagcggtgagcgaaggggtaaccttanctttacgccacgatctgcaaaagtgggggggggaaatggatccaattggtagccctcgaaatctcaagggctggtcctactatgtgggccgcacttacggccaatgaaggctgggcaaatggaaggggaaaggatgggatcacttctggccaattttccggaaaggataatggacgggagcaatgcggacattggagcgaattcgtgaccatatgtgcaaaacggatggcanattgcggaaggaaatgggcatggacgcatatagggtctctatcgcttggcctanaatactggctaaggggacgggcgaagggaggattaaccagggtggcatcgattactacaaaaggcgcatc

SEQ ID NO: 156951 - DNA, 306 bp, Zea mays
  Clone ID: MRT4577_74716C.1
acaggagcaggaccagcaccagcaccacacgctgttataataatatgaataacaaacacattcacatatagaagtgagcaccttcgccgggcagtgcagctgcctcgacgggcaagacgggaggaacgccgactggggcgcctacttctactagggggggcccgggaagaactcaaactgtggcatagggcaagactgactgagctgagcacgccacctattacactcactaccagagccgcctaaccttaacacacctgagctgggtcatgtcgtgcatgccggcaattaggatatacgggttct

SEQ ID NO: 156952 - DNA, 517 bp, Zea mays
  Clone ID: MRT4577_74717C.1
atcagccgtctaaatattcaaattcagcatactcaaaatagataatacattgtgatgcaaataagcactaggtaccgaaatagccgaaaactaaaagctaaaatgatgaaattataggcccatgcaaccagtcataggcgcctagagtcttgctgggggtgggccattttggccagtccgatgggggcacacatgggcctagtcggcagcccataagcacagggtgcacgacctcataaaggacttcacttagggttaggaaaccataatcagccactgactttcacaggtggtggctgcacatcttcttgcagacaaacacgactcgtgtgtacgacggtccaatgggcgcattctttgcacgcagtggaaagttgtggccagagaccaggtgagagatggtcccccctactgtgcgaggccgttgccctactgcacaccccaggcggtcagcctcaaacccagtggaacgctaaagcggttcctcaatgcacgcggtggcggctccagcgtctcg

SEQ ID NO: 156953 - DNA, 1162 bp, Zea mays
  Clone ID: MRT4577_74718C.1
aatctctctctccctccccactctctctcttctctcaccgctatctctcgcccgtgcaagcgcgcgtgcccaggcctgccccgcgcgcgcgagcaccgtgccgagcgagcccaaccggcgccctgcccgcgaccccgagccgaccgagccgcgctccctgcgcgcagccgcggcttgcgtgacgcccgcgcgccattcagccgagcagtgccgcgagcccgacggcctccccgcgcgacgaccgcgccatgtcctgccccgacgccgcgactcggagcccaaccgtcacgcgccgtccgttgttaatagtgcttgatttcatccgttactccttctcccattcccctccattacgctcgttagaaactgtcgctgtgatggccattgaagaccgaccgttctctccctggcgtccctttcttctcccctccctctctctataaaagggacagcagaactctctcccatcctccctacccgagctctctcccattcctcgcactctctcgctcgtcgttcgtcgtcggagtttgccgctcgtcgccggagcccgtggagttcgctggagctacgccatccgtcgtccgtagtcaagcccctgctcttctccatcgggtgttggtcatggtcgactacgcacgggggcacctggcaagcgcttatagtaccggctcaggcagattggatacaggcatagttcccaaagctttaccctgtggactggactataagttggttacggtaggtgtaccttatgcagttgaccatttccaacatttgcgtaatgaggactctagggagaagcctcgtagtgagaccctggtcattcacctcggaagtgaatacgggtctagctaacccgggctaaaagggaatcgcgactcatgggtaaagatgcgccacctctgcagagtgtaaaactgatatatcagccgtgctcacggttatgagcagactggactcctcacatgataattgaacttgaagatggaaataaatcgagatccgatgatctgccaatggtttgcttaagtggtttcacttaagtgtttttgatatactattatacctttgtttaatgggaatacttgggattcacacttattagtaagacaggtgttgttaataaaatgttaaccaactaaaaggcttactgctcaac

SEQ ID NO: 156954 - DNA, 812 bp, Zea mays
  unsure (1)..(812): unsure at all n locations
  Clone ID: MRT4577_74719C.1
ccctcccggaccactcctccgcctctgactccgannnncatccggaatccgactaccggccaatcaccgccgccgactccgactccgactccgaccccgacttcgacgccgccttgccccaccaccgcatcgaggagacaggaaacggcgtctccgcgctggatctcgcgtccgacgaggacgaagcggcagaaggcgcggaggaggacgatggggacggagacccgccgcgccccgctgcccgcgggcgccgcggcgcggatcgtggacgcgatgcgcggcgtcgagttccccggcgcgccgccggcgtgggcgggcagcgtccccgaggaccagtggctcgaccgcctccagtctctccgtgccggtcgtcccaactgatgtgttgagcagatcagcagaacacaatgggtcttctttcgcatctgatgtgatggccgatgcagcagcgtgcaatttgtatgccaactttgatctagtttattgttattgttatcgtgactggaggactgcagctcatcggccatgaggttcatcatctgttggaactttgatcttctcatcttgaccctctaggagggtcataaagtatatgtttgcaagctcaagactttcagacaagttatatcttcttattctttagtataaatgatgttcttgatggtatctcagatgccaatgtgtcgtaaaatgcgnccgcaagcatctgttatctttgctgaaatgagggtactagcccagtggggcaaggtaaagactaaagagtgaactggatggcgcttaagcatttcaccttccgtgtcatcgtgttc

SEQ ID NO: 156955 - DNA, 355 bp, Zea mays
  unsure (1)..(355): unsure at all n locations
  Clone ID: MRT4577_74720C.1
ccacggggaagacccacttttttgtttggacttacccanaaccaannanaacccccccaccacaaaaaataccccaaccccaccccaacttatcacaggtcaggcccaacccaaacccgcaggtccaaaaatagaccacaacccccagccaaaaaacgccaacccaggttacacacatccagcgacacataaaacaccttcaaacaagagcaatgaacatcgcacatcaagattgaatgcaagaaccaaccactccccgagctgcgaaaccatttctccaacagacaaaacaacctatgtgaccaccaacccgacaaaataggcaaaactcctctacataaaaagatccaacacc

SEQ ID NO: 156956 - DNA, 1616 bp, Zea mays
  unsure (1)..(1616): unsure at all n locations
  Clone ID: MRT4577_74721C.1
ngataaagatgaagaagagttcgggtttgaccaccagctacatcttcctcgagcggccgggatcctccttcccatcaatctctcctctccatttgcatctcctcctcgtgcgccccgtgcccccatcaaatcgcctcgccccgtgccccctgctcaaaaccctagccctgccgcagccgtcctccatggctgcggatttccgcacccctgaccgcctcctgcccgccgcaactgaggagccgacgaccccgcagggccaccctcccaatccggtgctcagcacccccaccgtccccgacgccacccacgatggcctccgcttctggcagtacatgctcgccggctccgtcgccggcgtcgtcgagcacacggcgatgttccccgtcgacaccctcaagacccacatgcaggccagcacgccgccctgccgcccgacgctatctctgagggcggccttgcgtaacgccgtggccggcgagggcggcgccctcgccctctaccggggactccccgccatggcgttcggtgcgggccccgcccacgccgtctacttctccgtctacgagttcgccaagtcgtccctcaccgaccgcctcggccccaacaaccccgccgcgcacgctgcctccggggtcgtcgcgaccgtagccagcgacgcggtcttgacgcctatggacaccgtcaagcagcggctgcagctcaccagcagcccctacacgggcgtagggcactgcatccgcaccgtgctgcgcgacgaggggcctagcgccttcttcgtttcctaccggacaaccgtggtcatgaacgcaccctacacggccgtccactttgccacctacgaggcggccaagcggatgctcggggacatggccgccgaggaggagtcccttgccgtacacgccactgctggggccgcagcaggggcacttgccgctgcggtcaccactcccctcgatgttgtgaagacgcagctacagtgccagggtgtgtgcggctgtgaacgcttctcaagcagctcaataggagacgtgtttagaacaatcataaagcgagatgggtattctgggctcatgaggggatggaagccaagaatgctgttccatgcacctgcagctgcaatatgttggtctacatacgaggcctcaaagtcatttttccaaaggttcaatgaggaaaggcggaaatagtctgggggcattacttttagacccatgtatttttttttcttgaagtcaatgtacttctatacggaagcatactcgctcagctgaatgagaagacgcagctccaggatgcgtttgttggtgatccttgtgcccaagagctgccagcggggaattgagatctgtctaacgaagatctgtctgtgcccctgtattccttttcagataattcgatgtatttatttttcccagcctcggggtgaggaaataacactagaatatttctttttccagtttgatcagtcagcaagcttatctttactgttgtatggcctcctgccgtgtgccagatttttttatataattcaaaggctttggtttcgttgcaacttctattcaagtttctctcaaaaaatttggtcaaagctgggctcactgcctactttttcattc

SEQ ID NO: 156957 - DNA, 178 bp, Zea mays
  Clone ID: MRT4577_74722C.1
ttattcggcacgaggctcagggggaggcctgcccggccaaacagagcttctcagaccagccacacacaacctcacattcaagatgcatatctttgttaaaaccctgactggcaaaactatcaccctttagaaagattctctaagataccattgacctcataaagaccaacacctaggg

SEQ ID NO: 156958 - DNA, 723 bp, Zea mays
  Clone ID: MRT4577_74723C.1
attgggtacctcgaggccggccgggaaaaacccacgcgatcgaaacgagaagaacttggccccgtcccctcctcctgaatggcgacatcctcctccccctcaaatctctcctctttatctcccccagtccccctcctcctcgtgcgattcgccccgtgctcccctctcaaaaccctagccctaccacagccgcccctccatggctgcggatttccgcaccccagaccgcctccttcccgccacggctgaggagccgacgaccccgcagggccgccctcccagtccggtgcttagcagccccgccgtccccgacgctacccacgatgacctccgcttctggcagtacatgctcgccggctccgtcgccggcgtcgtcgagcacacggcgatgttccccgtcgacactctgaagacgcacatgcaggccagcgcgccgccgtgccggccggctctgtcgctgcgggcggccctgcgcaacgccgtggccggcgagggcggcgccctcgccctttaccggggactcccggccatggcgctcggcgcgggccccgctcacgccgtctacttctccgtctacgagctcgccaagtcggccctcaccgaccgcctcggccccaacaaccccgccgcgcacgccgcctggggggtcgtcgcgaccgtggccagcgacgcggtcttcacgcctatggacaccgtcaagcagcggctgcagctcaccagcag

SEQ ID NO: 156959 - DNA, 711 bp, Zea mays
  Clone ID: MRT4577_74724C.1
aattcggcacgaggcatcgtcgtctccccgcctcaccacatctcacctcgtctcctcctccggtccttcccccatctcttcgccggcttccatttcttgcctgccagtcactctcgtccgccgcagatcgagaagccgccaccaaaccccccctccaccaccgcatggccatggcagcccagcagcaccggcaccacaagcgccgccgcatcgccctctccccctccccgtccccgtccctcgcgcccatccccggcgcccccacgccgccgctcgactcgctggccgacgagctcctcttcctggtcctggaccgcgtggcccaggccgacccgcgggcgctcaagtccttcgcgctggcctcccgcgcctgccacgccgcggagtcacggcaccgccggacgctccgcccgctccgcgcggacctcctgcccgccgcgctggcgcggtacccgtccgcgacccgcctcgacctcaccctctgcgcgcgcgtccccgacgccgccctcgcctccgccgccgtctccggctcctccgccctccgcgccgtcgacctctcccgctcccgcgggttcggcgccgcgggcgtcgccgcgctcgccgccgcgtgcccggacctcgccgacctcgtcctgtggaatgggggtgccccctccgggccccccgtggttggccgtgggttgcgcgggttccgggcccctgtggaaggct

SEQ ID NO: 156960 - DNA, 523 bp, Zea mays
  Clone ID: MRT4577_74725C.1
ccgaggcggtcggtgagggccgacttggcgagctcgtagacggagaagtagacagcgtgagcggggcccgcgccgagcgccatggccccaacaaccccgccgcgcacgccgcctcgggggtcgtcgcgaccgtagccagcgacgcggtcttcacgcctatggacaccgtcaagcagcggttgcagctcaccagcagcccctacacgggcgtagggcactgcgtccgcaccgtgctgcgagacgaggggcctagcgccttcttcgtttcctaccggacaaccgtggtcatgaacgcgccctacaccgccgtccactttgccacctacgaggcggccaagcggatgctcggggacattgccgccgaggaggagtccctcgccgtacacgccactgctggggccgcatccggggcgcttgccgcggcggtcaccacggccttcgatgttgtcaagacgcagatacagggccagggtgtgcgcggctgtgaccgcttttcaagacaatcaataagcgatgtgttcag

SEQ ID NO: 156961 - DNA, 786 bp, Zea mays
  unsure (1)..(786): unsure at all n locations
  Clone ID: MRT4577_74726C.1
aattcggcacgagggctcggtggggggaggagtaggcgctggggcgggtggaggagcgcagcaggcctcgccggcgaccgtgttccggattcggctcaagcagtcgcctgcgagcctccgtcacaagatgcgcgtgcccgagctgtgcagaaacttcagtgcagttgcttggtgtggaaaactgaatgcaattgcttgcgcttcagagacttgtgcacgtattccaagctcaaattcaagccctccattttggattcctatacatatcctgaatccagagagaccaacagaatgctctgtattcaatgtgaaagcagattctccacgtgactttgttcagttcattgaatggtctcctcggtcctgccctcgtgcattgctagtggcaaattttcatgggcggatcactatatggacacaaccaacaaagggtcctgtaaatcttgtacgtgatgcaagcttgtggcagtgtgaacatgaatggcgtcaagatctttctgtggtgaccaagtggttgtctggaatttctccgtatagatggcttcctacaaactccactagttcaaacctgaagaccttcgaggaaaaattcctcacccaacagcctcagagtgcagtgggatggccaagtattctattgcgtctggttcagttttttcatcagggttctgttcaacttcattggtcacaatggccttctcanaactcagcacattctagaatggttttctactagcanagggcttctaggagcaggacccagtggcataatggctgctgatgcta

SEQ ID NO: 156962 - DNA, 637 bp, Zea mays
  Clone ID: MRT4577_74727C.1
cattgggacctcgagccggccgtaggaacactattgcgagacgctgtcgaacctgccgccggtgtcgacggacgacctgctgaagagggggactacctgctgcgcaacggctgtataccctgcctcaagtgcagcaaggtccctttcgtgtaccgcgataactccacctccccgcgttactacgacgtacgatactggaccatgcggaaactgcccatgttcggctgccacgacgccacccatggcacaaggagctgacaggaggccatcaaatcctacccggacgccttccaccgcgtcatctgggttcgacaacatcaagaagacgcaaagggtcagattcatcgcctacaagcccccgggcagcgactagagcgcgcccgtcggccgtcccccgacagttaggtatgtagatagctcctgcgggagctatgaactagtgccatgcgccgtctctgtcggtcagctttgcttcaggtcaccgtaccctttgcttgctgggtttcttctttccgtgatccccatctatatccttttccccggccctggctacgtggctttcgagctttctctgctgtatgagatggatccattggtgcaaccacgtgctcgaattgtgtacctctataccggctac

SEQ ID NO: 156963 - DNA, 271 bp, Zea mays
  Clone ID: MRT4577_74728C.1
ggggaattaaaacttttttggaccacaagagactggggatggcttaatttgcctacatcctacccatggtcaataaccgcattttattaacattcatttctacagatcatccatggccatttgacacccggggcaacaaccagacactgggtcgtaccggcagaagcagaacacaccacggctgaacgcctactgcactctagggcttacgcgacagcaagacagcaagggccacccgttttttgggactgtatgtggacttttaaaccca

SEQ ID NO: 156964 - DNA, 471 bp, Zea mays
  Clone ID: MRT4577_74729C.1
atggatcctaagggaaaggggattgtgatcaacgacaaggagaaagagatcctcaacaacaacaagtcaacaggagataagccaaacaactcaggctcaaacaacaagagcaaggatgggaagaagaagaggttatttactgtaattgatccccatcttgttaatcttattcatgaaaaccctaggtataccaaaatgttgtccgaggacatctttgatgcaaggtacgtcaatgacatcgccaacagacctcttcctctttacaagccgcaacctgttgcactcaaagcaacaaccagcatggagacactcccaaataaggtacaagataataaagagaagaaggagaagaagaagttctacagaaagacgaaggttgaggcgcacatcggtaaggaatgggactcggactgttcttcatctgactccggtgttgaacgtgggccgtgggctgctgcgggtcgtggataa

SEQ ID NO: 156965 - DNA, 360 bp, Zea mays
  Clone ID: MRT4577_7472C.1
ttgaatccagacacaaggggtatattgtatatttctgtgtaccaaaaaacccctcaactgtaaaactgtggaacgattctttcttctctttcacatgcacggaaagttgggtccttattggcgtacaaacaaacaaggcaaagagcaggagccactcaaggcaatctggtcctgctggtccaaccgactagacagcaactgatggccgtaacaatggcagtcaaatgatcatacgaatctacacctatcttcatacgtggtacgaggctccctacatctgctagctcctcatcttctcgatcacgggctagccgaacgacggcccgtccttcctgttagacaccaactactccaccgggt

SEQ ID NO: 156966 - DNA, 344 bp, Zea mays
  Clone ID: MRT4577_74730C.1
aaagagccacatgcaaccggagcagcgcacagcaacagagcacacgccgcacaccgccgcctccgcaccagcagcaatggagcgcgccggcgctctctgcctggtgctgctctgcctcgtggccgcacattcacccgcggtgcacaactccacgaaagcgtcggccgctgcgccggcctgccactaccacggcgccggcgatcgctacaacaaagacgctcgcgcccgccgctgcgacgcggacgattccggacaccatagcctctgccacctcgcatgggaggaacgttggccatgactagcccgtggctaccgtgttcacaaatactgtcagtgatgcactt

SEQ ID NO: 156967 - DNA, 373 bp, Zea mays
  Clone ID: MRT4577_74731C.1
aaaagcaacagggcgcatttatggacttgctttaacccaaacggggtttgggttttgaagattcccccatttaattttttttccccattttgtaaatggggggggggaaaaatcccttttattaactacaaaagggccgcctgtttttttccccccaagattttttaaaaagaacctggtggggaataaaacccttttccctttaaaaaaaagctatttttttgggggggccttggggggacccaaaaaaacttttttttcacttcaggggggaagggaatgcccccccggggccccccatctacttgggcgtgtttttcccagccggggggccagccgggttaaatttatcccaggccttgatccaggggac

SEQ ID NO: 156968 - DNA, 348 bp, Zea mays
  Clone ID: MRT4577_74732C.1
agcagtggtaacaacgcagagtctttttttttttttttttttttttttttctaaccaactaatgtgcttgctttaaatataggggtgtaatcaatatatttatttaagcgaatgtccattataattttatgacaaaaacttatttttgtaggcttcttcgggaggacattatacaccacattaattccgcttgttgcgagccatgtgatgatttatttgcccttgttgatgcactactcttagacaaagcacaacttttgacactacaaccaaggttatgtatgtaggtagggtctgatagtggttacaccatcaccccgcgtactctgcgttgttaccactgcttag

SEQ ID NO: 156969 - DNA, 1519 bp, Zea mays
  Clone ID: MRT4577_74733C.1
ccggccttgaaaaaaaaaaaaaaaaaaaaaaaaaaactgtaggaaggcccttcagtgtttgaattcctgttctccaactgatcaagtctgcaactatcgttgcattgcatcatatgaaagtccatatctggaggctctttccctctgtgttttgcagaagaacaattgccttgacctcaatgctgagatacccagtaaaccgaatgtaatgccactaaccatgttcagagaacaaaaactaagccatgaaatagcggaagatctttttgttggttggttggacagcatggaatggagttggcgagtggcagctggacaaaatccagcatatgatcaattcccatgtcagtaccagttacttgccgggctcctcttcgtcccctcccacccgcaaccgcacagagaaaggggaggaggctctctacccagcgcagcccgagcacccctccccccggatcgggacccctgctctgcgcaatccacccatggcggaggaatcaggccgccccttgccaaagtttggcgattgggatgttaatgatccagcttccgcagacggattcactgccatattcaacaaagccagagacgagaagaagggtgggaacggacaagacactgagtcaccttccaaggacaccaggactgagagggtggaatcttatgctgcaaagccaagcacgaagaaatggttttgttgtgtgacagccagccctacgcaatcctgaggaagacaactgcatgcgttttggaaatactgtccctttaattttctatacatactatccataagacaatgtaggggtacccagggctccaggatgggctatctcgtaaaactcttgcgtgcgtgtatgtatggtgtgagagaattcacaaggtggacttctggttgtaaaacaaaaaaaaaaaaaaaaaaagccccggggcccctcgctcgctcggcaccaaatccaaacgctaatacagagatttgttacctctgtagaagcaccaagtcaaaacgctagaataggagttgtgaactgtactagcaaaaatacttaaacgctaaggtagcctccgcccgctataatagcaccccagcagaacgagagagttactcattaaaacttgagaggaagactcactaaaagtgaacgagagagatactcaataaaactagagagagctactctataaaactaaacaagctgaaaatatttcctttccccttaagagagctcgctggaaggcagcctagctgccctacatctctccctgttaccaaactgctctttagcaccaggcgtctagaaagctagcactagcttaactagacaaaggccgaagcaccatagtcacgcaatacagcataacgtaccaaattgtaactagtcagatagaacggcctttggccaaagtcctacatagccaacggctgatacaggactataatggaataataacaatactatgacgatgacaagatgcagaaccatctgtcagcactacgaaaaaaaaaaaaaaaaaagcggcc

SEQ ID NO: 156970 - DNA, 608 bp, Zea mays
  Clone ID: MRT4577_74734C.1
aattcggcacgaggccgcctccccctctcccaccccgcgtgagccgccgcccctgctccccctgttcgcacccgccgcccctgctccccctgtcccgcgccgcggtgacaggatccgagaacacccctgcggacgcgtccaggattcaaggcctccccctcccttcccctgccctcaccccctcggcgatgcccggattcatggtggcgcaggcgctggaggcgtccacagggggcgacaccgtgaccctgcccccgttcgacatcagcgctcctccccccgaccaccgtcgatttggtgtctgagccctcgctagatctcgcaccctcaccgaagccctcattggattcgacgccctcactggaggttgcaccgcgatgggatctaggaaccgtagatggcctcgaccacccacgtgggttgttgcctctgcggatgagacgcagcgccaaggggccagaggaaacgacgtgatggacctcatatcacagctcatgtcatggttcatgcctctcatcgcctcccgccgtggttcgccgaggccgccccatgctgcacgccatgggcagcgatgtcgccttcacgaagctcggcatggagtgctaccc

SEQ ID NO: 156971 - DNA, 294 bp, Zea mays
  unsure (1)..(294): unsure at all n locations
  Clone ID: MRT4577_74735C.1
cacganggntcanctgnctcttacttntaaccantnaaattnacctgcccgtnaaaaggcnngcatnacacancaacccgagaanaccctatnnagctttaatttattaatgcaaacagtnccnaacaaacccacaggtcctaaactaccaaacctgcattaaaaatttcgnttggggcnacctcgnagcagaacccaacctccgagcantacatgctaagactncaccagtcaaagcgaactactatactcaattgatccaataattnaccaacgnaacaagttaccctaggg

SEQ ID NO: 156972 - DNA, 385 bp, Zea mays
  Clone ID: MRT4577_74736C.1
aggaaacccggaaactttagtagacagacccttcaggatgccgtgtttgttatgcaacggtaatgtacactacatgcgacgatcacatactcagactggtacagtacctgccatgaaacattaagaatacgaggaacaacgcggcctactagctaggtagctaaggcacttgggatttataacaatgaacggggggtataaacacgcaaaggatggatgcagggaaagaaggatggaatggccggacacacaggaggctttaggaagtatttcaatgcggccctgtagacatggacgcgaccgagactgtagcccttggcccgggaaaagggacacataacaacctttacagagctgatagtgcgtacgcatggaggacctggac

SEQ ID NO: 156973 - DNA, 214 bp, Zea mays
  Clone ID: MRT4577_74737C.1
aaaaacaaccatacaaaagggaaatgaaaccccccctgcttttggaacccaagaaaactattaatcacaaaacccaatggcagcgcccgaaaccaaaaaggaaccggcggaagatgacccaaacccataaacaaacctcagccccaccctgaatcaggcttgggggccccacggcccgctgcgggtaagttcagtcggaaacggctgtgctccc

SEQ ID NO: 156974 - DNA, 668 bp, Zea mays
  Clone ID: MRT4577_74738C.1
gggacgactgcgcataacagaggtgttcctcgcggcggcggtggtgacggcggcggcggtgacaactagtggtggcatggtcgccgcggtgcgggacgacgacttcttcgtggacggctcggtgtaatgcgacacctgccgggcggggttcgagacgaacgcgacgacgccgatcgcgggcgccaaggtgcggctggagtgccggcactacatgagcgcgagcggcgcggtggagcggtcagcggagggcaccacggacgcggcagggaagtaccgcatcgagctggtggacaaccgcggcgccgaggaggtgtgttcggtggcgctggtcagcagccccgtgcccgggtgcgccgagaaggaggttggccgcgaccgcgcccaggtgtcgctgttcacggacgccggggccggcctcgccaccaccgtgcgccgcgccaacccgctgggcttcctcaaggataagccactcgccaactgcggccagatactcagcagctacgcgctgggctccgcgcctagctactgacggcccttggctttgggaccaattcgcacgctgcctgctttctattgcatttgatttgcacgtgtctatttttagtagtatttagtaaacattacgaataatcttcatcggctagcaatacaaatcaattaattagagt

SEQ ID NO: 156975 - DNA, 657 bp, Zea mays
  Clone ID: MRT4577_74739C.1
tgggtacctcgaggccggccgggatccgcaccctcccactcccctcccctcccctccgctgccctactctctcggaagcggcggtgccggggtcgcagcggcgaggagccagccatggcggagcacgcgacgctccccttctcctgctcctccacgctgcagaccctgacccgcaccctctcctcgcgcggggcccaccagctccgcgggggcttcctccgcctcccctccctcgcggcgctcccgaggttggcccacccctgccgccgccacgtctcggagtccgctgcggcggcgcccaatggcgcctccgctgagggggagtacgactacgacctcttcaccatcagcgccgggagcggcggcggccgctgcgccgcgcttcgcctccgcgctctacggatcgcgctgcgccatctgtgagatgcccttcgccgcgatcggctgtgacgagctcggagggctcggcggaacatgagtgcttcaaggatgtgttccacagaaatggctactgcacgcatgcaagcactctcacgagagacgaacaggctcctggagttggatggacatatgacactgaaccgagtgatgactggagctctctcatagaccgtaagaatacggagtctgcgcgcctgcatggaatttacacgaata

SEQ ID NO: 156976 - DNA, 286 bp, Zea mays
  Clone ID: MRT4577_7473C.1
gaaaggtggacttgaaaacctactcgcaagttattctagctggccttgtatacgtgggatatacgagttcttatcacttctcgtgagctcaaccagacgattagtagagcaatacttacctactactaggatacatctgcgagatcggacgatccgaaagtcaaactcatcaaagcctcgagactggtagctgtctcacgtgccctgacaactgtactggctgttaccactttggtcgtgccgatcggagtttatactcagacagcctgcccgatgtgctatttat

SEQ ID NO: 156977 - DNA, 267 bp, Zea mays
  Clone ID: MRT4577_74740C.1
ctagttctagatcgcgagcggccgctccgatctagaactagtcggacctgggcagttctcggaggtgcccaaggcggaggggttcctctcccacgtgggccagcatcgccaccctcttctcgggctcctcgctcaccgacaactccaacacgggcgtcgtcaggctcggcgacggccgcgtcctgtgcctgacagagaccatcaagggctccatcgtggtcgacccggacacgctcgacaccatcggcaagttcgagtacacggaca

SEQ ID NO: 156978 - DNA, 419 bp, Zea mays
  Clone ID: MRT4577_74741C.1
gggggcgggaaaacccccccccgggccagtttttttggcccaggggggggggggggcatttgtcgggtccacagccaaaatccggggggaaaaaaaaattggggggggggggcccccctccccggttcagcccttttaaaaattcaaccggggtccaatttaatccggggggcaacccagttgggtcaacctaactgaacagtttgcaggggtgttaactgctgatcccaaggaattgggggaacctgggatccttgggtccccaaccgatctcaccccgggttttggaattcccatttttttccccaagggcccgggggacccaaaaaagcccccaaacttggggaaaaatttcccactttggttaacagcctccatttttttttccctggaagggggcttgtttccaccccccaaaa

SEQ ID NO: 156979 - DNA, 654 bp, Zea mays
  unsure (1)..(654): unsure at all n locations
  Clone ID: MRT4577_74742C.1
ctagnacacacannagctttatctataacatgcttataagaatgaacaagttccttgcaaaactgaataaattagactggaaacctgtaaggatcgttctgctttagacaaaaatcataactgtggcatgttaataatgtgaaaatgcatgcctaacattgattagtagcttttctggactttaagcaactaatctaaagaaaaaatgtcaatatgtttagaatggagtgataccgacatagcatgtaaattactaataatttgtctaaaaaaactgtcccaatcctagaaatagggatgcaaacagtaggcttagaattgagctgcaaaatgctagggaccatataagtcaggtaataactatcaggaaagtgaagctatcagtttctagctgcacactatatagctgaccagtgcattttgcttgtttagttcactagcatattcatccattgaggtggttcttttttcccttttccttttgaggagctgactgcttgtccgagaaagtgttntattaggatcgttttgcactaaaaggttcaaataatgtttggttaaaaaatgacatctgttataggatagaggctataaatataagatagaatatacccgttctttagtacaatgtggccgcatttatttcagctgctc

SEQ ID NO: 156980 - DNA, 564 bp, Zea mays
  unsure (1)..(564): unsure at all n locations
  Clone ID: MRT4577_74743C.1
aaaaaaccacgaaaaaaaaaaaaaagaaaaaaaaaaaaaaaaaaaaacagngaacacgggccgcggggggggacgcccaaaccgagccccccggggaaaccaaaacccaaaccggccccgcaaaaagggcgcccaaggccgaaaaaaaacccggggagaaaaagccgggggaggaggagcccgcggccgagaaggggcccgccgggaagaagcggaggggggaaaagcgggcccccgcgggcaggcccgcggccaaggaaggcggcgagggcaagaggggcaagaagaagggcaagaagagcggggagaccaacaagaccaacancnccaaggggcggaagcaggggcacccggacaggggcangcccaccaaggccaggaccagaaggaacgccagcagaaacgaaaccnccaaaaagcccgcaggggaggccgccaagcccgcgcgccaaaacaagaaggcgaccaggaccncccgggagaccccagaccccgggagccagggacgngccgggggagcncgccaagcacgccggccccggaggcaccaaggccgaaaccaag

SEQ ID NO: 156981 - DNA, 278 bp, Zea mays
  Clone ID: MRT4577_74744C.1
gtgactcgtgggggagctggatcgtactcctcctcttaccaagtactcttcgggttacaggcactaacagatgcaccacacaggctatcgctgcaggtgatgctcattacatccactctgtcatccggcttgactaagccaccactaaccagtcgctggaaaaagacttcatctcctaccgtgagatactcgagtacaaggtcatcaccaaccgatagaccactaggactcacagttcgctctaattgaccttctcattcaatatctccatgatcata

SEQ ID NO: 156982 - DNA, 282 bp, Zea mays
  Clone ID: MRT4577_74745C.1
gcaggaggaccgccggggctcggcaacacgggtgattggcaaccgagggcagccgacacaggagcggggccatacaacgtgcagcaggcaacacgggacaacggacgaccacgcaccagcacaagcgccatcatggaacgggcactaaggaacggaaggcacaaaaaaaccgccgagaaggaagacgcagagagggccggagcgaacagcagcgagcccacagaccacgaaggacacactgacggaacgaccgacaacgcaacaacgggacagagcacacac

SEQ ID NO: 156983 - DNA, 388 bp, Zea mays
  Clone ID: MRT4577_74746C.1
tatttttttttttttttttttttttttttttttgggttattttttaagtaaaaaaagggggttttaaacccaagggggggggggtcccccccaggaacgggggcaccacaacaccgggaaaacccaggcaacgaacaaaaaaaaaaaagaaacgggggggagccatccgggggaaaatcaaaaaaaaaaagggccgaaaaaaaaaggagggggcccaggggacaccaccagaaaactctgtacaggaagaagggcaaggccaaaaaaagaagggggggttagacgggcccccagcacgaggggcgtacaaaaacccacccgaggggcaaggggcccgcccaaacggggcgccaagagggccaagagggccaccccaccggcggggagg

SEQ ID NO: 156984 - DNA, 514 bp, Zea mays
  Clone ID: MRT4577_74747C.1
gcaataacaaaaaacaatcccggtccatgggctggattttacaacatgcttcataaattctggcgcaactttgtattccaaagcaatacgcacaggggacggacacatcttgccaggtttggccagaaaacgctgggcagggtccaaacacacttgcgacagccgaggggcaggcggaaaccaccgccactgggcggtaggcaaggttttctacgtggacgttgaaaatcccgaggggatgtccgaaaaagccgaaaatgccagaagatgcaaagtcggccgccctcaataaaaaccctttggcgctttgggaacccacgatgatcttgggggacttccagaaggccctagatacttgctggggaaagggagcggttcacctctttcatgggcccgttttgtacatggttgggatggacagagctcattaaggggggccggcgctaaactagcctacgatgttatgcgcagggaccaggggccggcctgctagatattgtaggccaccctcact

SEQ ID NO: 156985 - DNA, 792 bp, Zea mays
  unsure (1)..(792): unsure at all n locations
  Clone ID: MRT4577_74748C.1
gggaccctcgaggccggccgggctccccagtcgatcacaaacctcagtccaaactccaacccccgccgcatcagaaaaaaaccctaggccatggacgccgcggcgctggagtcgctcatcctggacctccacgccatcgaggtcgtgaagctgggctccttcacgctcaagtccggcatcaaatcgcccatctacctcgacctccgcgcgctcgtctcccacccgcgcctgctctccgccgccgtcctctccgtcgaccgctcaatccccatgctcatgcgccgcaaggaggtcaaggcccacggcaccgccaagtccatcgagggctccttcagccccggggacaccgtcctcatcatcgaggacctcgtcaccagtggcgcctccgtgctcgagaccgccgccccgctccgcgccgaggggctcgtcgtcgccgacgccgtagtcgtcgtcgaccgcgagcagggtggcagggagaacctcgccgctaatgggatcacgctgcactcgctcatgaccctcacggaggtgctggccgtgctgctcaagcacgggaaggtgaccgaggagaaggcgcaggaggtgaggcagttcctcgacgccaacaggaaggtggcggtgcctggggcagcacctgttacacccagggtgctcagaaagacattttcggagagggcgaatcttgccaccaacnnctatggggaagaagctcttcgagctgatggagacaagcagacccacctgtgtgttgccgctgatgtcgggacaacaagggactccttgagctggctg

SEQ ID NO: 156986 - DNA, 2145 bp, Zea mays
  Clone ID: MRT4577_74749C.1
cgggatcaattccattggccccctcgaggccggccgggccaggcgttgcgcttgcgcagcaaatcaacaaactactacaaagccacttcctgctctcgctccgccgccgccgcctccctccccagtcgatcaccaaacctcagtccaaactccaaacccccgccgcatcagaaaaaaaaaaccctagcccatggacgccgcggcgctggagtcgctcatcctggacctccacgccatcgaggtcgtgaagctgggctccttcacgctcaagtccggcatcaaatcgcccatctacctcgacctccgcgcgctcgtctcccacccgcgcctgctctccgccgtcgcctcgctccttcacgcgctcccggccacgcgcccctacggcctcgtctgcggcgtcccctacaccgcgctccccatcgccgccgtcctctccgtcaaccgctcaatccccatgctcatgcgccgtaaggaggtcaaggcccacggcaccgccaagtccatcgagggctccttcagccccggggacaccgtcctcatcatcgaggacctcgtcacaagtggcgcctccgtgctcgagaccgccaccccgctccgcgccgaggggctcgtcgtcgccgacgccgtagtcgtcgtcgaccgcgagcagggtggcagggagaacctcgccgctaatgggatcacgctgcactcgctcatgaccctcacggaggtgctggccgtgctgctcaagcacgggaaggtgaccgaggagaaggcgcaggaggtgaggcagttcctcgacgccaacaggaaggtggcggtgcctggggcagcacctgttacacccagggtgctcagaaagacattttcggagagggcgaatcttgccaccaaccctatggggaagaagctcttcgagctgatggagaccaagcagaccaacctgtgtgttgccgctgatgtcgacgaagcaaaccaacctgtctgacgcggtggacctccggaccacaaaggaactccttgagctggctggcaaattcattccccaaatttgtatgttgtattggctcgaagctccattatattgctttaaaccacatcttgttgatcttcgaagatcgaaagtctgatgagattggaaattcagtaaccatgcaatatgaaggaggaatattccgcatattggattgggccgatattgttaatgcgcatatagtacctggacctggaatcgtagatggcttgaagctgaagggtttgcctaaaggaagaggactacttctgctcgctgagatgagctctgccggcaaccttgcccatggagattacactgctgcttccgtaaagattgctgagcaacattctgactttgtgatgggatttatatcagtaaatcctgagtcttggtcagtaaaaccatcaaaccctgcatttatccatgccacgcctggagttcagatggtcgcaggaggagatgatcttgggcaacaatacaacactcccgaatctgtgataaactacaggggcagtgacataatcatagttggccgtgggattataaaggcgagcgatcctatgaagaaggcgtgggagtaccgcttgcaagggtggcaggcatacaagaacagcttgctatgaaggaaggggggcgccatgagcatccccaagtataagggcgaatccagtcagtttggcgaaataagcgcatgcggaaaggttttcctgcagttgagtcaggacctaattgacatcagattcactgcagaggagactcatgccccatcatcgtttctgttacaataatttcctctcggtttaccctgttcttgctggttgagttaggcacgttgtgatgcctgtgctcggttaaatcgtcttactgccatgccacttgaggtttggactcttgagcaagcaattttatcgatgccgagaattgtatgaaaaaaaaaaaaaaaaaagctgaggtttggactcttgagcaagcaatttttttggttgttcgttttgatcccaacccatatgtattaagtgagattaaatatgaattaagtgggttttaatctcgaacaagtcaaaatctttcataaattttttcaatcccatccaatatatgtgatagtaataaccgaacaatgtctaacatggaaaggtccccccttc

SEQ ID NO: 156987 - DNA, 119 bp, Zea mays
  Clone ID: MRT4577_7474C.1
tctatgacgcgtgggaccagccacaagttccgggttctcattcttgtacagaagagcgcggcgcgcggagacctggcccaggacgccatcatgtcgccgttctggaactttaacgccca

SEQ ID NO: 156988 - DNA, 469 bp, Zea mays
  Clone ID: MRT4577_74750C.1
gcaccaggtttgtcacgtgataaaggatgcaaactgaaccagagcctacaggtatgttcctcctacactaatgtggcatatgaatgcgcccttagccagtactcctccgttccaaattaaaatttgttttattaattaatgggtttatacaatacttgatgtatttgttttatatatgtctaagttcatgttcatctatttgaatatagacataaaactaagagctaaaataactactattttagaacgaatgaagtatataattaccatgtaagaaattaaaacttgtgtgatcaagaaattaaaacaagagacggttttatttcaagttttgagtaatagtgcttgcttgattaaacttatctcttttactggtaatggttcattgatgatttgttcaattgtatatacattattttaggattcttgcaatcaagtcttttgaactttgatgatcaatagacaattg

SEQ ID NO: 156989 - DNA, 341 bp, Zea mays
  unsure (1)..(341): unsure at all n locations
  Clone ID: MRT4577_74751C.1
gaccttttttccaaaagcgcaggagaactgcacatctttgtagataatagagagaacatgccgtacataaaaaataaaaaggagagccccccacggacacgcacacaacgcactacgaccactaggagctacccgggtgccaagagggtgtccgctaaagcaagactacctagctgcttagctccagccatcacccaacaagaccttacatgaccaaaagaccaaacaccaccttacctggctcttcgaccaacacaatgctgagatggaaactaatgactccaactgacctcaatatgaaatagatcccatcggaagtggcctaccatggtggtgacang

SEQ ID NO: 156990 - DNA, 290 bp, Zea mays
  unsure (1)..(290): unsure at all n locations
  Clone ID: MRT4577_74752C.1
cgtccgcggacgcgtgggcggacgcgtgggttcgcgccaatggtcgtctacagaaggcattaaatgggntnaatgcgcgccagagtcagagcagagccagatggcgcaccggacactgaacagtgcctgtccggtgtaccaccagactgtctggtgtaccaccagactgtccggtggcccagaagacagaagctccaacggtcggaatccaacggtttggtgacgtggcaggcgcaccggactgtccggtgcgccatgcgacagcagccttcaccaaacgactagtttgg

SEQ ID NO: 156991 - DNA, 1775 bp, Zea mays
  Clone ID: MRT4577_74753C.1
cggcacgacggccggggaaaaagccaccacttcctcctcagtccgccgccgcagccgcctccctgtcgcccaccacacctcggtctcaaacccacgcacccgccgccgcgggaaaaatggccatggacgccgcagcgctggagtcgctcatcctggacctccacgccatcgaggcagtgaagctgggctccttcgtgctcaagtccggcatcacctcccccatctatctggacctccgcgcgctcgtctcccacccgcgcctgctctccgccgtctcctcgctcctccacgcgctccccgccacgcgcccctacggcctcgtctgcggcgtcccctacacggcgctccccatcgccgccgtcctctccgtcgaccgctccgtccccatgctcatgcgccgcaaggaggccaaggcccacggcaccgccaagtccatcgagggctccttccgccccggggacaccgtcctcatcatcgaggacctcgtcaccagcggcgcctccgtgctcgaaaccgccgccccgctccgcgcagagggcctccttgtcgccgacgccgtcgtagtcgtcgaccgcgagcagggcgggagggagaacctcgccgctaacgggatcactctgcactcgctcatgaccctcaccgaggtgctcgccgtgctgctcaagcacgggaaggtgaccgaggagaaggcacatgaggtgaggcagttcctcgacgccaacaggaaggtggccgtgccgggggcggcgcctgttaaacccagggtgctcaggaagccattttcggagagggcgaaacttgccaacaaccctatggggaagaagctcttcgagctgatggagaccaagcagaccaacctgtgtgttgctgctgatgtcgggacaacaaaggaactccttgagctggctgacaaggtcggccctcaaatttgtatgttgaaaacccatgtggatatattatctgattttaccccagattttggctctaagctccgctcgattgctgagaagcacaactttttgatcttcgaagaccgcaagtttgctgacattggaaatacagtaaccatgcaatatgaaggtggaatattccgcatattggactgggctgatattgttaatgcgcatatagtacctggacctggaatcgtagatggcttgaagctgaagggttcgcctaaaggaagagggctacttctgctcgctgagatgagctctgccggcaatcttgctcatggagattacactgctgctgctgtaaagatcgctgagcaacattctgactttgtgatgggatttatatcagttaatcccgcatcttggtcagtaacaccatcaagcccggcgtttatccatgccacacctggagttcagatggtcgctggaggagatgatcttgggcaacaatacaacaatcctgagtctgtgataaattacaggggcagtgacataatcatagttgggcgcgggattataaaggcgagcgatcctttgaagacggcatgtgagtaccgggtgcaagggtggcaggcatacaagaacagcttgctatgaggagggcgccgtgagcattccaagcataataagggcaaatccaggcaattggcataataagggcatgttcgttttgatctcaatccatatgtattgagtgagattaaatatgaattgagtgggttttaatctcgaacaagtcaaaatctttcataaattttttcaatcacatccaatatatgtgatagtaataaaaaaaaaaaaaaaaaaaaaaaagcggcc

SEQ ID NO: 156992 - DNA, 398 bp, Zea mays
  unsure (1)..(398): unsure at all n locations
  Clone ID: MRT4577_74754C.1
gaaaccaaaggggttctcatgatttaaaaaaggggttttgtttaatggcctaccggacaaatagcccccctttgggttctcacccccccctgggtaaaacgcccaaacaaggagcttcccccagctccctgggcaggggtgcccaccgggagcccccccgaagacagacaggggatgcccctgccaatccttgcaggccaacaacttaacttttccccattttcgaccttgcgtccccaatgggcaatccatccttttcagaagatgcccgtccagggccctggggtcttttcatagccggggggggcgattcaatatccgtnaaatcagcaaaagcttcagggtttcccccccggggaccccttttaagaacatgaaaaccacgtccctcgggtaaa

SEQ ID NO: 156993 - DNA, 1674 bp, Zea mays
  Clone ID: MRT4577_74756C.1
ccgggaggcccagccaaattttcgttcacctggcttcacccacccgcgtgccctcgccgacaactgagccaccgccgccgccgccctacccccaggtgcccaggtcgtttcggtccctttgccaggtcttcgccggcgacgagcaccagccaccagccagggaatataactttgacctgtaaaatgaggccagttttttgcgggaaccttgactatgatgttcgcatctctgaggtcgagcgccttttcgggaagtatggaagggtggaacgagtggatctgaagacaggaatatcatggagcatatgtgctcttcctggttgatggactggttctacctttactgcctctgcctgagcccccacctcatgcctggtccatctccaggagttcactgtccaccacggcatctgtgcacatggaaacgaccacctcgtgaccgatgtcttacttttacgatcaacactgcatcctcgtaccctgcctgatcaccattccttcgccaatccaaccatgccaatctcatgtctggctggagagtggagataagtggagggtttgcattcatctacatggaagacgaacgtgacgctgaagatgctatcagtagacttgatggaattgattttggcagaaaaggaaggagaatcaaagttgagtggaccaaggaggatcgcactgctgatcgaagaggcaactcaaggaggtctccaaccaatgcaaaaccgaccaaaaccttgttcgtgatcaactttgacccgatcaacacgagaattcgagatctggagaggcactttgataaatatggcagggtcgcgaatgtaaggatcaaaaagaacttcgcctttatacagtttgaggcgcaggaggatgctactagagcattggagggtgctaatgggagccatttcatggacagggtcatctcagttgagtatgcgctccgtgacgacgatgaaaaaggtgaaagggcgacgaacggatacagcccagacaggagaggccgcgaaagatccccaggtgcaagacggtctcctagtccttacggcagaggtcgggagagaggtagcccagactatgggagaggcaaggagaggggcagcccagactacggcaggggaggccgcagccctgatggcaggggaggccgcccagccggcggtggcggcggcggcagaggtgatcacgccaggggaggaggacgacgacgcagccctgactattatgaccgcgagcgccgagaagctagtcctggctatgacaggccccccagctgctcacctggaactgggagggacgcgagagactagaaaagcgccccatgcctgtgttgtagaattcaagcatcaaagcctcccgcgtcagatgaagttagagttggtgatgttagccagcaggaaactcgtttacttatgtgcgttagctcgtgctgactttgcaagttagcttaccatttcccatttgcgactccagaatgtaactcgtatggtctggaatggtagctttcaggactcgtttgaacctttcttggagtttttttcttcttttccggctaccttgattgccctgtgcatgcgctgatgaatctacagattgtttcgtctgtcaagtgttccgctgtaatgtaagagacgaaattatttgttccttgttgatgtagtccctgttttgtgc

SEQ ID NO: 156994 - DNA, 262 bp, Zea mays
  Clone ID: MRT4577_74757C.1
gcatttcccatgggtaaaattgatcagacccggatgtggaaggttggtgagcgtgtccgttctacaaggccagctggtgatctaggtccattatacccatttactgctggggtctacgtggcattgatgatggcccagattgagatcctgaggaagaaggggcattcttactctgaaattattaacgagagtgtcattgagtctgttgattctttgaatcctttcatgcatgctcgtggtgtttcattcatggttgataact

SEQ ID NO: 156995 - DNA, 728 bp, Zea mays
  Clone ID: MRT4577_74758C.1
attgggaccctcgaggcccggccggggatagtatcatacacattgttcagactaacacgccatttatattattattagctgttatccatcaccaatggtgaagatcctagatcacataagcatccgagggttctttctacttttcatggttcttgtggcatcctttgttggtcatgcacagataataagaggtgaaaccaaagaggacaacgacactaagagcatgatgttgacaacaacgagaccaggaagctatgtaactagcatggatgaaaaatctagcttgtgctttgaggatataaaaactttatggtacatctgcaaaacaacttatcagctttataggacattgaaggattgcttgtcgcattgcaacagtatgtgatgcaccatgttggaaaaaaggactaataagaggccatgctttctcaagattgtagattgagatggtgaagatgttctacccaatcatccatgcatgtaccaagggataaaaaattataagattaattattagttattattaagtgttcccatctttaggaaatgtcattttctcaagagtattttctttgtgtgcgattatggaagtttcaaatttcttatatgagacaataaaaaaactttgtcagtcttcaaaaaaaaaaagcaaaatgcgtgttcctctcataccacaatggtccatatatgtcgttttgacagttcgaaaaaaaaaaaaaaaagcggcc

SEQ ID NO: 156996 - DNA, 225 bp, Zea mays
  Clone ID: MRT4577_74759C.1
tttggggtttttaaaaacaattttggggtttcaaatccttttccgatcatttaacaaccaaagctccatgcacgaatccgtacagtaacaacaacgaacagacaaaagcgtcaatttttagaccaacatcctactaacctataacgcggagggctaaatgatgctttcatttttaaacaaatgcgtgaaataaggggcccctggacccagaccaaataattgggt

SEQ ID NO: 156997 - DNA, 285 bp, Zea mays
  Clone ID: MRT4577_7475C.1
ataaagactaaaatgagggggaacagagttcactgtacaaatttgacaactgtcaccaaaattcataaaaaacaatagtactgtgcctctttcttctcaaacaatggatgacacaaaactatgagagtgacaaaatggtgacaggtagctgggacctaggctatcttaccatgaaggttgttttgcttattgtatatttgtgtatgtagtgtaactattttgtacaatagaggactgtaactactatttaggttgtacagattgaaatttagttgtttcattggc

SEQ ID NO: 156998 - DNA, 170 bp, Zea mays
  unsure (1)..(170): unsure at all n locations
  Clone ID: MRT4577_74760C.1
tgnctttgggcagctcaagcaggggggggggggggggggggccatgactaatgtagattcctcttatccgttttatttctatatcagagtatcacacgcctcatccaaatggctgtattttttcttcgtatagctcattggcggctttttttttttctacaacctttcac

SEQ ID NO: 156999 - DNA, 814 bp, Zea mays
  unsure (1)..(814): unsure at all n locations
  Clone ID: MRT4577_74761C.1
cattgggtacctcgaggccggccgggatcttatttacggacactcctcgaaaacttttgagctcaaagcggccatggcgcatgaagcagcaatagttattgatcagctcgctggtgattcaccgtcggtgaaagcagttttgtcactactcctggtccctgtcctcctgctcttcgtcctgctgcgctacttctctacaggggcaacgactaatggtacgaaaggaaagaagaaactgcctccgtcaccgccggcgctgccgctgatcgggcaccttcacctcgtcggcgcgcacccgcatgtctctatgcggggcctcgccgcccggcacggtggcgaggacctcatgctgctccgcctcggcacggtcccgacgcttgtggcgtcgtccccgcgcgccgcacaggcggtgctgcgcacgcacgaccagtcgctggcctcacggccccgctccatcttcggcgacatcctcgggtacgggccgtcggacgtcgggttcgcgccctacggcgaggggtggcggcaggccaagaagctggtcaccacgcacctgctcaacaccaagaaggtgcagtcctaccgcgccgcccgcngaggaggaggtgggagtggtggtcgacaagatccgccgcgcagccatgacaggcgcggcggtggacttgagcgaggtcctgagctcgttcacgaccgacatggtgtgccgagccgtgngcgggcggtcgttcagggtggacggcctggganaggtgttcagggacgtgatggacgcgagcatggccgtccttgnnggcttcagcctggagaacttctacct

SEQ ID NO: 157000 - DNA, 107 bp, Zea mays
  Clone ID: MRT4577_74762C.1
gcaaagacgagccgacgtatctgatgatcgtagttctcttcatcatcctgaagggcgcagcgcgcttgatacctgttgacatgcatcatctgacggccttactggcc

SEQ ID NO: 157001 - DNA, 843 bp, Zea mays
  Clone ID: MRT4577_74763C.1
cgaggccggccggggtcgactctcctcgtctgtcctagggccgccattttccctccgcccagatcgctgtgaagttgaccccgcttccctcccagctcagcgacctccttgccgattacgagtgccgtgtgtgccccgctccaccacaaatcgatcggaaacgcacgcccctttctcttcgccctttcgcgtcgtccagatctcagtcgttcttcgctccatgagctaggaatccgaggtgtcctctaggctaagcgaagttggccggcggcggctaggatggggttgatatccgggatgatgatgggggtcattgttggcgtcgccatcatggccggctggagccgcgtcatgcgccgacgcagcacgaagcgcatcgccaaggctgcggatatcaaggtgcttgggtctctcagcagggacgacctcaggaagctgtgcggtgataacttcccggagtggatatccttcccgcagtttgagcaggttaaatggttgaacaagcatctgagcaaactttggccttttgttgtagaagctgcaacagtagtggttaaggaatccgttgaaccactgctagatgattaccggcctccaggaataaaatctttgaagttcagcaaattttctcttggaaatgtgtcaccaaagatagaagggattcgtattcaaaatcttcaaccaggtcaaatcatcatggatatagatttcccgttggggtggtaatccaagcataatcctagctgttgatgctgtagttgcatcactgccaattcagctcaaggatcttcaggtctatactgtcatacgtgttatatttcaactgtctgaagacatccctga

SEQ ID NO: 157002 - DNA, 1103 bp, Zea mays
  Clone ID: MRT4577_74764C.1
ggtacccctccgaggtctcggcccgggaaaaaaaaaaaaaaaaaaaaaaaaagaccccactcgaggccggccgggcggccggttccctccgcccagatcgctgtgaagttgaccccgcttccctcccagctcagcgacctccttgccgattacgagtgccgtgtgtgccccgctccagtaagccaacagctcattcctcctcaccacgctgctcgttactaaccaagcaatcaatttcctcctctttccattctcccagccacaaatcgatcggaaacgcacgcccctttctcttcgccttttcgcgtcgtccagatctcagtcgttcttcgctccatgagctaggaatccgaggtgtcctctaggctaagcgaagttggccggcggcggctaggatggggttgatatccgggatgatgatgggggtcattgttggcgtcgccatcatggccggctggagccgcgtcatgcgccgacgcagcacgaagcgcatcgccaaggctgcggatatcaaggtgcttgggtctctcagcagggacgacctcaggaagctgtgcggtgataacttcccggagtggatatccttcccgcagtttgagcaggttaaatggttgaacaagcatctgagcaaactttggccttttgttgtagaagctgcaacagtagtggttaaggaatccgttgaaccactgctagatgattaccggcctccaggaataaaatctttgaagttcagcaaattttctcttggaaatgtgtcaccaaagatagaaggtattcgtattcaaaatcttcaaccaggtcaaatcatcatggatatagatttccgttggggtggtaatccaagcataatcctagctgttgatgctgtagttgcatcactgccaattcagctcaaggatcttcaggtctatactgtcatacgtgttatatttcaactgtctgaagacatcccttgcatttctgctgttgttgtggctctccttgctgatccagagccaaaaattcagtacaccctgaaggccattggaggaagcctaactgcagttcctggactttctgacatgattgatgacactgtcgattcaattgtttctgatatg

SEQ ID NO: 157003 - DNA, 359 bp, Zea mays
  Clone ID: MRT4577_74765C.1
tttgtttttttaggcaacaatacagtccaatacactgcgatccaagtaaagattacataaaccgggctagaccttatgtgatcacgctaacagggccttatgtgatcaccgtagattggttgaaacagaggcaccacggatacttgcatttactatgtgaactaagatacagcagaaataaaatttgacataaaggagatgtctacaggcgttgcgtacgctactgcctatgaataatggcatgggttatggaccgtacgggcgcaatcaggtggacatcttgtcaactgaagggggccgcccgcaaattgcttgatgccacacgatacttggtgtgacaggcctgccccatcaggaag

SEQ ID NO: 157004 - DNA, 487 bp, Zea mays
  Clone ID: MRT4577_74766C.1
tgattggatgcattgtatgagaaatctcgatatagtgtacgaatggagtatggatcttacctggccatggagacgtgcttcagagcgtgggcgctgaacgcccccgctaagaagaaaggacaggctcctacgtcaaaaacctggtgatgccgtcaaagaggaaaaaagggccctttggccgggggccgttcaaaaacaaggggatcccccgggttgggggaatcaaaaacaaggtttatcaattcggggaacctcaagggggggcccggaacccaattccccctataagaatacatattacgcgggtttgttggccgacgctttacagcccccggattggaaaaaccagggggtaacccaactttctgcctttgcaaccaatccccttttcatctcgtggggtattatcaataaggacaacaccgaacgcctttccaaagatttgtacaacctgaagggtgaaggaaagtgataacggtttcttttt

SEQ ID NO: 157005 - DNA, 222 bp, Zea mays
  Clone ID: MRT4577_74767C.1
agatgggggatctaagatttcactgaagtaaaaacacgtgccaaggcacgaccacggaaaaggagattttggtgatgttatcatctttgtaggaacaattctatgaagtacagtaaaaatagactaaaaacaggtagaacgagtataaaaatatattgaagaattatgtaaacattacgaataaaggagttgagttattacatgcactatatggattatagt

SEQ ID NO: 157006 - DNA, 534 bp, Zea mays
  unsure (1)..(534): unsure at all n locations
  Clone ID: MRT4577_74768C.1
acaacagggtgatatgtggcacagctacgttatcattgcgaactggcaacgtgctacacagtttgtgttgcttactggcggacatatgccactgtngactgatggaagcgagaataaggggtgcttcaacgcatggaccnatacacgggtcccatgtacgatcccgaaaatacgccattatgagggaagcgaactctacactaacgtgggggcagtcaccagatggaatttcatgatgtacatcgccctatcaggttgttttagatattgcttgtgcatactctaaggtaatgtcacggattttacttggaggctgcatctagaccacttatggcgaatgactactttgctgtccttcctatgcctcggcttgtgctgaaaaacctcggttccattcaagaagattatgacaacgtgcaggccactgatcaagacttatgtgcaacatctcattgttgaaaggatgcctggccgtgctctataggatgtgctccttatgacgactacatgtgcaatccgcgtctttgctgccct

SEQ ID NO: 157007 - DNA, 618 bp, Zea mays
  Clone ID: MRT4577_74769C.1
caccgaggcgacgatgatactcttgccgaggagtgacccctagtgttcatttcccgggggctacgccggtcaggctactcgtgcgcaatacctgtccgatgcgcttaggtggcgcggaccgcgacccggttcgctggactgctctgcgtgcctcgcatccagcgcagcgtagagcccaggcgatcgtcgttatggagaagaaggagcacgagctgctagagatactgcccatcacgaccgaacacatgcaagacgaggcgtccccacctcaagggacgagctcttactgctccgacttaagcgctctgcacgccaacagtccaagaacagccagttcacccgcatgcacacgacgatcgctcgattgctaaccgtgaaaagagagccgaaaattaaacaaagaatcactcaacattgtctaagaagcttcatacgaaacggaaccaaagcattgcggccagaccaccaccatctatagggggaacaaacacgagcagaaagccgaacaaagaggcaatgggcaaaacacactacatgcgagtggagcaggaaggtcccttcatgtattacaacccttactgcgttgatatgtattacatgtttacattgtgctaacca

SEQ ID NO: 157008 - DNA, 292 bp, Zea mays
  Clone ID: MRT4577_7476C.1
gccggccgggctcggaaaagggaacaaaaaaaaatttttcccaaaaaaaaaaaaaaaaaaaaaaaaaaaaaataaaggggaaaagctccccaattaagtgggagggacccacgtccacacgacacgaaccaccaccaccaaccagcagcgggaccacgcacccagggcaaagggatggggttgctcaccatgagggggtccttcgccgccggggcgggggccgcgccctcacctcgggggaccttctccgtggataggtcccccaaagtacaccgctgtcaagagccccccc

SEQ ID NO: 157009 - DNA, 413 bp, Zea mays
  Clone ID: MRT4577_74770C.1
gtggaggagcagagccatggattcatcggtggccgctgcggtgagctacattcctgggcacccgcctggcggaccctgcgccacataacggtcgcatcgtggcccggttcgggttctggttgggcggccaggcgaagcctgctccgagaaaggtggcgaagacatccacctcctctgaccggccgctgtggttctccggcaccgtggcgcccgactacctggacggctcgctggtcggctactacaggttggaccccttcggttttcggaagcctgtggagtacctgcagttcgagttggactccctgaaccagaacctgaccaagaatgaggccggctgcatcatcggcacccggttcgagtcctacgaagtcaagtcctcccagttgcagtcctacatggaggtgttctgc

SEQ ID NO: 157010 - DNA, 1714 bp, Zea mays
  Clone ID: MRT4577_74771C.1
gcgcgcgccgcgccgcgccgccctcttcccccggctcctcgtgtttgtttctcttctcttcttatccgccgaaggagaaaaacacccaccagaaacccaggacgaggaagagtctgcggccgatcgtggatgtcgccaccgacgaacggcgccatctcgctcgcctacgcgccgtccatgatgctgggggcgggcgccctgacgaacccgccgctcctccccttcgacggcttcacggatgaggacttcctcgcctccgccgacgccgctctccttggcggggctgacaccgaccagaccctcctcctgctgccctcgtgccccggggcgaactgctgcggcggcagtagctccgaccagggtctcggagccctagcgtgtgaggtcacaaccgccggatccttctcgctcttgggccagcctgcgcctgggcaggtttcgtgggaggtgacgactgccgtcgctgcggaccgcaacaccttctcgcgcacgcgcgaccctgcgccctcaccaccaccgtccccggcgctgccgctcgtgcaaaccacctcccagtcccagaggacctccatctaccgcggggtgaccaggcacaggtggacagggcggtacgaggcgcacctgtgggacaacacgtgccgtaaggaaggtcagaagcgcaaggggcgccaagtgtttctgcacattccatcttttgcactttactcgattttggtgtatgcatctttcttcgacgccaagggtggctacgacaaagaagataaggctgcaagggcatatgacattgccgctctgaagtattggggtgataatgctactactaacttccctagagagaactacatcagagagattcaggatatgcagaacatgaacaggcgtgatgttgtagcatcactgaggaggaagagcagtggcttttctagaggagcatcaatctacagaggagtaacaaagcaccaccaacatggacgctggcaggcaagaatcggccgtgttgcagggaacaaggatctgtatcttggaactttcgcaaccgagcaagaggctgcagaggcgtacgacatcgcggcactgaagttcaggggcgagaatgccgtgaccaacttcgagcccagccggtacaacctgctagcaatcgctcaacgagacatccccatcctggggaggaagttgattcagaagccagctccggaggcagaagaccaggccgctctgagcgctcgttcgttctcccagtcccagcagtcgagcaacagcttgccaccgtatttcctcaccaacctcctgcagccgctgccgtcgcagcactcactagctcaggctctgccgagctacaacaacttggggttcggggagcccagcttgtactggccctgcccctgcggtgacccgggggagcagaaggtgcagcttggcagcaagctggaaatcgtggacggtctcgtgcagctggccaactctgctgcgaactgacagtgctatctgaaatgctggttgttttgcttgtgtggctcggggtcgggggtacgttcatgaaactgatagcctgagccctgaagatagcggggtataacatacattgtgccgtttgtttgtcgtattttggtgtatcgtattttggtgtacaaaggcatccaagagtctagtcaagctaactagatgatattatcgggtgtatgatctctctaccggaatggcttaaggcattcac

SEQ ID NO: 157011 - DNA, 280 bp, Zea mays
  Clone ID: MRT4577_74772C.1
gggaaaaactggccctaaaaattgggcggaaaaaaaaatccggcatttatcccgggggggcccgggggaaaaaaccctttgttttggggcaacctttgggccaccggtccccccctccaccaccaattttggggggaccttccccgggtccacaccttgaccattctatttgcccacccccgggctttttagccccaaaagaaaaacctagcccgggcctttaaaggcccccctttcccccccccgggggcggccccctggtcccccccggaatttccgg

SEQ ID NO: 157012 - DNA, 486 bp, Zea mays
  Clone ID: MRT4577_74773C.1
gctcgccccacccgtgcgccatctgatgattgcatccactagaattattagtcgttataattctcgtatttagcgcatgcgcgttatggcagtgttaaaaataagtgaagaacgatgggttcatttacgtgaaaggtacattaacttaaggatatctccgcgaggtgacgacataaaggatagatttactatttcatataaccatctgatgaattttgtcgttgacaattgcattaaataaataacataaacaaatgtcccatttattgttgacccgcaaaatatgtttggtgcgtactaaaactaaacctgggttttccgagccttgcagggtattccttaaaacaaggaatgttgttaaccattaaccattttcttgcgtgtgtttcatcagctaatgggatcttatgtgtattcccactgttagggcctttctcgctcagatccttaccccctatttttttggttagccatataccgactcta

SEQ ID NO: 157013 - DNA, 290 bp, Zea mays
  Clone ID: MRT4577_74774C.1
attcactgggggacttgattgagtggtgctccgagcggcatcacatgccttccgattgtggcgatcaaacacaacacactggtgtgtttgctgcaatgcaagaatacacctgttccactggtaacaatggtgtgatttatccacaatctgggattagccattcatctggtcaaaatggggcacatggcgcatacttggaacaccaacattttgaaggctgcatgtatatgagcgggaatggacagatgtgcggaccttacctgcctgaacaactgtatgaggggctatct

SEQ ID NO: 157014 - DNA, 3543 bp, Zea mays
  Clone ID: MRT4577_74775C.1
atggatggatcatatgacatcgtccgacttatgctaaggtcatttaccgttattgatcctcatcttgtaaatcttatccgtgagaatccaaggtacacaaagatgacgcccgatgaaattctcggaaaattcgtgagcgggtgcatgatggtgaaggaagcaaggaacaagaaagggaagaaggaaaggaagaagtactatagtaaggcaaagggcgaggcacacattggaaaagaatgggactctgattgttcttcattcgactccgacgatgaagtactagctgcctccgccttcgacaagtcctccctcttccccaacgaacaccacatgtgcctcatggctaaggagaagaagacttgcaagaatgattatgagaaattaaaatttgccagggatgcctacaccattggtagatacccctctattaaggacggacttggtttccaaaagggaaccaagaacttaacaagccaaaggacctccactctcaacaaggagaaagggaaggctcctatgactagtagcccttcacatgaccaaaagaaccatgcctatctttatgctcatgttaagaatgtttctagtgttgctcagcatgataggagttataatcatgctactctacctaatcgtcatgatgctacatttaattctcatgccatgtttgaatctagttcttcatttgctcatggtttatgcatccagggtacaagctggatcattgatagcggatgcacaaaccacatgacggggagaagaaaatgttcacctcctacgtcaagaatagggattcccatgacactatcatctttggagatgggaaccaaggcaagaagaagtgatggttcattagcttttaagggtgtattatacgacaagctctacttagttgatttctcaaaagagaatgtcgatctagatgcatgcttaatcgctaagactaatatgggctggctctggcaccgccatctagcacatgctgggatgaagaaccttcttaagcttctaaagggaaaacatgtgttaggactaaccgatgtctgttttgagaaagacagaccttgtgcagcgtgccaggcaggaaaacaggtgggaactactcatcaaaacaagaacgtcatgacgacgtcaagaccacttgaactcctacatatggatctcttcgggtccgttgcttatcttagcatcggaggaagggtacccctaagactcctaaactcggctagtaatcaccatcagcgcaaactacagaggctgatcggcgcaattcaggaaaacagcgctgctcgcccctctccgactgctgtgccacctgccagggtgaggctgacagcagctgagtccagcctcaggcgcaacaggaagctccgcctcgcccgaccttgggcctcggcctcaggaggaagtctccgcctcgcccgaccccagggctcggcccccgcctcggcctcggaaggtggtctccgcctcgcccgaccccagggctcggcctcaacctcgacctcggaaggtggtctccgcctcgcccgaccccagggcccggcctcaatctcgacctcgggtggaatcgcgtcctcgcccgaccccggccttggcctcaggaggagtctccgcctcgcccgaccttgggctcggaccgaccacgccgcaggagggacccccccggggtcgaaacgccgacagcaggataaatctaaaacccaaggaacattaaagcgcttcctaaggagagctcaaaatgagtttgagctaaaggtgaaaaagataaggagcgataatggatctgagttcaagaaccttcaagtagaagaatatcttgaggaggaaggcatcaagcatgagttctccgctccctacacaccacaacaaaatggtgtcctagagaggaagaataggatgctcatctacatggcgaggacaatgtttggagaatacaagacgcctgagcagttttgggtcttcaacaaatcaataggattagttaaagtctctagcgatgttgtatttgatgagactaatggatctctaagagagcaagttgatattgatgatgtagatgaggatgaggttccgacggccacaatgcgaacaatggcgataagtgatgtgcgaccgcaggaacaacaagagcaaggtcaaccttcttcctctacattggtgcatcccccaactcaatatgaggaacaggtacctcaagatgaagtcttggatcaagggggagcacatggagaacaggataaggaggaagaagcaccacaagcttctccagctcatgtcctagagacaattcaaagaaatcatccagtggatcagattctggatgatatcagcaagggagtaaccactcgctcatgtttagctaacttttgtgagcattactcgtttgtttcttctatcgagtcttttagggtagaagaagccttgcaggatctagactgggtgttggccatgcaggaagagctcaacaacttcaagagaaatgaagtttggagcctggtgccacatctaaaacaaaacattatgggaaccaagtgggtgttccgcaacaagcaagatgagcacggggtggtgacaagaaacaagactcgacttgtgctaaaaggttatgcccaagtcggaggtttggattttgaggagacttgcgctcctatagctaggcttgaatcaatccacatattattggcctatgatgctcaccattcttttaagttgtttcaaatggacgtgaagagcgccttccttaatggaccaaccaaggaggaagtgctctctaaggtgctctatggacttaagcaagccctaagagcatggtatgaatgccttagagatttccttatttctaatgctttcaaggctagaaaagttgatcctactctctttgctaatacttgtaatggtgatctttttgtatgccaaatatatgtcgatgacataatatttggttctactaatcaaaagtctagtgaggagtttagtagggtgatgatgcaaaaattcaagatgtctatgatgggcgagttgaactacttccttggattccatgtgaagcaactcaaggaagggaccttcatctcccaaacgaagtacactcaagaccttctcaagatgtttgggatgaaggatgccaatcctgcaaagacaccgatgggaacggacggacacttggacctcaacaaaggaggagcttcggttcatgatggaagctctctcctctgtcgaagttcttcaagacgaaggtataacccgagaatgacaacaatgaatgtcaaagttatggggggctttggcttccagatgaaggtttcctcttgtgacaggattaatgtcaagggcataaatgtacttttactcaggctgcatcctgtgcctatgttgggggccttcgtcttccgaaggtaccttcggactcggaataaaactgtacacaatatgaaaagcatggtcgagatgaaggttgatgcagctccgaagctatgcgcaagggagcttcggctcagcggcagaaaaaggaaccgacttaaaggggaaaaggctatctag

SEQ ID NO: 157015 - DNA, 458 bp, Zea mays
  unsure (1)..(458): unsure at all n locations
  Clone ID: MRT4577_74776C.1
tttttggttttttttttttgtttttttttttttttttttttttttctcttttttctttttgggcggcaaaaagggaaaaaaattgggcattttcgccactctcccggcgaaaggaacaaaacccactagcccccccaaacccctgggcgtgattttgcaccctcttcacgctttttacaaaaggaattaacccctaccccccccatgcgcggccttagagagctagaaaaagccgaaacggctccgtggcccccccccccccccccaccctgttgaaagaaaaacacataccgcgggcgccactgggcccccctgagggatatctcaaacttgttcagcttccccctcttaacccccatccaccccatgggaatgaccggaggggccgttggtccccttctacccccagaaagaagggaanttgtttggcccacctggggcccaatggggcaccaggg

SEQ ID NO: 157016 - DNA, 887 bp, Zea mays
  unsure (1)..(887): unsure at all n locations
  Clone ID: MRT4577_74777C.1
caccggcggtgctagacggcgggcggcgaggtcccgctcctgttccctcggccgtggtcctgcagcacatcgtccggtccgagctgctggaggtggtggccggcgtcgtccaaggcgagctgaccatcaacgaaagagctcgtgccgcagacgtgttgcagctcaggtgggaggagttcgcagcgtgccaccagttctggggcggcggccatgacctgatgagcggcctggagaaggaggtgggcggcatggtgagcagcctcagggccggggtggcggcctacgcctacgcctgggtgtccagccaccagatgcagcgcgccaccagcatgggctcggccgagaaggtgaccgtcgagttcctgacgccggcgatgcggctcctattggaggaggcgcggaagttgccgcggtggtggaactggaaccccccgcacacgggctgcgtcgaccacggcttcgagatgatagaccggaggctggagctgtggtccaagatgaagcgcgacatgcagcacctcgggtcgttccaggagcaatcggcggcggtggtggacgacgagcagcagcgcatggccgccgtcttccaggaggcgtcgctggaggccatcgaccgcgcgatgcaccgcgacatttacctggctgtggtttatgcgagcaagcagaggcaatgccgccacttggtggctgcaaagaactgaaggcgcttgtactggccatgccctagtccgcaaatgtgttgtttcgttaaatgaaataagggtgcccatgaaataatatacaattttgtgccgttttgttcaaaaataaatgatgtaatgagtaaccgataacataatatcatacttatttaagtcnnnnnanaaaannnnnnnnnnanaannnaa

SEQ ID NO: 157017 - DNA, 1079 bp, Zea mays
  Clone ID: MRT4577_74778C.1
cccatgtctaactttaatcagcagcagcagatgttcaaagctgcggctcctgagactgatattcagggtgcagatcccagtaataacacactctttggaataaacggtgatggtcagctgggctttcccatgggagcagatgatttcttatcaaatggaattgatgcttccaagtatcagggtcatatttcaacagatattgatggtaactacaggatcccaaaggatggccagcaagaaatatcgtcatccatggtttcacagtcgtttggtgcatcagatatggcattcaattcaattgactctggtatgaatgatggtggtttcgtgaacagaacctcttggcctcctgctcctcccttaaagaggatgaggacatttaccaaggtgtacaaacgtggagctgtaggtcggtccattgacattagtcagttcagtggatacgatgagttgaagcatgctctggctcgcatgtttagtatggaggggcaacttgaggaacggcagagaataggctggaaacttgtctacaaggatcatgaggatgacatcctacttcttggtgatgacccttgggaggaatttgtcaactgtgtgaagtgcattaggatcctgtcgcctcaggaagtgcagcagattagcttggatggggatctggggaacaacattctccccaaccaggcctgcagcagctccgacggcggcaatgcctggagagctcgctgcgatcagaactccggtaacccatctactggttcatatgaccagtttgaatgacctaacttgccggtccatacatgccggatcacaagtaggcgtctcgtgaggggatggcaggtgcagaatgtttgtagatgtgtcgccagatttacgtccgggagagcgaatcgctcgatggattggtagtgtttttgttcatatgtgtaggttttctcacatggaaggaatgtagtatagaggatgggagatgaagattaccgtaggtgaaagatgatgttgtaccatgaggggggaaaacatgcttgtagtagtaaagactgctgcttcagtccacgtatctaaaaagttcttctctgacc

SEQ ID NO: 157018 - DNA, 230 bp, Zea mays
  Clone ID: MRT4577_74779C.1
gggcggggtaattaatacattgtctatggttaaaatgtgtacgcggttgggttccatacaaccccaagaagatgtttcatgaatggcggccaccgcaggcggacaaaacaggtaaatgcagagcctaattaccaacgcgggcacccgcgggctttctgctgcctaagtaacagggtaagcggcccatagaccttatcactggtaaacatgtgaataccaatgctaatgtt

SEQ ID NO: 157019 - DNA, 263 bp, Zea mays
  Clone ID: MRT4577_7477C.1
atagaaattaggaacaagctgttgattaaagagcaaacagcttagaacagtagtagaattggtactttggtaactaagatataggaggacagcttaaatttaaatgagttgaacataactattacatgtaaagaaaaagaagtgtgtgcggtgaaagtgagatagcattaagggacaatgggtgggactgagtgaaagtaagcctcagaaactagcagggtgagagacatgacataactgcagggccgagatgatgtgcaaga

SEQ ID NO: 157020 - DNA, 842 bp, Zea mays
  Clone ID: MRT4577_74780C.1
ctcgaggccggccgggccgggtctcctccccgctcgtcgtcttctcccccccgtcagagcgagactgcgagagacagcgcgaaggtagagagagtgtgtggaacagtggaagcagcagcaaacgcgaccatggcgggtggcgccggcgggcgggacccgctcgtcgcctccgagatccacggcttcctcacctgcgcagacttgaactttgacaagctgatgatggaggctgggacacgctggttccggccgaatgagatctatgcggtgctggcgaactatgcaaggttcaaggtccatgctcagcccatcgacaaaccaattagtggtactgttgttctcccacgcgtccgcccacgcgtccgcttccgtaaagatggccataactggaagaaaaagaaagatggcaagactgtccaagaagcccatgaaaaactaaagattggtaatgaagaaaaggttcatgtgtattatgctcgaggagaggatgatccaaatttctttcgcagatgctactggctacttgacaaagagttggagcgcattgtcctcgtgcattatcgtcaaacatctgaggaaagtgccttaccaccttcgcatgtagaagctgaagttgcagaagtgcctcggatcaatatgattcattacacctcctcaacagattcagcctctgctcatactgagctatcttcttctgctgctgctgcaccagaagatatcaactcaaatggtggtggggcggtttctagtgggtatacttctgtatcttcttttggtgagtttgcagaaaccgacaatcaagctactagcctttcttcattttgggtagattgaatggagtc

SEQ ID NO: 157021 - DNA, 598 bp, Zea mays
  Clone ID: MRT4577_74781C.1
cagggccggactttccggggcgaccgaagccttcgcccacgcgtccgcggacgcgtgggggagatatgccgccacgcacgaggaaaatcgcgcgtaagtccactggaccgattggtgtacctcggcaccagctggctccgagacatgaggagagcagcagcggcagtaatgaccccattggagacctagaagcccaggtggagcaacttcgaatggagctacgtcatagaaactaggtgtgggtagaagatggtcagcgtataaatgagttaagagctgacatctgccatttgcaagacgagcttgttgaacgggatttggcaatcgattcggctatcaactcatgttccattgcttgggatcgagaagccaaagctcgagcccgtgtggaggagcttagcacggtcgtcgacaacttgcaggtgtactgcaatacattacatgaagaagttcatgaattgtatgcatgactacacccagaacgtacctgccgaccctggttgaatgggagccggaccttctggaacaacagacgaagcacttggtggggaattgcacattttcaagccccctcctttctatgaaccctggctgacga

SEQ ID NO: 157022 - DNA, 379 bp, Zea mays
  Clone ID: MRT4577_74782C.1
gttgttatagctatttttttggtggggttatttaaattttccttgtcttttatccaccactatggagaaccagaaacaatagctttgattgattcacttagaaggcctcgttgggaaaagggagaaccagacctggcctccattgggtgggggagcacccggggtatgtgaaaaacggcccaaaccccccgagggggggggggcgccacaggttccaccaacgccccgcaaaaaacaaacaaggggcagcccggccgggacatgctggggaggaagatgttttttggggggggaaccccccccaaaacccggggggggacagggatccccaaagcaccggcccaccacccctatgggggggcccttgttggggccccca

SEQ ID NO: 157023 - DNA, 552 bp, Zea mays
  Clone ID: MRT4577_74783C.1
gagataccccaaaggcccaaagacccgacagattcgcgagagctcgagagagtgcgaccataatggcgatgagatgcgcactgacctccctccccgcgcgcctccggtccccggcggtggtggccagcgggacccggcgtcttctgagtgacgggaaggggcgcgtgctcagcgaggaggagcgcgccaaggagaacgtctacatccagaagatggagagggagaggcgggagaagctcaagaaaaagctcgaacaggagaaggatgcggccgacaaggctaagtccggcgccgacggcaagaaggccgagggaactaactaggagcgatcttcgcctgcctgaaggtgaccccatcttggatgcatctgggggacatttgtgtttatagatgtccaaagatggaagaataaattctgtaaaacgttgatagcactagctttgctttgttttcggtttgccgcgcttgttgaggatataatccagggaccataaacattgataactgggaacttgtatcgttgctggaccaaatatttgtcgcccttttgcg

SEQ ID NO: 157024 - DNA, 357 bp, Zea mays
  Clone ID: MRT4577_74784C.1
agccaacgcgtccgcggacgcgtgggcggacgcgtgggtctacacgggtccgtgtcaacgatgacatgctgcgcgccacatttaaagaaatagcttatcaggccacacaggacaatttccagaagggctccatcttccgacccttcacacatcatcataaagatctctgcgcacatcactgcagccgtggttgcataatcctacgagctcggtctggctacacgtctgactcacaccattgacgtgatgatatatgcatagaactgcatgtacattcccgtctatcgcaactaccgttaatgctgcggggatcaattttgcagtaataacatatctatcaacgcagatggtactctg

SEQ ID NO: 157025 - DNA, 431 bp, Zea mays
  Clone ID: MRT4577_74785C.1
aggcccatcccgccggcgcaggtgagaaccagcgccaccttaggttagggcggccgccgccgcataatgcgcggttgccacgatgcatatcttcgtgaagaccctgacggggaagaccatcacgctggaggcggagtcctcggacaccatcgacaacgtgaaggtcaagatccaggacaaggagggcatcccgccggaccagaagcgcctcatcttcgccggcaagcagctcgaggatggccgcaccctcgccgactacgacatccagaaggagtcgacgctgcgcctgaggctccgcctcaggggattcttttatacgcgcaagaagaagacgaacaccaagtccaaaaagatctagcacaagtacaataaggagaagatcgccgcgctccagttctacagggttgacgacctcaccggcaaagtcttcc

SEQ ID NO: 157026 - DNA, 364 bp, Zea mays
  Clone ID: MRT4577_74786C.1
aatcccaccagtaccacaagccccatcctgccgccgcaggggagaaccagcgccaccttaggttagggcggccgccgacggagaagcgcgcggttgccaagatgtatatcttcgtgaagaccctgacgacgaagaccatcacgctggaggcggagtcctcggacaccatcgacaacgtgaaggccaagatccaggacaaggagggcatcccgccggaccagcagcgcctcatcttcgccggcaagcagctcgaggatggccgcaccctcgccgactacaacatccagaaggagtcgacgctgcacctggtgctccgcctcaggggaggtgttttacccgcccgaagaagacgtacacctcgccc

SEQ ID NO: 157027 - DNA, 682 bp, Zea mays
  Clone ID: MRT4577_74787C.1
gcaaattcgttcggtggaatttcataccttggttttgagaaactaacctttgttccaattcagagcaagcttattgagtcatccttgatgtcggcttcggagatcaattgggtcaatgattaccacgaagaagtctgggaaaaggtttcccctttgttgagtggccattctcgcgactggttatggaagaacactcgacctcttttagatgtgtaataataactcaacgcacagcacggcttgactgcgtaagtgaaagaaatgaacagacatgtttggctggagcatctcttgaagatctgatggccttcaatggaatgcaactatatggcagtaaacagaggcaaggcaatagatgcgtaggctggccagggttcagcggatgataggttgaggctggtgtatttgacatccagccaatttggtgcaacacttgaaaaatgaattacatgcaagccttttctatttattacactatcgacgacaccgtccattgtttgatgaatttattatttattacatttggtacctttttttatacaaaaaaacatctttttagagtgatgtagccatttgagaccatggtttcgtatatggaatcagtcagattcttagggtgctcttggtagggctatggcgaaaacaatttgagctatgatttttgtggtgaattatgatggag

SEQ ID NO: 157028 - DNA, 645 bp, Zea mays
  unsure (1)..(645): unsure at all n locations
  Clone ID: MRT4577_74788C.1
aacttcggcacgaggggttactcaagttcaaaaccccctcttacaaaaattgttgagtctgctaatgggcgtccacaagatatggacgttgttgctgccatgaggaatggagaagttcttgggcgtctaactgttttaaaaagcgaccactgcccaggcagccacagccttaatttacccgagagggtggagggtgcaccaaattttcgggaaatccctgggtttccagtctatggtgttgcaaatcctacagttgatggtattcgagctgttatccagtgcatcagtacaagcaagggagggcgacctgtgctatggcataatatgagagaagaaccagttatctacataaatggaaaaccatatgtgctacgcgaagtggaaagaccttgcaagaatatgctggagtacacagggattgatcgtgatagggtcgaacgcatggaagctcggctgaaggaggacattttacgcgaggcagaaagatatggtggagcgataatggttattcatgaaactgacgatggagagatctttgacacatggggaaatgtnagatatgaagctggtctgactccgttggagggatacaaaaacttggtgagtgaaggcctttcgatcaaatatgcacgggtgcccattact

SEQ ID NO: 157029 - DNA, 689 bp, Zea mays
  Clone ID: MRT4577_74789C.1
cggaattctggtttcccacgcgtaagccaacctgccggtgcgcttcacagtcaacgagcacaaccccaaccagaagatcggcatgtactacgatgaggtcgtcgcgtcggtgttctacggcgaccagctcgtcgcgacggggtccgtcatgcaccccttctaccaggtgcccaagggagacacgcccgtgcaggggaccctcaccgccaggggccccgtcccgtcggacccgtcgtgggggcggttcgccggcgaggtgtcggcggggagcgtcggcatgcggctggagctcagctccaagctgcagttccaggcgaagatgtgggacagcaagaatcaccacatcaaggtggagtgcgacttcactatgcaaggggatgggacgctccgtaagcaggacaaggactcccagtgcacgctctacttctagcgtgatcgccctgcttcttgaattggtgcaggctgacccctttcaactaaccttgatttcaaggttgtatttactgtgtgctttttccctgcatttggctgatgtttgtgattgttgtggtgccattatttgtaacacacgcgtgtcacttcaagagaatattttctcctcgtgacatgctcgtccaatccaatgttttaaaatacaaaggatgtgaactacttgttaaattaaaaaaaaaaaaaaaaaaaaaaaaaaa

SEQ ID NO: 157030 - DNA, 334 bp, Zea mays
  Clone ID: MRT4577_7478C.1
tgttcatgtccttcagcccaaccctacaggccggggaaaaattttttttgtgggtgaactggaaatctgatgaccttcgggctggtgtacacggagtacgcgacggcggcggacccaaacaagggcatccttgtcaccatcgcccccattgacatcggcttcatagtgggggccaacatcctggtgggcggcgccttcgacaacgcgtccatgaaccccaccgagtcattcggacacgccctcatcagctgggaaagcaactaccagtaggtgcactatgtacgccccgtaatcacaggcagcctcgccgacgccatatacgagctgctcttca

SEQ ID NO: 157031 - DNA, 754 bp, Zea mays
  Clone ID: MRT4577_74790C.1
ggacgcctgcaggttccggtccggaattcccgggtcgacccacgcgtccggtgcgagtggcgggtgcgagccggagctgcgtggcggggcttgcaggtggttgcattttgtttctgaatccctgcttcggagacagccatggcagcccgagttcttgtcatcggtagcgggggaagggaacataccctggcctggaagctcgcacagtctcctcaggtcaagcaagtgttggttgccccaggaaacgcaggcactgcgtgcgctgggaagatctccaatgctgctgtctctgtcaatgatcacagtgccctcgctcagttctgcaaggatgaaaagattgaactcgtagttgtcggaccagaggcccctctggctgcaggaattgttggggacctgacctctgcaggagtacgatgctttggccccacagcacaagcagctcaattagagtccagtaagaagtttgctaaagagtttatggaccgccatgaaatcccaactgcacagtggagagcattcaccaaccctgaagatgcctgcagctttattacaagcgcgaactttcctgctttggttgtgaaggccagtggccttgcagcagggaagggagtgattgtggccaagagccaagcggaggcctgcagagctgtacaggagatcatgcaagaaaagtctttcggagcagctggtgaaacagttgttgtgggagaagttctggaagggggaagaagtgccttgcctttgcttcactgac

SEQ ID NO: 157032 - DNA, 373 bp, Zea mays
  Clone ID: MRT4577_74791C.1
aaaaaaaaaaaaaaaaaaaaaaaaaaattaaaaaaaaaaaaaaaaaaaaaaaaaaagagaaaaaaaaaaaaaaaaaaaaaggccaacagcctgctcctccggttgaagagcgactggcctgctttctcgcaactagtcgcccgccttgaccccaacgtctttcgtgtccataaagtccggttcccgccatttggtcccaaaggggctcctaaaacccccagtgaactaaaggatgcctcatccttgtgacggcttaaaaaccccgtcgttctacgtgctttgtcagctttacctttcaaagactaccgtgtctgctggtctctttcagattcaaaattttctgaaacagctatgtttataaagaaaatgtttg

SEQ ID NO: 157033 - DNA, 193 bp, Zea mays
  Clone ID: MRT4577_74792C.1
ggagcttgtatagcggccgccctcgccctttttttttccacgactttttctcattatgaattcaatgcccaaccgttctcaaacgagctcagattcatagacaaagaggactcggaccttggctcacttgtgagaagcaggcataggcatggcctacaacaaaaatgacgggtgctttcttttgctccacaag

SEQ ID NO: 157034 - DNA, 266 bp, Zea mays
  Clone ID: MRT4577_74793C.1
gtgagctacacccactgtacgttaaacatatagactggactcgaactcctacgcagctgggagcctggatgacagtgcgtgctgccgctcgtatatatagtcggatcgcagggccgtctgcaacacactatacgcttgggggaggctcgatacacctttgaagacttcaaaatatgagtggacaatcagcctcagcgaagatacatcatgcgtgctatagctgaaaactgttcatgaggcgctcgagtaccagatgactgatctgg

SEQ ID NO: 157035 - DNA, 413 bp, Zea mays
  unsure (1)..(413): unsure at all n locations
  Clone ID: MRT4577_74794C.1
cnggccggccggggcgtgttttcgtgacgccgtgtcttgtctgtgacgtctgtgacgagcggcgccgcatgggatattctgcctagcagatcggatccgctggtccgtgacgacaacaggacggtccagtgggatctccatacccagtcgttttccaacggcgatgtgcctaccgcttcggggggttaaacgggctcgtgcgggacgatgttggcgccttcagggcgacgaccatcagctggctgggttcatgctcgcttccgaccagttggagggttcaacatgcccgtgagtgtccctggtcgcgcttggctaggttgctagcagaaacagagctgccgccgttgtgcttttttttatcctcgattcaatctagaaattacataccaaaaaaaaaaaaaaaaaagcggccc

SEQ ID NO: 157036 - DNA, 543 bp, Zea mays
  Clone ID: MRT4577_74795C.1
aggcgatgagcaagctccgtcagcggtatgatgaactgaaagagcgctatggggtttctgatattactgtttcagtacaaagtaaagatagatcctcaaaccgcctgtccttcccgttgagttatagttagtgctcatttgggttgagttatagttagtgctcatttggagccacctgactaaattttagtcccgttagatcaaatgtttgaatactagttagaatttttaaatatagtataattacaaaattaattacgcagataaagactaaagataaggactaaacggtaagatgagtcaattaggcctgattagtctattattcgtccatgtgatgctacaataaacatttgctaaccatggagtcattaggcttaatgaatttatctcgtcgtttagtcttcatctatggaattagttttatagttagaccatatttaatacttgtaattggcattcaaacattcaatatgacacagactttaagtagggggacaaacacccctttagtaaatggtgaatataatcgggtgaactttt

SEQ ID NO: 157037 - DNA, 156 bp, Zea mays
  Clone ID: MRT4577_74796C.1
tctaacgcatgatcagtactcttttaccgactcttgctttcttatactcctcttaatctctcgttctcttttataattcggatggtgctcattcacattagtccaccttctccaaagtcatcaatgctttcgatgtccattatgtcacctccaact

SEQ ID NO: 157038 - DNA, 452 bp, Zea mays
  Clone ID: MRT4577_74797C.1
gtcgccgcccgcgtgcccaagaggtgctgcagttcgccggcattgaggatgtcttcacctcgtcccgtggatccaccaagacccttggcaacttcgtcaaggccacctttgactgcctgatgaagacttatggattccttactcctgacttctggagggacaccaagttcgtcaagtctccattccaggagtacaccgacctcttggccaagccgactaaggctcttatgattgatgcacctgtcgagaacgtagaggcttaggatggcggagtaaagagagtctttgctagctcggacttgtctgatgcactttgttttacaatagttaagaaccggttgtcatccttggattgtgctgcgtctggatgtttctatttcctgtcaagttttggatcatggtactgtgatactgcttttatcaatgaatgctgcataattattatgttatcg

SEQ ID NO: 157039 - DNA, 365 bp, Zea mays
  Clone ID: MRT4577_74798C.1
tatgccatgggggccagggatttaaatacggataccaccatgtagcctgacaaggggggagccacacatttacaaccggttcttaacttatttatatgaacacaaattatatcaccgcatgcaagagaaaaaccgaagccgaggtactaggaaccaccgccttctctttgacagtagcacggttcccacggccccaccacctttttttcccctcagtgctcacttcacccacaaggcacagcaggctacccaaggttcccagcagagggaacttcaattatttgtggaacccattcaaaattaccacaacgcattgcaagttacaagaatttaaaacacggtggtgtcggttttgttgttgcccc

SEQ ID NO: 157040 - DNA, 435 bp, Zea mays
  Clone ID: MRT4577_74799C.1
ggcaaagaaaaaaaaagccttttaaaagagccaaagtgccggtccctttgcctgctggcggatttaggcccctaaaaaaaggcgggtcgggcgtttgtttacaaggccagccccattatcggtgccctggagggcggggcatagacatccccaatacaaaaagcgcggggggggcctcccattttcaattcttgggcgagggggcagggcaacaatgggtgccggcttccccaggacgggggaccatcatggggcctgggaggcctccttgagatcctacttttgggggggggggccccaccccttgggcgggcccttgggaaaaaagggaagggggttgggaaaacgaaccccctgctgtttgatgcccttgttggaggggaacggaacccggccccgatcccggaacttctcgatttccgggccccccggggg

SEQ ID NO: 157041 - DNA, 265 bp, Zea mays
  Clone ID: MRT4577_7479C.1
aaaaaacaatcaagacactaaactggttacaaaagaacacaaacaaaaagataaatggatgcgaaaaaaaaaagctatagaactgtagtctataaacattcattggcggtattctggactaaatctgacttgattggtcttcgctctcaggggagaatatactctgcctgttgactgaactggcagtgcgcatcctgctctatcgtcttcgttgaagtggacagcgtatgtgtgatggttcgtgaagatcactggtgtgatcatt

SEQ ID NO: 157042 - DNA, 1628 bp, Zea mays
  Clone ID: MRT4577_747C.1
acggacgcgtgggcggcgactactctcccatcttaacagcctcgaggctggccgcttgcttgtccttgttcttttcccacccggctacccccgtcgtcgccgccgctttccccgtggtttcagagctccagtcggctagctaggccgcctggctaatctccctgccttctataagtacagagatcagggaagcggcactccatccactgactgaccgctcatggcgaaggtccacctctacgtcgccgcggcctgcgccgtcgtcctcgcgctcgccaccccggccctcgccggcgacccggacatgctccaggacgtctgcgtggctgactacgcttccccggtcaagctgaacgggttcccgtgcaaggcgaacgtctcgggggcgggccgggtcttcagctcggctgccccaagtacccggcatgcatgtgtagcagttcgcccacgctgcataaacaactctatctcaacggcgacgacgctcccatcttaacagccaggaagctggcgtcttgcttgtccttgttcttttcccacccggctacccccgtcgtcgccgccgctttcgcccgtggtttcagagctccagcacggctagctaggccgcctggctaatctccctgccttctataagtacaggttcattgtgtgctgtgctcccagctccatcactgacacaagagagcacgctactactcatcactcgccaacgtgcagagatcagggaagcggcactccatccactgactgaccgctcatggcgaaggtccacctctacgtcgccgcggcctgcgccgtcgtcctcgcgctcgccaccccggccctcgccggtgaccccgacatgctgcaggacgtctgcccggctgactacgcctccccggtgaagctgaacgggttcgcgtgcaaggcgaacttttcggcggacgacttcttcttcgacgggctgaggaacccgggcaacaccaacaacccggcgggctccgtggtgacggcggccaacgtggagaagttcccgggcgtgaacacgctgggcgtctccatggcgcgcatcgactacgcgccgggcggccagaacccgccgcacacgcacccgcgcgccaccgagatcatcttcgtcctcgacggcacgctcgaggtcggcttcatcaccaccgccaacgcgctcttcaccaagaccgtcaccaaggccgacgtcttcgtcttcccgcgcggcctcgtccacttccagcagaacagggggcacgggcccgccgccgtcgtcgccgccttcaacagccagctccagggcacgcaggccatcgccatgacgctcttcggcgccgtgccgcccgtgccctccgacatcctcgccaaggccttccgcatcagcagcggcgaggtggaccacatcaaggccaacttcgcgcccaagtagagatccaacgtctgcattcccttgattttctcaataataaatccccgcggtgtgcagttcgatttgttcgtcttcgcttggtttggttcgagacattgctgaccacgcttgttactgctaatttgtgcggaccggagggagttgcttgtgctccgataaataagataaataatcaattctatcaaaaaaaaaaaaaaaaaagcggcccact

SEQ ID NO: 157043 - DNA, 619 bp, Zea mays
  unsure (1)..(619): unsure at all n locations
  Clone ID: MRT4577_74800C.1
gggagctccttacgaatccagctcgcgtgatccctgcccaggagaagttcatcaagctccttgaaaacagccgatatgtccctgtgaaaccagcgccttctggattcatcctcctccgagacctgcagccgaccgaggctgaggatcttgcactgaccgatgcccccacaacagtcgcaggaagcaccggcaacactgcccctgctgcaggccaacaggggtcaggatcatcagccatggccgtggacgatgagccacatccgccacaaccctttgagtacacctcgtgagcgactgagcgtcaccttttcttattcgtttttttttgactttttgagtatgtagtgtgcggaaatttgttgttggctggaagaccttttgtagaaacatgagtagagaattttacttgatttgaagctatataggatcaacgttgggaatctgggatatagcccaggtcaaaacccgcgctcccgcctgtgctcttttttcgtgcaattcaaagtcgagttgacactccangtcaaaaaaaaaaaaaaaaaaaaaaaaaaaaaaaaaaaaaaaaaaaaaaaaaaaaaaaaaccagaaaaaaaaaaaaaaaaaaaaaaaaaggcttgtc

SEQ ID NO: 157044 - DNA, 500 bp, Zea mays
  unsure (1)..(500): unsure at all n locations
  Clone ID: MRT4577_74801C.1
gggcgcattaaaaatgtcttaaaaaacttgcagtgggttttttcatgacaacatggaactgagctttctaacactgatcatagtgctagtcaaacaagctatgacctagaccttggccagtaccaatacctatcatctgtcgaagaccaaaacaccctcactgtaatgaattaaaggcttaacaacttaaaaaccaaatgctacaacagtatgggccctgtgcaggaatgataattaacaaatgcatcaaagcacctatctgaaggacagggctctcacaaattactgggcaatttcctttgacacctaaggacatatgaaagcggccaacactgggcttttatttttattttagcaaatcacatttccatctactttggggctctggggctaccaccacacaggcacagtcacacttagaggcggaattgactcggatgatccccagcgaccatatgccaataaacngatacggttcaaagaatggagcctgtttcact

SEQ ID NO: 157045 - DNA, 194 bp, Zea mays
  Clone ID: MRT4577_74802C.1
agggctgacaacagctcgctcttccactgtcctcactcactgactgcttgaactagcacgataggctgatgctagcagtatcatctcactcaaaagctgctatacggatatacacagaatcatgggataacggcaggaagagtaacatgtgcaacaaaagagagcagcagaaaagccacagaatccgtaaaaag

SEQ ID NO: 157046 - DNA, 4022 bp, Zea mays
  Clone ID: MRT4577_74803C.1
ggggaaccgcggaaactttaggggctttttatatctcaatccttgttcattatccaaggaagtacataatacatcaacaatgtacccatcaatcaatttaactaatttgcacctaaatatttctacatctagattctaacatctagtcatgttatatactgtcgcctaggggctagggtttgcatacctggggaagtctttactcttcactgatcatggctgcccaaaagttcaatgaacttactgaatcagactcgatttttgtttcaaggttgataatgccactgaaaaggccggagctccggccgacggagccaaaattaaggcttattgttttcgtcagttgttgtcgactcatccaagcagacccgagatacccaaaccctcgcaccttctcggcggtggcggcggcggcgtacgggacggcagagatggccatggaggcggtggccacggtgagctccgccagtgggctccttgctatgctgcaggagcctgcgccggagctgaagctgcacgcgctcgcccgcctcaactccgtcgtccacctcttctggcccgagatctccaccagcgttcccaccattgagagcttgtacgaagatgaggagtttgagcagaggcagcttgcagcacttgttgtttctaaggtattttactacctgggcgagctaaatgattcactgtcatatgcacttggtgctggacccctatttgatgtttccgacgattctgattatgcccatgctcttttggccaaagcattagacgaatatgccagtatcaaaaccagagccttgaaagctacagaggaggaagagaacattgatcctcgattagaggccatagtggagaggatgcttgaaaagtgtatttttgatgggaaatatcaacaggccatgggtatggctgttgaatgcagaaggctggataagctggaggaagcgattgttgggtgtgataacattcagggggctctatcatattgcatcaatctttctcatcaatacgttaatcaccgtgaatatcgctttgaggttctccgctgtcttgttaaaatataccaaactttgccaaatccagactatctgagcatttgccagtgtcttatgtttttgggtgagccagaaactgttgcatgcatattggacaagctgctttctggaaacaaggatgatgctctccttgcatatcaaactgcctttgatcttgttgagaatgaaaaccaggctttccttttgaatgtgaggaatcgtttggcctcaccgactcctgtgccatccaaccctgacagtgagccagctgtgcaagatgaccaaactgccagtactgtgggtacaggcacagaagcagctggagatgttcagatgagagatgatacagcaccaaatggaaatgctcacactgtggatccaaatgaggtagcgcatgctgacaggcttgaaaaaattaaaggaatactgtcaggggagacttctattcagctgacattgcaatttctatatagccacaacagatctgatcttttaattctgaagacaataaagcaagctgtggaaatgaggaatagtgtctgtcacagttaacaatatgtgccaatgcaatcatgcatgcgggaactactgtagatacctttctaagagagaacctggagtggttaagcagggcaaccaattgggcaaaattcagtgcaactgctggactaggtgtcattcatagaggtcaccttcaacaaggccgggctttgatggccccctacctacctcaaagtggtgcagttggcggtggcagtccatattcagaaggtggtgccctctacgcactaggtctgattcatgccaatcatggtgaaggaatcaaacaattcctccgtgaaagtcttcgcaacaccagtgcagaggtcatccagcatggtgcatgtttggggcttgggcttgcagctttgggcacatcagatgaggaaatatatgaggacataaagaatgtcctttacacagacagtgctgttgctggtgaggcagctggtattggcatgggcttgctcatggttgggaccgcctagtgaaaaggctagtgagatgcttgcttatgcacatgatacacagcatgaaaagattataaggggtttgtcactgggaattgcatgacagtgtatggcagggaagaggaagctgacacattgattgaacaaatgactagagatcaagatcccatacttcgttatggtggcatgtatgcattggctctagcatacagagggactgcaaataacaaagctatccaccagcttctgcattttgcggtgtcggacgtgagcgatgacgtgcggaggaccgcagtgttggctctcggcttcgttctctacaacgagcctgaacagacacccagaatcgtgtccctactgtcggaatcatacaatccacatgtccgttacggtgcagctctagctgttgggatatcatgtgcaggatctggattaagtgatgccatttccttgttggagcctcttacatcagacgttgttgactttgtgcgtcagggagctctcattgccatggcaatggtaatgatccaaacgaatgaatcctttgattctcgtgttggagcatttaggcgtcagttggagaagatcattcttgacaaacatgaggacaccatgagcaagatgggtgccatactagcttctggtatcctcgatgctggtggtaggaatgttacaatcaagctcctttcaagaaacaagcatgacaaactcactgctgtgattggtcttgccgttttcagtcagttctggtactggtatcctctcttgtatttcatcagcctggccttctcgccaacagccttcattgggctcaactctgatttgaaagtgccaaagtttgagttcctgtcacatgctaaaccgtctctcttcgagtatcccaaaccgacaactcagcagactacaacttcaacagtgaagctgccagcagccattctgtcaacttatgcgaaggcaaaatctagggcaaagaaggacgcagaaagcaaagctaaccaggagaaggccacagaagaggcttctggttctacctcaagcaagacggctaaagctcaggagaaggatgctgatgcaatgcaggttgacaatgccagtgagaagaaagctcctgaaccagaagcgacttatcagctccttacgaatccagctcgcgtgatccctgcccaggagaagttcatcaagctccttgaaaacagccgatatgtacctgtgaaaccagcgccttctggattcatcctcctccgagacctgcagccgactgaggctgaggatcttgcgctgaccgatgcccccacaacagtcgcaggaagcaccggcaacactgcccctgctgcaggccaacaggggtcaggatcatcagccatggccgtggacgatgagccacagccgccacaaccctttgagtacacctcgtgagcgaccgagcgtcaccttttcttattcgttttttttttttgactttttgagtatgtagtgtgcggaaatttgttgttggctggaagaccttttgtagaaacatgagtagagaattttacttgaattgaagctataggatcaacgttgggaatctgggatatagcccaggtcaaaacccgcgctcccgcctgtgatcttttttttcgtgcaatgcaaagtcgagttgacatgaaaaaaaaaaaaaaaaaaaaaaaaaaaaaaaaaaaaaaaaaaaaaaaaaaaaaaaaaaaaaaaaaaaaaaaaaaaaaaaaaaaaaaaaaaaaaaaaaaaaaaaaagggtatttttgggagccgtgaagtcatacatagagcctgggttattcatctgggttattcattgctgcggttttaatctaactatagcttctataatattttgtcttcatagattgcagctactacagtccgacgaccaacggaggtgttctttaggggcaatcatacctaccacatgggcatgtatattatgttgtatcaacaaacaacgatgtctagtatgaca

SEQ ID NO: 157047 - DNA, 2093 bp, Zea mays
  Clone ID: MRT4577_74804C.1
ctgatttgaaagtgccaaagtttgagttcctgtcacatgctaaaccgtctctgttggagtgtgccaaacccgcacgcgtggggactactacttcgacagtgaaactgccaacagccattttgtcaacttatgcgaaggcaaaatctagggcaaagaaggacgcagaaagcaaagctaaccaggagaaagcaacagaggaggcttctggttctacctcaagcaaggcggctaaagctcaagagaaggatgctgatgtcatgcaggttgataatgccactgaaaagaaagctcctgaaccagaagcaacgtatcaactcctgacgaacccagctcgggtgatccctgcacaggagaagttcatcaagtttcttgaaaacagccgatacgtccctgtgaaaccagcgccttctggattcatcctcctccgagaccttcagcccactgaggccgaggaccttgcactgaccgatgctcccacagcagttggaggaagcaccggcaacactggcacagctgcaagccatcggatcccccgggctgcaggaattcggcacgagcagatgtcagtgatgatgttcggaggactgcagttatggctcttggatttgttctgtacaatgagcccgagcagactccaagaattgtgtccctgctctctgaatcatacaacccacatgttcgctatggtgcagccttggctgttgggatatcatgtgcagggtctggattaagtgatgcaatttccttgttggagcctcttacatcagacgttgttgactttgtgcgtcagggagctctcattgccatggcaatggtaatgatccaaacgaatgaatcctttgattctcgtgttggagcatttaggcgtcagttggagaagatcattcttgacaaacatgaggacaccatgagcaagatgggtgccatactagcttctggtgtccttgatgctggtggtaggaatgttacaatcaagctcctttcaagaaacaagcatgacaaactcactgctgtgattggtcttgccgttttcagtcagttctggtactggtatcctctcttatattttatcagcctggccttctcaccaacagccttcattgggctcaactctgatttgaaagtgccaaagtttgagttcctgtcacatgctaaaccgtctctcttcgagtatcccaaaccgacaactcagcagactactacttcgacagtgaaactgccaacagccattttgtcaacttatgcgaaggcaaaatctagggcaaagaaggacgcagaaagcaaagctaaccaggagaaagcaacagaggaggcttctggttctacctcaagcaaggcggctaaagctcaagagaaggatgctgatgtcatgcaggttgataatgccactgaaaagaaagctcctgaaccagaagcaacgtatcaactcctgacgaacccagctcgggtgatccctgcacaggagaagttcatcaagtttcttgaaaacagccgatacgtccctgtgaaaccagcgccttctggattcatcctcctccgagaccttcagcccactgaggccgaggaccttgcactgaccgatgctcccacagcagttggaggaagcaccggcaacactgccacagctgcaagccaacaggggtccggatcatctgccatggccgttgacgacgagccacaaccgccgcaaccctttgagtactcctcataagcgtagatacctgggtccgtagagagttggtggtctgaacttgcgattcccctcgtcctttctataccttttgttatctttttttttaactttctgagtatgtagtgtgcggaaatttgttgttggttggaagactttttgtaggctcgagaattatacttgagtcggctctataggatcaacgttgagaatctgggtgctcttatagctaagccccaacaaccctgattttatcctagccgtgaagtcatacatagagcctgggttataagccccccccaaaaaaaaaaaaaaaaaaaaaaaaaaaaaaaaaaaaaaaaaaaaaaaaaaaaaaaaaaaaaaaaaaaaaaaaaaaaaagtactaggggttgttaccactgct

SEQ ID NO: 157048 - DNA, 525 bp, Zea mays
  Clone ID: MRT4577_74805C.1
ctaataccactcactatagggcataatcggacaggccaccacctacgtatggttatgtctggaaaacgccgctcattatacacaaaaactgtttattgaacgtgtaactcatgatgaaatctaaaagagggcgccaccaatgatcgcatggtgctagaatagctgtgcgtctgtcaaagcatgcaaggatgaatggcagctcacaccacctatgtgagagggtgccagcgttaggcgctgctggctataagaacgacagcaactggctgtgagtcaagaaagtggcaagactcacaccagctaggtagctgattggtagctgaatgggctgctgtgaataagcaagataagaacacatgctgcaatgcagctgaatggaagaaagtgataaactgatgcagctgatagctggctgaatggtatgctatcacaaggcgaataagaagcagagctcatggcatctagtgccgatgaatgcaccaaactgctctggctgaaagtaggcaacaagggttgctagcacaa

SEQ ID NO: 157049 - DNA, 382 bp, Zea mays
  Clone ID: MRT4577_74806C.1
ggcaattttacggactattttcctcatctttaacctcaactaaacttcgactttcggtcaacaatttaccgttcaacaggtgtaattgatattttgttttagacatttcaaaacaaacatttaaacatgggaaacgtgttttccaacttattcaaaggccttttcggcaaaaaagaaatgagaattttgatggttggtttggatgctgccggtaaaactactatcttgtataaattgaaattaggagaaattgttaccactattccaactattggtttcaacgtggagactgtggaatacaaaaatatttcattcactgtgtgggacgttggtggacaagacaaaattcggccattggggaggcattatttccaaaatacac

SEQ ID NO: 157050 - DNA, 523 bp, Zea mays
  Clone ID: MRT4577_74807C.1
aaaacggaatgggggggctttttacggggggggggtccctaaaaaaacaggcaaacaaaacacccaattaggagggggggggggacggaaaaccccgaagaaaccctacggttttgtaaaccctgctcctgccccggcccctttttggccctccaccccaaccccatttaaaaaaaaaacggccttaaaacccccccccctaaaaaaaatttattttggcccgggggcccccttaaactctttgccggggtatttggaaaaaaaaaaaggcccccccggggaaacggaaagggggaccctttccccttccttgtccagggggccggggccaaccgttacaaccgttccaaaaaatggttttcccttggaatttcccgaaaaaaaaagccccccgggagttttgttttaagcttaaaaaaccttgtttaaaacacgggcgttaaaaggcttaatgtttttaacggaataagttttaaaaacccctaaaacggccccctttttgaaaaccaaatgggtgggatcg

SEQ ID NO: 157051 - DNA, 567 bp, Zea mays
  Clone ID: MRT4577_74808C.1
ttttttttttttttttttttttttttttttttttttttttttttttttttttttttttttttttttttttttttttttttttttttttttttttttttttttttttttgggggaattttaaaggggaaaaggaggtttaccgggcacgggtccagctaaaaaaggaatttttacaacggggttttttaaaaggttaaaaaaatttttcccaactttgaaccccaaaaaagggggggactgggcacacccctggcaagggtaaagggaaaattcaaacttttaaaaacccaccggtaaaaaaggggcccccaaaaaaagaccccttttgccttaaggaagggggggcccaatttggttggggggggaaaaaaaaatccccaaattggaggccctgccaccccccggggggacactttaaaagccaaccagttgttttaaaaaaaaacccgggacccttgattttaatcttgcaaaaaaaaaaaaggaggacccccatccatgctcccatgattcgaaaaaggacgtgaaaaaaaaaaaccaaactcacaagaagggattttttagttt

SEQ ID NO: 157052 - DNA, 354 bp, Zea mays
  Clone ID: MRT4577_74809C.1
aggttagggtttttttttttttagcacaacaacaatcaaagaatgtttttttttgtaaaaccatggaacactccacatttcctgatatacaaatagccctaggaaggtataaacaattctcctttaacaccatgtttgtttagtttccagttaaaaaaaacaaacccggccgtttaatttaccggcgggggggaaatgtatccctcaacccccaccaaagtttccacacaggtgggaaaaatacaacagggttgtacagggttgttttacagtttgcacaagtccctaggggttggggcaaacaaaccacattttcgctagcttggttaaactgaaaggatttcaagctttgcc

SEQ ID NO: 157053 - DNA, 598 bp, Zea mays
  Clone ID: MRT4577_7480C.1
aaatgaggcccaattctttcacagatcaaccataggaatattgtcaaactccttggttgttgtcttgaggcagaagttccactattggtgtatgagtttatatcaaatggcactctttcgcaccatctccatgttgaaggaacaatttcactctcatgggatgaccgactaaggattgccctcgaaatttccaaagctttggcttatctacattcatcagctacaaaaccaatacttcacagagacatcaagtcatctaatatacttcttgatgataatttaactgcaaaggtatcagactttggtgcttcaaagtacatcccaattgatcggactggagtgactactgatgtgcaaggaacctttggctacttagatccaatgtattattatacatcccgactaactgacaagagcgatgtttttagttttggtgttcttcttatagagctgcttaccagaaagaaaccatatgcctacagatctgatgacggtgatggtctcgtttcagaattttcatcattgctagatcaagggaccttggttgacattatagatcctcagatcatggaggaggataaacaagtcgatgaagttg

SEQ ID NO: 157054 - DNA, 629 bp, Zea mays
  Clone ID: MRT4577_74810C.1
agcgggggaaccggcgcggccacgaggaggggaggcgcactcaacttgcatccttacgaaacggaggctccgctctgtccgagcgaggacctagggccaccatgcgccgcatgaccgccttcccaacagcagaccatgccaggatggtctatttcgtatggaagccgaggggccacaaggacaagacccgcggcgagaggcatcacgttaccgcctgcccagcacacagaagctcgggctgttctacgagatcggtcccttcaacatgccgcacagcctaccgctcgactgtcatgattatggtcgggccaagggttcaaatcttatctatgtcttcctgcccgatggatctggatataatagcagccaggatgtgggtcacactcaacgaagctgagctagaattagcagtgaaccatatgaatgcctaccagccttctttgatgggcacccactgcaggctagatatgagtgacacataactcaaggatgatatgatgagcattgcattacatgatttgctggatgtttgcattagtgagccccgaacggttagtgcatacgctttaactataagggttgtgttataggctacgcactaactgactcactttgacagtgcaaggcac

SEQ ID NO: 157055 - DNA, 309 bp, Zea mays
  Clone ID: MRT4577_74811C.1
acggcggcatgaaaactgatgacaaacattctctattcttaccgaggaatgggactttcggttggagggatgactgctggatgggatgaaacggaccctggactatactatgtagacagtgaagggggaaggttaaaaggaatgcgtttctctgttggatctggttcaccatatgcttatggtgtgctggataatggctatcggtatgatatgtctgttgaagaggctgcacagttggccagaagagctatttatcatgcgcacattacgagatggagacagtggtggtgatgccagcgttgactacgt

SEQ ID NO: 157056 - DNA, 538 bp, Zea mays
  unsure (1)..(538): unsure at all n locations
  Clone ID: MRT4577_74812C.1
aatgaggcagttctcgctctaatctccaataccttaataagtgtcagatatctttagnatggaatattacataatagtgaaaacgtgccctgacgccctagacactacatgcctaattgagttcatcacatcacacttgagggagaaaagcaacaacactaccgcgcgggcggccggcgacagccaccacactcgtgctggttatttacgccttaacagataccaattgtgacaggccatgaggcgctcgcgtctcagcaaaaaagagcccaactggtccgctgcgtatctgataagaaggggaacgtatgatggttcaccacaggacgcctttgtctgttgcaagatgacaaacgccttccttgtttccgctcaaaaaccacttgaaggaggaactgacgaagtaacaaggcccggacgttcaaacttcatcaaattcacacctgttcttgagggatttttgcatggtgcgaccaccaggaggcgcatcaatgtcactgttcgatcaaaccaatctgagcatagaaaacctgtctgt

SEQ ID NO: 157057 - DNA, 243 bp, Zea mays
  Clone ID: MRT4577_74813C.1
agccgtcgtttacatccgacctctccacctgcaccaccaacaacaccaactcacatgtagcgagagctaagagcacagaaaagtactgagcgggacggaacagctagcgctaggaataacgcacacacaccaccatggcaacgctcggagaacagccggcggaagtcatgtccgtcgagatgcacgcacccgacgggtggaccaagaagttgactcccttgaaaggagggtgcatctcgatta

SEQ ID NO: 157058 - DNA, 286 bp, Zea mays
  Clone ID: MRT4577_74814C.1
catgtctctatctcccactgccttatttactgaatgggtggagaatctaagggaaaaggataccagttggaatatggaagaactaacctctagaactgactgtacctttccttggaaatccactagcaatctatccctattgaaagtgaatctaccagaaggttatggaattccagaaatcacagcacagacaaaggtggctttgggggctgaattagtggacactacttttgttacattctggatgcctactgactacttgtgcttcagagggtcttttgccttt

SEQ ID NO: 157059 - DNA, 432 bp, Zea mays
  Clone ID: MRT4577_74815C.1
actagttctagatcgcgagcggccgctcgcgatctagaactagtcctgaatttaaatgcttttaaaaatgtttataattggttttgaaaccagaaaaaaaaaaaaaaaaaaaaaaaaaaaaaaaaaaaaaaaaaaaaaaaaaaaaaaaaaaaaaaaaaaaaaaaaaaaaaaaaaaaaaaaaaaaagaaaaaaaaaaaaaaaaaaagggggggccctttttaaagaaccaaagtttactaacgcgtgtatgcaacgaaatagtttttttttggggccccctaatttaaattaatgggccgcttttttaaaacgtgggactgggaaaaaccttggggttcccaaattaaatcgcttggaagaaaatccctttttcgccggttgggttttatagaaaggggcccgccccattcgcctttcccaaagtttgccaac

SEQ ID NO: 157060 - DNA, 273 bp, Zea mays
  Clone ID: MRT4577_74816C.1
aagctggcacactcctgaatggaaccccagagtacctcctgtgtggaagggtccctggattttccctaacacccaccgctcacaaccttcagccatgctgatggcagagaagataagaacttggagcccatttctcactggagaggaaaacttgtcatctggctttgcggagaaggttccaccttacgctcgtagtacattatctttactatgtgctaggatatcatatttagaaggacaaggaaatgtagaatacttgaatgagcttgtatt

SEQ ID NO: 157061 - DNA, 793 bp, Zea mays
  unsure (1)..(793): unsure at all n locations
  Clone ID: MRT4577_74817C.1
tttttttccctttgtaaattaaattacacaacacatttatgatgatgaaatgatccagacaatctgcttttacgtacaaaagattactcctagagaaaagcttgagagtaattaaacagctcacacaacgcaaatacatgtgcgaggtccagttgcaactaatttaaggaccagatattacaaacgaatgaatgctagctgctgctaacacacagtagctaggacagacaacgcaagcaagtaatgtgcaggtgatttaattaattaatttgtgggaatggcaacagtaataaaatgaactcccagctagagtaataatgtaataatttagtttaaatttattttggtcagttagttctatgtgtgtgagatatcttcatctcgtacgtttgtagtatcatcgtcagagtctttgccttcggcttgaggtgctggtgcttgtgcttgtgctgatgctgatgaaccaaacaagcggcgacgacggcggctaataacagctgacctgctgctgttgattcgtctgctgccgccaccgcctgctgttttcaatcccaagcaggaacgacgacgaataatcactgacacgctggggctcctccgcagctgctcatcgctgctcatgcatgtagagctgggacgatgggngtccaccaattcgaactgaaccgccaactgctgcagcttgcgtcgcgccccaaaggtttcatattatgaaacattgtcgtggtggcggtcttttgttcggtccccccaggggtttttggggttttttccttttaggaaaaaagggggg

SEQ ID NO: 157062 - DNA, 280 bp, Zea mays
  Clone ID: MRT4577_74818C.1
ctcacgcctccgccctcccaagtgggacgcgggtcactcccgtccgggtcgaccgcgatggcctcccgcctcgccgtcgccgtcgccgtcgccgcgcccgcgtcgtctccttccccggtcgccaccgtcgccccgccccgcgtcgtcctgcgtcgaggccttccgccgacgtggcacgctctccgcgccctccctcgatcccgtggcgcagccgtcgtgtgccaggcccacggcggccaggacaccgtcatgcaagttcctgatgtgagcaaatgcacat

SEQ ID NO: 157063 - DNA, 1212 bp, Zea mays
  Clone ID: MRT4577_74819C.1
tacaggacttggatgggattctaagctaaggactgtgattgcaagtgatgaatactggaagaaaaatacaaagaactgaaatatggccctccagaaaatgaagatttcatgacacaaatgtttgaacatattgcagtggatggatctacatcatgcgctctaggtgaattttatgatgtggaaaatcatgagactgaggttgatggtattgatggagttgattttggcacatttgaggcagactgtgatgctcaatatgatgaatttgtgtttccttttgctagtggcagcaagtcaactcagtcgaagagaggcgtctcaactcagtcaaagaaaagagctagtcctactgttgttaatagcccactgaagcgctcaaagaatcccatggttaaggtcatgaataagattcataatactttggagatcaattgcaatatttcaaacaaagtaatccttggtatgccgtcacaaaagccttttgcattgcctttgtcatgaccttcttctctgtattcgacgttcctgtcttttggccaatacttctctgttattggattgtgctttttgtcctgacaatgaagcgacaaattgtgcatatgatcaagtacaagtatgtccccttcagcataggaaagcagaggtatggcggaaagaaaggccctgccgccagtgcatttaaggagtaaagacggagggagggtgtgggacctcgaaagcagtgcatgtgctatctttgaggcatcctgctggcatggtggtattttgagtaccagggctactgatagtgaacgccccccatattcgctagtggagagtggagattgcaaagaagctgaccagacttttgcattggttgatgatttctgttttacgtgtcggtagtttatgtacaatggcatggagcatagctagtagatcaaatttccggatcctctgttgtactgtccctttgtggacaagttgtggacctgttggatccttgcaaacgcattgtgatccaggacctagaggacaaaatcaaactgtccagcgattgttacttggaccttccaacattgattacttggaccttccaacattgtgatccaagacctggggccacatggcggtgaaacatagctgcttttttttcttctctgttacttggaccttccagaaaaaaaaaaaaaaaaaaaaaaaaaaaaagtactctgcgttgttaccactgct

SEQ ID NO: 157064 - DNA, 379 bp, Zea mays
  Clone ID: MRT4577_7481C.1
ggggggaaacaacctaatagccctgaagtttggttggccaacaaactgaaaccattggtgcaaccacagtagcgcaattttacaaactcattttagggggggaccccgataactcaaaaaatggtttttttctccaaaaaatttttccggttccaaaataatttgaggcaaattttttttggggggaatgggcaccggggggtattcattggaggtggggagggcccagtcccttaaaggagaaaaaaaagaattttttaaaattttttggagggccaatggctttttaataaaattttttgggccatcatttaaaaggaggatccctttttcaagggttgggggaacaaaattgggaataataaagggtgcttgcttt

SEQ ID NO: 157065 - DNA, 493 bp, Zea mays
  Clone ID: MRT4577_74820C.1
agcacgcctgcccgagtaagctccaagccagaggaagtaccctgaggaggcctaacgtctgcacgcgcacaaccgagccttgaggggcggtcgctgacacagctcacggatcacattatgcgcacaacggctctgggcaccaaagtctttcgggcgtacattgttgagaaggatgcacttggagcctatccattcggaattagacgatgtatgcagatgtgtaactagtaacctaaactcgaagtgctattacgcgctttgtaggtagcactcaccggatatggcgcgcacttccgccagtacagagcatagacgctaactctactgagactaatacccttttttgggcgtgtcacacgactagccgattaaatctcaatatacgccgaacgctccgagggcggactcctgtccgcaaggtgagacgacctcacggagctcatgatcacactatgctggttcacagaggatcagctcgagggcctaaagagct

SEQ ID NO: 157066 - DNA, 1121 bp, Zea mays
  Clone ID: MRT4577_74821C.1
attttcctcaccttcccgaccctggtctcctctgccctactccttttctagccctaatccccacggaacggattcagacccgcctgattctccaccaagctggcgtaggctcctccccgctggggcagggccgtgcaccctcccgcccgtgcgcgcctccgccgccgacgtctccgcgtgctacgcaccatcccgcctccgccgcgactcggctccgtctccccacgtccacgcctcagcgctccaggtatcgagcctctgaaacccgtctaaacccctttttttgggtttgactgacagcggagcaaccgctggcacggcgtagcatccacgcagccgcggtggcatagcatcgacgcgcggcgagttcgctcccctcccctcccctccccctggccgcctacaaaactcgctcgaatcttgagcccgccgaccctctctctcccccacccctgtcttctcccaggctccagaacctcgttttgccgtctagtcgcaggactcccgaggctcggaagatggccggcgagagcagcatcaggcggcccctcttcggcggcgccatctccaccgccttccccgcccggttccaggatgtgagcaacattcgcgaggtccccgaccaccaggaagttctcgttgatcccgctcgtgacgagagcctcatcttcgagctgcttgacctcaagggcgaggtggaggacggcggcagcgcgctctggttcctgcgcgacgtcgccaacgagcaagatgcggcggataacttggtggtcgagcactctgggacaattgaactagctggtctgcgctccggggaagcacctgcagtggctggaactgcaattggcaagctggctgtttcaaaagggaggcaaggcagagaagcacagaacattgttcgactttatttggcaaacatacgtctcaagaatgcagcaactgatgtagttatcaccgcatatgagccactgttgataaatcctttgagtgaaagtgcccaggcagttgcagctggaccagcagtacccgcagaacaagcaggatgcttgccaatgtcggaggtgttcagacttgcagtgacgaactttgatgtccatgattggaaccttttcaatggcagc

SEQ ID NO: 157067 - DNA, 711 bp, Zea mays
  Clone ID: MRT4577_74822C.1
ccggccgggaacactacaaccacaaaccacattccatcacaatgccttcagtcggaaaccccaacggcccctgcaagaaccgtcttgccgcccgcgcctcaaaggcccgtaaggaccgacgcaagaagtcccaagctcccaaggacaaggtcgcaaaggccgacacaacacgaggcgcacgaaagggtctcttgcctacaagcggacctagagccaagatgagtgccaagaaggcgcgcaaggtcgagaaggcaatggcgcatgctatgaagcgaaagatggaggctgatggagaggcagagatgaaggatgcccccgaggccgagactgaggagaagaccgaggaggctgagatggctgatatccagtgaggggtgtgcgatggtggaaaatgatagacaaaaacgaacgagcggacggacggattcacgacaagcgccaagtcggaaactaccagcgatgcgattcttgaataacccgcccatgatagcggcaaagggggaacgtcgtgtcgaaagatgtaaatgtggtacaagcacttggatcaacccgtgtcgaagattagcacggattgaaggagcactataacagtgtaccattccatattagagacgcaaaggcgcatattgcgggaaacaatctccagacattcccgagaataatgagcatgacgattcgatcttgaaaaaaaaaaaaaaaaaacccgcggcc

SEQ ID NO: 157068 - DNA, 352 bp, Zea mays
  Clone ID: MRT4577_74823C.1
ggctctgggggcccttttttttttttttttttggcagaccttactgggtgcacctctacctctctattaggacataggagctcaaattaaggatagacaggctgacaggaagcttgagcagcgccacagaggtaccaagcatgtcttaaggctcgcagtaatcagaatctcatcaagagcagcagcccatcactggctgactaacagaaacagagacgatcatcagccgaaggatcgggataggatcctagacttcctagagagaggccgcccattgcggactctcagaagccgagctagctgcggggccagtgcctgcacttgcccttagacctgatggtatggtaagtgc

SEQ ID NO: 157069 - DNA, 160 bp, Zea mays
  Clone ID: MRT4577_74824C.1
gccattactcggagccggcgagctctccgaaatcggcggctattggctccagctaggccgatcagcacattgcgtggcacagcgatgtcgtacgcggaggtcgtcgccgtcgataagcagacagcccgcggtgcgcacggacgctgaggagttctcgcgc

SEQ ID NO: 157070 - DNA, 247 bp, Zea mays
  Clone ID: MRT4577_74825C.1
ctataacatggtcggatgttatagagagacaggtatatataatgatgtgaacgtaggagtaaaaagggataggaagacataaaggaacaattaagatcggaacgaacggatacaccattatatataagtgtctctctataacatggtcggatgtttgattttgtaatgtgggtttgaataatgaaaatgtatgtttgggcttttttagcctcccttgactgttgagaaaaaaaaagctaggggtaca

SEQ ID NO: 157071 - DNA, 338 bp, Zea mays
  unsure (1)..(338): unsure at all n locations
  Clone ID: MRT4577_74827C.1
gtggggggggggggggtgtgttttttatttttttttgggtgtttttttttttttttttttttttttttttgcttnacacacaacgggggttccttgttttggttttgatttgatcatacttgggttcagtttttacaaccttttnntaaaacaccgggggcgttggggggtccttttttctaagaaaatcatttttaaacatttttttttttcncttgcnttttaccatttactgcccggggttagtaatcattttggaatataaaaagaaagtgtcttggggaccctaaaccattttttggatccccaccttcataagcctttggggggggatgctc

SEQ ID NO: 157072 - DNA, 298 bp, Zea mays
  Clone ID: MRT4577_74828C.1
ggggggaaaaatctgctttttgggccttataaggttatataaaacagggtaactaagtacattaatacaatctggggggccttgggggggaaatgatgatgcggatcaattcccatttttgacactgtatgtaaaaagaagatactggtgcgggtgagaaacaagggtaaaaaaaagggggggggagggttacattatcctaaaaccccgacttaaacagatcggcaaattggacaatcatatgaaccaccggattttctcctttttttttttccccccattggggggaacatggggt

SEQ ID NO: 157073 - DNA, 399 bp, Zea mays
  Clone ID: MRT4577_74829C.1
gggtgttttttttttttttttttttttttttttttttttttttttttttttgttttttttttattgttgttttttttttttttgttttttttttttatttttggttttttatattcttttgttgtttctgggggggaactataacatagagggggggggaaaaaagagaaacctttctaagaactttactgacaaaaagggggccggaagcaaaaaaaccctggggggctacgccagcaggtccgtgaactgggggggcggtgtcatggggaaaacgggctgaatgcagaattggggcgtgggggggccgaaggccaaaaagaggggggggaaggttgccgtggcgaaggggccaaggggcttaggggagccaaaaaacgaggtgaacacatacttaat

SEQ ID NO: 157074 - DNA, 869 bp, Zea mays
  Clone ID: MRT4577_7482C.1
caagaacaacctcctccgcacctccatcccagtgggggtatgccaccataccctatgcatcctttcagacctgatgctcctatgggccactttgaaatgggtgatcatcggccacctcctgtacattcgatggaatatatgggtgctgatagaatgccatacttgtatggtgttgaacaaggaggtcctcgcccttttctagaacagccttcgccaagaacctgccctcctgaggcaccaaggacaaacagtgaagttcccagaaacatgtctgatgcagtgccagctacagatttcagaaagggaccagtggcaattgaaaaccaagtggctacaccaacaggcacaactgaagttatcattccttgcaattatataggctttgtctgtggaaacaatggcagtgaaattgaagaaatagagaagatgtcaggtgcttcaattacagttcatgatcctaaagctggcgacgcaaactcaaaagttgttatatgcggggatcccgaagaaacaaagaaggcacagagcctgattcatgccttcatattctgtggtctgtatcaaacataattgatgacttgatcactgtgcagtaccatcgtcgtttatgttcttgaatctagagtagttcccatgggcagatttcagcccttgattggatgtacatgtaccgtcgctaccggggtggatgtaggtagggctgatgcatgccttgtacaaacaacgccgatgtacatttctgtagtcctgtgttttagtttgggggaatgacaccatggaatgtgatgggttggctgcacggacctctgtggaatgtttaaccccatgccatcattggttttcatgatttcatctcttgtttgggaggc

SEQ ID NO: 157075 - DNA, 638 bp, Zea mays
  Clone ID: MRT4577_74830C.1
gcaaaagtagccgcccctcccctggcggttgttcccagaccggctcaggtccaggcatccaggctcagcgtctagggaccagccccagccctagcccctagccctggcggccggcgtggcggcacacagtgcccggcgccttcgtccacttcccggcccggcgtgacgttggcccgggcgcctcgcccattcgatttcgtcttccggtgcagcacaggcgagaagcgcactcagctcgacgacccgacccgtcgatcgccgctcccttccatcaaggcaagtagtcaggaaggaagaaaatccattggtggcgcagtcctaggatcagcacaaagatgcctcctggtcgtgagaaggttggagtcaaaaggccacatggacctcagctatcagggctcaaaggaatgtaacataagaactactgataattcgcttggtgcaatcaagctctgctctaagagagtttttgcgcagcaagaaactactagaattacaaggtcaaagaaaaatattgctcaacctgatgcaactcttacaccaaggcacaacattgattaccacacacagggtatagttgaaggcaagttcaactactatgtttcttagctattttgttggggttcattgtatggtaactg

SEQ ID NO: 157076 - DNA, 397 bp, Zea mays
  unsure (1)..(397): unsure at all n locations
  Clone ID: MRT4577_74833C.1
ggtccatggaacaaggggcacattttttccagcagagaagcaacagtttgccctcaaatttgggaccttactttaattcgaaatattttttataactaacaaggtgggggtggggggggnggggggggnnnaanntaacaccacaaggtcaggggggggaaatattgccctccatcccaggtttggtaagacccccaacagatgagttacactttaaccactggaagctccccacacttgctgatgactacttttttttttgggcgggcacctttttgggtctcctgggacttgatcaaaattacgaaattcattcctttcagaaactggccaaaaacgaaatgcctttcgttcaaccaaagggttttgacagggcaaataaaaaactggctgccat

SEQ ID NO: 157077 - DNA, 1017 bp, Zea mays
  Clone ID: MRT4577_74834C.1
ccggccgggagacacacaatgatccattgcttatcacccagccagaccaggcctgcaagagatccattgttgcaagggaagcccaacctaaggcctaacccgcacagggcatagtacccatcaattctttgctggcggcctaagaagaaggatgtgctccgccccagtcgggatgcaacaaccaggtcgttcagccgcagattagcaggccgcctgcgctcccaagctcctcctttcccctcagcctcccctcctctccggtgtacgtctccgccgagatggccgccccgctccggcggagcctcccctcccttggtcgcgcgcttctcacgccggcgccggcgcggatgctctccgcggaggcctctgatgccctcgttgagatcaagcccggggagatcgggatggtctccggcatccctgaggagcatctccgccgtaaggttctaatttattcaccagctaggactgcatcccagcaaggttcaggcaaagtcgggaggtggaaaattaattttttgtcaacccaaaagtgggagaacccgttgatgggatggacatctactggggatccatatgctaatgtcggtgaagcaggacttacgtttgacagtgcagagtcagcaaaggcgtttgccgaaaaacatggatggaattatgtggttcggaaacgccatgcacctcttctgaggcctaaggcctacgctgagaacttcaagtggagaggccctccgaaagcggagcaagcatgagctcgagacatctgtgatgctgacattggcacgatgtcgttttcctcctggctcgattttattttgctttcaaccgtgcccattgttaaagtacgaactagagtatgcatctatcaaacttgtaataagcatgatgtgcaatcaaacaaaatggtgtacttgtacttccaaaacgttaattcgtggatgacattgcttttgcaaaaaaaaaaaaaaaaaaaacgccaacaaaaaaaaaaaaaaaaaaaaaaagtgggtcttattt

SEQ ID NO: 157078 - DNA, 443 bp, Zea mays
  Clone ID: MRT4577_74835C.1
ctcgaggccggccgggccgagacctctccactcatcaccagctgccattgccatctactgacctgtgacctccgcattcccaaacagcccgagcgagcgagctagcagagcggcggcaggcacctccctcctcaaggaacatggcccgcacgcagcagttgtgtcagtagtggcgaccgccgtggtggacttggtgctgctgtacgatgcgatctcctacgctgccatcccttttgcacttgctgcctccagcatgttcatgattgtccgcgaagtttacgacctgtctcatggaattgccaacaaggagtgatctaccacgggttaactagtttttctacttggcatggaagcaccatccagactatgaagtcttctttgcttgataactaatactgtcaaagaactactcgactacatttttgcatcatatttctgtttga

SEQ ID NO: 157079 - DNA, 512 bp, Zea mays
  unsure (1)..(512): unsure at all n locations
  Clone ID: MRT4577_74836C.1
cccacgcgtccgcgcacgcggccgcccgagcggccaggcacgcgcgcggcagcaggaagacacccncaagagccacagagatggaaaccncgacgcggctgaaaagcatggggaagctactgaatacaacggccctataatgacacatggtggagaggagcggggcgtcaccttatggtgcgggggaggttgtggaaaattgagtatacctgccatagaaatgcctgggctgggaagcttctgcctcggtgttgggctcccaggtagcgcagagggaagctttaatcagagtgagagtttgtaattcttggagaacaagctggtcttcgttgcgtcgatactgtcaggggcttccaaaggattttcattgacttcgaaagatgagctcaaggctgaaggtacctcacgttcgggctctgctgtgccttcactcaaagtgaatcttgtgcaagcgttgggatctgactgtccgtcgtcaccagcgagaacgagggagctaaatccgaccttgc

SEQ ID NO: 157080 - DNA, 177 bp, Zea mays
  Clone ID: MRT4577_74837C.1
ctcaagcatggattgaatccttttcattctcatcatccgccacgtgtgggacggactggtaattgatgtggtacgtgcaaatactgtcaaaagttcaaattttaggacacatgatcctgaacaggtacactgtagtcacaatggactgtattttagatcaaacatttgagggcaaac

SEQ ID NO: 157081 - DNA, 470 bp, Zea mays
  Clone ID: MRT4577_74838C.1
acagcttatcaccatgtacacaccttttattaacgcaagagacatgccaacgtaccctctctcattaaatattgattccgttctcatcgtattaaaattgtacacctttcatgaagccagacggtcctaatccggaagacgtcaaaccgccagtctaatacgctatataacacaatatcatccctagacttaactaaaccttataccatcatatgcttgacgaaacataactcgtagatcgtcttattgtcaaagaaattctaaaatatgctctagaaaggctcctaaggaacaccaaaggccacagatcgctagctaggacttaaacgtaagtctaatgcttatgaagtgattcacgacgctcgattcatgcgaaatgttgtcgaccttgacgatcatcatcaagcgctttatcagggggtacatgataaaggtgccttccatgctgaagtgcacatcacatgaccgaa

SEQ ID NO: 157082 - DNA, 308 bp, Zea mays
  Clone ID: MRT4577_74839C.1
ccacgcgttcgcccacgcgttcgccgactccttcgaatcggagcccgtgtccgtcgccggcggcttcgccattcgcctccggtgcccacgagctacgcttcctcctcttcgtacgctccgtctcatgacgtgaaagagtataaactgtcatgactgacaggcttctcacgaatctaatcttcatgtgctgaaccgtcgatcgcacggccatgctgcaagcctacccccatgccatcatcaatgcatacaaaactggaactgcccaagaagctataacatggtattagactgactaacaatgccatgac

SEQ ID NO: 157083 - DNA, 684 bp, Zea mays
  Clone ID: MRT4577_74840C.1
cgtaagcttggatcctctagaacggccgcgcccgccgacgacaaccgggggctcctgctgctcatcgtcgtcacgcccgccatcggctgggtgctcttcaacatcctccagccggcgctcaaccagatcaaccgcatgaagtccgactgagctgctagctggcaacaacaccggggacggcggagtgtgcgtatcagcggctggacggttgtaatttatagcgtgaagcatggttggtctacgtgccttgttttttccatcttcgaatcttgagcaaatgcagtacatgtacagctccctccctctcgtctcaatctgttacatacatatacccacataccgtatcctctgtggtggttggtcaacgcaaacgctcctcgacgctggacaactcgccggcgagcgctccctgaacgccggcgccggcgtgaaccgtgatagacaagatgcgcgtcgtcagcgccgcgcgcccctcaccgtcgtcatcggactcgcccctctccggcgttgcgcgcgcccagctcgcagcagaggcactcacgagttgcgtgtagcctctgtgcttctcctccccgtcgcgtcatgcgcatgcgcttcatgttcgtctaaacagagtgcattgctatatggaacatattaaacagttatttttttccgtatgcttaattattctagcttttatct

SEQ ID NO: 157084 - DNA, 526 bp, Zea mays
  Clone ID: MRT4577_74841C.1
taaaaaaaaaaaaaaacaaaaaaacaaaacataaaaaaaaaaaaaaaaaaaaataaaaaaatattttttttttaaaaaaattataattttttttttatatttttaatttttttatttatatttattaatatttttttaccttttcccgaatcccccttttgggctatttttgatattttttttaaccttgtgggcggttttttctttcttttaaagggccatattccccttttagggaaattgtttaaaatttattttgcctccttttttcctctggttccttggaaaaactttggctttcccaaatttaatttctttaaataattccccctttttccgattggtataataccgaaaaagcccgactcaagctcctttttaacagttgtccgccctgaatggcgtttgcaccccccatatccttgccctttatgcctgttggttttttttgttcccctctaggtgcccttaacatttttcaccgcctatatccacgcccttttgatttttttcatttttctttttc

SEQ ID NO: 157085 - DNA, 330 bp, Zea mays
  Clone ID: MRT4577_74842C.1
aaaacaaaaaaacaaaaactgttcaagcaaaccgtttgttttacatttcccggaccccatttccctggttttttggcccctatatttttaaaatttaacccccccgacaaaaaaaaaaaacaggcctttgggcagccccctatcccacctttggccccccccccgggaaaggaatcccaccaaccggggggggccctgtttgccaacattgaaaccggtggggaaaactactttccccggtccattttttttcccggggccccctttggggaaaccctcccgggggggggggcggaaccaaaagactggaataatgggttggcccccaaa

SEQ ID NO: 157086 - DNA, 289 bp, Zea mays
  Clone ID: MRT4577_74843C.1
gtgtttctcaagcaggtcaagtccgggcgggtccttatctctgggcctttcatgatcaatggtgttccgatccgccatgtgaaccatacctatgtcattgctacatcaaccaatgttgacatctctggtgttgatgtcgccaactttgacgacaagtacttcgcctgggtgaagaagcataaggtgaagaagaccgagggcgagctttctgagacagactaagaagcatccaactcactgcctgacttcaagaatgatgaccagaatgctgtggattctgctctgatca

SEQ ID NO: 157087 - DNA, 280 bp, Zea mays
  Clone ID: MRT4577_74844C.1
cgcgtccgaagcaggatttcaaggaggcactatgatgcatactggcaataaggtctttcatctgaccacccctaggatccttacagggaccgtgatagaacctatatagccagctcgattgccttatctatagctgcggatgatcctattccagcaactgtggggctttagagctgactataaggctgcagaagataaacatcactggactggggatgttgtaaggaagagtcctgattcacagagatctccccactgacagaaggttgctccatgagga

SEQ ID NO: 157088 - DNA, 297 bp, Zea mays
  Clone ID: MRT4577_74845C.1
cccaaaaaaaccccttcccccaaatggaatggccccccctcttaaaattttgggttctgaaactttcttgaaaaaggggggaactggccctgtttgcccaaaatccctggggaaatggcgcccccccccccctttcaattaatccgggccccgcaccgagcgggggggagggaccccaacaaaccggttttttctttggatcggaggaaccctaggtccggggatctttcatccaacaatgcctcccaaggggggggccctcccgacttataccccctgccccccgtgtaggccccc

SEQ ID NO: 157089 - DNA, 381 bp, Zea mays
  Clone ID: MRT4577_74846C.1
cggccccttgggtgaaactgccaccagccttttttttattttatgcgaaagcaaaatttagggcaaagagggccccataaggcaaacttaccctgtaaaaaccaccaaaggaggtttttggtcttacctaaagcagggcggttaaggctaaataaaaggatgctgattccatcctggtggataatgccccggaaaagaaggttctggaaccaaaaccaactttttacttctggacaaaccaagcttggtggactccttgctcaggagaagttatttaagtttctggaaaccagcgcttacttccttgtgaaaccaggcccttttggattaatccttctccaggacttctatcccattggggctctgtactttgcacttgac

SEQ ID NO: 157090 - DNA, 465 bp, Zea mays
  Clone ID: MRT4577_74847C.1
tgagctcctgcgtgttctccggcgggattttcccttgctccggcgatcccgttgggagaggttcttccctgttcgcgctcccttctccgtcgccgctactccatccatagatcgatctatctatcggatccactccgatggagaaacagagcagccaagaactttcgatcgaaaacaaaagcgctggtttcagtagggtggagaaacctaaggtggcagagattcagcttcaacttctaccctatgacgttttgcgcgacatactgtcacggttgtcaatcaaggatgtcgggaggatgagcacgctttctggtgaatggagacagcagcggatatgccacccagatctggtcttcaccaaagacacctttggcatcagtactgacccagatccggacttcaccaaaaccattgatgccatcattagagacacggatactaaacgagcatcctggactgctgaat

SEQ ID NO: 157091 - DNA, 1400 bp, Zea mays
  Clone ID: MRT4577_74848C.1
tttgatttttccccttgcctacagatccaccagctcattcatcacttgtgaaaaaaaagaatatcagtgttgatggtaaaaaagtatggatgcttaaaagtcttgctcatttcttggtaggttggatgtggctccaccagctctgcctccctacttcctctactgctgcggctactgctacatcatctatcgtgcctgtttttctaggaatcttaatggcatcaggctgacattttgttcaactcattaggtgcgtcaacactgaaattcactcttacggtcatgttttgttattgcattagagtttgcagcatgaatcagggacatccaatgttgttagatctattaatgcgatgttctctgtcttatttttatcctacaagtcatttcgagatatgtggttgctgatcagatgcgggcaatgtcaattttattattggaattgttaacttgacactcattcaccttctggactgaaaaccaagacagtactgcatctatttagttaaacatatattacttggctgctaacacaactaagagaaatactgaaaatcaatccttcagtctatccttccataggattttaatttgtgcatgatagagagttttacatgtcagaaatttatagatgtcagagagttcattgcagttcatctccttcactgcatcttgcatattttttctctctttcagctggttacagtaacaaggaaccaccattttgatgcaaaggtaagcatctgcattttactcgagttacatgtcactgctaccccttaatcccggggtgcctttgatttgcgacatccaggagcagatgcgacaggatcacaagtaggaggagctgcgacgatgctgtagcgagagacatgggtgccgaggtcgttgtgctgcggtggtggcaggacaggaaggaaacgaaaaagcaggagccagggttgttcaacaacgtgaccgagtcgctgaggcgaggaagagtaaggtgaaggcactcgtcgacgcctttgagactgacagagcgtcatctcgctgcaggaaaccagcaagcctgctgctgctccagctatgaaagtaggtgtcgtgccatgagtgcttcttgacctgcagtgtgcatgatcacctttcttggaattttaaactttttttggttgttagtgaccgtaaaagtggcgcttgttgaggtttgctcgttcccatgtaaactgacttttctcatgggagttttcatacttttgtagtgctagaaaaaggaaagtctgtacaggttttgtgtctatgcaaggcttgagaagttggcattgtactgataagtgataagtaaacaagttattgtaatgatttaaactagattgttttgaaaggaaatggaatgcataaagcaaaaaaaactttatgtt

SEQ ID NO: 157092 - DNA, 325 bp, Zea mays
  Clone ID: MRT4577_74849C.1
tttatttgccacggtgtctacgagatccactcccacaggatcccgtcagatgaggagatggccgaccgcatcgacacgatgctgggggagctggtcaccaacatcctctgggtgaactccgactgcggtctcaggactctaaagtacaaggtggagaagcctcgattgcccaacatggcgtgcgccgataagttaatacgtaccgagtacaggagtggccaagtgagcagctactttacgagctagtcgctactgctgaggactctgatgagggcagatcctgtccaatagacccggatcgggaggagccagaggcctgcttctg

SEQ ID NO: 157093 - DNA, 420 bp, Zea mays
  Clone ID: MRT4577_7484C.1
tatttttttctatatacaatgttcctagtgggttttttaacagtttgtgctgcattgccgaccaccaaacagacaaaggcgctgcgatcgtggcaacgaccaggacttcactagtgtccgaaagaaagggacatccctatccccttgtatctgagtcactgaaactatgactcacaaacagctaccttaaaacgcataatatgccgtgagaggcactcaatgaggccacgctgcagtcggcatagcacctgaggcagcatacaagcttgttatccgacttacactggccataaccacgttatttattaccccgtacataggagaataccagctcattgaggctagccgtcgaaatggactgcctactaaaagtccgaggcagcacacgcactcggtgcctcatgtataccaagcacacga

SEQ ID NO: 157094 - DNA, 922 bp, Zea mays
  Clone ID: MRT4577_74850C.1
accttcaagtgactcaaccagttgcaggaaattactacccggttaatctcggagtgtacatagtagatgagaaatatgaactatctgtccttgtggaccgtgctgccggagcatccagcattcaggatggtcagctagagattatgctacacaggcgtttgcttaaagatgatggcagaggtgtcgcggagccacttgatgaagtggtttgtgtggatcaagattgccaagggctaacggccaggggcacttactatatcaatgtcgagaagctaggccatggagctcattggcgccgtacatatggccagcaagtctactctccctttctccttgcttttactcatgaggatgcgacaagctcaaaaccctacagtgtggccaaagatagtatgatggatgggaattacagccttcctgacaacgttgcgattgtcactttgcagaatcttgatgatggtaccacactactccgcttggcccatcttttccaagctggcgaggacccgagatattcagaggtagcagaggttgatctgaaaaaggtctttggaaagagaactatcaaggaactgaccgagactaacctctccgcaaatcaaaagaagtcagagatgaagcagctcaactggagagttattgaggacgctgaaagtggtcctgccccggtaaaaggtggcccagttgattgtcgtgctctggtcgttgcgctgggacccatggagatacgcaccttcttgctgaaattttaatcgcatttaccgtgcttgtaattgtaaagaaaaaacaatgataaatggagaacttgctatcgttatttccttttgtaaaaaaaagatgaaatacccaaatagaacgttaaatttgcgcaaggtatgtacaatctacatcatgtgttttctattatatggttgctcatatt

SEQ ID NO: 157095 - DNA, 300 bp, Zea mays
  Clone ID: MRT4577_74851C.1
gataagcattggccatatccatgattttgaccactaataatgttgcttatagttgacagaagctctcacttcacttctagatggagtccttttgatacttggggtgttcagtaagttggtgttcaattgcagtatgttgcataatttcatagctttcttaatatgccaattctgttgatggagctttatagacatgccaatttataaatggagcatgttgcagttagatgtagtctatttcagaattgagtgtacaaatagattttacttataatgtgttgcataataggactaagcttt

SEQ ID NO: 157096 - DNA, 662 bp, Zea mays
  Clone ID: MRT4577_74852C.1
cctcgaggccggccgggaggaaggaagggaagccctcgctctcgctcaccacccctgtctgccgtctgcttatccctggagcagaccggagtaaggccagccaaccaaattgtctatctactgaagggaaggaggaaaaaaaaagagaatcaacaagttgttgcagctgcagctttaccaattcccatgggttccaagccgggcgaggcgccaacctgggcggaccagtgggcctccggcgagggcgacgggagcagcgcgaacggcaaggcggccggtaagaggacggtggccggcaacgtgaaggcggcggcgtcggagggactcgtcaaggccaaggcggcggcgctggtcggagcgcacaagctcaagaccgggacgagctcgggcatcaagtgggtcagggagcagtaccagaagaagaggacgtcgtccaagtgagctgcaatgtgtcaattgtgatggaggagcactgctactctctgttctgatctttcttagtgaagcccattagactagaggaacaggtttttctcttgggtggagactcttcttggacgcttttggttcctttggatggtgagcttgtaagccgctggccttttttttcattattatgccagactagtatgatttttgcaaaaaaaaaacggacgcgtggg

SEQ ID NO: 157097 - DNA, 944 bp, Zea mays
  Clone ID: MRT4577_74853C.1
agccctcgctctcgctcaccacccctgtctgccgtctgcttatccctggagcagaccggagtaaggccagccaaccaaattgtctatctactgaagggaaggaggaaaaaaaaagaggtaacttgaaactgtcagtctcggcattgcataatcgcattcccaggtcccttcctttcgattccgtaagctgttgtataggacgagttaggaacatctctattctctgtcggaaaaaaaatctttttttttaccatgaactgttccgtcgatctaccaggaaactggagccttctgctgttctacttatacagaaattcaaaacgccatgtgtggaaggaggaaaaaaaaagagctgcagctttaccaattcccatgggttccaagccgggcgaggcgccaacctgggcggaccagtgggcctccggcgagggcgacgggagcagcgcgaacggcaaggcggccggtaagaggacggtggccggcaacgtgaaggcggcggcgtcggagggactcgtcaaggccaaggcggcggcgctggtcggagcgcacaagctcaagaccgggacgagctcgggcatcaagtgggtcagggagcagtaccagaagaagaggacgtcgtccaagtgagctacgctgcgtcaattgtgatggaggagcactgctactctctgttctgatctttcttagtgaagcccattagagcaacaggtttttctcttgggtggagactcttcttggacgctttggttcctttggatggtgagcttgtaagccgctggccttttttttcattattatgccagactagtatgatttttgcatagttttatgctctgtcaacagctaacaggtattaggagaaaatttaagggcccctttggtagggcttatttttcagcttcggctctggctcatgcaaaagttgtgccaaacacctctttttc

SEQ ID NO: 157098 - DNA, 420 bp, Zea mays
  Clone ID: MRT4577_74854C.1
cggacgcgtgggcgctcaccacccctgtctgccgtctgcttatccctggagcagaccggagtaaggccagccaaccaaattgtctatctactgaagggaaggaggaaaaaaaaagaggtaacttgaaactgtcagtctcggcattgcataatcgcattcccaggtcccttcctttcgattccgtaagctgttgtataggacgatggtagggtaggcagagttaggaacatctctattctctgtcggaaaaaaaatcttatttttttaccatgaactgttccgtcgatctaccaggaaactggagccttctgctgttctacttatacagaaattcaaaacgccatgtgtagaatcaacaagttgttgcagctgcagctttaccaattcccatgggttccaagccgggcgaggcgccaacct

SEQ ID NO: 157099 - DNA, 159 bp, Zea mays
  Clone ID: MRT4577_74855C.1
taccaacaatggtacccaaaatatttcgcctccttatgctcctcggactttctgcaagtgctgatacagcgaccattttcccaaaatgctcccaagatcctatagcttaccttcttaccgcgtaggtgggcaccatcagtgtcttccgtaagtgaaaaa

SEQ ID NO: 157100 - DNA, 230 bp, Zea mays
  unsure (1)..(230): unsure at all n locations
  Clone ID: MRT4577_74856C.1
atctatccttttttgatattatatgttgaactgacctgggttgctgcctttcatttgcagataatgctggagtgattgtgaatcccaagggtgagatgaaaggtatgaattgtngccacaataattcctccagcattgggcctattctgtttggcatggcatgacaaactatcaaatttgtcttgtaggttccgctatcactggacctatcggcaaggagtgtgctgatc

SEQ ID NO: 157101 - DNA, 141 bp, Zea mays
  Clone ID: MRT4577_74857C.1
tagcgccagatggcatggacttcgtcatcgccagcatcctgattgaccactctccagcctatgctgccaagttcctttcaggatggtcatcccgctcgtgacattgacacaaggaccaccgaccgacctaatagattcggt

SEQ ID NO: 157102 - DNA, 309 bp, Zea mays
  Clone ID: MRT4577_74858C.1
ggtggcagccaaacaagcaaaacgattttttttgcacagggcctgcaatccgggtgggggacactgaaaaaaaaaaccggaaaaaatttcgctggaaacaggctaatccggggcccccctagaaaaacaaaggcatctttttaggcctgaactcacgcgggtaaaggaaagtacaggagccacagggctgagggcaactccaatctggctactgtttactgggaggggggacttcaatctgacacggtagatacacgacctagggttgacgctcgaccgcatttccttcccagggccaggggcccggga

SEQ ID NO: 157103 - DNA, 310 bp, Zea mays
  Clone ID: MRT4577_74859C.1
gagccctcagtcggcggccgccctttcctttttttttgttgttttttttgatattttcgtcattatccccccaacataacaggttgatcacgactaaagctgcggaacctccgcgataagcaacccacacagcaaccccggaggaagaaaagggacaaacttccacaactaaaaaaggggccccccccaaaaggccctaatttgaggccgagccccaccccccagggaaagagggccaccctaaagggcggcgggccaacaaacccaccagggggaatttaccccccagggacgtaaaaaggggcccccg

SEQ ID NO: 157104 - DNA, 298 bp, Zea mays
  unsure (1)..(298): unsure at all n locations
  Clone ID: MRT4577_7485C.1
cgccgtagtaagtttggatngtgtaggaggggcgngttttttttttttttttttaataaggatattcatatttttttgtattatttgattataaatgaatgatntatggagtgatttaaggggattggaatggaagaaattttgaatggagatggtttattttaaatttttagatagaaatgaatatatgaggattgttgtgatgatggattattatgaaaagagaatttatagaatgttttttttgtggtataggagtatagttagaggtttttgagggttattaaatgattatttt

SEQ ID NO: 157105 - DNA, 368 bp, Zea mays
  Clone ID: MRT4577_74860C.1
gggggtggggttttttgggggaagaaacactaaaccgggtaaatccttgttttaaaccgccacttgggactcgggaagacctttgagtacatgacacacacacatgctttacaaggttcaaatacaaaattcaatcacaccccggcggggggtgtataaatttagctcgacgtccttatttatttttggactacacacacatgcatgcataaacatgcgtgggttggccataaacatgaacataggttcgggtaccttaccatcccagaacggttgaaacagagacaagggatgagcaacaagggaatctatttttcttcaccggcacctttttttttattaccacgggcaccaccaccggcaccacc

SEQ ID NO: 157106 - DNA, 575 bp, Zea mays
  Clone ID: MRT4577_74861C.1
ttgggtacctcgaggccggccgggacctgactagaacattaactagcttctcctagctctactgaggatctctggattgctgcaaagctaccagagtacgcaggcagcggagggaggacgacatccgactgcgcgccaacaagttctaggtagcagctcggaccatcggcacgcggccacaggcaacggacgactgggactaccaggagaccacgctcggccagctgtcttccagcctcgggcagctcagacccctgaacctgcataccgctgctccatcggcggagatacccaccaccttcctcttcctctacctcaccatccgcaccgcgatgactgatattgaaatccaccaccacgagcgcgaccgctgagcctcacaggaggatcagctgaaccaacgacaggctgatgttcgccctccgctactgcacaggcaggatctgcaagcggagacatcaacccggcgctgcacctatcagacaggtcgtgtgcaggtaccccgccctcagcatggtgagcgggatacatcctcctggaccgaatgaggcgctcttgcggagcgtactaggaaa

SEQ ID NO: 157107 - DNA, 360 bp, Zea mays
  Clone ID: MRT4577_74862C.1
gaagagggacgagggtaatcacagaggtctgcgacacggagacctgggtcccggtgatcggaggaactgagctgaccatgatcctgacgacaggactgctctgaacgctgacgagccttggccacaggacagactatatgatcatgcacaacatgggcctggccattctaatacaagccgtcctctacttagcgctgataaccagcttcctcatggccatcgggcttcacatctacgcgagctagtagacggccggaacatgatgacatatacagactaacaggatgctccgacggaggcatccacttcaagatctgcggttccagctacggtcgtataggctgtctctaattctatgga

SEQ ID NO: 157108 - DNA, 285 bp, Zea mays
  Clone ID: MRT4577_74863C.1
cgtgcggccgtccggtcgaggcgccggcgggccccctatgtgcaccgggatgtccactccgcgtccacaaccgctgcgtccccgacggcctccaccagacctgcttcctccgacaggcctcgccggcgcccggcagccctgaccactctcgttaaccttagacccccgccaagagcgaatatacagctctctcatgccttctcagaagccacgcacgcctaccgcagatggcacacaggagcgcctccgctggacaggtgggaccaggcccgaagcctatatgag

SEQ ID NO: 157109 - DNA, 1839 bp, Zea mays
  Clone ID: MRT4577_74864C.1
ttgggaccctcgaggccggccgggaagaagcacactacgctccacgcatcgcgtagacggcgtagttggctcgcgggaccccggagtcagcatcgcgccgctctctcccgaagctcgcgcgtctcctcggcgcccggagcgagcctgaggcgcgcggacaaacgatggcctcgccggcggcggcgacgctgcacccttcccccaccttccttgcctccggccctcgctaccgccgccgcggacatccatcttcgaaggtcagcttccgaaggttggcgccacgattaaaggtcaatgcactttttggatggcctaggggggacacgacagcacgtgaactgatccctcctgctgaatcctatacgctctcagggtcagcctcagaggtaggtgcaaaaccacgtgaggtgtctatatctgttgcttcttcaatcatggacattcctgctgcggattgggatgcctgtgcgtgtgatttagatgatcctggaaattttaaccctttccttacttatgcattcctctcaagcttagaagaatcaggttctgcggtcaaggaaactggctggttaccttttcatattgttgcacgggatgagaatggacatattataggtgttgttccactttaccttaaaagccattctacggccggggtttgtgtttgatcaatcatgggcagaagcttactacaactatggccttgaatactatccaaagctccagtcttgtgtgccttttactccagtaactggtcaaagaatattacttcgaaatacatcataccgtgatcaagtttttgacgcactagtcaaaggtttgatgagcctcactaccaagatgaatgtgtcatcattacatattacgtttccgtccgaaggtgaattcagcaaactgaaggatagtgggttgttacaaagaatcgggttgcaatatcactggagaaatcggaattacaagagttttgatgagtttctgatggatttgaagcagcctaaacggaagaatatcagacaagaacgtaaaaagattcctgcccaaaatttgcaaatgaagcgacttcgtggagacgaaataaagagcagacactgggacaccttctataaattctaccgtaacacaactgataatcattggggcagaccatacttgacaagggatttctttcacctcttgggagaaaagatgggggataatgtgatgcttatagttgctgaaaaagatgataaactagttgctggcgctcttaaccttattggaggtgatacactatttggccggttatggggatgcctgccagatgcttactttcccaatttgcattttgaagcttgctattatcaggcaattgaagcagccatagagttaaacctgagtaaggtggaggcaggtgctcagggagagcacaagatccagcgtggttacctcccagtgacaacttacagctgccactacttttcaaatcctggttttgcggcagctattggaaattatcttactcatgagacggctcaggttaagcatgctattaaggtccttcgtgattccggaccatacaaggaagacatactgaaagagttcgctgctcaacaagacgacgacctgtagaatacagaagggacttaaactatttgcatactgttttatagaactaacatcttctatgtagcaacagggatacaggtcatccaattaagtattaccaaactacgaatcccacattttggacactgctaggactgtaaatatttaacattgtaaatctaaacccaagcattctgcgatattatgcatctccgcgccggaaatgatttctggggcgatattacatcaaaccac

SEQ ID NO: 157110 - DNA, 255 bp, Zea mays
  Clone ID: MRT4577_74865C.1
tctctcaaataccccttcaaaacactttttgtttcattattaacaaatttgcttcccaagtcacaaaaaaaatttgttctttcgtcaacacaaaccatttttgtatttaacccgaaagcggccttggttaaaatcattttttctatccttgttctaaagaagaaacaacatttttctgtacaaattcaccttcaaggaattcaccacattgtccctttttttcaaaaaaaaacttccctctggaattaaccaacc

SEQ ID NO: 157111 - DNA, 290 bp, Zea mays
  unsure (1)..(290): unsure at all n locations
  Clone ID: MRT4577_74866C.1
ccacgcgtccgctgagtcagagaggtgcagatcaatgcgtctgttgttaanccccancnncngcattagtagtctgcttcctntnnggctccaccttcaccatatcatcccatgccctcccgctgtcttcacccctgatacccaaatctccctcctttaccgtccctttcttcttatcctgactcaagcaccactctctccaaagattcttccacctattcatctctttntacttccgcccttcgtattgtcataatcagcaagtgctacactactccaataatgagagg

SEQ ID NO: 157112 - DNA, 469 bp, Zea mays
  Clone ID: MRT4577_74867C.1
aattaaaattggcacagccctacaaccatacatggggaaaacaggcatggacgggggccaaaatacatatccataaccacatatcctaaaacaggggtccgcccaaatttgggggtccccccgtcgtccgtccggggtaaaaaaaaaacggaaacggagggaaggaccggggttagaaaaaaaaacgtttaatttttgcatcggacccagggaatccaaggcaaacaaaacgagcttgcaaggcaatcaggggcaaagggggcacataatgaggccgttctcgttgcacttggcgcacctttttggggggggggggggggtccctccggccgggggggccaccagaaccctgaagttgccggcgaactcccagaagggaacaaaccgggcgccgccaaagccctggaaaccggggccgtccttggccgcgcacgcctcgccgggggccttgacccagggaataatttcc

SEQ ID NO: 157113 - DNA, 1588 bp, Zea mays
  Clone ID: MRT4577_74868C.1
gcgagtcgtttaggggcctccactccacacagtacacacgacacgatgtctccagaactctcttgggtgatagcttccacagggcgacgacctccatgaaaaacggcgagtcttcattcccatcgtcgtctccgcgctcttggaccatacgaatctccggtcgaacctggtgtcgtccgcccgccctctctcccgctgctccccatcgctctttcgttgtgactcgctccctccctggctccccgcatcgctccccatcccatcttgtcctggacacctgggaagcctcctgttctttttagtttcattcttggccacagacttcacgtgcccacaaccccaaggaggagaaaccaggctatgaccaatagctatcagttccttcagtgttttacgcccctctctgtgagcggaacaaggtcaccatggagcgtgtggtggggttcggcaaggaggtcgtgctgaagcagcggcggcggatgcgctggagacttcgcttgggctcctccagcgtcgtgtacgcctgacttcgctaccccctcgtcgcccgccgagacgccgtgcccagaggttagcagatgcacatgccagtattgataaatcagcatgcatgctagctggagttatgttttagaacttgccacacatgcataccgacctgtctcctataatgcagacttccttttttatgatgaccttgcaacagtatattcagatatatgattttaccataagcgctccatctgagatcagtatgtgtaattctattgtggatggagattgaggcgaatgatacaggacttgaaaagtcaatgctttgagcactttaatcacgaatgttcaatctaaagttcaatgtttgaaaaaaaaaaaaaaaaaaaacccacatcgcggtcgtcgccccattcaagtggtggcgcgctccgatccaccccgcccctattccgcctaggctgagctccgcctccactgtagatccgcctcaaagactggcccaaagtgttttttttcaagtccctgaactcccccaacatcacgacggggtgagcactatctctatggtccaaaatgctataaatggtatacactatcatcagaggatatgatgtcgacgcatttttcggagggttactgaagagctgctaaaacaagcgctaacagggattatggtactacctctgttcataaaaaggatacaaataccaatactccaaaggtaataacatatagctcactatttttttgtgattcatcaacatgttgaagtaagaacccttggcatcaaagaagaaacacataatgctttcaacgcgcgcgggcgcgcatcagttactagttcataattcacacgcaaaaaaagccacgaacgggaggactgatccttgtgaagcaaaaagggagaaccggctacacgacatttgcaacgcgcgggaaactagttgggatacactttttctatgatacccaaaaaaaatgagagagatttgccttgaattttatagggaataatagtcattgtacgacaactagtagagactattattgcttcgtgctcacgaggtttcttaggaatcatgcaatgttcttg

SEQ ID NO: 157114 - DNA, 272 bp, Zea mays
  Clone ID: MRT4577_74869C.1
tttatccacgccagcggtttctgctttaggatcgctttggtctcagtgatggcttgggacgtaaccttttgcttttgggggcgcagtgttagaacggacgtggacgatccgtcaaccaatgggacggcatcacgactgccaccatcatggtgcttaatgacaccatgacgctcttgtatcgattctgcgctgtgaagaccagcaacaaaccgtcgtcttactgattctttggaacctatgaacactgctttggctgttgcaagctttgggta

SEQ ID NO: 157115 - DNA, 267 bp, Zea mays
  Clone ID: MRT4577_7486C.1
gggttggggttgctttatgagctttttttgcgatttaagagtttttattcaaaagtacggcaaacaaatttgttctaactgaaactttataataaactcccagtggtccataaccccaaaactcatataacttaaaagggaactcagggggaccggtaaacctgaaaacttttaaccagaaacaggcctaaaaaagacaggtgaagaaaaaaactaaaaaaaaaggggccggcgcacaatgagactatatttaaaaactggtggggg

SEQ ID NO: 157116 - DNA, 754 bp, Zea mays
  unsure (1)..(754): unsure at all n locations
  Clone ID: MRT4577_74870C.1
cttccnctagctaccaacgcggctctcgtccctagaattacagcagctcctccgcggggcggcgaactactacccatcgccaaaaccctagccccgatccggtcgaggagcactacttcttggcatggcgggcacccctagccagtgatggaggctacttcaatgcaataatgaccttcccccagaactatcccaacagcccgccatcagtaagatttacttctgggatgtggcatccgaatgtttatccagatgggcgtgtttgcatttctattcttcatccacctggtgaagatcccagtggttatgagcttgcaagcgaacggtggacaccagtgcacacggttgaaagtatagttctgagcatcatttcaatgctctctagtccgaatgacgagtctccagcaaatattgaagctgccaaggattggagagagaagcgggatgagttcaagaagaaggttaggcaatgtgtccgcaggtctcaggaaatgctgtgaaggaggaacatgggggagttgaatgagtctgcaatcggtgtgctgcaattcacaaccaattatctcatgccagcattcttttgctttcccctgtatattttttcaaccggtgtcgctcgtatagtggtgtttggtctctctagacagactcgggacggttgcttatcctanaaattcgattgtactgcgtggcatgaaatgatcgattcgaagaatattttgaacatgctgccacctaataaaaaatttcatgt

SEQ ID NO: 157117 - DNA, 269 bp, Zea mays
  Clone ID: MRT4577_74871C.1
ctaggccccatcttctaaagaagttaagcaagtttcaacaacatcttctgcagacaacaagatggcagctctgtatgcttatccaaaagtccaagggctttgttacaagtgtgggatgacttactctcgaggacatcgatgtgctgaaacagtccagttgcagatggtggaagaattgtggcagatggtttcattgcctgagactaaaatgttatcgtcgtctgaagctaactcgtcgtctcaagcagttgtgaaagggatatctactc

SEQ ID NO: 157118 - DNA, 809 bp, Zea mays
  Clone ID: MRT4577_74872C.1
ctcccgattccagctgctctcgtccctagaaataaagcagctcctccgcggggcggcgaactactacccatcgccaaaaccctagccccgatccggtcgaggagcactacttcttggcatggcgggcacccctagacgatagcaacgtcttcgagtggcaggtcaccatcatcggcccgcccgacaccctatatgatggaggctacttcaatgcaataatgaccttcccccagaactatcccaacagcccgccatcagtaagatttacttctgggatgtggcatccgaatgtttatccggatgggcgtgtttgcatttctattcttcatccacctggtgaagatcccagtggttatgagcttgcaagcgaacggtggacaccagtgcacacggttgaaagtatagttctgagcatcatttcaatgctctctagtccgaatgacgagtctccagcaaatattgaagctgccaaggattggagagagaagcgggatgagttcaagaagaaggttaggcaatgtgtccgcaggtctcaggaaatgctgtgaaggaggaacatgggggagttgaatgagtctgcaatcggtgtgctgcaattcacaaccaattatctcatgtcagcattcttttgctttcccctgtatattttttcaaccgatgtcactcgtatagtggtgttgggtctctttagacaaactcgggacggttgcttatcctaaaaattcgattgtactgcgtggcatgaaatgatcgatttcgaagaatattttgaacatgctgccacctaatcaaaaaaaaaaaaaaaaaaa

SEQ ID NO: 157119 - DNA, 274 bp, Zea mays
  Clone ID: MRT4577_74873C.1
aattcccgaatttccctttcgacttacttttttaaacaaaaagaaaaaaacgcgtggtggtattatttccactggggctgcgcacaacaacaactatctaccatcgcatagcacacatggactggtaacaccgctatgccgtggccattgccaaagctaccgcccatgtgcccagtgccaggaaccatcaccttttcttggtcccgccaggtcttcactaggctgactttaggaacgcttggtaaaccatatctgctcaatcaatggcaaatgg

SEQ ID NO: 157120 - DNA, 258 bp, Zea mays
  Clone ID: MRT4577_74874C.1
agagagttctcaacatctcctctagagttcgttggatccctaattgccaccctcgatcacgactcctcgtcacaagcaagcgtattctatcactcagagtcacagagatcaacgatgcgctcaagtccatgtacaacgctcaataagatccgtcagagccatgtaatgacccggccgtcctccaaggtcatcatcatagctccgtgatggttatgcagcgccacggctacatgggacaaatccagtactttgatgacc

SEQ ID NO: 157121 - DNA, 506 bp, Zea mays
  Clone ID: MRT4577_74875C.1
ttctacccatcgccaaaaccctagccccgatccggtcgaggagcactacttcttggcatggcgggcacccctagccagatcttgcgaagaaccccgtggatgggttctccgcagggcttgtagacgatagcaacgtcttcgagtggcaggtcaccatcatcggcccgcccgacaccctatatgatggaggctacttcaatgcaataatgaccttcccccagaactatcccaacagcccgccatcagtaagatttacttctgggatgtggcatccgaatgtttatccggatgggcgtgtttgcatttctattcttcatccacctggtgaagatcccagtggttatgagcttgcaagcgaacggtggacaccagtgcacacggtggggcttcttgttcagggcacataaatgtttgcttgctctttttctatgtgggggtggtagtctgtttgggttgaaaagatagttctgagcatcatttcaatgctctctagtccgaatgacgag

SEQ ID NO: 157122 - DNA, 1049 bp, Zea mays
  Clone ID: MRT4577_74876C.1
tgggaccctcgaggccggccggggtcttcttcccgattgaagctgctctcgtccctataaataaagcagctcctccgcggggcggcgaactactacccatcgccaaaaccctagccccgatccggtcgaggagcactacttcttggcatggcgggcacccctagccaggcaagcctcctgctccagaagcagctcaaggatcttgcgaagaaccccgtggatgggttctccgcagggcttgtagacgatagcaacgtcttcgagtggcaggtcaccatcatcggcccgcccgacaccctatatgatggaggctacttcaatgcaataatgaccttcccccagaactatcccaacagcccgccatcagtaagatttacttctgggatgtggcatccgaatgtttatccggatgggcgtgtttgcatttctattcttcatccacctggtgaagatcccagtggttatgagcttgcaagcgaacggtggacaccagtgcacacggtggggcttcttgttcagggcacataaatgtttgcttgctcttttcctatgtgggggtggtagtctgttggggttgaaagtatagttctgagcatcatttcaatgctctctagtccgaatgacgagtctccagcaaatattgaagctgccaaggattggagagagaagcgggatgagttcaagaagaaggttaggcaatgtgtccgcaggtctcaggaaatgctgtgaaggaggaacatgggggagttgaatgagtctgcaatcggtgtgctgcaattcacaaccaattatctcatgtcagcattcttttgctttcccctgtatattttttcaaccgatgtcactcgtatagtggtgttgggtctctttagacaaactcgggacggttgcttatcctaaaaattcgattgtactgcgtggcatgaaatgatcgattcgaagaatattttgaacatgctgccacctaatcaaaaaatttcatgtttaacatcataaggaataactgttgcttattctaaaaaaaaaaaaaaaaaaaaaaaaaaaaaaaa

SEQ ID NO: 157123 - DNA, 662 bp, Zea mays
  Clone ID: MRT4577_74877C.1
tcctagcaatccatcacaaacaccaagggctcagtccaccagagtaacctcagcaagctcggtcaccacatctgacgcgctggaggtgctccagtccttcaaagagacaagggagcgactgctgtcccggagcagcgcaaaacatcaagagccaccgggaaagccataggcccattctttgctttgtttctcttaacgtgatcgctggtagacccccaaccaaccgcgaaacgggatgcacaatgagctaagcggactatagctgctgtgttcatgtacatatgactgccgaagttgatgcctttggttggagagaaggcaccggtttccatttattccagcggaaggatcactcgtcgttcttaagagtgatgccgctgttgataccccctttttttgtatatgggaagtgaaaccgatacacgtaggtgggagcgagggagcctgtgaactgtgatagatgaaagcagggcgtgtgtgtgtgctgtgtgtgtaaattatgtaactgctgggaatcaaatgtttcattggacatcaagctttgatctgggaagttgtggattggcgaactgcaggctgtagttggaaaaggaactctcggttgaattgagagttccaaattataattgaaacatagtatatgtacatcatgtattttgttt

SEQ ID NO: 157124 - DNA, 572 bp, Zea mays
  Clone ID: MRT4577_74878C.1
gtgagtggtctgtttctacttgggttacgagccatagacgtctctccacgacgagacagtgccacgatttttttttttttacaaataccttcactatttttttgccaaatagcttatttaaatattttaacagcctctacattaaacaacaatatacatgccccgtgaagagcaaaaggaaaagacactttcaggttgtgcatacgatctgcttgctcatctacagcacgtgaatacgtgatgtctgatgtctcatcgtcatcacgcttggcttgtgattcctccatatatgtaggttctaatgcagaagatttcacattttcacgtaattgttgactagagttgtcttctttgcgaactgcaggttcacttgccagttggaaggctacacctgtcttttgtggttgcttgtggacttgtggtggggcagctgtcggtgcgaagagcatttccaagtcggttggcttgttttttagttgggcgcgcgcgcaggagggggcaaggtgcagttcttcctcatcctcctgttgtctccccctcgcactaaacaggatttaggcgcacgcgtggtg

SEQ ID NO: 157125 - DNA, 2046 bp, Zea mays
  Clone ID: MRT4577_74879C.1
ccctcgttgaagcagtgggctaaaaaaaaaaaaaaaaaaaagacggggacaaaaaaaaacaaaaaaaacaacaaaaaaaaaacaaagccctcgccccaatccaatcgatccccaatccgttcacgcactccccaatctcgccgtcgccggcctcctctccggcctccgccgctgcctctctccacaataataatccactcctcgtcgcctcgcgtccgtctccttgaccaacgtgctccccccttcttctacctgtaattcccatcctgcttgtgcggcaagggcctctcccgcgcgatggggaagcacgagttcctgacgccgaaggcgatcgcgaatcggatcaaggcgaaggggctgcagaagctgcggtggtactgccagatgtgtcagaagcagtgccgcgacgagaacgggttcaagtgccactgcatgtcggagtcgcaccagcggcagatgcaggtgttcggcatggcgcccgaccgcgtcgtcgagggcttctccgaggaattcctcgagtccttcctctccctcatccgccgcgcgcaccgccactcccgcgtcgccgccaccgttgtctacaacgagtacatcgccgaccggcaccacgtccacatgaactctacgcggtgggccacgctcaccgagttcgtcaagctcctggggcgcgaagggtactgcaaggttgaggacacgcccaaggggtggttcatgacctacatcgaccgtgactcggagcaggccgtcaaggaccgcctcaagcgcaagaggatcaagtcagacatggctgacgacgagcgccaggagcgcatgatcgcccgccagattgagcgtgcgcacaagtccttagctaaacccaatggtggtggtgctgccgagggcgagcctgagtctggcagtgaaggagagtattcaggttcggatgatgatgagcaggagccggaggatgactcgaaagaggcagataaggcaacaggtaagattgcgattgcgcttcagaaggctgtgccggggcccaaggttaatccttttgacgataagccgaagatgaaatttggttttgatgaggaggatggctcaggcacccgagaccaggagaagaatgagttgaccaagaagatgggaaaggatgtgaaggcagcagaggcaaagaggtcagcattggacgagctgatgaaggaggaggagaaggccaaggagaggagcaataggaaggactactggctgtgccctgggattgtggtcaaagtgatgagcaagtcattggcagagaaggggtactacaagcagaaaggggtggtgaagaaagttattgataaatatgttggggagattgagatgttggagagcaagcatgttctcagggtcgaccaagatgagcttgagaccgtgatccctcagattggtggacttgtgcggattgtcaatggggcttatcgggggtcaaatgccaggttgctttcagtggacactgagaaattctgtgcaaaagtgcaggttgagaaaggcctctatgatgggaaggttctcagggctgtcgaatacgaggacatttgcaagatatcctcatgatatacaacgtgattcattccattttcctggatcatcactgaagcaaacaagctatacgatctagtgtactagctctgtcgattagattcttaatagtttctgtgcttgttattgtttgtgctggaatatcttctgttgaagcagtgtttgatatcttgatgtttctagttcgcggtaactgctgaaaggctatctgtgagaaaatgctctcatttatgtttgcttgttactagaccagaataaccgtattgatgagtttcagcattatttgccaaaaaaaaattttgatatgttgaaaaaaaaaaaaaaaaaaaaaaaaaaaaaaaaaaaaaaaaaaaaaaaaaaaaaaaaaaaaaaaaaaaaaaaaaaaaaaaaaaaaaaaaaaaaaaaaaaaagggggggccctttaaaaggaccaaagtttactaccccgggcttgcaaggttaaagtttttttttgggggccccaaaatt

SEQ ID NO: 157126 - DNA, 562 bp, Zea mays
  Clone ID: MRT4577_7487C.1
aaaaaaaaaaaaaaaaaaaaaaaaaaaaaaaaaaaaaaaaaaaaaaaaaaaaaaaaaaaaaaaaaaaaaaaaaaaaaaaaaaaaaaaaaaaaaaaaaaaaaaaaagttttttcccttggcccgggaaccccccttaagggcgaatttttggaaaattatccatcaaacttgggggcccgtttgaaccttccttttaagggggccccaattcccccttttaagggggttggttttaaaattaattggcccggggttttaaaacgtggggattggaaaaaccctggggttccccaatttaatcgctttgaaaaaaatcccctttttgccagttggggtaataccaaaaaggccccccccgatcgcctttccaaaaatttgcccaccctaaatgggaaatggaccccccttttaggggccctttaagcgcggggggggggggggttacccccagggggaccgttacatttgccagggccttagggcccgttcttttggtttttttcccttcttttttcgccactttcgcgggttttccccgtaaagttttaaatggggggctcct

SEQ ID NO: 157127 - DNA, 845 bp, Zea mays
  Clone ID: MRT4577_74880C.1
ctcccccgcggggcggcgaactactacccatcgccaaaaccctagccccgatccggtcgaggagcactacttcttggcatggcgggcacccctagccagatcttgcgaagaaccccgtggatgggttctccgcagggcttgtagacgatagcaacgtcttcgagtggcaggtcaccatcatcggcccgcccgacaccctatatgacggaggctacttcaatgcaataatgaccttcccccagaactatcccaacagcccgccatcagtaagatttacttctgggatgtggcatccgaatgtttatccggatgggcgtgtttgcatttctattcttcatccacctggtgaagatcccagtggttatgagcttgcaagcgaacggtggacaccagtgcacacggttgaaagtatagttctgagcatcatttcaatgctctctagtccgaatgacgagtctccagcaaatattgaagctgccaaggattggagagagaagcgggatgagttcaagaagaaggttaggcaatgtgtccgcaggtctcaggaaatgctgtgaaggaggaacatgggggagttgaatgagtctgcaatcggtgtgctgcaattcacaaccaattatctcatgccatcattcttttgctttcccctgtatattttttcaaccggtgtcactcgtatagtggtgttgggtctctttagacaaactcgggacggttgcttatcctaaaaattcgattgtactgcgtggcatgaaatgatcgattcgaagaatattttgaacatgctgccacctaatcaaaaaatttcatgtttaacttcataaggaataactgtggcttattct

SEQ ID NO: 157128 - DNA, 3511 bp, Zea mays
  Clone ID: MRT4577_74881C.1
ggggcaaaagttgaaggggaaagctatcatgcctggatattatgccacaggggatctcaacgtggaagcaagtggtaggtggtctccatactatgaggagatgacatcaaatggccagttatgcaatggcttcgcaacaaaaccaacaagtggttattcagaatttgacaaagaaatactcaagcatcaaattcttgaacatgaagctgtgttcagacaacaggtgagtttaccctaattctaagaaacaaagtacatcatatcataattatttttttcttatcatatgttttttttcctgtcaagcctcacaacccactcgctatccaggtgtatgaactgcaccgagtttacaaaatacagaaggatatgatgaaacaacatcaaagaaaagaggtatattcatacccaactttggcaggtgcatcacatactaattcaccgtcacaagtgccaccaaacggtgcaaagatgatgtggcagatgccagttcctcctgtgtctacaacatacaggaaagctattggagagcataatgatacaaaccagtcctgcatgaagttccttagagaaggcagtgtgcagtcttctccaaatggatttctatcaagtgatgctgctccaagaaccagacaaggcacttttgaccttcaacttccagccgatcattatatagatgacgatgacacatcagataacaagcccatagatttccttggtttggcatcagatgcaaaaccccagaatgatgctgagcttacattagttagtgcagaacgcttgggcaagttcagtgataatagttcatcctcaggtttgcggactacaaataatcttggaagccgacaagttaccaacctgaatgaatcaaatactggcttctttatgggtagagcaaatggatctgtttccagaggccttccgcataccctcgagaactcgtggcaccaaccgatattgagatcaagcacaactactttcaatttcagtaaagaatactccaaagaaaagcacacaaatgaaggtacaagctcaaatttttttgacacaagtgcgaaactaacacatgacgacaagccaacaatcaataaaggtaaacaagtcagcagtataacttttttagcacccagatataatgatgctgatcccccaaaatacttcaaagctgctgatgggaggcctgccagttataaccaatttctttaccaaggtcagaatagttcagctggatggattgcacgaagtcctctggaaccttctgttatcaataattttgctagagttgaccgtccacatcatttgaatctgggtacatttactgcccccgtctctattcctcaaatagacaatccttcaattgtctccccgatgggttcttgcacagcagacccaaggagcagcgttatcaataatcctgctttaattccaagattcaatgggttctcaactgtgaattcgtacaccagtcttagtgctgtgacgcagagcattggaacttcaatcccaaagctgataaatgtggataatgtagataaacgctatcctggttttccacttgattcgttttctgtgtcccactcacgacatcaggtagcaatttcaagtaacctggagcaaaagaactcccagaagttggaagattcagatcaacagtcccatggcaagggtatgaagaacttcaatttgaatgagacactgtcagattgtcaggaagatggtcttgtagaacaagatgggagatgtgcttccagttttcagcatgataaagatggggggtcagtattcgggatctcttggctcaaaaataaacctatgtctgctgatccaacagctttggagaaggcagggaagatttttggacattcgtttggaactacaatggagctgaaaaatgctaaagaccagaacgaaccagctgtgactattcgaaatttgtcagactctgcttcgacatctcttggctgtggaattaagaaggatgggccttcagaagacattgccactggaactttgctggtttgtaataaagcccaagaggatgctacatgtttacctctttcatgccagaaacatgtgcctaaagatggacaagatgctgatggagtcatcaagataagtggtgcctccatcaggaatttcatcgatctcaatgatgctgtgccaaacgatgacaattctgaggaatcagtagtgtcacatgaatgccaggcggaaccttcacggaacaaccatcctaaacgagcatttgtgattgatctagaggtgccggcttgtgaagaggatgctgcttgggattttgatcaagaatgtgcacagcctaaacctgatgcacaccaggaagttgacggcagatctgatacatctgctctagctgcagctgagaacatcgtagcgttgtcaaggattattccaacagctctagaggcatctgatgatatgttgcagtggtttgcagatctcgctgtattgaacatcaaggaccttgctgagcaagctgaactccaagcttgtaccaatgattccagtaacgacgagtcagattcattcgaatccttgacactgaagctggaagagaccaagattgatgagtactggagcaggccactggaacctgaaatcacaaccgatgaacaattaatttcaactgctcaccttctcaccaagcccagaaggggccagcaaaggaggcgacggcagaagcgggatttccagaaagatatcttgcctggcctttcgtcactttcccggcctgaaatcatagaggatgtccagttgcttgaggggttagtccaggcttctggtggatcctgggagtcgagtttaactaggcgaggacgttatggtgggcggactcgaggtaggaaacctcggaaaactgtagtaactgtaattgtagaagaggaggtcgaggttagcccaccgccgaaacctgttggcactggcgacctcgaagccgatgataggggtatggttggatggggcagaacaacaaggcggtgtcgcagagcgagatgtccgtcaggtaacaacttggctgctgcgtcttgagaaagggtattgccagcaagcattggacctgattaggtacttggtggttcacaattgttatagactccgatggatggactggtataaggtgatcacagtcatgagtgtacatactctgtcggcctattggcctcaccccaactttcatgcttttgggtcgaaacatggtttacgttcttataataagttccgtaaattagctggtaagacatttctgcgacagcattgtattaagctgttccaggttatgaggtccggtataaattcattgtgagaaaaaaaactgcaatgcctgtaaaccaccttgatctctgaagattagctcatcgcatgcgcaacaaagggtgtgaaagacttcgggtctgtattcttttttagcttatatatgctctgcctaattggctagtacatattccagcatgcgaattgctaatttagttttataccgtggatatgatacaac

SEQ ID NO: 157129 - DNA, 953 bp, Zea mays
  Clone ID: MRT4577_74882C.1
gggtacctcgaggccggccgggccgggctcttcctcccgattccaaagctgctctcgtccctagaaataaagcagctcctccgcggggcggcgaactgctactcatcgccaaaaccctagccccgatccggtcgaggagcgctgcttccttgccatggcgagcaccactagccaggcgagcctcctactccagaagcagctcaaggatcttgcgaagaaccccgtggatgggttctcggcggggcttgtagacgatagcaacgtcttcgagtggcaggtcaccatcatcggcccgcctgacaccctatatgatggaggctacttcaatgcaataatgaccttcccccagaactatcccaacagcccgccatcagtaagatttacttctgagatgtggcatccgaacgtttatcctgatggacgtgtttgcatctctattcttcatccacctggcgaggatcccaatggttatgagcttgcaagcgaacggtggacaccagtgcatacggttgaaagtatagttttgagcatcatttcaatgctctctagcccgaatgacgagtctccagcaaatattgaagctgccaaggattggagagagaagcgggatgagttcaagaagaaggttaggcaatgtgtccgcaggtctcaggaaatgctgtgaaggaggaacatgggggagttgaacgagtctgcaatcggtgtgctgcaattcacaaccaattatctcattgcagcattcttttgctttcccctgtatattttttcaatcggtgtcactcgtatagtggtgttgggtctctttagacaaactcgggacggttgcttatcctaaaaattcgattgtactgcgtggcatgaaatgatagattcgaagaatattttgaacatgctgccccctaatcaaaaaaattcatgtttaacagcaaaaaaaaaaaaaaaaaaggccccta

SEQ ID NO: 157130 - DNA, 1094 bp, Zea mays
  Clone ID: MRT4577_74883C.1
cattgggtacctcgaggccggccgggcttcttcctcccgattccagctgctctcgtccctagaaataaagcagctcctccgcggggcggcgaactactacccatcgccaaaaccctagccccgatccggtcgaggagcactacttcttggcatggcgggcacccctagccaggcaagcctcctgctccagaagcagctcaaggatcttgcgaagaaccccgtggatgggttctccgcagggcttgtagacgatagcaacgtcttcgagtggcaggtcaccatcatcggcccgcccgacaccctatatgatggaggctacttcaatgcaataatgaccttcccccagaactatcccaacagcccgccatcagtaagatttacttctgggatgtggcatccgaatgtttatccggatgggcgtgtttgcatttctattcttcatccacctggtgaagatcccagtggttatgagcttgcaagcgaacggtggacaccagtgcacacggttgaaagtatagttctgagcatcatttcaatgctctctagtccgaatgacgagtctccagcaaatattgaagctgccatgcctttggtttctgaagttatacacgactttgccttgcagaaggattggagagagaagcgggatgagttcaagaagaaggttaggcaatgtgtccgcaggtctcaggaaatgctgtgaaggaggaacatgggggagttgaatgagtctgcaatcggtgtgctgcaattcacaaccaattatctcatgccagcattcttttgctttcccctgtatattttttcaaccgatgtcactcgtatagtggtgttgggtctctttagacaaactcgggacggttgcttatcctaaaaattcgattgtactgcgtggcatgaaatgatcgattcgaagaatattttgaacatgctgccacctaatcaaaaaatttcatgtttaaaaaaaaaaaaaaaaaaaaaaaaaaaaaaaaaaaaaaaaaaaaaaaaaaaaaaaaaaaaaaaaataaaaaaaaaaaaaaaaaaaaaaaaggggggggccgttttaaagaacccaagtttactaccccgtgctt

SEQ ID NO: 157131 - DNA, 682 bp, Zea mays
  Clone ID: MRT4577_74884C.1
gtaccggcccctctctcgagtttttttttttttttttttttttttttttttttttttttttttttttttttttttttttttttttttttttttttttaaaaagcccaaaaaaaaaccagagtttacggcccctatcctgacccaaggttaaggggccgttacatgttaaaaaagggttttttgggcacaaaatttcccaaaacatggccctcgaaaaaaattttaaccccattttgggggggcaaaacatccttattccttgacccaaaagccgggggcgttccccccctaaaggatgggggcggccctgacgaaggaaaaccccgaaaagttgctggccccccccccagggggggggcttaccggaaagcccaacaggggcgttttcgcccaacactcggaaaagttggaaaaacaggaaaccccgggaactttgggccaaaagctcgggtggatttgccgggcccccagtttcctccaggggagggggtggaaccactgggggttttttatcccgggggtgcccccggggaaattgcccacccctttggggggttccttgggaaacaggcccctcaggagggaaggggcttcactaaacaaaaaggaaggaagcctcaggtggcctttaaaaaccttggggggaactttctccctattcccaaaaaaggggggcttgcct

SEQ ID NO: 157132 - DNA, 266 bp, Zea mays
  unsure (1)..(266): unsure at all n locations
  Clone ID: MRT4577_74885C.1
gccgcaagccgnccttcgngccccncgaaggcggggggggccgggggggancccgaccgcccccgcgacagagcccgggccccgcnaggccagagnnangcggccncngcagcganggcgaacaagcggaccaaggcggagaagaagaacgcgnacgacaagaagcngngcagccngcacgangagnacaccggggggcggaacgcccncgccgacaacgaggggagcaagcaggagcaagacaggcgccggggccacaggggcga

SEQ ID NO: 157133 - DNA, 176 bp, Zea mays
  Clone ID: MRT4577_74886C.1
ccaacaaactactaacctgcccgaagcgggaggcgtacgtcgcgtccgtgggagcacaccctacaactgaccagaaggatgctaccagcactgaggacgactcaaaggctttagctagtgcggcgcacatacttcgcgaagttctccagacctttgacagtgaacgctgtaccggg

SEQ ID NO: 157134 - DNA, 192 bp, Zea mays
  Clone ID: MRT4577_74887C.1
gttattaagtcaaagtttcaaacatgcctttggttgcggaaaaacagttgcccaattcaaaccaaaatatattccgtctgttgccacactcggccagggggtgaaaacaaaaaacggcccctgctctcattaagggtcctgaagataaaaaacctatggatcaagcccaaatgcaaatggggatgaaccccc

SEQ ID NO: 157135 - DNA, 419 bp, Zea mays
  Clone ID: MRT4577_74888C.1
cctgccggttccggaccttaattaattcctttgacgatctagctttttaaactttcggacgcccttcctttttattatgggaacttttttgaacaaatctttgttggaagaaaagtatcgtgtgaagtccacaaggtccaaaatggtgtccacagagatgatgaaccgcctaactacaaaacacagcacctcaatacgtatttaactatttgcacaagttaattgttaagggctaccctaaaatgcctcatcctagatcccccaaggaataacctctctcgagaggatgtttcaggtctgaaatcatggatttgcaattcttaacaaaccatgtgcccttcatccactcatggaaatgggcattaggagttccaggtgcgagctccatctagggggccttgatcgatttcatcgagagc

SEQ ID NO: 157136 - DNA, 355 bp, Zea mays
  Clone ID: MRT4577_74889C.1
gcgcacacaccacgatctcagcttacttccacttcagctccaatcacagtcgtgaccggggcgagtgctagctagaggggcgtgaaaatgccgatcaataggatcgccctgaggagccaccagtatgtgttccactcgtgcgccctcaaggcggcgttcgctgagttcatctgcaccctcatcttcagattcgccggccagggctccggcatggtcttcaccaagctgaccggtgggggcccgactaccccggcgggcctgatcgcggctgcggtggcacacgcgttcgcgctgttcagtggccgtgtcggtgggcgcgaacatctccggaggacacgtgaaccccgccgtgacc

SEQ ID NO: 157137 - DNA, 233 bp, Zea mays
  Clone ID: MRT4577_7488C.1
gacgaacgcaagctgtcctacttattcagcttgcgacaacgtttgttcatatgatatgggccatggtcttgttaagaatacactattggtgtctataccacaccactgatgaagcaactaggctgtgctcgatagactatatcacaccaggagactaaggactgcaccagttcaaaacagaatgcatgttgaccttatccttcgctacctggcacacaaaatacaacgaatta

SEQ ID NO: 157138 - DNA, 148 bp, Zea mays
  Clone ID: MRT4577_74890C.1
cttgttagagcatgctgtgatctgcttcgctccaaggatgaacgcggggggagcctgatcgcgaggtctgagcatacttgaagataccagacttaataccactagtgctggagtgagtgataagagcagcacggagaggctgggaggc

SEQ ID NO: 157139 - DNA, 783 bp, Zea mays
  unsure (1)..(783): unsure at all n locations
  Clone ID: MRT4577_74891C.1
gccggccgggccgggagccgactcgctgtcattttcagctagtgccgtggagctcgccgaaatcggcatcacctttagggccaacgaaacagcagagctcgttgacatgggcctaaagaaagatgtcctctttgctgagctctcactagcgccgctgtctctaaaccatgcgcgcgcaagccgcctcgtcaatatggccgctttcgagatatgcactgtccctagttttattgatgctcaagttgaagactccgctgtttgctcctaccttctcctcctctgcatgttggtgcatagggaagaggacgtgcatgagctgcgacgacagggtatcctgcaaggaggagctgggctcaccgacaagcaggcactcaaattcttcaccagccttcagagcctgcccgacgggcaatgttgtacccgaaccaggatagaaatcgagaactacaggttccacaagaagatgcagacaaaggtgtacaagaagcgcaaaaccatcttcaaggttttatccatcactgttgcaactatcactatctttggtacactactcagtatctcagcacaactctcaaatgtctctaaaggctgaagtagagtttgaaaaataggtgcgctggtataggtactaggctggtgagctcactttgggctgccctttgataccttttgttctatcaatgctttgtgttatttcccttatagtagctataacattccttcaataatatacctgaatgttgggttacagtaaaaaatataaaaaaagattcctttaanatt

SEQ ID NO: 157140 - DNA, 306 bp, Zea mays
  Clone ID: MRT4577_74892C.1
atggtgggtggggatacttgcaaattaactttttttttacaaaatttgcatttgctctatgttcctttttacttttaatgttactccacacatatgttttcacccatacagcattgttggtttgggagcccccaaaaaatgaggaggcttggggggggaccaaaaaaccccccccctccccgggcaaaaacaaaaaggaagctgggtttttttttaaaaaaaaaggaacccccaccatggtcatttttagcgggggcagaaacaaagaaaattgttacacggggggggacgaatgatgaagacccc

SEQ ID NO: 157141 - DNA, 787 bp, Zea mays
  Clone ID: MRT4577_74893C.1
aggtaccggtccggaattcccgggtcgacccacgcgtccgcgtgaaggttaccgggaaggccgtgatgctggacgagatcataaactacgtacagtcgctgcagtgccaggtggagttcctgtcgatgaagctgtcgaccgtcgacccgcgccgggagctcgacgtgggctgcttcgtcgtccccagagacgacgtaacgatgcaggccaacaggctgtgcgcgcccgcgacgtcgtcatcgagcacagccttctgctacgccgcgcggagtgttgttacgaacgccaaaggattcgagacgccggtgcccttggcgaaccatggcgtcgcggcggacgacaggccacttgagcggcgtactcgagacgcaggtccccaggcggggagcttgtgggaagaggacgatctgcagagcctggtcctgatgggattccggggccgttgatcgttgacgctctgattaggctagggacgacagttcgtttccaccgaccgccaaccaaagcgagagttgcagggccacgtaacagcagggttgggctccaatcattgggaactctccatgattgtgcacaaacaggacgcttacacgctaatttccagctcggcggaggccaagaaacgaaacaaaaaaaaaggcgaaaagaagatgttttttttctcgcattccccctcacgaatttgcagtttaatcgatgtaagataactcaatgtaattattaatggtatttgagtcttatagacatcaagttgatgaaattttatactacacaagatgctttcggt

SEQ ID NO: 157142 - DNA, 714 bp, Zea mays
  Clone ID: MRT4577_74894C.1
atctggttgttctgaagactgttgccatttgtgactatgtggctcgtgttgttccggcaaagtacgtcatgaagtgtgatgatgatacctttgttgggcctgacgtccgcccacctgatccgtaggaaatcccagattggcaaaagcttctatttagggaacatgaactactaccacaggccactgcgggagggaaaatgggctgtctcatatgaggagtggcccagagaagagtacccgccctatgctgatggcgcaggctatgtcgtttcttctgacattgcaaacttcgtcgcatctgagatggagaacggccgactaaatctgttcaagatggaggacgtgagcatggggatgtgggtggggcagttcaacttcaaccgctcggggccggggagcgccgtggcgtacgtccacagcgccgggttctgccagtccggctgcgtcgctggctacctcaccgcgcactaccagtcgccggcgcagatggtgtgcctctgggagaagctacggcgaggcgtcgcgcagtgctgcaacgcgaggtgaccgtccatatatacctcgggctcacttcagctgggatggaaatgggtacatacttacatactactgaggctgtgtttccactgatcggaagcagcgatgtacacataatacgtctgtaaggatgggtagtttacacatctgtacacagaaatcaacggtaccatagta

SEQ ID NO: 157143 - DNA, 508 bp, Zea mays
  Clone ID: MRT4577_74895C.1
ccctccgctctcttcaggtgaggagggaaatttttttgcgtgctcatgaagctgccgcaggacctcgtgccaggctgcagcaaggtaagtaaacatcgacggcccttgctcaaaattcggttgaaaacacacacatatttcaatttctaaagactcctcgacctcgtgaaggttaccgggaaggccgtgatgctggacgagatcataaactacgtacagtcgctgcagtgccaggtggaggtgcgtgcgtatgatctgcaccctgctctgtctgctcttcttaggacgtagagcatagctttttcctttttaattaacggaaaagaaaacacgagctcttctgaactcgagcaaaacgggtttgcttgcttccgcgacagttcctgtcgatgaagctgtcgaccgtggacccgcgccgggagctcgacgtgggctgcttcgtcgtccccagagacgacgtaacgatgcaggccacaggctgtgcgcgccccgacgtctcatcgagcac

SEQ ID NO: 157144 - DNA, 785 bp, Zea mays
  Clone ID: MRT4577_74896C.1
gccggccgggtcgggacaactgcactcatgactccgtacatccaaggacactccaaggactacgaaggaaactaaccaagactcccctcccctctcatatacaatatcgtcgagggacctggactgacgagcactcaagcaatgttgtaccatcaactgtgcaacgtcggtcgtatagtgccgtgaagaccagagctccgagttgagacggcaccggtgatcgcactggctccctcctggacgttatctcggagttcctcggatcgctttgacacctgccagctaatcagctcctccgccgtccaccctaacaactgcaaccgaggcgaagttcgcagcagagaggcgagcctgcagcaacggctgctgaacccgcctgcctgtttctgtccagcgagaaccaatcgcggtcccttcgactgggaactacaaaaacagaccatcccgcgcgtaataatcggcgacaaagaccacacctccgagatcttcctaaagaccatcacccatcaacgacgttaccagggcacggcaccatcgacttcagtcgacaactcatggatctacccgacacgtccaaggaccgctacaagcgcgtcttcttctccaacgacacgtacctccccagccagatgacgtggacgctgaagacctaccgcgacgacaagctccggaatctgaggggcgacgaccgacaggtcccgtaccaggagcacgaccgcgtctaaccgctacgacggctactacgacctcggactgcctgacaggagaacccgcgtctcgtcctc

SEQ ID NO: 157145 - DNA, 779 bp, Zea mays
  Clone ID: MRT4577_74897C.1
atccttccttcctcctccgactccctcttctatttctattaagaaggaagcaagcagggacggggcgccactcagatctctccgccccttcctctcctcgtgcccccaacccgcctctcgtcaacgtcgccccgcccgaggagaggacgagcgatggcatcgccggccgcgcgcgcggcctcggcgctcctcctcctgctcgccctcgccgtcgccggcgtcctctccgacggctccgaccaccgctacaagctcggcgaccccgtcccgctctacgccaacaaggtcggccccttccacaaccccagcgagacgtaccgctacttcgacctccctttctgctccccggagaaagtgaaggagaagagcgaggccctcggcgaggtcctcaatggggatcggttggttgatgcgccctacaagcttgatttccgcaccgatcacgattccaaggccgtttgccccaagaagcttaccaaggaggacgtggccaagttccggaacgcggtagccaaggactactacttccagatgtactacgatgatctcccgctgtggggtttcatcggtaaggtcgagaagggaggcaagcctgacccgagcgagtggaagtactacctctacaggcacattatctttgacatcctctacaacaacgaccgtgtcattgagatcaatgtgcataccgaccagagtgcactggttgacctgacggaggacaaggaggttaatgtggacttcccttacactgtcaagtggaaggagacacctacaccgtt

SEQ ID NO: 157146 - DNA, 732 bp, Zea mays
  Clone ID: MRT4577_74898C.1
caaagcttacccatgatgaggcatgtgaccagttaaaggatcctcgatcagcaggccgacatcgagaaggtccttaatcgactcagatggagacactacaccgagattctcttctcatgcaagtcacctgcccagtcttagctttatcatttcaaacccaaagtttggtacctggcagaggtacatcttttcagatgttgaacccatcatggccatgatggatccaccatcaaattttgtttttgaaaacatcccacccactttgaagcatcaacttttgtgaaaacaaaacattttgtttttctagagcaaagctaagcctaagaaaaaccttttgtaaaacagggacttaaggagaagtaatcaaatccaaggaaatgcaggaattggtttagcacacaactcctatcacctaatgcaccaagcaagtgagaaagattttaaaaggaacaaggaggtggcaaatgcaccgaggcttgccttgtgttattggtgaatcaggctctgctccgcagatatccaaataaaagcagttgcctgcctgatgttcttcaggtggtggtggtgaagtccttgcttcttcaacttctacttcctcctcgttttccgaagagggctgtccacggagaggtcctccatggtggcattcggaacagggcggaatggatttgtggactatgtgagttctccggtgaaattaagtcgattgctcaagtgctcgtgtgtgtgatg

SEQ ID NO: 157147 - DNA, 284 bp, Zea mays
  Clone ID: MRT4577_74899C.1
cccacgcgtccgcccacgcgtccgcccacgcgtccgcccacgcgtccgcccacgcgtccgctctccggcccggtgagggatctcagtaagctgcctaagtgtaactacgatgattgcaacactggctatgacctcggcgagtacagatagtttatcttgtacatacaggccatctttaatgacccatttaggatgttcaacaacatgcttgagatgtgcgattgctacacgcgatccaacgagcctgaccacagtaacaatatgtacaacgccgttaaaatcta

SEQ ID NO: 157148 - DNA, 306 bp, Zea mays
  unsure (1)..(306): unsure at all n locations
  Clone ID: MRT4577_7489C.1
atangcgaccgacaacgccgcgcggaccgggggggcagcaacaccgaaagggcggagacaacccggcggccgaaggcgaccgaacgagagccggagccacaggggccagcggcgcgagggaccaaggcgcaagacaaggcgaccgggaggagggaaggacggacgacagcagcagcgaccgcgcgaggaccggcacagaacagggccagcccaaggtgcggccagaggcgccccacgacgagccccgcgcagggcacacacaccacgagcgggcaaaggaacccaagaaccggagcaacgaagacg

SEQ ID NO: 157149 - DNA, 650 bp, Zea mays
  Clone ID: MRT4577_748C.1
cctcgaggccggccgggaagcctgtgacgctattgagaggacacggagtattgtccctactcacgacgcccaccgatactatgatgttgcagtcatggtcaccgccgtgctggtccccacagacggaaataccacccaggtcgaccggtcccgcacttcactgcgcaagccgaagaaggggattggtactgagcacgcgcctgctagccccccgatgtgagcattgagtggcaatatgcaaccaccatgtccggctaccgcatccccgacaggtagaagcaggaagcttatgaacctcctcctcctcggagccatctcagtgcccaacggaaagcatggccgtcccctactaagccatcttagtaactgacgactacgtcaacgactaccgtatcacctacgcctatgacaagccgtacaacgacatgacgggggaggtgcgcttcaacacttaccgactcaacgatactacgctcgcacaaacgctccaggataaccccacgccactctaggtggttgcaggacaagacgctggacacctactcgatctacagcttgtgcactcacctcggatgcgtcatggcgcgcaacggcgactaaaacaaatacatcgtgcccatgcgcacaaatcgccatacaaccaccattgc

SEQ ID NO: 157150 - DNA, 599 bp, Zea mays
  Clone ID: MRT4577_74900C.1
aacacccgtccgaacccataataggcggacgggagtttttattcaatcggcaaataaatcagaacataaacaatcgaaacggttagctagccagttttttcggcgaacaaaaacgactaggtacattggctcccacagcaaagcgaaaaattataatcgaaggaacggccagttagctagaagccccacactccaggcataaaaaactacaacgaacccgttttgctagctagccggccgaaatcgatccggaacgacaacaacaacgtacggggtaaaaacagcaaagcttcacttccactgggctaatttttatggggcgggcgtcttccccgaaaggaaaaaaaaaaattaaaaaggggctctggacgtttaactttggcagggactcaggggagggcgtttttcatgccccgggaaaactcctccagcctcctaaggccttgtttggaaaaagccgtttcccccaggtgcctaaccatggggctgccgaggatcaccccggaagggccccacggggcaatctgtttcacgggctctgggttggatatgccgaacccaacaacaacgggcttggtaaccaccttcttaacccccgg

SEQ ID NO: 157151 - DNA, 420 bp, Zea mays
  Clone ID: MRT4577_74901C.1
gccggcctttttttattttttttttgaccagttttggaaaaagtcgagcgccaacgcgaagagaggattgcccaaaaggggacccggacaaaacgttctccggtggctacggcacaaaaaaaaggtgggggccaatatcacgttgaatcttgagcccactaccggcgcggtaacaaacccccatgggttaaagcttgggccggtacatctttccgagacccttgggtgcgggttcaaaaaacaactactcgtgcttaaaaagaattccgggcgccagctccatgtgtttgggcaggagggggactctcaagggacggttgggacccaggttgttgtccccctacaggaacccgaggtggcctaccgcggtttactggaggggacacaagcctgtctcttaaacacgaaatccggttcaat

SEQ ID NO: 157152 - DNA, 327 bp, Zea mays
  Clone ID: MRT4577_74902C.1
ccgaacaaaggggttcaccccagccgttttttttttttttttccgaggattttttttcctgcttgctagctagctcgacctagtcagaaaactttgggtttacttttcgggggggggccacccccacctttttttggggccgagctagccctagcgggggccttgggtccaacggggcccccgtcccctaacagggggggtgggcccctgggtcgacccggacctgttggcaatcctgtttgaagtacccgacccgcgcgttaatttgggcggggtggtccccgttgccctcgagggcccctttgatggccctgatgggggccccaa

SEQ ID NO: 157153 - DNA, 544 bp, Zea mays
  Clone ID: MRT4577_74903C.1
cccacgcgtccgcccacgcgtccgcagcacatccctctccggcggtccggccctccgtcgtcgcagcacggcagcacttccctctcccaggttctgggcatctggcgttctacttctgctgtccacggctgacgactcctcgctggctcgctgcaccactgcaccagcacgcacggcaaccagcctccgccgtccagacctccagggggcaggggctgccagaaaattatctagtatagtattgtgagtatatatattggttctatatataatggcaggtggcggaggagagcttagaaacagcccaactacgcaaacttgacagtctcattaacaaggtaagatcgaggatcataaaatccatttgttgtaattttctaagaataatgaagatgtagcaagtggctcctctccatgagcaatgtgttttatgtttgttgagagatgtgagcaaatgagcattggttgtaatagtctatgtgtgctaagtgatcctgatgtgagcaagtgattataaatatgtgtttttaactttaccccccac

SEQ ID NO: 157154 - DNA, 1805 bp, Zea mays
  Clone ID: MRT4577_74904C.1
aattcggcacgaggcccttccagcccggcagccacaccgtccccgtcctcccactcccccctcgcaaccatttcaaatcgctctctcgacccaactgtactcgccgtcgtcaattcatcatccatccccatccccccatcgactcccagatctctatccccctctccctgtcctcactctctcgagcgcgttgtggcggatgtcctcgtcggcgcgtttcgatctccgggcctcgtcgcatcagttgcagccgccgccgtcgcacgccagcatgagcagcgacgggggcgcgttcgcaaacgcggagaacctggagcactgcgcccggtacctgaaccagacgctcgtcaccttcggattcccggcatctctcgacctcttcgccaccgatccggtctcgattgcaagaacttgtaactgcatctatgcgctgctgcagcagcgacagagggacattgagttcagggagtctacaaatgaccagcggcagcggatgcaatctgatatctcacggctggaagctaagatagagagaatggatgctcaattagcagcgaaagatcgagagctagccactcttactcgaacggaggccaaaaacactgctgctctgaagtctcagattgataagctgcaacaagaacgtgatgaatttcagaaaatggttataggaaatcagcaagtacgcacccagcaaattcatgaaatgaagaagaaagagaaagaatacataaagttgcaggaaaagctaaatcaggtattgatggagaagaaaaaggaatcatcccgttctggaatggagataatgaacttgttacagaaagaaggacgacaacgcggaacatggaatggaaaaaagaacgacaatgattattacaaaatgattgttgatgcatatgaagtgaagaaacaagagctgatgcaagagaatgcagatttacgggcactgttacgttcaatgcagatggacatgcgtgactttctcaatgccccgaatgggtcatcacaatctactgttactgataatggaagacaggagtcagggtctcctcagtctccgcttggtggcaagacggatgtttttgacttgccctttcatatggccagagatcagatagaagagagtttgcgcacaaaaatgacttcaatcaaggcacgaatgacacaacttcaagatgctcagaaaggtgcagaagtgacttctgaggcaactgaccgggagcttgagcttgaagctcaactggttgaagcaagaagcatcatccaagagcaggcctgcatcatgtccaagcacttcaagtctgataagccaagtggcaggaggcatagcggtctggatggcgagcgtgaggcatctgccgaggtgtaaaagcatgtctgtagcaaggatatatctgttctgcaagacctcctgattttagtaagtaccgaggtagtatgttgcaggatataacatggtcctgtgctgttgtagcccgagtttaggtgctgtctatgcagtatgatgtgcaggagcatatcctccagcacatggctaacccgatcacatctaagtcacatgtagcgtaactgtaatcctattcatactatatgaagaatgtcagtgtagcaacccttgaaaaaaatggacctttcggaccttacatcttgaagctctgttcgcatgaaaaaaaaaaaaaaaatattctatcagcggtgacagcacgttgtgacccttgttccctgctgaaaaaaaaaaaagcggccggggagccacccctttaggggggggggggggggggggggggggggggggggggggggta

SEQ ID NO: 157155 - DNA, 449 bp, Zea mays
  Clone ID: MRT4577_74905C.1
aagtcaaaactggctcttatttggcccaacggttttaaaaaggtatgaccctccggggggggggggaaaaataaattttacggatggccggacagcaggggaaaggcccaaagcaggaaacgggaaaggaaacaaagggaaaacggacccgtaaaaaaccaggggggcccaaaaaggtaaaggggggatggttggaccactgcaaacccgaaaaaaaacaccacccctgggggatgcctaatgtttaaacagcagccaaataatcttggggcccgggtgccacctaccaaatccacgggatggggaaaaaacaatttttcctccggttaatttttaaaagcattttttacaaaacacgggaaggcattttccacgttcgttccatcctaagaaaacgtttaaaaggacgggaggttcccttaaaaggcgcaccatgcctttgccttttt

SEQ ID NO: 157156 - DNA, 394 bp, Zea mays
  Clone ID: MRT4577_74906C.1
aacatgaaactgaaaactaaaactcaaacaggaacgaaaaatgtgcattcaatggtaaccacgcgaataacctaccattgtccaacataagtattgcgcggagaacatgggagaaccaaagtgacgtatccaaaatccttacatccattacgccaaaatatattgaggaaccaaacccacacatccataacatagggatctacgcagccaggacctactaagtcgaaggcccagtgcctgtccctgcggctgtcatccgcctcatcatgagtaaacgcactctagatgctgaaggatggggcaatatcatgtggtgagtcgacctctgttatgtcaccttgagcgtgacagatgaccgtcgaggagagccttgacggtcacatagttcagcacg

SEQ ID NO: 157157 - DNA, 442 bp, Zea mays
  Clone ID: MRT4577_74907C.1
cacaagccagccgacggtcgagcacacctagccccccgggggggaaaaaaggcggcgataccgccgacgccacgaaccagcgcgagccaatcctggcccgaggagccatcgattgcaggcccaacgaggggagtggcacacgacaccacctgctcgcttcttgcgcacaaagcaggacgcgaaggtggaacgggagaagtactggacgaggtgcaagagtaagcagcccacgcggagtacaaacggcgagcccctcggatacgccacacccgggactgaggcccctctggcttcacctcgggggccgacacctcagagtagcaacttgaagggtgcttgcacagaccatgcgaagggggaaagcagctgggatcacttcggccacaaccatccgggcaggtcctgctaccgtagcagatccgacatagcagcgacgtcgcac

SEQ ID NO: 157158 - DNA, 260 bp, Zea mays
  Clone ID: MRT4577_74908C.1
tttttcttctttttttgtttgtattctgttttaaacggagggggggggcatataaattggatggacaaccatcccactggtacacgcaggtgtccccttttttcctgtcggtagggacatagatgccggccttggggtcagtgcaccctttcggcacgggcaatcggacatgctgtgccaacttgccataaaattcgaccttaaagtttaaagcgtccagccccggctgactgaggaacttgactaacaactgtacgcgc

SEQ ID NO: 157159 - DNA, 1583 bp, Zea mays
  Clone ID: MRT4577_74909C.1
aaataaaaaaaaaaaaagccgagcccaaacccgcgagtcagcgtgcggcagcgctccaatccgacttcatccctgctcggctggccgctacattgctgctgaaccctagccgccgcgccgctacctgctaccatcgctccacccgccgtccgccgcgacgccgcccatcgcgtcaccatcgtccggaaactgggcaataggggttgcggccgcccgttgccaccaggtcctctgcgcctgccgctacgggctgtccgcggcaccgcgcgtcacagtcgtcggaggcgcgttgggcggccgcctggttggccagccggcgactgcgtgtctctgtgctccgtggtccctttccttctgcgagaattgcagagcaattggggtacacagcacaggcacatgaatacaacacaacagtttgctctctgattcgatcgatccaactagcctccaagcatggtgttcggccggagcaaatcaacttcgtcgacgacgccatccgcgccctcaaaggcggcggctgcgtgctccgagctgcgcaccgcgtaccacgactgcttcaaccggtggtacgcggagaaattcgctaaggggcagtggcagagggacgactgcgccgaccactggcacaagtaccgcgcctgcctcgaggaacatctggaagacaagcatctgaggcaaatcctactggatgcagaaacttctgcattttatgccatgcctgaggccaaccctccctcgggacaaggaactacaaaatgacaatccacctgattggttacccgcaccatctcatcttgggtcaccgtatgcgtcgactttatttgagattatgtttggttgcttatatgtgggagtcacaacctgcatgagtggatgcaaaataagtcattttaatgttattaacctgcatccacccatacgtttaaaattatcgtgtttaaaattatcgtatctggctgaccaggacggcggcagcctgcgcatagacgcgcagccatccaatcaggctgatatctccttcaccatatgtcatatcggacttcattcaatcaggatatatagaaccttggtagatgaactagaaactccttggatcttgacaattgttaggcccctggatcatgtaacacttaacaagcaaaatttgcgtgtgtcagaatggtgtgtgccctgctatctggaaaccttgcaacagttgagaatagaatcagctgtagagctgtacatgttgaagaacgttgtgtttcaactgtggcttagcttttagcagagtttgttgagtaatatgtttcggacatggtattggtttcaatacattaatttctgatgttgttaaggtttcatgaatcctgacagtgacgtggtcactcaccctatggcgggtgctctgtgcttggaggagcagcaggcagcagctaaggcgagtgctctgctatctggacttcttgtcgatccttgtaataactcttgaagtttggtgagtgttccaattttttttttatttgggtcttgtttcatgtttttttgcatattttaagtgtgaaaaactttgcgctgggtaatccaacttccactcccgttat

SEQ ID NO: 157160 - DNA, 448 bp, Zea mays
  Clone ID: MRT4577_7490C.1
ccggtcctaattccccgtcacccaccgtcgacaaaaacaaaatttctaatcaacttctttacaattcatattaaccaagctgctaaacttatctacaacatatcctacataaaatctatatacataccttttaacttacttcaagggcttctctttttaacttccaatttttttcccgtcttcccacctttcttttttttttttttcccctaatttcatttttttgccttcgttttaaacatcttaacttgaaaaaccttggttttccccactttttttccttttgagaaattcccctttttcccaatttgatttttattcaaaaggcccccccccttcttttttttccaaattttcccccttcttatttttaattgggactcccccttttctgtgcctttttccccgagtttttttttttttcccccaagttttccttttattttta

SEQ ID NO: 157161 - DNA, 397 bp, Zea mays
  Clone ID: MRT4577_74910C.1
aaaaaaaaaaaaaaaaaaaaaaaaaaaaaaaaaaaaaaaaaaaaaaaaaaaaaaaaaaaaaaaaaaaaaaaaaaaaaaaaccaaaaaaaaaaaaaaaaaaaaaggtttccctcgggccgggaaccacccttaggggcgaaattttggaaaattcccatcaccctggggggccggttaaaccatgcattaagggggccaaattccccctaaagggagcggaataaaaattaacgggccggggtttaacaacgtgggaacgggaaaaacccgggggtacccaaattaaatcgcctggaaaaaaatccccttttccccagtgggggaaaaaccaaaaaggcccgacccaatcgcctttccaaaaattggcccaccctgaaagggcaaaagggacaccccc

SEQ ID NO: 157162 - DNA, 516 bp, Zea mays
  unsure (1)..(516): unsure at all n locations
  Clone ID: MRT4577_74911C.1
acgctgaagcaactttcttttaaaaataaacaaaatcaaacagaagtctcctaagatttttttgattcatgccacttaaataaacaactttctttgaccacagaaatagctcataagaaattagtgacaaatttaacatatgtttgacagactcataacaaaaaaaatacttggtatgcccaaaatgttaacacaacaataacgttcttttgaacatcttgtatttattgtcgcagagctccatccattgcctcccaggaaactaaaggcttggtggacatctgaaaatattgagattggtggacatctgaaaatattgcagaaattagtaaatgtgaccatgaagcaaaaaaaattgtagaaattgagtgcaagatgtcaacaagaaccttctcatagttcatattccatgaagctctagccatgactacatagtatacaataaccaatgactattacatcaaaataatactaatgattattataatcatnccacatctgcatagcaatttgatc

SEQ ID NO: 157163 - DNA, 231 bp, Zea mays
  Clone ID: MRT4577_74912C.1
tgggagcccccgctcagctgcaggagtaaacgtatcaaacttgatgtaccaggagccggacatgccatcgacgaggccattgatacggtcgccggtgacgcagccgacgcgcatgacctcctcggcgacggacatgtcgatggcctccagcgcagccagcgcgttgctctggatctggatgggtccgcggtactggccctccccgcgcaccgcgctcaggtcgcgctcgaa

SEQ ID NO: 157164 - DNA, 865 bp, Zea mays
  Clone ID: MRT4577_74913C.1
aggccggccgggccggggtcccccgaaactggcaaaggtgtgggacagttggctggaattttacatgacttcttggagaaaaccaacgatatggttaatggtacagatgattctatattgtatactcttccccaggaagagctgtttgaactgtttctaactctgagcggacagctttcacttctatggaatgcattcttgaaatttcataggctaaataaaacaaagatattggagtacttgcacgatgcttgggctattggcaggaaggcagaatggtcaatatggactattcactcgaaaattgagatccctcatcgctatctgcagagtatgagtgatgactcaccccaccgttattctcttagagtttctggctcaaggaagttccatgatgaccatgtacagaactctgcttcacgggcggaactacacaggaaaagcatagcacaaatgaagattaatccacattatgttcaagatatgcatatatatggtgatccttcacgtgttcctgttgttcttatagaacaacatgtcatggttgttccacagcatagttccagcaaggatatggcttcaaatgtttctgaacaaaaggatactattgtggtacctaaactacaaggagagcctctggtacccaaaagtagtgctggtaaaaaaagtggacgcatattgagagctgtcatttttgtgcatggatttcagggtcaccatctggatttacgtcttgttagaaaccaatggcttctattgcaccctggagctgactgcctgatgtctgaggctaatgaacataaaacactttggagactttaaagaaatgggaaccaggtgggctggggaagaactccccttcctg

SEQ ID NO: 157165 - DNA, 834 bp, Zea mays
  Clone ID: MRT4577_74914C.1
cattgggtacctcgaggccggccggggagaatctcttctccgatccgcccaggccaccatggcggaggatgctacgagcagccacccgtcacgctacgtcaagctcaccaaggaccaggacgcccccgccgaggacatccgccccggcgagctcaaccagccagttcacgtcccgcagctcgaaggccggaggtgtagcgagtgcggtcaggtcctgcccgagagctacgagccgcccgccgacgagccctggaccaccgggatcttcggatgcaccgatgacccagagacctgtatgtaatctagtctctcttttggattggaacttgggcatggtggtctgctgattctgttagcgacaacacatgctgattcaaaatattcattcagtccaaaatgcctgatcaaatgtttgctttgcttagcacttgtatgatctccctgtcaatatctgtatggaatcactaggccgaactggattgttttgcccctgcgtgctgtttgggcgcaacgttgaggctgttagggaggacatcccttgggcaactccttgcgtgtgccatgctgtattcgttgaaggagggatcacgctggcgattctgacggcgatatttcacggtgttgatccgaggacgtcattcctgattggagaaggtctggtgttcagctggtggttatgtgctacctacactggcatcttccgccaggggcttcagaggaaatatcatctcaaggtggccaattcaactcaactcaactctcctctctttccactactgttaattaagagcgagctaactcttgtttggccagaactctccgtgtgacccatgc

SEQ ID NO: 157166 - DNA, 887 bp, Zea mays
  unsure (1)..(887): unsure at all n locations
  Clone ID: MRT4577_74915C.1
gggtacctcgaggccggccgggatgagatgagcagacggaggcaaggccggggtcggcagcagaggggagcagagagatctcattctccgatccgcccaggccaccatggcggaggatgctacgagcagccacccgtcacgctacgtcaagctcaccaaggaccaggacgcccccgccgaggacatccgccccggcgagctcaaccagccagttcacgtcccgcaggtctcgctctctttcttccttagggtagggtatgtatccctcgtcctttgagtccgatggatctggatctcatccctactcccctgcccgacagcagctcgaaggccggaggtgtagcgagtgcggtcaggtcctgcccgagagctacgagccgcccgccgacgagccctggaccaccgggatcttcggatgcaccgatgacccagagacctgtatgtaatctagtctctcttttggattggaacttggcctgattctgttagcgacaacacatgctgattcaaaatattcattcagtccaaaatgcctgatcaaatgtttgctttgcttagcacctgtatgatctccctgtcaatatctgtatggaatcactaggccgaactggattgttttgcccctgcgtgctgtttgggcgcaacgttgaggctgttagggaggacatcccttggacaactccttgcgtgtgccatgctgtattcgttgaaggagggatcacgctggcgattctgacggcgatatttcacggtgttgatccgaggacgtcattcctgattggagaaggtctggtgttcagctggtggttatgtgccacctacactggcatcttccgncaggggcttcagaggaatatcatctcaaggtggcaaactcactcaactct

SEQ ID NO: 157167 - DNA, 562 bp, Zea mays
  Clone ID: MRT4577_74916C.1
cccagcgtccgcccacgcgttccgaaaaaaaaaaaaaaaaaaaaaaaaaaaaaaaaaaaaaaaaaaaaaaaaaaaaaaaaaaaaaaaaaaaaaaaaaaaaaaaaaaaaaaaaaaaaaaaaaaaaaaaaaaaagggggggccgttttaaaggatcaaattttacttacccttgcttgaaaaaaaaatgggtttttttttggggcccttaattttatttcatgggcggtggttttaaaactttttttttgggaaaacccttgggtttccccaatttaatggctttgaaaaaattccctttttggaaagttggggtttttcccaaaagggcccgcccttgttggcctttcccattttttgcccttcttttttgggaattgggcccccccttttcccttctttttaagcgtgggggttttggggtttccgggcagggggcctttttcttttgctagcgcctttgcgccggttttttttttttttttccttttttttttggcccggggggccttttttcccggttttttttttttttggggggtttcttttttggttttcctttttt

SEQ ID NO: 157168 - DNA, 333 bp, Zea mays
  Clone ID: MRT4577_74917C.1
cgtggatcggcacatgtgcaatctataaacgtcattccttttgttggtcacttcgggcaaatgccacaattatgaactttgcttatgaatgatagaagactgcatggagttatacatgagtgtatataacgcggtcgacgggcatgggacttaaatctatatgatctaacggatcaagcattatttattaatgacgactagcacttctgcgatcaaataggacgtggtcctctcaagacacattgaagtataaaaggactcgtctcaactgtaccattcgagaaagtcaattgcaaacgagtgcaaatccaagcagcgagcctttgtcaccac

SEQ ID NO: 157169 - DNA, 313 bp, Zea mays
  unsure (1)..(313): unsure at all n locations
  Clone ID: MRT4577_74918C.1
ctanttttttttttttttatctaatttcttgggggttttttaattaatttcgggcgttaacaaaaacaaaggcaacttaaaaagccttcctcttcttccccaaaaaaactttcttcccccccaaaaaaatgacacctaaccaaatcaatggggacacccgaaactcttgggcgaaacccctctccccctcctggtacccgaccccaatccaatgggacccgccacctaatttttcccaaagcataccgaaattaaaactttctgtaaaacccaaaaaactctccttagcccaagaccttcacgaaaaaccacc

SEQ ID NO: 157170 - DNA, 752 bp, Zea mays
  unsure (1)..(752): unsure at all n locations
  Clone ID: MRT4577_74919C.1
ccggccccgggatcatcatcatcatcagcatcatccgccttctctcttcccactactctacatctccagtatcattatcacaatgccttctctcaacgccctcctcagtgcctctttggcctttgcctccatcgccctcggcgcccccgccgttcaggacaagcacttctccgtcgaacaagtcaagaaccctcagttcgtcaagaacggccctcttgccctcgcccacgtctacgccaagtacggcgtccctctccccaagggtctcgagaaggccgtccagaaagtcaagtcctctcacaccaagcgtcagaacggcagcggttcagtcatcaccactcctcaagatgaggacatcgagtggttgacccctgtgcagatcggtacccctgcacagacactcaacctggactttgatactggttcttccgacctttgggtgttcagcaccgagacctctggtagcagtggacacgacgagtacaaccctgccaggagcagcacttccaagaagctttctggtgctacttggtccatcagctacggcgatggaagcacctcatcgggagacgtctacaaggacaaggtctctgttggaggccttcgttgtcagctcccaggctgtagagtctgcccagcgtgtctctgaccagtttgagcaagagactggtctcgacggcctnctcggtcttggnttcagctccatcaacaccgtcacacccacccagcagaacaccttcttcgacaacgct

SEQ ID NO: 157171 - DNA, 193 bp, Zea mays
  unsure (1)..(193): unsure at all n locations
  Clone ID: MRT4577_7491C.1
tcttactgactggnggccgggnatttgtttgcagggtgtgggacagggggcggagcacatgtttctgctttaacagggggggacaacactgtctgntcagtgnnagggncgacctccgggggcgccgcctgggaccgggaccgggggcttgcggggccgctgcccgcgggccatcggtttttcatacggcctg

SEQ ID NO: 157172 - DNA, 306 bp, Zea mays
  unsure (1)..(306): unsure at all n locations
  Clone ID: MRT4577_74920C.1
ggaattncccgggtgcgacgccacgcccgtccggagggctcaaggtcatncnnttctgccacttangtagtctcggaggggcnttgggctttgggctgggcgggcggccgcgccctgtttcgtgtcgcgcgcctgccgcccaacaaanngtgtcgcttagggtagaggtnnagtaggaatttnngcggtgcgnntgtgttgtcttaaagtgtgtnngctggaattagcnntgtggnngcctgtgggctttgtggctttgtgtnntctccgtcgtgtttcttgtggcngnngtgtggccccctgtgt

SEQ ID NO: 157173 - DNA, 625 bp, Zea mays
  Clone ID: MRT4577_74921C.1
ccccccctcgagtttttttttttttttttttttttttttttttttttttttttttttttttttttttttttttttttttttttttttttttttttggccaacaaacccggccaagcggggaattcaccccatgacaaacaaagggggccccaaacggaaacattccctaaaaggtcgaaccaaaacaggggggcaaaaaacaaccccccttttccccttttggaaatggggacagcaacaacaaaccaatttaacccccagttagggctgaagggccccccggaaccgacgggcacaggcattttttgggggcccccccctgctcggaacggaaaaacccgggctgccccccaccaccaaaagggtttttgccaaaaagggacttgaccccccacatcccgccgccccgggggctttgttccctttccgggggggggtcagggggcccccttttggggaactttaacacgtggaacccttcctccttggcaccccccaccagttccttgaacacggacccgtccatgggaggctgcccgcaaaggaaccaaaggaatttccgggagggctgccccacaaccccgtactggtagccggcgtcaatggggaccccccaaaatccccc

SEQ ID NO: 157174 - DNA, 1232 bp, Zea mays
  Clone ID: MRT4577_74922C.1
gggaccctcgaggccggccgggattctctcctccacacgggcgcgacccaaaaccccattcatcccctcctccggtctcgactgccatggccgccgggcgggccttccttggcgcgccgtgctcctccctcgccgccggcgcccgttgccttgccttcgcttcccctttgccccggaacctcacccccgcgctccgctgcggcgttcgcggtcgctgcatcgcctccgcctcctcgtcccctgactcgccccccttgccggagccctacgtgctcaccactcctctctactacgtcaacgctccgccgcatatgggaagcgcctacaccaccatcgcagcggacgccatcgcccgcttccagaggttgctagagaagaatgttatatttattaccggaacagatgaacacggtgagaaaatatctgcttccgcagaggccagtggtagaaacccaaaggagcattgtgatgcaatttcaagttcatataggacgctctgggctgacttagacatagaatatgacaagtttattcgcacaacggatcgtaagcatgaggctgttgtgaacgaattctattccagagtgttaaacaatggcgacatatatagagctgattatgaaggactttattgtgtgagctgtgaagagtacaaggatgaaaaagagctattggagaacaattgttgccctgtgcatctgaagccttgtgttgaaagaaaagaagataactatttctttgccttgtcaaagtaccaacataaattggaagagctactgacaagaaatcctgattttgtaaggccatcatatcgcttgaacgaggtccaaggctggattaaaagcggattaagggacttttctatttctcgtgcatctgtagaatggggcattccggtgccaaacgataccaagcagacaatatatgtgtggtttgatgctctattagggtatatttcagcattactagatgatggtgagcaggcaagtttgcagcaagctgttgatcatggttggccagcctcactgcacttgattggaaaggacatattacggtttcatgcagtttattggccagccatgttaatgtcagcaggtttaagtgttcctgatacagtttctggtcatggattcttgactaaggatggcatgaagatgggaaagtcactaggcaacacaccttgaccaaaagatctggtagaaagatttggtgctgatgctgctagggatttc

SEQ ID NO: 157175 - DNA, 255 bp, Zea mays
  Clone ID: MRT4577_74923C.1
atacttgctcttttacacctgtatgcacccatggtttcacatgtacaaagcgaaaaacgtctcagacaacctcaagcagagacacgacccaggattccctaaaaaaaaggacccaacaaatttatggggacgcccaaaaaaaagtcccaaaggggcgaaaaccaaaatgccaacaccagaacaaatttttttaaaaaaaacgggtaaactccttacacaaaaaaaccccccaaaaaaaagtcacccggggcccca

SEQ ID NO: 157176 - DNA, 1253 bp, Zea mays
  Clone ID: MRT4577_74924C.1
ttcgttcgccggccgccgcacagcaagcaatgtatttgaccctaagtcttccactcgctccttgctcgcgcggtcgccttctcgcgcggtcgacgatcgttccctccgccgtctcgcgcggtcgctcgtcccctccgtcaggtactcgttccctgctcattccctgctggcctgctccctcgttctcggcctcgttcccagacggtcagtatttgcgcgccgcctccttcgttctcggctccctgttccgccacccgcgtcgtccctgtttcgccacccgccaccgccagtgagcccgcgagcttcctcgacgtcggcaatggcgcaaggaaatggaggtggcgccccgactccacttccccagctcggtgcacgggccacggccaccctgtctctacctcaacggcaagccacaacagcgtctaccgcagatctgactccgaatcatccgacctccattgaggatggcgccggtggcagttcttcgttcacgccaacgccgagtgcaagcccaactgttgtaggcagcagctcggacacaggtaacaagcgaggtaggaaaaccacctctgatgtgtggaatgacttcgagcaactctacaaacaagttaatggtaagaaagtcaggtatgcagcaaaatgtcactactgcaaatcacagttaactgctaagggtggtacaggtcatttgcatcgacatcgtattgcttgtgcatctaaagctgaccgtgcaagtaggccacaatctttacttcagtttaatggtgatggttctgtgcgttcatgggattataatgctgctactgctcgtactgaaatgtgtcgtttgattgctactttagatcttcctttgggttttggtggtcatcctgcttttgagcgttacattagacgctctcataatcctaggttccgttctgtgtgtagacagacaacgactagagatcttgttaagtttttcaagcaacgtcgtaccgtgttgattgatctattgcaatctagtgtgtcatctgttgcactcacatctgatatatggtctggtaatgcgaaggaagattatattagtgttgttgcccattttgttaatgttgattggttgttagagaaaagggtcattggaatgaggcttattgatgtttcgcatagtggctctaatattgcagagcgggttgcaactgttgttgaagagtttaagttgattgataaggttttttattcttgcatccttacaccaagattctctggttatgttg

SEQ ID NO: 157177 - DNA, 234 bp, Zea mays
  Clone ID: MRT4577_74925C.1
acccggccgaccacgcgtccgcccacgcgtccgcccacgcgtccgaaaatatattatttaaaaaaaaaaaaaaaaaaaaaaggggaaagttaaatattagggtggccgttttaaaagatggcgggctgctttctcgtatcataccatttaatctcctttatgttacgtcacataaattctattgtgtggccgaaattttacaaaatagcgaccggtaaaaaactggcggaccgg

SEQ ID NO: 157178 - DNA, 620 bp, Zea mays
  Clone ID: MRT4577_74926C.1
acagaaggcggcttaaaaccgccgataataatgcaacaattaatccactccatgggccccaagagaatgaggtgttggtaggtttggcgttaatctactcccaataatttgtgagcccatccgcctgattaatagcagccgatggacacggtacttttccatcactagccacctaatttatatctcaggccattttacatagatggatgggtcatggataagcaacatgaacagtaggtgcatgtcttcctcagttcgctagcaattttttcctgacatcaaatctccagacaccgaatgttcctggggaaaatgctctctcactatactaagaatatacattttgttatacctgacgatcgcacagtagcataggcatagcactaggaaaaaaagttctgagagggattcggtggtgcacgtgcccgcctctagcaactttgacggacggtcgatcagagctcagaaggtggctttcttgagcgaggtgatggtgaccgacgaccccagcgcggaggcgccgacctggacgtcgaagcagtcgtagcggaggaagagctcgacgaccccacgcgtccgcccacgcgtccggaagtccttggcggggcactggttgtcct

SEQ ID NO: 157179 - DNA, 281 bp, Zea mays
  unsure (1)..(281): unsure at all n locations
  Clone ID: MRT4577_74927C.1
cggccccccgactgaccgtccccccgggggggtgaaccaaataagtggaggggacacccnaaccccccnacccnnctcctacccgccggagccagaccacccgctcctaagggggaacaaccaccaatccacccactggcaccacacacacagaggacactacctacaccaaggcgtatgccagagcactcccctccgaaacccacaaggagaccaccagccacgctccaaagccacctcgagacatccaggcggcgcgcgtcatcaccgacaaaaacact

SEQ ID NO: 157180 - DNA, 415 bp, Zea mays
  unsure (1)..(415): unsure at all n locations
  Clone ID: MRT4577_74928C.1
anggaacgcnggaagaacaagcgacaaccaaaaagaaacggagggagaaccggcgaaaccgcaaaagaaacccaggggcccacacaaagggccaggcaagcgacncngcacaggacggaccacaagcatggaaccttttctttagggcgggcgnaaaaggagagcgcacnccaaagccggaacaacnggagnaagggggtgctacagcagatccaccgtgtcaaagagactgctacatacaacaaagcctaaagcctccaagaaccagtcactaggaaagcctagagatgcggacatacgaagaatgcccacacaccggggggacagtccggagcaaagaagcaaccatggccagggaagaaaacaagagcgggcggaccaacacacacgaaaaagaacggacagaaaaggaaag

SEQ ID NO: 157181 - DNA, 180 bp, Zea mays
  Clone ID: MRT4577_74929C.1
tcggcggacgcttccgccgttcccctgcattccaggccagccacgacccccgtggcttctacgctgcccgccagcgccagctgagtgctacatcgcagtgtcagggctgatgccgtgcgcggacttactcacccacattgggctgtcaccggtaccactcacgagcgcctgctgtgacgg

SEQ ID NO: 157182 - DNA, 487 bp, Zea mays
  Clone ID: MRT4577_7492C.1
gtactaaaaacctattttctttattaattctgaatttcttaagggtcctggactgggcacaatatttcttaagagatcaggggctaagtggcaatttctccaagactcatattcaccccgcgtggatggcgggttgattttcataaacttcatgagctcttttgtgaaacgctcaggccgaaggggtatcgagttagatcgaccgtcccagtacaaattcacacgcgggggaagaacacggttcgctgatgaatcccgccgcgacgcgcgacggagataaggtcgcccggccactgcatggaaccacaacgacacttctccgcacgatcagggtagacgccgaggcaccgcgatatgcagctaataccggagcccgcgaccctctctcactctctccgacgagcagatcccgagcaccggtggccgattcttgcccgaaccgcccacggccacggatggggagcatcgaccaagcaatgaaggcccc

SEQ ID NO: 157183 - DNA, 215 bp, Zea mays
  Clone ID: MRT4577_74930C.1
gccggccgggtcgggattttcttctctcatatcatgcactctgcatagcctacactgacctcgatcacattgatgcgcgatgacgctcttgtcgacgctcttgcatgtgaaggattctaaattcttcttctgcgtcgaattgtctttgtcatgagcgaataataacaatcaaagttatacttaccatacaataaaaaaaaaaaaaaaggccccta

SEQ ID NO: 157184 - DNA, 568 bp, Zea mays
  unsure (1)..(568): unsure at all n locations
  Clone ID: MRT4577_74931C.1
gggctggtaagcccagagaacaggnngacgggcattttgtggnggcgctnnggggggggcggcgagagnggnnggngcaganggccggggaaggaggggagcggcaggaagaaggaggccgnnngggggccgaccgaagagagcgcccgagcaacggggggcngcgccaccacgagggacaggaagggaagccccgcgccgngccccgccncaggggggggggcggggcccccncnncgncgaggccgaccgcgccgcgcncgacggcgaccgcgaccagcgggagcgccggccgaccccagagggcgccagaagccccggcgcgccctttttttntgccggggactccttnggcgtgggctatgggtcttaccccgtctcccttgtcggcgattacatcttactcggttttgctgaggcgccgggaagtgtgggatctccttgttttcccctctggtcctcagttgtaggggccggccctatttgtcctctgggcgggaggctgcttttcatctgcccccctgcgggcacccctcggctcctgcctcttgggagggtggcctggggc

SEQ ID NO: 157185 - DNA, 670 bp, Zea mays
  Clone ID: MRT4577_74932C.1
tgggaccctcgaggccggccgggacgcgatatcgcaccaccgacaccaccacccatctgaccattaccgggtacgcacggccagccagctcccgactatcaccctcccgaatacttgccatcggcgtctttcgatcacaacatgtccttcggtcgcgccgcgtctaagccagccgagcgggcgtaccactcccggcctaccgagcaacccccgttagcgctgaacacccagcgcggtttctcgcaggcggctatccgcaagagtgatgcgcatgccgaggagaccttggaagagttcacgcgcgggtacgagaaggaattcgagaagagcaacgacggtttcgagcttcagcgagacctgaacgactgcttcgcctacgatctcgatcacttaaccaccgtcatcaccgacgctctccgcgctgtcgggcgtgacatcgagttcccctccgctgtccgtgtgtttcgagggcataccattccaggtcgagaacaaggttcaatatgcagagaacctccaggagcgtgagaccatacatgaggagctcggtatccctctcacagagggcatgtaccccgatgagaagcaaagaaagagggtgaggctgcgcatatccgatttccccatgctcctactccacatcttgacatcgaataccgtggcgcggatc

SEQ ID NO: 157186 - DNA, 1655 bp, Zea mays
  Clone ID: MRT4577_74933C.1
ttcccgcgtccgccccgcgtccgcggggggggggggccgcgtccgcccacgcgtccgcccacgcgtccgcatagagctagcaatacatcgctagctcacttgatatacatattgcatcggcataaaaactgaatttaccatggcccacttgatctcttctgcaatcgcaggcgcgggcaacttggtcgctgatggaatcagtggtgtcactggcgtagcgtcgcaggttgtagaaggcgtagaggacactttaggcagtatcgtagaagcaatcgaccaaggagtcaaggatgaggaccaactggatttgcccaagtacgtgtgtttcaagggagataatggtctgtacctgagtgctcgaacagttgaaggccacccctacctgcagtttgcatcggaagacattggcgacccaagtgtgaggttcatcacctacaaccacaaggtgaacggcaaacgggtggtgcgcttcaagtcgaaccatctcggcaagttctggaggcggagccccaactggatctgggccgacaccgacgacaccagcaccaacaactccgacaccctgttcgaggtcatcaagatcgacgaggatggtgtgtacgcgctccggaacctcggcaacaaccacttctgccacaggctgacctacgacggcaaggagagctgcctgaacgccacaattccgaccatcaggaaggaggcgcacatcaagatcgaagaagccgtcctctcccgaaagatctccaacatcgagtaccacctcaagggcgccaagatcttcgacaagaaggccaagaccctcatcactcgagaggcggtgaacggcaccagcacggacagcaagaccaccatcaccctcaagtacagcgtcatcaagggcaagctatgggattcgagcaagtccatgaagctgggggtcaccaccaccattgaagctggggttcctgtggtcttacccgcaaccattgaccgcaaccatgagtcctcagcgagatcatcaccaccggcagccgaggggagtccagcatcgacaaaaagaggggggtcaccataccaggctagttcgtgctcatgtcgtcgtaccctcagcgatctaggtccagagcgagttcaactccacctacagctggggcgagtccatcatcgagaaagaagagtactccaacgcctacgaggtcgttgtgcctgcatactccgtcgtcacggtcagcgtgctcgctacacagggcatctgccaagtccccttctcttatactcaggaggacgttttgactaccggagagaggaaggttttcaagtttgatgacggccaatcttccgtggtgttaatagcttcggtttcaagtccgaggtcacggaaaggaagctctccaaggatgatcgactgagcggaatatatcgtccatatagtctctcgatataaacttcgagcggtgtgatttataaataagccatattaatgtaataatgctttaataagcagttcatatgtgtgtcgaaaatacgttttaattttatactactactacgtgtgcatgcactcttcatgtgtaatgctttacttgtaatttattgcgaataaacaaagagagtatgtctccaccaaaaaaaaaaaaaaaaaaaaaaaaaaaaaaaacctcggccgcgaccacgct

SEQ ID NO: 157187 - DNA, 364 bp, Zea mays
  Clone ID: MRT4577_74934C.1
ccagagcgcagaagaacccgatcgacaccatgatggtggtgctcgttgccctcgctcggctggggctcgctgcgagcgccacctacacgcatacaagcggcggctgcggctgccagccaccgtcgtcggttcatctaccgccgtcggtgcatctgccacctgcggttcacctgccacctacggtgcatcttccaccgccggtccacctgccgccgccgtaccacctgccaacgacggtccatgtgccgccgacggctcatgtgtcgtcgccaccatgccgataccctactcaacctgcacggactcaggctaacattagtcatacgcatgcccgggctaactgtctcatgcaagcccgtgccag

SEQ ID NO: 157188 - DNA, 395 bp, Zea mays
  unsure (1)..(395): unsure at all n locations
  Clone ID: MRT4577_74935C.1
gagccactagagcggccgccagccgcagacgagcgttttcactaacagccacccgccgccaccgggggcaggggccagcaagacggacaccaccaccccnacccaacgcgggacaaggacaccaccgacgcgcagcgcgcaaaaccgaagccccgagggcaacacgaccgaaagccccggccccacggactgaacgagggcccgcgcccgcacaacctggaagcgagacaggagctgcaccgaacacgacgccgacggacaggaagccggcccacgccaggcccgcaccaatgccggaccgccacggaaacgacgaggcaaaccagacagcggaaaccgcgacgaccgcgagcaagagccccggcgccgacggccaccgaaggggcagcacacgc

SEQ ID NO: 157189 - DNA, 418 bp, Zea mays
  Clone ID: MRT4577_74936C.1
cctcggaaaattcttttttttttttttttttttttttttttttttttttttttttttttttttaatttttttatggttcaatttactttcctggtttcatgggtaacaacagacctgaccggctcacacttataccagaaatgtacggtgaaaccccccctatagctgtttactaaaagaaacaaaacaggctttccaactacaaactggtccactgattttaacaaaacggccctggggaagaaaatgaaagtatggcggagacacctccaacgaacgcccgttcttttttaaaaacacactctcctttttgccaaagggatgggaaaaaaataaagaaatgtttaggtaaaacacattactctcgaacttttgaaaatttttgatctacttatcagggctcttccagacggggggc

SEQ ID NO: 157190 - DNA, 441 bp, Zea mays
  unsure (1)..(441): unsure at all n locations
  Clone ID: MRT4577_74937C.1
taaaacataaaccgagaaacacatggaaancaagctagaggcgggtctctcaactctganggcactctctcaacaaggatgccaaagctctgtgctttgcagtccttatcgtgatggctgtgatattctcgtcttgtgaagcaggaggcaataggtgccatgctttcccaggatgtgactcgatactgtgctgggcggagggggacaggctagggtacagcaaccctaagccacgctgcctttatcccaagcctaaccatgatggcgatgaatgttgttgttaggctaaaaaaaacctgggtgtgtgtgtgtgtgtgcccctttgttgaaacggggtatcagtttcatgcaaggtggtgtgtgtgcgtctcaccgccaactatggatgttggtcaactatgaataagaacaacaattcgtgatgcccaaaaaaaaacaaaa

SEQ ID NO: 157191 - DNA, 103 bp, Zea mays
  Clone ID: MRT4577_74938C.1
cacacgcgtgcgtatgacgcctggtctactccttgcacatccccttcatcacctacgggtaggtacctctgtccaagatgattctcgatctggccacgaacag

SEQ ID NO: 157192 - DNA, 493 bp, Zea mays
  unsure (1)..(493): unsure at all n locations
  Clone ID: MRT4577_74939C.1
ttgggtacctcgaggccggccgggccgtttttccctcctgcaaacctcacatccctccctctcctctcctctccctcttccctctctacgccccaaacaaacaaagctaaggaagaaaccgagaaatctccctcctgttgtcttggcggtgaggcaaggtccaacggtgaggatcatgtctgcggcgtgggaaggcgggaaggagaaaggcgcggccacccccgcccccgggggcgcgtgcgagctgtgcggcgccatggccagggtgtactgcggtgccgacgaggccacgctctgctggggctgcgacgcgcaggtgcacggcgccaacttcctggtggcgcgccacgcgcgcgcgctgctgtgccggggctgcgcgcgccccacttcgtggcgcgccgcgggcccgcgcctcggcccctctgcctccctctgcgaccgctgcgtccgccgcggntcgggtgccgtcggcacgggcggtgacgtggagatg

SEQ ID NO: 157193 - DNA, 1202 bp, Zea mays
  Clone ID: MRT4577_7493C.1
gttctcccctaccttagccgctcacaagactttagcagctcttccaggccggctcctcttccttctcttggtgcgtgctcatatcatggccaagatttgctcatgcctctttccacttcaagcatgcatatgcgtcgtctctgctggcagcccggccgttctgacgctagctgatcgatctactccatcaccgagctggctcttctatggattattcgtcctcgtccaccgtgggacgccatgatagcaatattaagctagcaggtttggtcgatcgatcggctcgtgtcgtgtgtgcctggctccctgtatgccacacatgtagccaacccgtggcgtgattggatgctgtgggtggcgtgcaaggagccaagcatgcataacaggccatgatcacttcctctctatcctctgatctgttgaatatatctgtatcgtgttttttttcccgagatgatgatgcacttatttcatgctgttacatgcatctgtatgcttgtcttgggttcgaattgcttctgcagggttagaatttaggactggtttggagaaggcaggtgagttccaatcctctttcaaagctccatcaatcgacatcacgaaattgagagagagtttacagttcgcccattttttatcctaaaaacacatctacttttcttttgcttacatgagagcctagccgcctcttgccgctgaatctgtgttgatttgtttggtttccgtcgtatccatagaaaaccacccgttgtctgctagatgtagtccatttgatcaccgatctgagctaagctagtggttgtccaccttttgtttgttttggtttttgtctctacggccatttgcggccactggaatcggcagtgcgcaagtctttttgtaatttagttcgtcagttttcgtctggactagtgtgcatctgaaacggacttagctggatttcgtttggaaagccgatacgcacttcaagtttcggctgcaaatggccaggtgtaatggacagcaagcttcagttactgctttagtagtacctaactgcagtagtcagtttgactgagaattagttgaccattttttgtcttacaacgagggcattatttccactgttcttgagcatctaagattttgcttgttcttatcatatgcttcacgaattatcaaagttcttttttaccacaaaagaataaaccatgtttggattg

SEQ ID NO: 157194 - DNA, 465 bp, Zea mays
  Clone ID: MRT4577_74940C.1
ggggccccaaaaaaaaaaagcctaaaaaaaaaacggggggggccttggttcaagggggggcccttggcaaaaaagggaaagggggatagcccccctttgaacggggggaaaaagagaggtttttagttgggaaaacaaatccaacctgaaaaagggggaccggtcccggacaaggggaaaattggggggggtttgcatagggggagggggttttgcaaaaaagctgggggggtcaggggcttttccggtggggaggaaaaatttttttaggaaagggccttttgccccctgaactttgaaaaattggaaggggtgaagatccgggtaaaaaaggggaaaagcaatttttagcctgttttgtttccccttgggaggctgggaaaaggcttcttttggccccccaaacttttttttgaccccggggaaaaaaaggggggttttcgccccgggggtttaaattttagg

SEQ ID NO: 157195 - DNA, 2386 bp, Zea mays
  unsure (1)..(2386): unsure at all n locations
  Clone ID: MRT4577_74941C.1
gttccatttgtggttctattctattcttatagccagcgactttgaaaatacagggcgaggtgcactggctcgccggccgggatacttccgtgtcttcccggccttcttcggatggccagacccctccttctccaaaatcccagaataccttgggctcccgagcaggagagagcaatgcaacgagccatccggatagccgcggctgcgacaaggcgagcgctgtcgtcgtcggcggcgagggcatcgccccctcctccccgcggccccctggctcctggctggggcgccactaggtggctctgcagcgggcgggaggcgctgagctacgacgtggtgatcgtgggcgcagggcccgcggggctcgccgcggcgatccggctgaagcagctctgccgcgctgctgacaccgacctctccgtatgcgtcctggagaagggctccgaagtcggtgctcatgtgctgtcggggaatgtgtttgagccccgagccttggacgagctcattcccaagtggaggcaagaggattctccaatcagagttcctgtttcatctgacaagttctggctgttaacgaagaaccaagcttggacactaccatctccatttgacaacaaaggaaactacgtgatcagcttgagccaattggtgcgttggatggccacaaaagctgaagagttgggtgttgaagtgtatccaggttttgctgctagtgagatactttatgatgaaaatcaaatagttacaggagtcgcaaccaatgatgttggtattgctaaggatggtaccaaaagggaaacttttcaacctggtgtagaactaagagggcgaataacactgcttgctgagggttgccgcggttcgttatcagagaaaataataagaaatcacaagctcagagagagagggcaagggcaacatcagacatatgctcttggaattaaggaggtttgggagattgaagaaggaaagcacaatccaggttctgttattcatactgttggatggcctttggatactaaaacatatggaggatcattcctgtaccaccttgatgatagacagttggcaattggtctggttgttgcgttgaattatcgaaatccgtttctgagtccctatgatgaattccagaaatttaagcagcaccctgctgttagaaaacttttggaaggtggaacagctattcagtatggtgcacgtactctcaatgaaggtggtttccagtcaataccatatccaattttccctggaggtgcaattattggatgctctgcaggatttctaaatgttcccaaaataaaaggaacccatacagctatgaaatcaggtatgcttgcggcggaagcaactttcaagtccctcgttgaaggatcttcgatggaactgtactgggagaacctcaagaagtcatggatatgggaagaacttcataaagctaggaattatagaccagcatttgaatacggattaattccgggtatggttttgtctgcactggaacgctacatattcaaagggaagtcaccttatacattgaagcatgggagacccgatcatgaagcaacagacacggccaatctgcatgcgcctattcaatatcctaaaccagatggacatataacatttgatgtcccaacatctttatacaggagcaatacaaaccatgagcatgatcagccgcctcatctccgcttgagggatcctacagtacccgaacgagtaaatgttgcactgtatgcagcgccagaatcacgctattgcccagcccgggtttacgaatatatctctgatgagaaaggtgacccaaagcttcatataaatgcacagaattgtcttcattgcaaggcttgcgacatcaaagatccaaagcagaacatcgagtggacagttccagaaggtggaggtggtcctggttacacagtaatgtagaatgctcaatgatgaaaatatgttgccttcaaaaataataacggctcattcaccactggtgtcaaactggaccaaatccctggctaattgggttggaagttacaccagacatctagcaatgagcaacttccttaaagcagtagacaggatgtcaggatgttcctagagctatgtaccgatcaggatcagtcagggaaagaagcgtgcatcacatggatgtggtgactgtaaaactattgggaagatgcaatttgtcgaccaataacaggcgctgtaagagagatctgtcccaaacgaaatatcgtaaggtgagatggagaatggcccagagctgggaatgtattaaaatagacagagtagataggccaagccccttatacatgggtatataggtaaatccatgaggattaatcaaaaaccctagcgaggttgctaacatcccgtactcttnaccttt

SEQ ID NO: 157196 - DNA, 704 bp, Zea mays
  unsure (1)..(704): unsure at all n locations
  Clone ID: MRT4577_74942C.1
gnacattacttcagcctgtatatggtagtctagaatcgatttaccagaacatcttttcaatatgtatttctctccatccatcattcctttgggagtggggcaatacaaaccatgagcatgatcagccgcctcatctccgcttgagggatcctacagtacccgaacgagtaaatgttgcactgtatgcagcgccagaatcacgctattgcccagcccgggtttacgagtacgtaaactagccactccttgttgaattcccgttgctcccttcatgcatcaatgactcaaagctttagtggccaagagttttctgatcactactgtgtctgttttcatgtagatatatctctgatgagaaaggtgacccaaagcttcatataaatgcacagaattgtcttcattgcaaggcttgcgacatcaaagatccaaagcagaacatcgagtggacagttccagaaggtggaggtggtcctggttacacagtaatgtagaatgctcaatgatgaaaatatgnngccttcaaaaataataacggctcattcaccactggtgtcaaactggaccaaatccctggctaattgggttggaagttacaccagacatctagcaatgagcaacttccttaaagcagtagacaggatgtcaggatgttcctagagctatgtaccgatcaggatcagtcagggaaagaacgtgcatcacat

SEQ ID NO: 157197 - DNA, 337 bp, Zea mays
  Clone ID: MRT4577_74943C.1
tcgttgaaccaagcttggacactaccatctgcatttgacaacaaaggaaactacgtgatcagcttgagccaattggtgcgttggatggccacaaaagctgaagagttgggtgttgaagtgtatccaggttttgctgctagtgaggtatcatcattattcattttagaaacccttatgtggaaggactaatatctctctgaattcttctctaacagataatttatgatgaaaatcaaatagttacaggagtcgcatccaatgatgttggtattgctaaggatggtgccaaaagggaatcttttcatcctggtgttgaactaagaggcatgtaaacttt

SEQ ID NO: 157198 - DNA, 211 bp, Zea mays
  Clone ID: MRT4577_74944C.1
ggtgtcctcaagaccctcagttatcggcatccgccctcgactactgctcggggaaattgtggcaactgacagggaatgtgcttgaatgagttctgacgcaatcactggcacgagcggagcgataataaagcggatgacgtgtcaccgttggccttctgttatactgaccccgtctatatcaagttcatacttaggatatcgcgagggtatt

SEQ ID NO: 157199 - DNA, 322 bp, Zea mays
  Clone ID: MRT4577_74945C.1
caaaagggggtcgcccttttttttattggtccaaaattaaacccctgaacatattaagttacctaacccgggggcggggggtacttttctccgggggagcttttaccccccaaacttttttggtgaaagttcctttggccaacatttaaaaataaacttattctcgcttcaatgggttaaaacttgggcaaataaaggggccaaaaccttttatttttatatgacaccccctttgggaaatttggttggccctccaggtccaaaattttttaacaaaaaacaaggattccttgtcaacagtttatcaagcgaacatttttta

SEQ ID NO: 157200 - DNA, 569 bp, Zea mays
  Clone ID: MRT4577_74946C.1
attgggtacctcgaggccggccgaagactatacattacatcataccccttgaaagcatagaatacagcgtctctacaacacaaaggggaaagatgacgtgatcgagagcggacgctgaagggggggagatcgctggcaaagactacacggaccctcccccgtggcctctgatcaacgcgagcggaatacgaacctggtcctgtgacaccgcttcgcgtatcctccagtttatcgtcacactgctgttcctgtacatcaccgcggacactcgcgatcgggtacaagcacaagacagacccagctcttccccaagccgacccggcatgcctcggcgtgggtgtggtgggcatcccctgcggcttcgacgagatgatcttcgatctcggctactgtaccggcgggatctcgggggggcacatcacacacggcacgtgaccttatcgttcgattactgtacacgcaaggtctccactggagcacccggtgttctacatcgggacgcacagccgtgatgacatatgggaagtatgtctaactcaggtgatacatagcgcctacttacacaagta

SEQ ID NO: 157201 - DNA, 261 bp, Zea mays
  Clone ID: MRT4577_74947C.1
attcggctcgaggttgggggggggggacttttttatccatccaacgatgtgaacgaacccgatgggggcatgtgagaaatactctagaccattaggactcggtgttggggaatgggctatacttgtactatttatttacagaatgagcatgtgatgaaacctcgatttccatgagggctgactatgaaaaatacactaactatggtgtcatatcctatatggcttgaatcagacaaaaaaagaaagacgggctgccgacat

SEQ ID NO: 157202 - DNA, 527 bp, Zea mays
  Clone ID: MRT4577_74948C.1
actcgcctcacttcgtgtatggtcttcagagtagtagacagagcaggaggagcacgagagaggagcagcgaagaagaagaatagagagcagtaggcagcagcagcttccgatgttgctgctacgtgggcataggccaccaagatcttcctgtgtctcgtggcggtgctcctgggcgcgggactcgtcctcggcttcggtctggcccgccacacgtggggagccgaaaggacccggcagtaatccggactggcgctggaccgactggcagctgcaccagggaggcgaccccccgctcctcccggatgtcgactccacgcggtccaacccgctctctagctcgtcgtcgccgctttccacggaggcgccgccaccccgtctccgtacgccggaggcgtcgtgtcggctacgggcgagccgtatcttggaccaactggaccgttcgccgagggactcgaaccaagcggtcatgcgtgtcgggggctggcttcttcttttttgtgacttttgctcggagtgttctcccttc

SEQ ID NO: 157203 - DNA, 861 bp, Zea mays
  unsure (1)..(861): unsure at all n locations
  Clone ID: MRT4577_74949C.1
ggaccctcgggctcggccgggctccttcagctctcccacccatacttctctatctctcttgcttccattgggcaatctgttcacgtcaggacttaggagggcgcgcgtcgggcgtgacttgcattggtagagtgagagactcggggagagaagagaatgatgtcaagggagcgcaagaaggcggctgcggctctccaggagaagctcaagatcctccgctccatcactcattcccacgctctgagcaacacatcgataatcatggacgcgtcggcgtacatcaagcagctgcagcagaaggtggtgaggctgaaccaggagattgcctgcgcgcaggacgccctgagacacaagtcctcctcctatccgacggtgagcgtggaaaccctaggagtgcaggggttcctcgtcaacgtgttctccgacaagagctgcccggggctgctcgtctccgtcctggaagccttcgacgagctggggctcagcgtcctccaggccaccgcgtcctgcgcggccgactccttccgcctcgaggctgtgggcggggagaacgtggtggacaacgtggacgagcacgtcgtaagcaggcacacacgcacacgcctctacttgcattgcattggtcgtcctctcatgtgtcagcgtgcccagctggaccgcgtgtagctagtcgatcgccgtctcaactctcagggagaccccttgttttgctagctaatagcatctcggtttccctctcttccaatttgatttttttcctatttatttatgcttctattcatctacctatcggtggcatgcaatgcaagctggaatatatatatatagncgatggatcgggtgaggtcgttcgttcgtaac

SEQ ID NO: 157204 - DNA, 829 bp, Zea mays
  unsure (1)..(829): unsure at all n locations
  Clone ID: MRT4577_7494C.1
cctcgaggcggcgggagctcgtcaaagaagggccacgggagtagctctgtccctgcggccctcaacggctacctgtgctgtcctccctccgcctacctgcgcctcccgtcgtttcccgctgcgcagcttcatcggtctccggtggtccgccccccgtttccaggttagggagcgagcttgtgcgtccgtagcggttgtcaatggcaagccgggatgcagcttcagactcggagtacctactttaaatgtttgtcaatctcgccaaaggtctgttgtcattagaaatgaacatgctcaaaatgctgaccttccacgaaaatattcaaaaagagagaagaaaccatttcctatcccagtgctggagttaaggcgccgagcaaaggagaggatgaaggcagcacaagggaaaccgaaacaaccaatgcctccaccaaaaaacggaatgtattgcagcgagatacatgttggatctgttggacatcctttccgaacatgccgaggaatgtcatcagatcaacgaagaggagaacatgactggggaagtactctagtggaggcagttttcttacccgtcgaagcctatcatctagaggaccgtctagggaatcgcattcctcatgatcagaggtttactgtaccccgcattcccgctctcgtggaactttgcatccaagctggagttgacctccctgagtaccccacaagcgtcgaagaaagcctatcattaaaatcngaagaaaagagtttgttgatgcaaatgaagacgacctaccagaaccagagcctgacagatttaggcagccacttcttgaggaactacgttatgatg

SEQ ID NO: 157205 - DNA, 270 bp, Zea mays
  Clone ID: MRT4577_74950C.1
ggcctggggttgatggtgaagagcatcgaatgggatcagagactggtggagagagcccagcgcctggaccaggagcttctgcaggctctggagaaagaggagaagaggaacccgcaggtggtccaaaccagccctcgtcactcccacaccacgtggttaggtgggtagaccccacagccctgtgtgaggagcttctgcttccactggagaacccgtgtcagggcagggcccgcttgctgctcacaggcctccacgcctgtggggatctga

SEQ ID NO: 157206 - DNA, 637 bp, Zea mays
  Clone ID: MRT4577_74951C.1
tccagatgatcgggagccagatttcatatttaaagatgcaggttgccgctactgccggctcggtctcgttcgtgctgcctgacaagggccggccgatggataaaagtaccgcgtagtaccttgtccctgtctcaaggacgatcgtccgtgaacctgctgttgccttgcccgaggctgcggacatctactacagctcgatcttctcggtgcttcccatggaggcctgtcacctgctcggcactgatgcctgcagcgcgcacatggacccagagaccatgctcgcctcggcggcggccatggccagcaagaggctgctggaggtggacaaggactacctgtcgtacgacgagccaagaacggcgttcccgggcgaggcagtgcgacgacctcgacaacgagttctgctacgcgccataccacgccggcgactccaacgagctggcgcacgcctgagactgatgcaaaatctcatccatatctgactacaaccgagctggtctcagcaaatgatgctacctcaccatagatgttcacgacatgttataatgtgagtagcaccctagcagatgaccgagcaaggccgatgcagtatgctatggatatatgtatgtaccatgaatcacaatgagatggtact

SEQ ID NO: 157207 - DNA, 820 bp, Zea mays
  unsure (1)..(820): unsure at all n locations
  Clone ID: MRT4577_74952C.1
cccacgcgtccgctgcccttcccctgcccgccgatcgcttgccccactcccttgcttccgtggcgcacacgccgcgcacgcgtgctcgcctctcctggaaccgtctccgccgccctcccgcgtcggcgtcgcggcgcaagagggtaccctgaatttcgtcagtgccaagtgacgaccgcttttgcccatttgtgatagctgaatctctgtggttcaaaggcgattgattttggtttgctgacgcacgcctaatgagctcccaagtctccacatcacacggtcttcatcccccggggaagcttgggacatttgagtcaccccatgcctggccgctgtcagcgcctacggcccagcccgaagcgggacgcggtgatgaccaggaggtcaggctgttgtcggttgcctggaaccaagattgtggatgcttcgcggctggtaccagcaatgggtttaggatctttaactgcgaccctttcaaggagactttcaggagggatcttaagagcggcggttttgggatcgtcgagatgttgttccgttgcaacatccttgcccttgtaggaggcggctccaatgtgcagtatccgccgaacaaggtgatgatttgggatgaccaccagagccgttgcattggagagttcgccttccgctcagatgtccgagccgtaaagttggcgaaggactacatcgtgattgtcctcgagcgcaagatatttgtctacaactttaccgatttgaagctgctctaccagattgacaccctgtcaaatcccagggnggactttgctgtctctctcataattccanntacttcagtatt

SEQ ID NO: 157208 - DNA, 483 bp, Zea mays
  Clone ID: MRT4577_74953C.1
ctcgaattccgttgctgtcgctacatctcttgatgaactgcgtgagctttgttcctttgttaataaaagaacaatagggggtgcactcctcttgtgtccctaacaaaagaattttcctctatggcaactaatcacacactcttggaagtaacatagattgcatatgtattagccggttaattttgctgacttactcttcgggttgaacccagcaatatatcatgatgactttatcttctatgtctagccaattccccagataagaacatctccaatagttcacaatcaataagttttacaagtggctaaaaaaggttgggagtatattttccaccagttcttaaaatcttgttcctagaatatagaagataattttacatctagaatcatgcaatgcttttaaatcatactaaccaattttatattttctttggatatttgcatcaggaaccttgccctgcctttttattctttccggcgtat

SEQ ID NO: 157209 - DNA, 250 bp, Zea mays
  Clone ID: MRT4577_74954C.1
cggacgctgggcggacgcgtgggcggacgcgtgggcggcgcttctccggctacaggaccccagcggctgctacctctcctgcccgaacctccgcgacccgcagccgccgtcgtcgcagtgcattttcggctcggcgggcgggttcgggcaggcttcgaggctgcacgacccggcgctgtcgccgtcggatttcctggccagcggaagcctcggcctcagtcacggcggactcttgggctccgagggtcta

SEQ ID NO: 157210 - DNA, 462 bp, Zea mays
  Clone ID: MRT4577_74955C.1
ccggccgggccagtccggctccggcccgtgcccgtcacgactcacgcgagacagcgaaacttttcccagcggcgaagcggagatcggagaaggaaccccaccctgcccagtgagatcttctcctagcagccgcaatctctcctccctcggcgcggaggacgagcagcgctgtagattcgatcgtgtgtgctcccgagatggcgatcgggtcggactaagccgaagcgaaagcgagagccgctgccccgtcgtcactcgatgaccaggcggacgggtgggtgcgccggcggcttcctgctgccgttgctgctcctggcaggtgcgcatcctcctcccccgacggactcagaaaggtcgcaaaatgccctgcatcggtcggggtgttgcagtgatgccttgcatcgattttagcttgctagaagaaattatacccgcaaaaaaaaaaaaaaaaaaggggcggcc

SEQ ID NO: 157211 - DNA, 465 bp, Zea mays
  Clone ID: MRT4577_74956C.1
ggtaccctccgggttcggccggggacacccatactcggaaccgggtatatggcatgtcgccatccaaaacagcgtactaagccgcgatcctctgccgtgacttgcacaatccccagagccatagagttattgtacgcaagatgctcacgaagccttgtggccaagggcacgtcctgctgcagcagcacgcatcagacgctctatcataccccgacccccgaggcaagacggatcttcagaacgacatagaccttgtgacacagcctgaagatctagagaagctaaagcacagagaagtaagcgcctagccacagtcctgcaactaattcttaatgaatgccaagtgccaaggatgcttcagaataaccacctatttcagacactaacacactgccgatgtgtgcgcaggctgccaaactgtactctgacacacaacctgaggctaggcgaggatcacgaagggat

SEQ ID NO: 157212 - DNA, 200 bp, Zea mays
  unsure (1)..(200): unsure at all n locations
  Clone ID: MRT4577_74957C.1
gcgggagtcagtggagggacgtatgaattcncctaattctttcnatcnaattanncnccttatttatnctctctacccaccaatttacctcacctaccctcaacctcttccttcacaccttcctcaacaattccttcatccccctcaccacctacctactcacttaccatatctcctactactcctactttcaattaaac

SEQ ID NO: 157213 - DNA, 259 bp, Zea mays
  Clone ID: MRT4577_74958C.1
ctcgagccgattctcctatgtcaatggaaaaacatatttcaactgggttcacatgataggatttctgtgcaggtatttggcatgagcctaaggataatacatctccatccattcggattaaattttgaagatatattttattcatccagtgctttgatggtattaaataatatgaaacatgaaggggcgccaccggaatagggacttcgtcgactcggaaattaattccgagccgtctttgtggcaccctagttttctt

SEQ ID NO: 157214 - DNA, 271 bp, Zea mays
  Clone ID: MRT4577_74959C.1
aagagggaagacgactttcctcctgtgagccaatgaggccagctggactacgccgagacaactgggagaggcgcgggactcgcacgttccgcggaacgccgggaaggggtcacctcctgatgaagtgtccggttccggtgtcagcggcggttgaattgccatggcaatgcggtgggcgcgcgcttgtcgtgttggtctcttgggaggtagcggggctaggccgggcgggtatccgctctcccagcttaggtgagcgtccccgggcgcctcc

SEQ ID NO: 157215 - DNA, 1711 bp, Zea mays
  Clone ID: MRT4577_7495C.1
gttcccgacctctggtcgctcctggcagcaggatagggacagagacggagccacggtcgcacagagcagtcttcgctccggccacggccaccgggagtagctctggccatgaggacctcaacggctacttgtgctatcctccctccgcctacctgctcctcccgtcgtttcccgctccgcagcttcatcggtctccggtggtccgccccccgtttccaggttagggagcgagctggtgcgtccgtagcggttgtcaatggcaagccgggatgcagcttcagactcggagtacctactttaaatgtttgtcaatctcgccaaaggtctgttgtcattagaaatgaacatgctcaaaatgctgaccttccacgaaaatattcaaaaagagagaagaaaccatttcctatcccagtgctggagttaaggcgccgagcaaaggagaggatgaaggcagcacaagggaaaccgaaacaaccaatgcctccaccaaaaaacggaatgttagtgcgtagacttataccagttgcatacaaagtgtacaatgcaagaattttgctgatcaacaacttgaagaggcttatgaaagtagtaccagtaaaaggctgcaagtattgcagcgagatacatgttggatctgttggacatcctttccgaacatgccgaggaatgtcatcagatcaacgtagaggagaacatgactggggaagtactctagtggaggcagttttcttacccgtcgaagcctatcatctagaggaccgtctagggaatcgcattcctcatgatcagaggtttactgtaccccgcattcccgctctcgtggaactttgcatccaagctggagttgacctccccgagtaccccacaaagcgtcgaagaaagcctatcattaaaatcggaagaaaagagtttgttgatgcaaatgaagacgacctaccagaaccagagcctgacagatttaggcagccacttcttgaggaactacgttatgatgagattattgctccatctagcccagaggagacggtggctcttgccgaggagacacttgaagcgtgggaggccgttcgggacggagccttgaagcttatgaagggctatgcagtgagggtttgtggatactgccctgaggtgcatgttgggccaactggccacaaagcacggaactgtggagcttttaagcaccagcagaggaatggacaacatggatggcaagcagcggtgctcgatgacctgatacctcctaggtacgtgtggcacatgccggaatccggggaagaactgcagagggagctaaagaccttctacggtcaggcaccagctgttgttgagctgtgcattcagggtggcgcaaaagttccggagaagtacaaagccactatgagactagacataggaatcccctctagtttgaaggaggctgaaatggtcgtctgatcctcccaatgatctgggcagatttgatcaacctgtaattgagttttttcttttgtgttgaaaagatgatgtcgtcaccaagctccatcgtggcttgacataggttgaatctgttagccaatgtgtatatatcagaactcagatgagatgattctcgttcggttttctttcagtccgcaacgatatgtttgtgtatttctttagaaacaaatgtgctatactgtgctgcacctacctcttgatcacaggcagtataattcatgccttgcaaaat

SEQ ID NO: 157216 - DNA, 781 bp, Zea mays
  unsure (1)..(781): unsure at all n locations
  Clone ID: MRT4577_74960C.1
ctggtacgcctgcaggtaccggtccggaattcccgggtcgacccacgcgtccgttcaagaagcaggcaagctttcgtgccatcaagagaattgccaagttgtcttccacgggaccgtcacggagtcacaaatatgtccaggtaattaaatgcttgtcttgtggacctgggcttggctggaatgtgcaagggtcttgaggatccttgcgtagcttccctctgttgaactattaagagaagatggcaaaagtcaacataactagagacctcattcatagacaagtcaaggagcggggtgccctgagctttgaacggcgatatcatgtcacagacccctttatccgacggctgggcctggaggcggagcttcagggacactcaggctgtgtcaactgtctggagtggaatgagaaaggagacctgctggcgtctggttccgacgaccagcacnaccattgtgtgggacccactgcaccacaagaagctgctgtccatgcacacaggacacacagcaaatatcttctctgtcaagttcctgcctcatgctggagaccgcattttgatcacgggggcagctgactccaaggtgcacgtccatgaccttacggtaaaggagacgatccacatgtnttggagaccacacanaccggggtgaagcgcattgccacggcgcccatgtggcctaacacgttctggagcgccgcanaggatgggcttatccgccagtatgacctttcgggagacagcaacactcagaagggctgattgacctaacagatact

SEQ ID NO: 157217 - DNA, 277 bp, Zea mays
  Clone ID: MRT4577_74961C.1
tgatttgtttcggtagaacgacaatttgatcataattaggaaatatattattgttttgtctagtaaaaaaaatcttttctcgataacactggttgaaataagttttggatatggccatcttggccaaatcatgggattaaactgttgagtttaggtggatgaaccatgaaccagcatattagtattatggatgaggtggttatagaatgaaccgattaagatacgcttccattctggaaagggagcatatgcccttgtctcttggttttttttttac

SEQ ID NO: 157218 - DNA, 378 bp, Zea mays
  Clone ID: MRT4577_74962C.1
gggttggggaaaaaattaaaaaaacggtttattttgaagatttaattgggattataacacatgaggggacccccaccccccgttacatggaaaaaacaaaaaagggagggctttatttattaaaagggctgggttcactcattcctgggaacctcctttaacttcaaaccttttgttccgtacttttttggcccccccccccggttggtggtttttaaccttcttttgggttcccgggggtttttgttaaacttttttaacccccccgtttttgggggttaaagattttttccccttttttttaactttggggccggtttttttgccttggcccaaaattccgttggcttttcggcctttaaggaaaccaatggtggt

SEQ ID NO: 157219 - DNA, 788 bp, Zea mays
  unsure (1)..(788): unsure at all n locations
  Clone ID: MRT4577_74963C.1
cgggaggctctacttcaactgttagttcctttatgatggagaatcctggggaagtgtaagcggagcaacatagtttaaaatacaatgttgaacaaaaacacataaaaacaattgagatcctggcagaatcaagattcaaggcataccttcatctcccaatctgtcccattcttcatcccatgtagctgctgtctcttgtattccagtttgccaacctaaaatagaaaaataaaagcaaagagcatgatccctgttagcaagtgggatcagatgaatctctgaaacatattagattttgcaatgaatactgcattttgaattgttatgatacacaataaaataatctatgattcattttgcattagttcatacctaataaactgaaaattagtggatggtatttcattaaacaagagataaaaccagaacaggccaatactggatagaagttaataaagagacaggatagaagcaagtaccaaaaggaagttccaccaatgtagttggcttagctctcaacccatatctcttgcattgttcattcaatgatttcacaagctcctcaagatcagactgtatcttattagcccgctcctataaacagaggaaaaatatgatcaggaaagagatgtatggcataaatgtaaccaagaaaatatattagaagagcgaaaatacaaacctgaagcttttcatcactttcatcccctttttgcagcttaactaatggcgttataaatttcaagttttcttctcctgaaaacataangaaaataaaatatgctcat

SEQ ID NO: 157220 - DNA, 292 bp, Zea mays
  Clone ID: MRT4577_74964C.1
gttaggtgccactcacccatgggcactgaaagttacgggggcacgtgcaaaaaaacacggaccccttgcacactgtgagctccgaaaaaaagtacagctacagaaaaaaatatgggcacatatgattatgaccatgacctacaattgaatcaaaaccctacattttttacctaatatcctaagaatttgcataagctattttcacaggttaaactgtgaactgctggaaacacatgactactagcttgtcattctattcttatgctttgtccatgaattactccatgctcat

SEQ ID NO: 157221 - DNA, 256 bp, Zea mays
  Clone ID: MRT4577_74965C.1
ccacaacagccgccctcctttttttttttttattcacacgcaggcggaacaaaacagtgtacgacatgaaagagcggggcgaaaaataaacacaaactattaaaaaggggaaacataacagaaaaaccagaatgataatcagaacagcaagacaaacgataaggagccaaaaaactttaacaataacgaaaagcaaactataaaagggaggttacctagggataacataaacagcaagcatgcgatgcgacactta

SEQ ID NO: 157222 - DNA, 401 bp, Zea mays
  Clone ID: MRT4577_74966C.1
acggctaccgcaaccatggccgcacaatgtctacaggctcctaaagcttctagggttcggggataccgctgataagcggaccattcaatgacagtgatcacaagcgttcatacctacatgatctcaacaggatacttgtaacaagcattgtactcaaatcagtgatagcccaacaattcaaccctacaggattccagaggttatctcaggaggaattggaggtacatcacactagggcatacaacacccgacagctctgatccaccaactacgtttgatgcattcaacggcataaaacatttagcgtacaaccactacgatagcttgagctaggaaacctatctgcctactctcaccacatcagccagttacattctgcctactggctgcattgaactctg

SEQ ID NO: 157223 - DNA, 186 bp, Zea mays
  Clone ID: MRT4577_74967C.1
atgtggccaaccgtcggcacatccgaggcatgctcaaccctgcttgatggagtcctcaccaagaggacgagctacaaccatggcatggaggaccccgagccagaatgcaatggcatccagttcatgcatgcgaccggatgtgagcatcatacggggagtctgggcggacatctcgcccaaatgtga

SEQ ID NO: 157224 - DNA, 1084 bp, Zea mays
  Clone ID: MRT4577_74968C.1
ctgaacaaattctactttctgccagaaaattacgactgatactggttcaattcagcactgcattgttcatcagactagatcatgccaactgaatcaggaggatatggagaaaacaaaggaggcatccagccgtcattcactcattcttatctgtacattcgtatctacaataagttaaactgcctattttcattgaaaaaggacggtcagttgtctgttccgttaatatcatcttatttgctccatgtcatttttttcatcttgctcagcagtaggtaacccaatccaacttggggttactcttgtacactcttgattgtaacctctagctgatgttgcgctttttcagtgctgtactttgcatagacgctgcccttattctcttcccaccagtgttgagcttccttctcgccaaaatgcttccgactgaatcgtacacgttttatgtctttcttgccacaaggtgatacagcaaatgtgacatacaccccacgctcgatttgctcgatcacaccattggaggtgacgcgagcaacaagggaattcccttctgtaatacggccattactggcaaatgttcttgaaccattcaaatgaccacacaatccttctacctgcacatcagaacttgaagaaggtgtatattcttcgtctccttggctgctggtctggtgatttttggtgttgtcgagttgtccgaatttgcctgtggcaaatttttcactgggatgatgttgcaaatctgctgaaaatgtttgtccttggctgatattagattttgtctcaaggttctcatattgctgaccgaccaaaagtttctctgacaaggccttacactgatcagttagaacctttatgatatctttggcagctttgcattttgcagcctcattcctaacaattagccatgtctcatcgagtttttgtttatacagttcaacctgaagagctttctgatggtattgctccatgagaagtgtcatctgtgaacgaagctgctttacttcttcagtgagcaaggtttcttctatgctgttaagtctttcctctggtcatcataggctgttgcaaagatctgccagac

SEQ ID NO: 157225 - DNA, 460 bp, Zea mays
  unsure (1)..(460): unsure at all n locations
  Clone ID: MRT4577_7496C.1
ggccgggnaagccaaaacacgcgcaaagccaccacagcgttttcatctccgactgcaggccagcaagcgaagagcacccctcgagatctcttcctccccgtgccgtcatggacgcagctgactcggaagccatcccgctgcgggggttcgccaaggacagcattcgcctagttaagcgctgccacaaaccggaccggaaggagttcaccaaggtcggggcgcggactgcgaacgggttccacgagatgggattaagtggcttctttagtaaattcatcttgatgcctatcaacaacataatcgcgcggctccggatgatccgtaaaccataggctggtgcctgaaggagtgagacaatggccgccctaccttggaggtcacaccgcttgcagccctgatttacgaaaagcaatttcttcaagacttgcgatgataaagggcaaactcctttatttattct

SEQ ID NO: 157226 - DNA, 158 bp, Zea mays
  Clone ID: MRT4577_74970C.1
ctagcagcaacactgcagctttattgagagagcgagatttttactgctgtttcctttcttaaagaaaaaaaattcttggttagtgtatctgaacttatgtttcctttggaatatttgcttttcagtatgatgtgcccaacttaagtacttttattagc

SEQ ID NO: 157227 - DNA, 126 bp, Zea mays
  Clone ID: MRT4577_74971C.1
tccagggggctacctgaacataaatatccaggacgggcttgtttaatataaaggggggacttatgcaagacagtggtccgcgcgaaatgcaggttcttcgggacaggaaataggagagggggggcc

SEQ ID NO: 157228 - DNA, 155 bp, Zea mays
  Clone ID: MRT4577_74972C.1
aacaccaacccgacacaggacccgaacagcaggtactttgaccacctcccaaacgagagggcccccgaccactcaagcgcattggggggtaaaacaacccctgaattaatgaacaccagggtgactgggcccaaggcggggggcgctctccttcc

SEQ ID NO: 157229 - DNA, 379 bp, Zea mays
  Clone ID: MRT4577_74973C.1
cccaggagtattcttatacatatcgtgggggattttggaattacttcagtatgggtaagttccttgttccaaaaagatgtatgtttttggtttaggctcattttttcgaacaacacagtaacactacttgtaatttcattaagaagaaagaaaaacggagactccaagtataagggaggaaaaaaaagtaactcccacaaccaacacttaaaacaagaaaactaaaaggaaaaacacccccacattaaaacagctcacatcaggtatgtgtgcttagcagttgaagaagcatctcattaagagcagaggctccagccatgcaccacagagcactctcgttagccacaggttgtagaaccaattggacattcggaggagc

SEQ ID NO: 157230 - DNA, 258 bp, Zea mays
  Clone ID: MRT4577_74974C.1
aagccttccgttggagaatcaaagccttggtttattctgatggcctggaacgggaagcacattcttgggaacccgcttggggaacccggctccataaaacggccgctttttggcccggttcggtttaggtttggtcggtatggcaaaccttgctccaagaaaggtggcaaaaacgtagacctcttctcaccggccgttgtggttccccggtgccatggctcccaattacttggacggttcgttggtacggaattacag

SEQ ID NO: 157231 - DNA, 325 bp, Zea mays
  Clone ID: MRT4577_74975C.1
tcgttttatctgtattcaacagattctggggtctacgacaggccttgccatggagggacctaaccgggctcgagatttgctaggcacagatgcctagagtgccgaacggactgtaattcgactagattactgactacatttgacgtcaccgttaacggctacatgctaacaaattctgacatcaaaggagcgctcaaaaaatggattagatgttgaaatccagtcacattgaacaagtgcggggtcactatcacatgtatcacatgcttattggggaagagcctaaaacacttgatcagcaagtgactgctaatggtgatggcct

SEQ ID NO: 157232 - DNA, 324 bp, Zea mays
  Clone ID: MRT4577_74976C.1
ttttgaccaacagctgccgcggccggccggggcgcttacagagatgggggatgggcgcacaggcggggccaaccggccggcgtggctgcagcagcacgaactgattggcaagattggggaggggaccaatggcctcgagtaccgcgcgcgccataagccggcccacccggcacctggccgacacggcccccctaacgccataaagaagaataagcaaacaaaggagggggacggaggagcacccaccgcaaatagagagatcacgctccagcgcgagatcaaccaccagaaagccggcaagctagtcaaagtgcacataaacca

SEQ ID NO: 157233 - DNA, 797 bp, Zea mays
  Clone ID: MRT4577_74977C.1
ggtaccctcgagtttggccgggccttcttgtcgatttgcacttcatccatcatttggcatataattactcactaatatgtgttgggcacttaatcaccaaaatatactagaaatggcccaagggcacatttccctttaacagtaggctcaccttaggatgaccttaagatccaactggaaaagatccaagtgtaatgtacttgatcacaataagagtctcatccaggatcctattgaggttgctagtccagaatatgagacatttcatgatcagtaaaacacctgtctaaatggacaagtgttatatagatcaactcacgacatagtgtgtctagaaggaggaaaggttgaccagtcaaataagtgattctatcaatcttcccaaactaagaatcctcaaatagaacaagacctctaagaaaggttcaagaataagattaaacatgatcacgatattttctacatgcaacaatcagacagtttctcagatccccctgagacctacctctattgcaagaagacatggcatacaatagaaagtgtccagaattcctgcaatagatgctacagaatgcaattccgtacaaacctaaggctccaagagggctaaaaacagttacagtggttaacgaaaagcaagcagacacttaacttcaattttgtgattagacaatcagcacatcctctatcacttcggtgacaaagactgtgtgttattcagttttgatataaagatgttggtctcgccatctgacgagacatgctttatttatctttgcacagtggtgcttgataca

SEQ ID NO: 157234 - DNA, 408 bp, Zea mays
  Clone ID: MRT4577_74978C.1
aaagaaaatttgggccagggccgggcccaaacacaaaggacaaacggttttttaacccggggaaaccccttacacaacaaggcccccacgggcggccgaaagggaaaaggacccccctgcttttttttaaattccggggaaaggacccgcacccccaccccagctggttattttattgcaacaaggcccccccccccccttggattcccaaaagggcccttccatttgcaaccatgggaaggggcccccaaaaaagggggaaaaaaaacccccgggaaaggattttgaatccaagggggggattggtttttgtcaccaccaagaacaaatgttgaaaaacccccccaccccggggggaaaccccgaacccgggggggccccctttttggtgcttcccacatggcccgg

SEQ ID NO: 157235 - DNA, 134 bp, Zea mays
  unsure (1)..(134): unsure at all n locations
  Clone ID: MRT4577_74979C.1
gnacacctcagagccccgcaaaanccactgaccggaggcaaaaggcagtggggctgggggtagttttcnatggtcacagagaactagtggtggctctgagaaggggaggacctctgggctttgattccatctnc

SEQ ID NO: 157236 - DNA, 817 bp, Zea mays
  Clone ID: MRT4577_7497C.1
gtaaccgacacacttcccactcatcgtcctcatcctccgctccccacccaccccacggcccaccccacagatctcgccgcggccaccgcttcctctatggccgcgccagcccgccgccttctcctgctcgtcgtcaccgtagctggagccctggcgctccccgtggcggcccagatcaaggaggagtccttcaaggaggacccgcgctcgtccatcatgttcgaaaaattcggcttctccgagtccggcgcggtgcggatcatcgtctcgggcgcctccgtctcctcccccgtcgcgcgggcggaccccaggcagctcgggttcttcctcctctccgacgagtccctcctccacgccatcgacgaggcgcaggaggggcccacgcgggagaagcgcgccgcggcgaccaatggcggcggggaggaccccgacggcggctccaccgggtgcgtgctcaacagcccctacgtcaagaagctcttcaccttcaagaacatgaagggcggccactacaacatgtccttcccggtcacccgccccgacgagtacaccctcttcttcgccaactgcgccccggaggcgctcgtctccatggccgtccgcaccgagatgtacaacgtcaacgccgacggctccaaggactacctccccgtcggccaggcgcccctgcccgccatctacggtttcttcgccttctgctacgccgcgttcctggccggctgggggtacctcaccctctcccgcggacgcgtcttcgggcaccagatccaccacctcatgtccggcctcctcgtcgcgcgactgctctactgcctct

SEQ ID NO: 157237 - DNA, 510 bp, Zea mays
  unsure (1)..(510): unsure at all n locations
  Clone ID: MRT4577_74980C.1
ccgttcctgttcctgttcctgctgctagctgctggttgctggggccgtgtacgtacgcgttgatgaaggtgaccgtggaagggagcggcgccggcccggccgcggtcaagaggaggcggagtggcgcgcctggcaggcgccagagcggcggcgtgagcgtgcggcggcgcgtgcaggtggacgcggcgaccgcgccagagccggcgccgctccagcgtctgcttgccgcgtgccgccgcgcgttcggaggccccgggaccgtgccggcgcaccacgacgtcgtcctcatcagagacatcctngacaagatgggaccagaggatgtgcacctgagagccgtcaccaaggccgccgccgcttccggcggccctcgaacgcaccctgttcctatcatcacacgaaccaccatttataaatgcaagaacttctnggtcggggggttcctgctgcccccaagcgcgaccatncctttgcacaaccacccggggatgacggtgttcaacaagcttc

SEQ ID NO: 157238 - DNA, 332 bp, Zea mays
  Clone ID: MRT4577_74981C.1
ttttttttttttttttttttttttttaatagatatgtaagcatgtacatatgtagataatgtcatgaattccaatatacaatgaaaggataaataaattcacatccaataaaatcagtaccaacaacataagcaaaaaaaactgactatattgggacatactgaccaccaaataacattttttttcgatgtctaggtgggtgagtgactttgggggctcccataggaatgctagaggcacgaggggacgaggaggggggaggcctcctaaaggccgatgtcgatgagggatcaggcgtcgtcaagagccaacaccatggttgggacccgatt

SEQ ID NO: 157239 - DNA, 497 bp, Zea mays
  Clone ID: MRT4577_74982C.1
cattgggtacctcgaggccggccgggatagcgtctcacgctaccatcccatctgcgagcctcgctacgcagaagagcgatacaaagaaagcaaacatgatggcgagcaacaccatgggcctctcctccacggacttggtcgcgaaggccgtgaacgagacggcgacatccggcttcccacagacccgcgtgactatgagaaagacgactacgaaggccaagactgcaacggcgtccggcagaccgtgatgaccgccccgaccgtagtgctgtacctgcgcccactgtctggaaagccaccgagctacctgtacgggggagatatcgaaagactactaatgggacacctcgcaggtggcggagcactggcagacggtagcctggaaacgccagctggaggagatacactctcgctgtgacatgatgcaagaatgtccatgtcacttccccgagctggtcgcccgcagaggtgatcagtaccaagaggcacgcgtggtc

SEQ ID NO: 157240 - DNA, 423 bp, Zea mays
  Clone ID: MRT4577_74983C.1
ctgagaataaggaatttccatagactgacaacatcaaaccctgctgacaaaacacctggtaatcacctctaacgagcccacggtagcgctgggccgctgttgacatgtcaagctaccaaagggtatggtgctgcttcctatgtctttccaaggatcagcgtcactgcccattatcttagaaccgggaccataccgagccttgagagcagccacatggtctgagacgttgttaacaaggataccagcaccgccgaaacccgagacgaattccagcccattcctcttctgcggatcagaaaacatttccagcggtttgggatctaattgatgtggctgcattgaaggttgttgataatctggaaacacgcaaaccgtgctattcttagccgagtaaatggtacactgcgcaaggatctctggcac

SEQ ID NO: 157241 - DNA, 2075 bp, Zea mays
  Clone ID: MRT4577_74984C.1
ccagattacgatactgacgaggcctgtgctgtggaaatggattcagctatctgtaggaagcagtcttgttcaaagattgtggaagatgtttgtcctactgaaggagccattttagggcctgactctgttttaatctctaagcagacagaaggagatatatcaaataggtgcattgttgatgttaaaattgaggaaagtgataaggaagctgataaaaattgcagcaatgttgatgataagaggtccagtgatagtactcatcaagctggccctatcaacatcaattgcccagaaagtacagataagctgcaaggaactgatgatgccgttgaccaagtaaacatgcatagtagtgtcctcaactcttcaaatgagcatgcaatggccatgcactcagaagtgagatccagtttacactctgtagatgtacttcaaacagacaaagctgaaggtactggtactgatcctagccaggtggaagaatgttcacatcatgctgtctacacaccgatgacagctgggaattctggtgcctcagctttcttaacttcagatagtggtatcaaggacaatgttcacatctcaaacatgtctggtgcctccactgttagtcctgcattcacttcaaactatcaacattctctgccaggagatatgcccctgtcgaaaccaaagccactagtaaccccccttaccccaaaggatttaatgcctgtgcagttcagttcagttcttcctgatcccactgcatttcgttttgagggcataaagcccaactttgaggacagcagtggcaacaaagtcagcagtgccctaggagctaaagacatttgcaagtacccagcttttaaagacccatctgataatgagcatgacacattgtttcgtaatattgatggttatatgaatcatcatctgacaactgaattgccagttttttctcaaagaactgcaagtggcactgtgagtacttcgcagacaaaattccagaatggcaggtccagcagcgtgtgccttccaaacagttctgaggggattcaatggcccaggaaacctgaagaagtaccggaagattctttgaggccttgcgctcgcaatgcaaaatctgagggtggtgagaaacaaaagcgacctggtgatgtcaagttatttgggcagattctcagccatcagccaaccttgccaagttctggctcgttgtgtaatggtagccagagcaagcctccctcaccaaagattgacaaaacatctgtgagattgaccaacaatccaagggatcttgtagttttttcttccaggcctggtgtcagtccacatgtgggtctggaggaaagatcagtgaggagctacggccatctggatggaagcacgatacagcctgagcctctgctggtgatggcgaagtgccagagatccttggccagtgtaccattttactcggctaagaacagcacggttggcgtgtttccagattatcaacaaccttcaatgcagccacatcaattagatcccaagccgctggaaatgttttctgattcgcagaagaggaatgggctggaactcgtctcgggtttcggcggtgctggtatccttgttagcaacgtctcagaccatgtggctgctctcaaggctcggtatggtcccggttctaagataatgggcagtgacgcggatccttggaaagacataggaagcaggtagcaccgatagcggtagccagttctagtgcttgttttgttgctcgctgtatcatatttagttcttttttttttctgtaacttgaatgaaatcgtcaaatgaaggaaagtgaatggctttcctgcccatactatttgtaagctttgcagtagttgccgggttatgttatttactggcattaacattttaacctttattgcagcaccataccctttggtagcttgacatgtcaacagcggcccagcgccaccgtgggctcgttagaggtgattaccaggtgttttgtcagcagggtttgatgttgtcagtctatggaaattccttattctcagtatcctagtatgatggatggagttttggttgagatttgtccttgc

SEQ ID NO: 157242 - DNA, 151 bp, Zea mays
  Clone ID: MRT4577_74985C.1
tacgataaccatggactccaccatctgcgacatcgacgctgtagttcacgatgacgcgtgcatgtagacgatgcaactgacatcgtcgtccatcctactcatgaccctgaataacgccgtccagctggacctactgaatgtgctgcagaag

SEQ ID NO: 157243 - DNA, 307 bp, Zea mays
  Clone ID: MRT4577_74986C.1
cgtggtatttttgtggcatcgccggtcctcctccagcgcggtggtgaccatggagaaggtgaccgccaagaggcccacgccgatgctctggaacggcgtgatacccgtggggacacctgtgaggctagccatggccggcactaacgcatgctcctaggccggcactagcgcgactatcctgatgcttgagatcgcctgctctgaggcctgcagcacttgatacgaagcggccactcgtgtgttcatggcgcttccctgctgcacggataaagtctgcagcttctctacgatggtgtcgaacatgatg

SEQ ID NO: 157244 - DNA, 851 bp, Zea mays
  Clone ID: MRT4577_74987C.1
cctcgaggccggccgggattcagtagtactgtgtaggagaattctctcccgtagcttttcccccatctgattagcagcataacaatgtgtgcgagtaactttgtgacttgtgagaagaggcacaacaccttttactgttggatcagtcggattggtctgtgatgctccttttccaggcacaccttcaactcaacaacctaataccccttcagtttctttttggaagaaactaggcaaaaggatagtgggctagaagctctcaaaaatggtctaataatgtgggcaatctatatgctagtaccagcacatgacaggccaccagcagcaatcatggtaatgtggtcccagtattgggagattggagtggttggaccaaacttccaaatgagctcgaagttgggagtatgttttgaatcttcagttcttcagttggttggagataagtactgcatgtcaacaaaaatgttcatgatgcccattagattatgcttgaatgcattgaaatgctctcgtgtgaaacaatgaagtttgaaacgtctgagggactatgtacccttagggtttgtttggttgattgggaatacatctaatatttgaatcagcggcctcacttattctaaggacacataaaagttagaattagattttctgcaacttgaatttactttctagtgcatacctagattttgttagtcaaatggagtcaaaataatagagttcaaacaacgtatgtggcattacatgaagtaacctttcatgccatgtggtgtattcttataacagctaactggctgagagggttttgtatcgaagttcatgcttatccctccttagattctttgatcaggact

SEQ ID NO: 157245 - DNA, 226 bp, Zea mays
  Clone ID: MRT4577_74988C.1
aatgatatccagcacgatcccatacgactgcggcccatattaccacgccccggatggagctgaatcttccaacccacgcggcggtgatgccctaccacaggcatgtgggcacggttcgggagcaacatatccaagcgacgacgggcaacttgcgctccgatcttaacgtccttctcctccatccccaggccattagcgacgactcccgccttcgttccataaggtc

SEQ ID NO: 157246 - DNA, 254 bp, Zea mays
  Clone ID: MRT4577_74989C.1
cccccccccccccgccccttaaaattcatgttggcatgaacgtgcggatgagaaagcagtgtttttttttgaaacaattagcaacatcatgctgtatcttaccaattttttgtggaattcgttgaatttgctgatagtgatgtattgcaaattaagaattgtttggattttgttaaaggaatgccccctcaatccctcaaaaaaaaaaaaaaaaaaaagggcgaccgctcgcgatctagaaccggacgcgtggt

SEQ ID NO: 157247 - DNA, 1794 bp, Zea mays
  Clone ID: MRT4577_7498C.1
atgaaggaggatgaggccaagagagaggcacaagaagaagaagaaaggaagaaagtcgaggaagatgaaaaagggaagacgaaggtggactacttcgacgacttggttgaactcttggtgtccaaggttcatcgcaatgctcaagcagtgagcgtaatcaaaggaagtttaggtcaggaagagtaccaaaaagtccaaggtagagaagatgctcgtgacatatggaatattctcaaaatgtcacatgagggcgatcctaaagccaagaggcataggatcgaggtgttggagagtgagttggcaagggaccgtgatgattatgatgagatgactcctcatcaactatttaccaaaatccaacaacatgagttagtggaagctccaatcaagacaagagattctcatgccttggttacaaatgatcaagagtcttccaagaagagttcaacaaacaaagatcacaagtctaagaagatgattgaaagctcaagtgaggatgagagctctagtgatgaggacatagttatgttcatcaagagctttagaaagtttgtcagaaaaggtgacaagtatcaaaggaaaggcaagaaaagggcatgttatgagtgtggcaaaactggccactccattgcagattgccccaacaagaaggaacaagaggaaaagaaggacttcaagaaagacaaatccaagaaaggagagagaagcaagggatgcttcaagaagaagaagaaagttagtccaaaggttgaagtcaaacaaatattgaagaaatgttctagcaatgatgggtcaagtgaagttgtgcccaagtacaagcccttaaggaacaacaatggaaagaagggacttgggtacaatatatttaaggcaaaccctagcatagaaggtaccaccttgtatgatgccttagggaggattcactcctctaatggtaatatcactcatgagaagatagatgtatactcctctggtgggtcaatttgggtgtttgacagtggatgtacaaaccatatgatcggagagaggaacatgtttcaatctttgcaactaaccaaagagtcacaagaaattgtgtttggcgatagtgtcaagggtgaggtgattggtattggtgaaacccaagagatcctcaagacgttcatgaggcatgcacaaaacgagtttgagctaaagatcaataaggtgagaagtgacaatggaacagagttcaagaactcatgtattgaagagttcttgggtgaagaagggatcaagcatgagttttcggttccttacactccacaacaaaatggtgttatggagaggaagagccaaactctcattgaggccgcaaaaaccatgcaagatgagtccaagacacatgacaactattgggtggaggcaatcaacacagcgtgccatgcaatcaaccgcctatatcttcacaagatctacaaaaagaccgcctatgagcttctcactggtaacaaacccaaagttgattactttcaagtttttggttgtaaatgctttattcttaacaagaaagccaagagctcaaagtttgctcctaaagtaaacgagggcttcttacatggctatgcatcaaatgtgcacggttactgtgttttcaacaacactatcggtcttgttgaaatagtgttaaacatgacatttgacgaatctaatggctcgcaagggcatgttgcaagtgatattgcaggtgatgagcaacaaccctgtgatgtgaccaagaagcttgctatcgctgaaataagaccgcgagagaaggagaatgaaggaaggatctag

SEQ ID NO: 157248 - DNA, 403 bp, Zea mays
  Clone ID: MRT4577_74990C.1
cccacgcgtccgctagcctaaacttggagagaatgaaaggaatacctgaaccacccaaaccactccctttcttgcgtgctcttgagagttgctaacattttggtaccagagccaacatggatccaccacacgagtacttcacgagggcataagcaaagggcggagtgatggcaccaccgcgagtggaggattccttgtcgtggttgatggctaagatcgacgaaggcaacaaggagacatacaagcggacgcactctatacagtccgccatggagaatttgaagaataccgtcaagagcctagtgactgatgggagtgacttcaagaggtggataccggagatcgaagccaaggtggtggagatgacagaagtgctgaagacactctagctcaagtgaacacg

SEQ ID NO: 157249 - DNA, 283 bp, Zea mays
  Clone ID: MRT4577_74991C.1
aaaaaatattctatcctaaaaaaaaaatacctaaaactccataccaacggtagaaacctaaaattccacaatttacaaagaacccgaaaatctgacgtgtaaattcccccggaaggaaccgggttaccctaaccaaaaaaaaaagggaacaatggatcggtttccaccaaaatgagccgaaacaaaaaaccggcataaaatactacataaccaggaagaacaaacaacgcccataaaaaaagatgtttatatgggcaaggcaacctaacggaacgaaaaggtt

SEQ ID NO: 157250 - DNA, 348 bp, Zea mays
  Clone ID: MRT4577_74992C.1
ccaagccttcacaaccatccgagccgatttctaccagctcacataacgctaaaccctacggacggttctacaactttatggagaatctcttccgcatcatactggagccactttgcttcatccttctattcggctgctgccgaatagaatggtggatctgactgatgatgacaatactaggctacctgcccggaatcatctacccgacctatgtaccacttggtctcgactctcaccagtatgagaggtaatactacacgctgggttagagcatctggttgtgccaatccagtctaaacacttgattggaaatcactatctctttctctatgcggatcgtgtgacatg

SEQ ID NO: 157251 - DNA, 198 bp, Zea mays
  Clone ID: MRT4577_74993C.1
ggggcaagaaccggcccggaaaacccgggacgacccactttttctcatggagcacgtgacaatccaaagggaccggtaaaaaacggagggggggaaaaaaaacaggcaacacgataacaggaaaaaaagcaacgaaaacaaggaccaagagcaacacaggcagcccagacgacaccgaacgcaacagaccaaccaaca

SEQ ID NO: 157252 - DNA, 537 bp, Zea mays
  Clone ID: MRT4577_74994C.1
cgtacccaccagcacgatgcgaccgggcgctctatagtctttaccccagcaccacaactctcgatggctgataggctcctgccatagagacaccaacgcctccccgctgcctttcacccgctggggtggtaccggcacgcgaaaactacatcaggagctaacttcaacggggagcacgagccgctcgtctacgacaggctacgcttcgcgcggtcaggtggtcagcagtcgatcggccatgtaagccaactattcatagatacctcaggtctcaaattgtccatcattctcccagcaacataagatagataaggattgccagagcatgtatgtgtatacccaaggtgagctcgcgcgggtttgggccagtcacagactagatccttactatgcatccagcaactaccttacctcacaaacagtgaaaaataatcattaaagtgtgcatctgtatgtgctgacaatgatccatgtccctagcgacaggtgactgtatcaaagactaactgagctgccaggtgcaagcatgcgctataa

SEQ ID NO: 157253 - DNA, 643 bp, Zea mays
  Clone ID: MRT4577_74995C.1
cccctcctcgagttttttttttttttttttttttttttttttttttttttttttttttttttttttttttttttttttttttttttttttaaaagggtcaggcaaattcggcccgccggtttattttctttactgggctttttaccaaaaaaagaaagattcagttaagccctcccactcgcatttcctgggaacggcccaagttaatccgccaagttttttgaagcaatctcaaacacgttttgggaaagccctttggccgaaacaattttttccaggggggccttaaaaagagtttggtgggttttggcgcccccccccccccgaaaaaaggctgaaacctgggggggggcccccggggggttttttttggaaagctgaaaaacgatctcccccaaaaatttggccccaaaaccttttttgggggggaagttcacaggggacccacaaaaccccccggttggggggacccccttggggggattcctcagggcaaaaggggggggaaacaaaattttttgaacttttgcaacatttccaggaatttgtgaagtagtttgaaaagcaaaccatttggttacaaccaagttttcaggctgccacttgttataaaaatccaggggggctttatcacaaacttggc

SEQ ID NO: 157254 - DNA, 423 bp, Zea mays
  unsure (1)..(423): unsure at all n locations
  Clone ID: MRT4577_74996C.1
atattttttttcccaannntttttttttttgggtttgttttttttttttttgggaaaacatgcttccggaacttggatgggtttctgctatggacaagatatgtcacccacaggcacagttaactccgaccagcaaactcaactggggggggggggttcttaaaacttcacagggatctttttttaaacacatgcccagaatgcatgctaaaacttgaaacaacgggcatgttaattagaggcatgacaatttactggtcaaatatacttgaaacaacaggggagccgcaatccaaaaaaactggactggtatctttgaaacgccttttttttaccggaacccaactgggtttccactttgggggcaagcttatcctttctgggtcgggagggccttttagctagcatgagagccaggaaaac

SEQ ID NO: 157255 - DNA, 554 bp, Zea mays
  unsure (1)..(554): unsure at all n locations
  Clone ID: MRT4577_74997C.1
gggtacctcgaggccggccgggagactgaacacacatagcgcagcagccatcactagctagtcgccggcgaacgcgaacgccattcatggcgcagatgcagatgtttgcgaagagtctgacggggatgactgtcacttctgacgtggagactctccgcacatattgatattgcgaaggcactattcacgaagangaggcattcccgcggaccagcatcggctcatcttccgcggcaagcatgtcgatgatggtcgcaccctcgacgactacaacattcaaaaggagaccaccctccacctgacgctccgctctccgagctggggccaagaagtgtaagaagaagacgctcaccacgaccgagaatatcccgctctaattgatgaaggggaaactctccgagctgcagctctataaagtggacgacgccactggtaacgagacccgtctccaggatgagtgtcccaacacagagtgcggatacgcgagtcttcatggtcaaccacttctatcgccactactgttgnaagtgttgcctcacctatgtctacaacca

SEQ ID NO: 157256 - DNA, 392 bp, Zea mays
  Clone ID: MRT4577_74998C.1
ggcccccagcataatcatataaaaaaattttacatgggcctaaccttttccattggaagggaaccccagtccagcaggaacagatgcaagcgccctttttttgatctcccctggacgcgcgctgggccttaaaggaagagcacacgggtcctttttttttggtgggttaaaaatccatggttgttacacaaagccctcaacaattatttttaaattaccgacttttttagctgaaaaaacccaccccatttgttttgaacaggactgaacacttatattggaacttggtttgggcaaacacacgttggcaggaagaacatatgcttccaacccggcaaaggaattatggggagaccccaacaatgggcaggaaaacgcaacccctggctaaa

SEQ ID NO: 157257 - DNA, 1924 bp, Zea mays
  Clone ID: MRT4577_74999C.1
gccgtgtgactacacctatgctggtgctattgctgcatgtggcgagctcggggcactgaagcatggaaagcagcttcatgggcatattgtgcagcttggttttgaggggagcaattctgcaggaaacgcactcattaccatgtatgctagatgtggtgctgtgaaagaagctcatcttatgtttcttgtgatgcccaatattgactctgtttcgtggaatgctatgatttcagcccttgggcagcatggacatggaagagaggcactagaactctttgatcgcatggttgctgaaggcatatatcctgataggatctctttcctcacagtattgacagcttgcaatcactctggtctcgtagatgaaggctttcgatatttcgagtccatgaagagggactttggcattatacctggagaagatcactatacgcgactgattgatttgctcggtcgagctggacggattggagaagctagagacttgatcaagacgatgccttttgagcctaccccatccatttgggaggcaattctttctggttgccggactagtggagatatggaacttggtgctcatgctgctgaccagctctttaagatgacaccacagcatgatggtacatatatccttttgtctaacacttactcagctgcgggatgttgggtagatgctgccagagtaaggaagctaatgcgtgatcgaggggttaagaaggaacctgggtgcagctggatagaagctggaaacaaagttcatgtgtttctcgttggtgatacaaaacatccagaagcacatgaagtttacaaattccttgaaatggttggcgccaagatgagaaagcttggatatgttcctgatacaaaggttgtattgcatgacatggagcctcatcagaaggaacatatattatttgcgcatagtgagcgactggcggttggttttggactcctaaacttgcctcctggagctacggttacagttcttaagaacttgagaatatgtgatgattgtcatgctgcaataatgttcatgtcaaaggctgtcgcaagagagattgttgttagagatgttagacggtttcaccatttcaaggatggagaatgttcgtgtggtaactattggtgaatacttttgtcatagcatatgttcttcaggtcctggcctgaacttcaattttgagccagcttgggttccaactaaacaaggagacttgaattggaatttaacgagtggacccacttcaatctgagagactcgggttggtatggtggctcagtcaactcatgtcttattgtcaatcatttactcatgtttcgtcaatggcttaagattggcatgctacatgctacccttgatgctggggtgctttaccagtgttcatttgccaaaatatccttccaaatccgtaatgtcatggaatggtctactaaatgccacaatggtgatccacggtacttacctcgtcagcacagataggtgacagcaaatgcgccagggacagagaccaaatcacattggccctctatcagactatggatgagttttttcagtagttttctaacgttggattagttgtactcatcttggagtgtgaataccatctccttcccaatttcatcttctcttacagattagatgtcacggggaaattgatttccgaacagagatgaccaacatgctggaactgcccgacaagcagatacgccatttgatgcagaggaaccatttgatcgttacgtgattttgtgtttccatataatttcgccatggctgataatgagcacaaccaaagatcgaatcagatctcaatttggcagaatactcgtcctgtttacccaatgtaaactttttcatgcatatgtatttatctatttactagcgggatacccgtgcgttgcaacgggaatatataataccagt

SEQ ID NO: 157258 - DNA, 469 bp, Zea mays
  Clone ID: MRT4577_7499C.1
aagggccgacccaggcgacccgaacaaagcaccattaccgccgtcaggtgcattaggaaagcaagcagtggcactgaggatatgaggagatgcagcagcctttatcggttgcaagtttattggagcacaagatactctttacgatcacattggcaggcactacttcaaacgctgctacatccaagggtcagtagatttcatattcggaaatgggctttccctctataaacactgccacttgcatgccgtaaccaacagctatggagccttgacagcccagaaaagggaaagcatgcttgaggaaacaggcttcttcttcgttaaatgcaaggtcacggggtcgggcgccctctacctcagtcgggcttggggcgttttctctagggtggtctttgtttatacttacatggacaagatcatcacccctataggatggtatgattggggagacaaaaatagagaaatgact

SEQ ID NO: 157259 - DNA, 468 bp, Zea mays
  Clone ID: MRT4577_749C.1
cggacctacctcactcaaaccgacgccagggccaaacgaaaaataggagtagggagagaaggagagagtgaaactgaaacacgaggaggagggatggcgaccccgaatgaccgagtaaggtggttgctgtacctgtccctagccgccaaatgcctcggcaaccagacttaccggctcacgggcttccttgtgcgctgcgcggaggactatgaggagaactggctactgcactgacacttcccggaagaccattggtgggggaggtggtggcgaacgcgcttcttttgttcgcaagaacgtctgcggccagagtcagatctgggacaacgcgtcgaaccctattggactgaccgagcttggcatcggccgggacaccagaccccaaggaccgttcggtgtcttccaggcgcttgagaccaacaaggatgagaccataaccactcccgcagaagacatcattgggacgaa

SEQ ID NO: 157260 - DNA, 332 bp, Zea mays
  Clone ID: MRT4577_74C.1
accggttcggaatacccgggtctacccacgcgtccgcgcacgcgtccgatcgatctcgctttaaatccatgcatactcgcttccggcgaacggcagcatctcaaccccatggcctagatcaagatcggaatcaatgggttcggcaggatcggaaagctgtatggacatggtggccctgcaaagtgtcgatgtatagctcattgccatgaactacgactttatcatcaccgactatatgagctacatgttcaattactagactgtgcactgacagagcaagcaccatgaaaataaacgtaaggacttcaaaacccttctattttatgagaatg

SEQ ID NO: 157261 - DNA, 1077 bp, Zea mays
  Clone ID: MRT4577_75000C.1
cggccgctcgggcgggccccgcctcttctttgtctcccggcggcggcgcgtagcacaggagaaggagcaggcggcggcggtgcccgaagaggagaagcacggcgacctagcccgagctcgcaaccatggctaggggtttgaagaagcatctgaagaggctcaatgccccgtctcactggatgcttgacaagcttggtggagcttttgcccccaagccatcatctggtcctcacaaggccagggagtgcctgcctctgatcctcatcctgaggaacagactgaaatatgctctcacctaccgtgaagtgcaatctatccttatgcagcgtcatatcatggttgatggaaaggtccgcactgacaagacctaccctgctggtttcatggacatcatttccattcccaagactggtgagaactacaggcttctgtatgacaccaagggccgcttccgccttcactctgtcagggatgaggatgctaagttcaagctctgcaaggtcaggtctgtccagttcggccagaagggcatcccctacctgaacacctatgatggccgcaccatccgctacccagacccactcatcaaggccaatgacactatcaagctcgacctggagaccaacaagattgttgacttcatcaagtttgacgtcggcaatgtggtcatggtgactggtgggcgcaacactgggcgtgttggtgtgatcaagaacagggagaagcataagggaaccttcgagaccatccacgttgaggatgcccagggccaccagttcgccacccgtctgggcaatgtgttcaccatcggcaagggcaccaagccgtgggtgagcctccccaagggcaagggtatcaagctcaccatcattgaggagcagaggaagcgggatgccgctgcccaggctgctgccaaggcctgattctgatgcgttgagtcgttctgctcgattttaagttttgttggatgtctgttgatttgcgaactcgtggttgctgctagatgtactgtggatgtttaccttattaagtgctatttcgagacctcatctggttatcttaaatgtttgagatcgg

SEQ ID NO: 157262 - DNA, 391 bp, Zea mays
  Clone ID: MRT4577_75001C.1
tgagtcgcacttgctaatgttgtgcctggttttatcggaggcagtgctgatcttgcatcctccaacatgactctgctgaagatgtttggtgacttccagaaggatacagctgaagagcgcaatgtccgctttggagtcagagagcacggaatgggcgccatttgcaacggcattgctctgcacagcccagggtttgttccgtactgtgctacattctttgtcttcactgattacatgacccacgactctattggtctcggagaagatggcccgacccatcagcccatcgagcacctggtgagcttccgtgcgatgccgaacatactgatgctccgccctgctgatggcaacgagactgccggagcatacaaagtcgcggtcgtcaacagga

SEQ ID NO: 157263 - DNA, 468 bp, Zea mays
  unsure (1)..(468): unsure at all n locations
  Clone ID: MRT4577_75002C.1
attcttcctggaccgcgtcgatgccgatgtcctacgcctcgtcgtctacagccgcggctgacattgcgcttggcgagtgcgctggcttgctctttccccaggcgtgagagagcacgtcatcctgtgcgtcacacgagtaccggatcgcgctgcctgcggcgctccttatccgtttcatatgacgcgatctccgatgttgcgaccatcgtatcaatgacatcttgacctcttcccattcgaatgcatactacgacatttccntgttctgccttaatggccctggataacgtcctacctttgggcgaaacgctgctcctgctgcacagacactctatagctacatggttcaccttagctatttgtgtacccacacactctgacttacttcgatgtattaggtgcaacaatcactgtattagtgaggatcgacactctcgagtcgagcgtcgcgctaccnatgaaatgatc

SEQ ID NO: 157264 - DNA, 214 bp, Zea mays
  Clone ID: MRT4577_75003C.1
tgagccttcgctcagtcttaggctcttagctctaggctctagctagtcgcgccacgccttcgtgtagccatcagccttctcatcgccatcaatgtccactgccgaggtccagaccccgacggtcgtggctgccgaggaagctcgcgtggtggacatccccgtggcgggcgtctggtacgaggaggctgcgtgctccgagctcgaggccgaggtc

SEQ ID NO: 157265 - DNA, 701 bp, Zea mays
  Clone ID: MRT4577_75004C.1
cactggggtcttggcaagctgattgctttctacgatgacaaccacatttccatcgacggagacacggagattgcattcacagaggacgtgagcacccgcttcgaggctcttgggtggcacacgatctgggttaagaatgggaacaccggatatgatgacatccgcgcagccattaaggaggcgaaggcagttactgacaagcccaccttgatcaaggtgactaccacgatcggttttggatctcccaacaaggccaactcatacagtgttcatggaagtgcactgggtgccaaagaggttgaagcaaccaggcagaaccttggatggccctatgacacattctttgtactagaggacagtcctatgcctcggagcttggaataatgatgatggagggagcggaaggatgcctgccatttgttggagcgtgcgtggtagtatttctaggcctgtaataaacaatgcctttttccatttacgttgttgcttttatccggtgaccctcacacgattcatcaaggtggtgagcctggctattaaatcgggtgctgttttttttgggtaaacattggcaatggccttactgtcttgcagcagtgcttcgttcgtttgctggattgtgggtttaagatgctgcattttggctcttttgttgatacattttcccattggcttttgtttgtgatacatacatagcattt

SEQ ID NO: 157266 - DNA, 552 bp, Zea mays
  Clone ID: MRT4577_75005C.1
tgcgtgaaaaaaaaaaaattcagaatagtttgtttacctttacttttgtgttgtatcgttctgtactaactacatattcttgccaatccggccaatgcaaactactgcgtgaaaaaaaaaaaattcagaatagtttgtttacctttacttttgtgttgtatcgttctgtactaactacatattcttgccaatccggccaatgcaaactactgcgtgaaaaaaaaaaaattcaaaatagtttgtttacctttacttttgggttgtatcgttctgtactaactacatattcttgccaatccggccaatgcaaactactgggtgaaaaaaaaaaaattaaaaaaggttggttaccctttcttttggggtggattggtctggaccaaacacaaatttttggccaatcgggccaaggaaaattctggggggaaaaaaaaaaaattaaaaaaggttggttacccttacttttgggggggaacggtctggaccaacaacatatttttggcaaaccgggcaaaggaaaattctgggtggaaaaaaaaaaatttcgaaaag

SEQ ID NO: 157267 - DNA, 3311 bp, Zea mays
  Clone ID: MRT4577_75006C.1
gtaaaagatgaagtgatgcttatttactcttatattatctgagccacccttaccaaaatcaatgtcatgagcatatctttgcatactaaattgctaagttccaacttgaattttaaatttcaaaggcataggcgtctgggcagagcggcagaccatttgtctgcctttgtaacaggggcggggggggggcaccggctccgtgctcgagatcgcggacaacgcgtctcgaggggggggaaggcttttttccctcggcccctttctcttttccgccctccctcgcgagctctccccctccgaccctcctcggcggcggcggcggcgatgcagatggcggccaccaccgagtcccaaccggccgtgccacaccctcacccatggctacgcactcggtcgccgccgcgcacgccaccatcgccgcgcgcgcgggcgccgccggggcgccggccccggccgagcgcctgggcttccgccttctgggctcgcccgccggcggcctgcgctccgcccgccgcgcgccgcccgcggccgcctcccgccgccataattccgcgcgcgccgccgccgtcgagacgctccagggcaaggccgccaccggcgagctgctcgagaagtcggtcaacacgatccggttcctggccatcgacgccgtcgagaaggccaactccggccacccgggcctccccatgggctgcgcgcccatgggccacgtcctctacgacgaggtcatgcgctacaaccccaagaacccctactggttcaaccgcgaccgcttcgtcctctccgccggccacggctgcatgctccagtacgccctcctccacctcgccggatacgacagcgttaaggaggaggacttgaagcagttcaggcaatggggaagcagaacaccgggccaccctgagaactttgagactccaggagttgaagttaccaccgggcctcttggtcagggtatcgccaatgccgttgggttggcacttgctgagaagcacctggctgcccgcttcaacaagcctgacagtgagatcgtcgaccactacacgtacgttattttgggagatggctgccaaatggagggtattgctaatgaagcttgctccttggctggacactggggtcttggcaagctgattgctttctacgatgacaaccacatttccatcgacggagacacggagattgcattcacagaggacgtgagcacccgcttcgaggctcttgggtggcacacgatctgggttaagaatgggaacaccggatatgatgacatccgcgcagccattaaggaggcgaaggcagttactgacaagcccaccttgatcaaggtgactaccacgatcggttttggatctcccaacaaggccaactcatacagtgttcatggaagtgcactgggtgccaaagaggttgaagcaaccaggcagaaccttggatggccctatgacacattctttgtaccagaggacgtcaagagtcactggagccgccacacacccgaaggtgctgcacttgaggctgattggaacgctaagtttgcagagtacgagaagaagtatgcagatgatgcagcaaccttgaaaagtatcatcacgggggagttacccactggctgggttgatgctcttcctaaatacactccagagagcccaggagatgccaccaggaacctctcccagcagtgcctgaacgcgcttgctaatgttgtgcctggtcttattggaggcagtgctgatcttgcatcctccaacatgactctgctgaagatgtttggtgacttccagaaggatacagctgaagagcgcaatgtccgctttggagtcagagagcacggaatgggcgccatttgcaacggcattgctctgcacagcccagggtttgttccgtactgtgctacattctttgtcttcactgattacatgagaggtgccatgaggatctcggccctgtctgaagccggagtcatctatgtcatgacccacgactctattggtctcggagaagatggcccgacccatcagcccatcgagcacctggtgagcttccgtgcgatgccgaacatactgatgctccgccctgctgatggcaacgagactgccggagcatacaaagtcgcggtcctcaacaggaagaggccgtccatcctcgctctctccaggcaaaagctccctcacctgcctggcacctcgatcgagggcgtggagaagggcgggtacaccatctccgacaactcgaccggcaacaagcctgacctcattgtgatgggcaccggctccgagctggagatcgcggccaaggccgccgacgagctgaggaaggagggcaagacggtccgcgtcgtctcgttcgtctcctgggaactctttgatgagcagtcggatgagtacaaggagagcgtcctccctgccgccgtcacagcgaggatcagcatcgaggccgggtccactctcggctggcagaagtacgtcggagcccagggcaaggccattggcatcgacaagttcggcgcgagtgctcctgccgggacgatctacaaggagtacggcatcaccgtggagagcatcattgcagctgccaagagcttttaagagctaacaacggtctgagttttttttattgtcgtcgttgatgccaaaggaacactgtacctagaggacagtcctatgcctcggagcttggaataatgatgatggagggagcggaaggatgcctgccatttgttggagcgtgcgtggtagtatttctaggcctgtaataaacaatgcctttttccatttacgttgttggttttatccggtgaccctcacacgattcatcaaggtggtgagcctggctattaaatcgggtgctgttttttttgggtaaacattggcaatggccttactgtcttgcagcagtgcttcttcgtttgctggattgtgggtttaagatgctgcattttggctcttttgttgatacattttcccattggcttttgtttgtgatacatacatagcatttatatattaagctcaataatgtgacgttttattgaaaaaaaaaaaaaaaaaagcggccaattataatgcagggagcggaaggatgccttccatttgttggagcgtgggtggtagtatttttaggcccgtaataaacaacgcccttttccatttacgttggtggttttaaccggtggccctcacccgtttcatcaggtggtgagcctgggtattcaaccgggggttgttttttttgggtaaacattggcaaaggccttgctgtctttcagcagggcttcgttggtttggtggattgtgggtttaagcagcggc

SEQ ID NO: 157268 - DNA, 494 bp, Zea mays
  unsure (1)..(494): unsure at all n locations
  Clone ID: MRT4577_75007C.1
gctgttttttttttttttttttttttttttttttttttttttttttttttttttctttttttttttttttttttttttttttttttttggaaaaaaacnaaaaaaaaatattgattatttttaaaaaaaaaaattcggtataagggcacaattggggaggaaatttaaaatgaaataaaaaaaaaggaacctcaaaaaatgggttgttgccttaaaaaaaaaggattaataaaaaaaaactggttgtatggaaaaaattgttgttgtttaaaaaagggggaaaaaaatgggttagccactacaaatggataaagtaactgttggcgctgttaaaggtaccaaaaaaagttcaaaaaattaaattggttaaaagaaaaaaatttttgaaagtaggaaaaagggtttgcaaaagttagttgaagaaaagctggtaaaatttgtggaaaaaattggtgttgaaggtatgtaggggcattgccaaaaggaagggggct

SEQ ID NO: 157269 - DNA, 393 bp, Zea mays
  unsure (1)..(393): unsure at all n locations
  Clone ID: MRT4577_75008C.1
ggggggaacgaaaccaaagcctttgggttattaaaaaaaaatttggggccatacaatggtacaacaatggagataagcttggtgacactgagtgggggtggtcaatacatggaaaaaggggttttcttttttattatttcctcaccccaagggccaagggtggaaaaaatagtacgtgaaattatttgggaagaaaagatgggacatacagattggggttagaaagattttgcatattgatgtgccacatttcaattcctcgggataggttttgggcacaacattacaaaaaatgcattctggagatgccgttctttttttgctgaaagaagttgctggatgcttttggataaaaataaattggctttaaggngggggggggggggggggggg

SEQ ID NO: 157270 - DNA, 316 bp, Zea mays
  Clone ID: MRT4577_75009C.1
ccggggcacgcacttcatcttctccatctcctccccatcttcctctagcgccggccattagggaggttcgagctcgcccctccgcgccctccctgctcgctgctctatagctcgccatcacccctccctatgcctcgtcgagccgtgtgtcctcgactttgacctcgcctttagccgcacacacacctgaaccgtgcccctgcttttctctctgctcctcaagccatggtgcccggtcctccctccagctcggccaggcgggggcatcgcttcctgccgcttctcccctcctggcgctccttcctgtcacgcccgg

SEQ ID NO: 157271 - DNA, 724 bp, Zea mays
  Clone ID: MRT4577_7500C.1
cattgggtacctcgaggccggccgggaatcaccggctgagtcagcttcaatctcacctgtgacctgtacactcccagatcagacggttcacgtacgacgcgacaagatccaagaactcgctcgcgcgcacggacagggccggaacccagggatcgagactgaacagcagtccgagacgccatgaacgtggaggaggaggtcgggaggctcaaggaggagatccataggctcggccagcagcagcccgatggctcttacaaggtcaagtttggcgtcctcttcaacgacgaccggtgtgcaaatatctttgaagcactagttggcaccttgagggccgccaagaagaggaagatcttgacctacgaaggcgagctgcttctgcaaggtgtccatgacaacgtggagataaccctgttgcccccacctgcagttgctgccgcttgaagcgaagagcaccaccaagttctcgattccatacaactcgtatgcttgtattctgccgtgcctatattagattctctcgaaccatttggtgttccttgaaaactgctatcgtgtgatatatgaaattgtggtgctcaagaaattgccttgcttgcatatggttgtgttgcttaatttcaatgctggtatagcattcgtgtcatgagacatgaaaacagcagactggagttaatggccgcgggttattgacgtcttcaaaaaaaaaaaaaaaaaagcggcc

SEQ ID NO: 157272 - DNA, 200 bp, Zea mays
  unsure (1)..(200): unsure at all n locations
  Clone ID: MRT4577_75010C.1
ctaacaacatctgtncaccgtgaaatctcggctacctacctgancttctggttacctacgccnccggggtacccaactaccganncccanccancataccaaagccaccgcggatgnnctatnccgcntacatcaatggtgctgatncactctcgnaccgngactatcntacgaccgacatgctccacgacntcccgggc

SEQ ID NO: 157273 - DNA, 510 bp, Zea mays
  Clone ID: MRT4577_75011C.1
ttttttttttttttttttttttttttttttttttttttttttttttttttttttttttttttttttttttttttttttttttttttttttttttgggccccaaacccacccccgggtttttttttgggtaaaaaaggccaaaaccccaaaaaaaggcccagcaaattaaaacccaagggccccggtttctaaaacccacccggggggggggccccgggaaaaccccgggggcctttttttgaaaaaaaaaaaaaaaggctcccgggggtttcaacccaaagggggccaaatggagggggggggcccaaaccgggggggggggggcaaaaaccccccccaaacggggaaaaaaaaattggccccggggccacgggccccaatttatggggggggaaaaccccgggccacaagttcttggtttggcccctgaccgggaacagcctttggaccggggagagtttccccttggggcccccccaaattgggggttttcaccggcccccgcccacc

SEQ ID NO: 157274 - DNA, 306 bp, Zea mays
  unsure (1)..(306): unsure at all n locations
  Clone ID: MRT4577_75012C.1
cccacgcgtccggctcgatctccatctcgaccgtcgctcaccgggaagctacgctacgacgaagcatggcgtgcgtcaccgcccgcgccccggacgaagccctgcacccgtcgtcgtcgtcggacttgcttggccactctagccgcctaggacggactgctaccgagaggacgacgaggcgcagcctcaaggcggaggccaagggcgagtggctcccgggcctttactgccacagctacctcgacggnagcctggcgggcgacaatggcttcgacccgttgggcctggcagaggacccggcgaacc

SEQ ID NO: 157275 - DNA, 382 bp, Zea mays
  Clone ID: MRT4577_75013C.1
gcgggatcagatgttttcatctatctcatctctttttctactctcatctaagccggtggccagggatataacccagcagacagggaacagcgtcgtgggggtgtaacgctgccgacgaccacagaccgcgactacgatcgaggccctgctaccttgggacccgaggtccttgacaccggtggacaaatattttgcaggtgttttgcgaacatttatttggtcgactcgcaccacacttgccatcacccgaggcaacggttcaccatgtatttatacccagtataaatcaaacgaaaccacacttcatttattcttgttcctgttcgtacctgctggtcatcacctccgacaaatagtttaaaaaaaaaaaaaaaaagcggcc

SEQ ID NO: 157276 - DNA, 200 bp, Zea mays
  Clone ID: MRT4577_75014C.1
ggaaatatcctatagagaatgaatcctaaaaaaatccttcatatttcctttgttccaaatggccctaaagttaattttccacaatttgataaattacatgcgaggggcaaggcatatcagtatccaacttgtgatattaacaaacatccagagaaataaaacatgttgaaaattctggcattgaacccagttcagatttg

SEQ ID NO: 157277 - DNA, 149 bp, Zea mays
  Clone ID: MRT4577_75015C.1
agaggtggtgacgactacgacgacgtcgacggggttgtcggagcgcgagcaacggtcggcgggtctgacgcgcacagcgcacgcgctgcgtctggtgtcccctccccagtgacggccgacgactccgtccacggctttgcattcgccag

SEQ ID NO: 157278 - DNA, 503 bp, Zea mays
  Clone ID: MRT4577_75016C.1
tctgcaacatctacacccgcttctgcgagcaggtcgccggcagcctcgcgctcgggatgctggccgccgtcggcaccgccgtcctctccgccgcctccgcgcgcaacgtcttccgcctctactactgctcgtcgcacgcctcgccgccgccgcgggagacctgcgccgcgcactagacctctcggcccagggcgtcagctgggccgggcgtgcttctccggagaatctaacactgggccgtcacgaagcgcaggtgcaggcccagatgaaggatgattgagttgtgctctagagtgtactcctcctacctgtgtttccctctctcttttgtctttgtctctctaaggtgtgtacttctattttcatttaattttgttgcatttggtacgttagttgtgacgtgagtatgtatgttcgtcagtgtattccgtacataataataataataataataataataataataataataataataataaaaatgttgcctctttacctgt

SEQ ID NO: 157279 - DNA, 671 bp, Zea mays
  unsure (1)..(671): unsure at all n locations
  Clone ID: MRT4577_75017C.1
agccggccgggaagtcagcggcaggaacagccaccataaaaaacgccgtactcctcgtcgtacgtacgtacgtacacaagttttaagctctgtttctgtggggccgcaggcgtgcgcgtacgcgacttccgcgaccaccgtgggcggcggcgcaagcgtgcgtggttggcgctgggacggcgcgcacccgccttcagtggnaccaagctctgcaacatctacacccgtttcttgcaggcaggtcgcccgcagcctcctgctctggatgactgggccgccgtcggcaccgccgtcctctccgccgcctccgcgcgcaacgtcttccgccactactactgctcgtcgcactcgcccgcggcgccggagacctgcgccgcgcactagacctctcggcccagggcgtcagctgggccgccacgaagcgcaggtgcaggcccagatgaaggatgggctaggctgtaatgcaggagattgagttgtgctctagagtgtactcctcctacctgtgtttccctctctctctctctcttttgtctttgtctctctaaggtgtgtacttctattttcatttaattttgttgcatttggtacgttagttgtgacgtgagtatgtatgttcgtcagtgtattccgtacataataataataataataataataataataataat

SEQ ID NO: 157280 - DNA, 259 bp, Zea mays
  unsure (1)..(259): unsure at all n locations
  Clone ID: MRT4577_75018C.1
accccgaaatncgcctcaagaccactccaatctttaaaagnacaacaacncgggtactaggtaattttttcatttttcgagaacccaaatagcnatattctttcttgattctatgctatggactttaaaattagtgaacccgtttagagaaccatctataatgcctagcacgtaattggaggacttgagaaaataaggctttcattgcccaatgagacacangtcctgtacgacaaacaatgggccctgtgtgatgact

SEQ ID NO: 157281 - DNA, 320 bp, Zea mays
  Clone ID: MRT4577_75019C.1
caacaacaaaccttgtcccccaaaatcgttcattttcccaacgcctttcaacctcttaattacatcaacttccactgtacatccgactttccccattcaataccaccaacgcctaggttcgccagaacactgacctttaaactaaaaaagccccctcccctctcaaaaattttttattctctcaaaaagccaccaccgaatcctacaccgctttcacctgaaccgcaacacaccttccctctctttcacctttaaccatacccgtgcgaggaccacaacatgctgctacacccacttctttgcctttagcaactccacat

SEQ ID NO: 157282 - DNA, 745 bp, Zea mays
  Clone ID: MRT4577_7501C.1
tgggtacctcgaggccggccgggccgacactttcagatcagacggttcacgtacgacggttggcaacactcacaaccaccgcaccgcacaccgcagcccaagttctcctctgcatctgaaatatggggccacctgacgcgacagcgacaagatccaagaactcgctcgcgcgcacggacagggccggaacccagggatcgagactgaacagcagtccgagacgccatgaacgtggaggaggaggtcgggaggctcaaggaggagacccataggctcggccagcagcagcccgatggctcttacaaggtcaagtttggcgtcctcttcaacgacgaccggtgtgcaaatatctttgaagcactagttggcaccttgagggccgccaagaagaggaagatcttgacctacgacggcgagctgcttctgcaaggtgtccatgacaacgtggagataaccctgttgcccccacctgcagttgctgccgcttgaagcgaagagcaccaccaagttctcgattccatacaactcgtatgcttgtattctgccgtgcctatattagattctctcgaaccatttggtgttccttgaaaactgctatcgtgtgatgtatgaattgcggtgctcaagaaattgccttgcttgcatatggttgtgttgcttaataaattcaatgctggtatagcattcgtgtcaaaaaaaaaaaaaaaaaagcggccaaaaaaaaaaaaaaaaggcccctagggcc

SEQ ID NO: 157283 - DNA, 295 bp, Zea mays
  Clone ID: MRT4577_75020C.1
ggggggattaaataaaaactctgccggcacaccaaaattttttatttcatctcccctcttttttttaaaaaaaaaacccaaccccccccccttcgtgtttaaccacccccaaccctctttttgaagaaaaaattaaagggattttaagatcacctccttcggcctttttgggttggggctccattttcccccctattttcctaaactctttcctccaatttagaaaaccttcccttctctaaaaaatttcggcaactctttgcctttgggtataaaaccaaaaactccctaaaga

SEQ ID NO: 157284 - DNA, 1072 bp, Zea mays
  Clone ID: MRT4577_75021C.1
agaaactggagattgcagaggcaaactcgaaaatactgaaagaaaacgctgagatgattaatgagtacttctctattcacgttgatcacgatgggaacttgaccaggcttccagttgtacttgatcagtacacccctgatatggaccgtctcccaaattttgttttgactatggggaatgatgttacctgggatgatgagaaagagtgcttcagaacggcagcagctgctattgggaacttctacgcactccatcctcccatccttccaaatccatcggggagtggtgttcaggtgtacaagaaaaataaagcttgcatggcgagtggtgaacatgttgatagtacagatatcagcagacgggagggagcattagctttagcctatcagctattcagaatctgcagataggagggagcatcaactattctataattgcttgatatatttttatgtagtgctgcttgagttttataacatgaccgtcgaaactagattggcagtcagctagatataaccgaccgtcgaaactggcttcttatcatggtacgcagtgcgctgcaagcctgcaagtgacatcaaattggattggcagtcagcgggtgtcacagtgtcagtgtcgatggaatggttctgcagcgcatgtgcttctgtaatttccacaataagtagtcaagtgctccctgacattgtagtgatccctgcacgttggtggaactcgacaacttgccaaagcgccagagtccatcttatgaatagagaaaataacaggagcaaataagtaaccgagcacgggattcttcgcaatttgatttgcgagatcactatggcaatagacaaaccagactgaaaggagaacaactcaacatcaatcttgattatcaaccaagagcctaaactcctttgtcatgtgttattgttttaatcctaaactatacatcgttgtggatattgaagatctggttacaagcctacaacttaactgatatatatatatatcacatgatgataatatgtatattcatggtgacacctttgctccttgaacatgttgtagtctattgtgtagttgc

SEQ ID NO: 157285 - DNA, 270 bp, Zea mays
  Clone ID: MRT4577_75022C.1
ataggggacggaggcattgatccagcgtttcaattagaacgcacgcagccagcacccagcacccaggagtaaaatttatatatcgcccccaagtaggggatcgaggaatttatttgcagccctttttttttttttccttttgattgaaaggggccccaaaactttttttgttggggggcctttgtttttggaggatcgtctcgttttgttttccgcccggccgccaccacctgcagggtatactatctagtttttaagtccggccaacca

SEQ ID NO: 157286 - DNA, 191 bp, Zea mays
  Clone ID: MRT4577_75023C.1
agtgacagcggcgaaactctgggcgatgtctggccgaggaagggcggctaagggtctgggcaagggcggggccattcgccaccgtaaggtgctgcgtgacatcatccatggcatcaccaagccggcgatccgcaggttgtcgaggaggggcggagctaagcgcatctccgggctaatgtacgaggagaccc

SEQ ID NO: 157287 - DNA, 407 bp, Zea mays
  Clone ID: MRT4577_75024C.1
ccctctaaagagggctcaaagcattttccatgcatgttcctgaaggggaacaccactttggttactctaatattgacctcaatccatatgtgttgagatggattatggtgtaactttggttactctaatatccacctcaacacatgtggtttgagattaataatagagcactcaaacaaagccttcaatgccagcaaaccttagcctttccttttgcctctcttgtaaattactggccagttaggactagtttggaactctattttcgcaagagaaactagttgattttccgagttcgagggcacgtcactggaaacctggaggaggaaacacatctggaaacgcagcgctgctgttacagctacagctgcgatcgtcgaccacttgtccagtttcgtccagtccct

SEQ ID NO: 157288 - DNA, 481 bp, Zea mays
  unsure (1)..(481): unsure at all n locations
  Clone ID: MRT4577_75025C.1
ggtacctcgagggcggcncgggccgggaaatccaaagagggagggtaacactgagggttttttcctcaaacaagctggcccatatcgcctttgtattgtcagaaagttcacgaaagattatggcgggtttatgcgcgcacttcagaggtactacctttacactgatcatcagagagacggcgagccacggtatagacatctctcatgtagtcttcgtggtgccatcttacattcttgacgagggatttcctggacggtctatctccaaccactgctaaaggaatataaagtcggttcggcgaggctatctattgatcagaagtctggacacgctaagtgagggtgagtatcgccgtataccagagtcgtcaacatcgtaatgtgttctagaacatcattaactgtgcacgcatggagggtgttctagctgcagaaagatatgaatccactatctcttatgacgaagctaccaggaaatctt

SEQ ID NO: 157289 - DNA, 599 bp, Zea mays
  unsure (1)..(599): unsure at all n locations
  Clone ID: MRT4577_75026C.1
cgtcgcgccactcacgacaccatgaggctgctcctcccgtgccctctgtatcctggctctcgctgccctcgccacctgcacccataccnaggctcgccgccaactgcccccccccgtcgcaaccaacctctaccgaccatgctgcatctgccacatacccttcacctgacaccaccggtgcaagtaatcaaaacccttctccctgccgcctccgttatccctgccaccgtcggtcccttttccgacgccagtcaatcctgatcgatcgacaccatgccactcaccctactaagctcgcccatgacctcagcccaatatcccagtccacactcatgccccgtgaccaacagaacgcagtccaagcccgcagccagcttgcagggtaacctgtcggcgtacgacagtacctcctatcctggcccagcccgtcgaacttcctgaggcataccatcagcccgacggcgacgccctactgctcacctcagtgccagtcgttgcggcagaagtgctgccagcagctcaggacagcggagccacaccaccagtaccaggcgatcttcaccttggtcctccaatccatcctgcagcagcagccgcaa

SEQ ID NO: 157290 - DNA, 508 bp, Zea mays
  unsure (1)..(508): unsure at all n locations
  Clone ID: MRT4577_75027C.1
ccgtaatcgtagntgtcgatcttgtcgccattggggggcnaccctacagatggaatggcaacaagatcccatcatgcgttagaaatcccataacagcagctagtaaccttcgccgccgtaccgcacgtacgtacctgctgtcagatggatacttgcttcctcctcctcctcctcctccctacatcgatgcagcaaacagatgggcgcgcaaacagaaaggaagaaagaaagaaagaacgagagccgcaccgttgagattgagaatgtagaagaaatggctggcgccggctgcgtgcgtcatggttttacctcggatttggcggtctcggcgaggatagggatgttgtagctgccgatcttggcgacgaggttctggtccaggaggatgttggtgatcttgaggttgttggcgaagaggcccggcttgatgcccccgtgcaggaactggatgcccttggtctcgccgatggccgccgagatcctgtgcacccatggcagcttcctccct

SEQ ID NO: 157291 - DNA, 393 bp, Zea mays
  unsure (1)..(393): unsure at all n locations
  Clone ID: MRT4577_75028C.1
gttcaagattcagatgatgtctggtttaagaaattggaatcttgtataacacctgcgatagaggcagcacagctaaagaagtttccagagagactatctgccattcctcccagaattctggagggtcaggtcccagacataacagaagaagtctatgaggaggataataagttgtggaagaagcatgttaatacttataagagggtgaacaagctgataggttcttcaaggtacaggaatattatggacatgaatgcaggccttggaagttttgctgcaactcttcattcttccagttcctgggtaatgaacgttgtgccctctatatcagaaaggaacactctnggtatcatatatgagcgaggtctgattggtatataccatgattggtgc

SEQ ID NO: 157292 - DNA, 818 bp, Zea mays
  Clone ID: MRT4577_75029C.1
aagtatggatctctacagttgtctgtcagtactaccagttgcagtgtcctgtcaggggttcatcacttaattttcatccgttggagcacctgcactcattgaagtttcatcggccaggtgaaactgctcttcatcttgccgggtcgactattgatcttcggtcacgtgatacaagcttagaggtggctgagatgcgtaatgcactcttcgctgaagaggaatcgactgctttatccacatgggctgttgcaacaatatgtggatgcctcaggttggaacatgtaattacgctgtttgccgccgcgctcctggagaaacagattattattgtctgttctaatttggtattgttccaaccttcacacatgttttgacattcttattcacaccttttgtgttgatattgcacaccagttaatctgatcattttcttgatctgtgtgttagctaacaattttctgttatggcaaatagaacaatcatacatgagttgttatttaataaagaatattgttttgatgaccagggaatgctttcagcttcagttttatccataatacctctaatacggccatatcagtggcagagtctactcataccggttttgccaaatgacatgctggattttctggacgcgcctgttccatacattgttggtgtgcagaacaaaacacctgatctgcaatccaggctagcaaatgctgtgataattgatgccaacaagaatcaggtgcctgcaaagtgtattaccttctatttacctgtgatattttgttactttctggagacaatttctgtcactactgtgtattgcctgc

SEQ ID NO: 157293 - DNA, 1225 bp, Zea mays
  unsure (1)..(1225): unsure at all n locations
  Clone ID: MRT4577_7502C.1
attgggtacctcgaggccggccgggcccgggaccggctgagccagcttcactctcacctgtgacctgtacactcccagatcagacgggtcacgtacgacggttggcaacactcacaaccaccgcaccgcacaccgcagcccaagttctcctctgcatctgaaatatcttgccacctgacgcgacagcgacaagatccaagaactcgctcgcgcgcacggacagggccggaacccagggatcgagactgaacagcagtccgagacgccatgaacgtggaggaggaggtcgggaggctcaaggaggagatccataggctcggccagcagcagcccgatggctcttacaaggtcaagtttggcgtcctcttcaacgacgaccggtgtgcaaatatctttgaagcactagttggcaccttgagggccgccaagaagaggaagatcttgacctacgaaggcgagctgcttctgcaaggtgtccatgacaacgtggagataaccctgttgcccccacctgcagttgctgccgcttgaagcgaagagcaccaccaagttctcgattccatacaactcgtatgcttgtattctgccgtgcctatattagattctctcgaaccatttggtgttccttgaaaactgctatcgtgtgatatatgaaattgtggtgctcaagaaattgccttgcttgcatatggttgtgttgcttaataaattcaatgctggtatagcattcgtgtcatgagacatgaaaacagcagactggagttaatggccgcgggttattgacgtcttcaaaaaaaaaaaaaaaaaaaaatttgggtataatggccaagggttattgacgtccctatgcaagaaccacacctcctcccttcgcctgtgatcatgtcgtcttgctgcggcggcaagtgcgggtgcgggtggcgctgctcctgcggcagcggatgcaacggctgcggtatgtaccctgacgtggagaccgccgccaccagcagcgtcaagaccacggtcctcgccgcgccgaccaccaaggccagcgccggcggcttcgaggcggccaccgagggcggcggttgcgactgcaacacctgcaagtgcggcaccatctgcggttgntcctgntgnagttggaactgagctggcccggcccggggatggcgcacgaatatttataatgagaagacgangacaaggcgtataaaaataatagcgggggtccaataaataa

SEQ ID NO: 157294 - DNA, 211 bp, Zea mays
  Clone ID: MRT4577_75030C.1
gttatattttaccactaataacttgattaatgtacatatgattaataagcagttcagcacaaatagaacatcaatggcataccatccatcatcactgatcactgggcttacatcagcccatacatgcgaaaccactcgtcgaccacgctgttgtcagcgtaggcatagtcaggaaagtagagcaggtcgtcgtcccccggttgctggcagg

SEQ ID NO: 157295 - DNA, 487 bp, Zea mays
  Clone ID: MRT4577_75031C.1
cttggaacctttgggctgatttatgtgcttgtttatgtgcttgtttatgtgcttgtggatgtgcgggactcaaagcctaatgtttgtattgtaagtgtaatatgttaatatttgagatttgatgtggttcctgttcctttcttgtgtgagggagacctgaggggagagaggcctctattcctgtgttcgtggccgtccggtgtagagctgctgtagacggattggcattagagggcggagaagttgtgggaggagcttttcactggtgttaatgagacttgtactatggtgtacggttggttttgtaatcatactattcacgtgtctgtttcgtcttaggataacgtaatagacgataccgctactaaggttacgggaagggtgactaataagatagccgttactgcggagtcctccaagagaaggaccgtcggctcttactagaacattctcaccgaacttaccgacacaatagatatccgggagt

SEQ ID NO: 157296 - DNA, 1561 bp, Zea mays
  Clone ID: MRT4577_75032C.1
gggaccctcgaggccggccgggccgggctaaccattctacttctttccccagccgccacaaaaaaatctggccggccgccaggatctattggccgacggcgcctatcctcctctctctgtattctattttctctctcagccgcgcagaacttcagccgccatgaaattctggttcctgaccgaccaatcccttcagctgggctgtgcgccacagagagatttttgcttctcactgttctttttatttcttctggccgcactagtactcggccgccagggagaaccggtcaatggcactgtgcatttgaactcgaccggcactgtcttctctctctgttcttgccttcagctcaccgtctattcatttttttaaggcgttctgttcagccgtcggcaagctatcccttctctctctgttattgtgcaccgagctgctctctgtttttatttaattattccgagcagctcgtgctagtgacctcagccgctggccctatggagacttgaggaccggaccccgcagaccttgccgctggtgagctcatccccgcgcatccccgcgggcgggtgagccgctgtcggctgggagctgacgatggtccaaaacgtcgggtcgaaaaaattgagtcggttttataaccgtctttaacctttgaactcggatctagtcctcatttactcgaatcctccactgtgaatgaatgtaagaaatggatctaatgtaatattcgggatcgagttatgagttgataaaacgtagatccgagatcttgcgttatttctgttatttttttttctgtgatgatattctgtaccttttctaatctgttctatcatctaggccgtggatgtaaaagatcccgagccactgggacctatgaggttagcgtgggccctcccaatcaagggcccatttaaagagatagatagttgggtttagcccaatccggtcactgttgaccagctgtagaggacacacccaacagatacaactcattaatggtgtgtgtcttgcctgattcatctgtggcaagggatatctcattgccaaattacctatagcttaaaaggaatttcgtcacggctcttaaacacaagaggaaaacatatttgttgagaacttgttagattttcttgatgttgaaaaaccgacaaatgatggtgtatctaaggaccataagacacaatccagtgctaatgtcgtatggtaggctaggaaaaagaaggaaaaagacatatgtcacattgaccatcaactaagaaaagaagaaggtaaacatggaagatatcttctgctatgtctatggtaagactgtacttcgtcaaaaaataccatacattaactaaggagagcattatcattgaaacctcggtaaacagaattgatatacactgtccttattcctatatatagcgtcttgtgtctgggggctccaaccgacgttagtgtgggccctcccgatcaagggccctattaaaggaacgattgttgggttaagcccaatccattctctattgaccgtctgtataagacacacccaacacttctgtctttcttgtc

SEQ ID NO: 157297 - DNA, 677 bp, Zea mays
  unsure (1)..(677): unsure at all n locations
  Clone ID: MRT4577_75033C.1
ctttttctgtattccatgtgtggatgattntaaggcatgagccaaagtgggcttttagagaatcaaagatcaaagaccagcatgaagcaaacaatgctaatactgatgctcctgccaaaatttatagaccacaggggaggaaagctgagaaggaaaaggctcgtgtgagaaagcatggtggatctgatgttaatggtgatccgttcattaaaggagtaaaaaatatgagggaagctcgggaagaaacagaacgagaccgaaagacccgtgatgacaagttctatgagttggaaaagagtaagcttgaattggagataatgcaaacagacacaagcacaatggatgaagaatcaaaacagtacttcaagttgatgaaacaagagattttggctcgccgtttcgggagtagtcagccatagttgttagctgttggaaacttagatagtattttgtttttgctagacctttgttattgataatcttgtgaacttttacatatggcacctgtcagccacttgctccgttccaaaatagtatttattttagggtatttatagattcatacaatatttgatgtatgtgttttatatgtgtgtttagattcgttgtctaagggtcttctagtctggcattgcctgtacagtcataatttgagcccttcctattttgtttggtgg

SEQ ID NO: 157298 - DNA, 297 bp, Zea mays
  unsure (1)..(297): unsure at all n locations
  Clone ID: MRT4577_75034C.1
cgtcgtgcccgtgggaccgccactgtggtctggtggtctcaacatcnnccgcccgccactcaggtttngcctccccgagtgggttcttccggcgtccgctgggggccgggggacgggggtcggtgccgcgactcagcttcggtcgtgctctgcaggagggtggttcaacgacttggaatgcagtcccggcttggcgcccgggcccgttgccgcctcttccacgggtcacctgcattcaagttcaaggctctacgcggctcgacggacgaggttgcacctcggcaaacaaggtgacca

SEQ ID NO: 157299 - DNA, 364 bp, Zea mays
  Clone ID: MRT4577_75035C.1
cggctctagagacggtccgccctgcccaccacggccaggttgagatcctctttttttcgccgggaacggcgggaggctcctaatcctactgcctgtgcacactggcccccaccacgcgtgcggctcgtggcggtcggagcctgcatcaacggaatgagtggccaggcacgccagccccggcggcacctgctgctttacttgacttacgtctggtccgactggactggacccctccgctctatccacactaaagattgcactgggtacacgaaatcctgctgatttatctctataagaggattacccatactacccataagtttgttaatgggttcaatgcaaacccaacggcttcataggcatg

SEQ ID NO: 157300 - DNA, 745 bp, Zea mays
  Clone ID: MRT4577_75036C.1
tggacgcctgcaggttccggtccggaattcccgggtcgacccacgcgtccgctccttcgcgacggttcggcctggtgccgcgagcggccgttgccagggtgggggtcgctttgcggcatggcgatggcggagggcgagcggactgagtgtgctgagaccccccgggacgaacccccggccgatggcgctctgaagcgggcagaggagctcaagacacaggccaacgactacttcaaagccaaggactacgagaacgcgatcaagttctacagtcaggccatcgagttgaaccccggcaatgccatctactatggcaaccgcagcctggcctacctgcgcactgagtgctatggctatgcactgggcgacgccacacgggccatcgagcttgacaagaagtacatcaaaggctactaccgccgggcggccagcaacatggcactgggcaagttccgggctgccctgcgtgactacgagacggtggtgaaagtgaagcctaatgacaaggatgccaagatgaagtaccaggagtgcagcaagattgtgaagcagaaggcctttgagagggccattgcgggtgacgagcacagacgctctgtcgtggactctctggacattgaaagcatgaccattgaagatgaatacagcgggcccaagcttgaggatggcaaagtgacaatcaccttcatgaaagacctcatgcagtggtacaaggatcagaagaaactgcaccgggagtgcgcct

SEQ ID NO: 157301 - DNA, 166 bp, Zea mays
  unsure (1)..(166): unsure at all n locations
  Clone ID: MRT4577_75037C.1
ggaccccgggctgccggagttgatccttcagtcagttacgaaaaaggaagtggctatagattaaaaaatacttgtgntcagtacccttgaaacaaaggtacccgttactacagtatgaaagtgtgatgtccatacggctgtccttagtcgcatgggcgaaccagta

SEQ ID NO: 157302 - DNA, 294 bp, Zea mays
  unsure (1)..(294): unsure at all n locations
  Clone ID: MRT4577_75038C.1
tnagggattttggggtttgtttaatggctcattatatctttttttttttttntgcgggaaactaaaaacggccccccaattttttaaaacatttttttttgcattggaaaaatattttctgtgggaaggcgcattccaacttgggccacttaagaacatttggggggaaattataaaaggtggggaaaataacaagccttttttccttaagcgtttttttcctgcctttgccaggggccatttttattttttcatgcgattggcaaaaatccctccccttacaagtcctcctaa

SEQ ID NO: 157303 - DNA, 597 bp, Zea mays
  unsure (1)..(597): unsure at all n locations
  Clone ID: MRT4577_75039C.1
ctggnctggactctgggggacgccggnatctttgcccaccctttcagactttctttaccgctgcagctttgactccagccccgcagcgacgccgtagaacgaacatcgctgtactaggctgtagctgtacgccttcctttttgcagctttggctaatggtgggtgtgtgtgtggaaaaaaaaaaaaaaaaaaaaaaaaaaaaaaaaaaaaaaaaaaaaaaaaaaaaaaaaaaaaaaaaaaaaaaaaaaaaaaaaaaaaaaaaaaaaaaaaaaaaaaaaaaaaaaaaaaaaaaaaaaaaaaaaaaggggggggcgcgttttaagggaccaaattttccttcccggggcttgcaaggtaaaagtttttttttggggtacccaaaataaaattaacgggccctgtttttaaaccgtggaaaggggaaaaaccttggggtacccaaaataaatggctttgaaaaaaaaccctttttcccaaggtgggaaaaaatgaaaagggcccgcccttatctcctttccaaaaaattccccaccctgattggcaaatgaaaccccccttaatgggaaaaataaagcggggggggggtggggtttcccc

SEQ ID NO: 157304 - DNA, 146 bp, Zea mays
  Clone ID: MRT4577_7503C.1
gcaggcaccattaattcaatggatcagtgcactgttctgcaaacagctttttcaatcggcgagtaagaggcccacaatctcctgtatcaacctatcaccattcgccctattgcgatttgcaaccgctatttgcgagttgggacgtt

SEQ ID NO: 157305 - DNA, 1394 bp, Zea mays
  unsure (1)..(1394): unsure at all n locations
  Clone ID: MRT4577_75040C.1
tgccgtaccggtccggaattcccgggtcgacccacgcgtacggccttggagacgtttccacttcttctctctgtctcggcatctgtttgagcagttcaaaccctatttttggaattttatagcattgtttcgtgatcagtcagttatatttaacatatgatctaattattaattatcccaagcacgcttcctcgacttcctatctcgactctcccaagtcacaaccctcgacctcccccctactccaactactggaagcgccgatccatcaggttctgatcgattcttctgccccgatccgcagcggcaagcggagatgaactgcgagacctgtcagctgaaagaactggagctggaactgacggagatcagggatgttctgcgctgtattttgcacaccatattcttccatagaaccctcagcctggttcgccccaaagatgttgactgtgatttcctcgatattacttatgtacaatgtggtctaccggaactagaaaaggaagttgacgaaaagatagaccagttcagtgcatgggtggagaaacacccaaaccgcagaagccagatctgcctctcctttttcgacgagaaacacagacaccctggttggtttgtcaacaaaacagagcgcatctattgggagcaatggttcatcaatttgcaagtcatgttccccaaaagatacagcaagtcaaacagctccaaagggctgacaaacatccaagcaaatgccgtggaggagaccagcacaaggcgtgctgcattggaggcgtcgattaacgaagtgctgttccagatcataaagttcgccaacgagaaaaaggaccacattcctgctatccctgacaggattttcaatcacgagatcatgatcccaagctcggattctgtatttggatggaacacggacgtcattcgcagagttctgaatagcgggcacccatactcgctttaaactgaagacgacatctcagtgggcgcccgtattcagtttattagcgtgctgccgccctgtttggaagacggctctgttaaccatcgtggtgaaccatataatatgcctaaggaaaaacctagttctgtgtacatcaccctgctcatctggcatgtacatactgtgttgggatcttgctcatcggtcaaacattcttaagttcgattaagtttataaataacaatattatgattctaaataagtttatcatgtaaaaataagtttataaataaaaatattttgattaaaaaaaaaaaaaacaaaaaaaagggggggccccccaaagggggcccagtttaacgnncgggatctttatgattgatacttatgcgagcatctggagtgagataggggtcgagaacattcttaagttgaatcgatttaggctagggtacgt

SEQ ID NO: 157306 - DNA, 378 bp, Zea mays
  unsure (1)..(378): unsure at all n locations
  Clone ID: MRT4577_75041C.1
ggggggggggggggggggaaacaaaaaaaanacccaggcagacagcnnanacaaacaacaggggnaccacacacaaaacagggaacanncacaggcaggagcannanncaggccncaagaacancaccaccgcaccaccgcnagcnacaaccggggggggggggggaaaaaannaaacaccaagncnccacaaacaggaaccgaccnaanagnaaagcaaacaccanccaaagaaacaganccaacncnccaangcaggcagggaagnaaacnaaaaggcagnngaacacaagccanananananagcnagcnagacggacgggccgggcaaggcccaacnaccgcncggngggagcnaggggaaaccacgaaccacg

SEQ ID NO: 157307 - DNA, 432 bp, Zea mays
  Clone ID: MRT4577_75042C.1
cttgacttctaacatcaaagcaagcttattttagcatgtgttacatgcttttaaaaatttatgacgggtggctaaaaccccacacacctcttcaaattaaacgactaccaatcatatgcctcccgtgatcatgaaaaataattaacttaaaacaaccttatcacttcaccccattgactaccacagcagtcgatccattgatagaacgccatccaaccaacaaatacccctaactattggttcaaagcaagccacactaccattgttgcccaaaataaccttattctttgggtggtttggccgccttaataacttttttttccccgggcgggacttaattgctttaccttgaagctttggttttgaagaccaaccaaacaaccttcatgcccccatgccacaattattttttccttaattgaccacttcccc

SEQ ID NO: 157308 - DNA, 1247 bp, Zea mays
  Clone ID: MRT4577_75043C.1
caaaccctatttttggaattttatagcattgtttcgtgatcagtcagttatatttaacatatgatctaattatcccaagcacgcttcctcgacttcctatctcgactctcccaagtcacaaccctcgacctcccccctactccaactactggaagcgccgatccatcaggttctgatcgattcttctgccccgatccgcagcggcaagcggagatgaactgcgagacctgtcagctgaaagaactggagctggaactgacggagatcagggatgttctgcgctgtattttgcacaccatattcttccatagaaccctcagcctggttcgtcccaaagatgttgactgtgatttcctcgatattacttatgtacaatgtggtctaccggaactagaaaaggaagttgacgaaaagatagaccagttcagtgcatgggtggagaaacacccaaaccgcagaagccagatctgcctctcctttttcgacgagaaacacagacaccctggttggtttgtcaacaaaacagagcgcatctattgggagcaatggttcatcaatttgcaagtcatgttccccaaaagatacagcaagtcaaacagctccaaagggctgacaaacatccaagcaaatgccgtggaggagaccagcacaaggcgtgctgcattggaggcgtcgattaacgaagtgctgttccagatcataaagttcgccaacgagaaaaaggaccacattcctgctatccctgacaggattttcaatcacgagatcatgatcccaaggtgaccccttttccttggacgtgttgacagctcggattctgtatttggatggaacacggacgtcattcgcagagttctgaatagcgggcacccatactcgctttaactgaagacgacatctcagtgggcgcccgtattcagtttattagcgtgctgccgccctgtttggaagacggctctgttaaccatcgtggtgaaccatataatatgcctaaggaaaaacctagttctgtgtacatcaccctgctcatctggcatgtacatactgtgttgggatcttgctcatcggtcaaacattcttaagttcgattaagtttataaataacaatattatgattctaaataagtttatcatgtaaaaggatttttcatgattgaaacctattgcgaagcatcttgggagtgagttaggtggttcgagtaacattccctaagtcttgaattcgaattttaggctagggtttcccc

SEQ ID NO: 157309 - DNA, 116 bp, Zea mays
  Clone ID: MRT4577_75044C.1
ggactgttgtttcttgccaacagctagatctggcagagggaccattatagcaagaaaagcgttagtaaaaaatcctagcattcagtaccacaaatacttgatatttgattctgttt

SEQ ID NO: 157310 - DNA, 586 bp, Zea mays
  Clone ID: MRT4577_75045C.1
tctttttttttttttttttttttttttttttttttttttttttttttttttttttttttttttaaaaaccgccataggggtgtcaaaaccaaccaaaattcgttgtcacaaatttcaacgggaaatacccattgggccacaaaaagagcaaaagcacggggtgcctggttttttattatactgccaaaaaaatacaagtttgatttgccggttccccgacggtgggggccttctggccttgtggtcccccgacaccgctggttttttggggtttgttagagggttcgccctccaacccctggggttgtggggctgttttactactattgggcggggaaccgttcctttttttggggaagaaaccggcgccgccgccgttaacggaagtttttatggccttagggcccaacaaaaaaacgtgtttgctcgagattttccggcctgttttgactttgggcccccattgcccttccgggtttgaaaggaaccgttttgttttttttgccccaattttgctgagggcaacaactgttttgaaaaagtgtgtttctatttttggcgattttgaaaggaacacccggccagg

SEQ ID NO: 157311 - DNA, 315 bp, Zea mays
  unsure (1)..(315): unsure at all n locations
  Clone ID: MRT4577_75046C.1
aaataacggatgcaaattcatcggagtcgaaaattcgtagttatctttatactattaaaaaggaaataaatagaagaataaattaaaaaaaaggaaaaacatctttcttggtcttatccccaccgcatcctaatctctacctctgcattcctgcgttgatttttttttccaaatcccgtcgcttgatatttctgagaccggaacgcgcagaggcctgtcttctaccttcgncgctatcctctgcgccgctcatcggagattttttctgctcgcgctggccaggatattgcctgaagtcacgaccttatcttcccc

SEQ ID NO: 157312 - DNA, 296 bp, Zea mays
  Clone ID: MRT4577_75047C.1
tagccacccacccttggtaatccggccggcggcggggctaaaggccgacaaggcatggagttggcggtgggggcgtcggcggctactttgaagtcgctcctgagcaagcttgggagcctcctcgctgagcagtacaccctcatccgtggcgtccgcggcgacatccagttcatcgccgacgagctcgccagcatgcaggccttcctcagcaacctgagcaagtgcaagaagagccacgacgaccagacggaggactggataaagcagatccgcgacatctcctacgacattgaaga

SEQ ID NO: 157313 - DNA, 207 bp, Zea mays
  Clone ID: MRT4577_75048C.1
aacaaaaagggtgtgtttttttttaattgtttttacaatccgaaatttggcttaaataaaggcaacccttgggccaccaagttcattatgtaggttccttttacaaaaggtctctttgggattagaaaaaatggacggcgcctggtctcactcaccttattgccggagcgaagcctagaacattcagtgggccgtttattttgagcg

SEQ ID NO: 157314 - DNA, 193 bp, Zea mays
  Clone ID: MRT4577_75049C.1
cgcgtcgagcagcagtcgcgaggaggcagatgaccaaaccgacctgcggggctgggcacgtaacggaccagacccgaaaattttaaattctttcttgccggccggcccgtgccggtgaacccttcgtttttgccggccgggcccaacttcggccttttcttcttcaaggggattggatacgccacaagctgcg

SEQ ID NO: 157315 - DNA, 336 bp, Zea mays
  Clone ID: MRT4577_7504C.1
ggagcggcgccagggaagctacgcttgccgtcccggaactggggacacgggatcgggcggagtacctgattatcagacgtgtgctgtggtgacctgtgagtcgtgtcgtcactgggtatatggccttcggggcattgttcttgtggagagtcatgcgaagagaactgatgccgctcgtcgtggggaacactgaccggatgtagctgagggacaaagagaatgggctcggtggagactgaaagagagcttgtgaacaggctaactggactggcgtgtttacaactcggactggaaacctggggtaccacttatcgcttgagacatcccctttgcagt

SEQ ID NO: 157316 - DNA, 427 bp, Zea mays
  Clone ID: MRT4577_75050C.1
attttacattataagatttaatggtacgatcggattctatttctattaatttttaaattaaaatttatttagagtcatgtgaagaagtcatgttaagaattatttggattgtggttcattaccagctctatctatttatcgttgagcaaagagccaagctggcactgtagcaggtggtgattgtccggtaatctcgtaacaataaacaggggcttcctttatttgaaggcgtttgatgggacatgtgcgtcgcgaggtgacgcggttgcaggcacctctccatccttctgccaagcatcacatggcgcgtgcttttgtagagaatccggcgctgatcggtcatctcagtggctcagtctgcagtgcaccacccaacactattgccttcggtaccagtaatgcctgagtcgaacagcttttttttttt

SEQ ID NO: 157317 - DNA, 1325 bp, Zea mays
  Clone ID: MRT4577_75051C.1
attgggtacctcgaggcctcgcgggccgggagtttcaaatctcaaatcctcatcgttctcctttccccaaaggccaaaaccgaccccgctccacgcctccactcccagccccagcggatcttctcgagcggcggccggcgatggcagcgagcaacatcgggatgatggacggagcctacttcgtcgggcgcaacgagatcctcgcgtggatcaacactacgctgcagctcggcctctccaaggtggaggaggcggcgtcaggcgcggttgcgtgccaactgatggacgcggcgcatcccggcgccgtgccgatgcacaaggtcaacttcgacgccaagacggagtacgacatgatccagaactacaaggtcctgcaggatgtgttcaacaagctcaagatcactaagcatatagaggtgaacaagctaatcaaaggaagaccccttgacaatctggagttcatgcagtggatgaaacgatattgtgattctgtcaatggtggcttcatgagcagctacaatgcttctgagagaagggaaagcagcaaagggggaaaggagacgaacagaagggcatcggtgccctctcacacaccggccaagtctgcatccacaggtcacaaggctcaagcatcacatggcgctaagcgggcaagcgggcagacggcgggtgcaccacagcgcagcgctaagccatcacctgtagccaactctagcggaccagcttatgacgaacaaataactgagctgaagctccttgtggatagcctggagaaggagagagatttctacttttccaagctgcgggacattgagatcttgtgccaaaaccctgaggttgagcacgtgccggtccatgctatccagaacatactctacacatcagaggaggaccctcagcagcaggctccagccctgagccccatcatggaggcgtccgaggagaggccgaagcaagaggcggcgcacaagagaaagagcatctcggacctggacgagtttggtatgtcgtccagctcaaggcagaggctctccgacatctcggacgtgcagctgtgtggatccccgctgacgagtttcagctaaagaaactgtcatctctacaaaatgggtgtctcgtctttctgttggattggttcgtggtttcgtatttcatgtgttgtttggtggtgaactgtcgtgtgctcttagcaagttgtctgccacagaatttgtggccataaatgctacaagttcctcctgctatgttatctgccacccattccaagctgcataatcgcaaaaaaaaaaaaaaaaaaaaaaaaagcggccagggggggggcggta

SEQ ID NO: 157318 - DNA, 330 bp, Zea mays
  unsure (1)..(330): unsure at all n locations
  Clone ID: MRT4577_75052C.1
gctccttggtctttctgcaagtgctgctactgcgaccattttcccgcaatgctttcaagctcctataacttcccttnttnccccntacctttcaccacccctctcttttttgggggggggcgcaaactncaaccctacannatccaacaaacaatacacaataaaatattacctttatcacccttnttcctncaacaatnatnanacctattacaacaattacctttaaatgcatttatttgncacaaaacattanggctcataaactacaacaacttgtgctagcaaaccttgctgnctatttttttcacagaaatttcttccattaaa

SEQ ID NO: 157319 - DNA, 191 bp, Zea mays
  Clone ID: MRT4577_75053C.1
aaagacgcgagggcggacgcgtcggatctacgtggtacaccttcaggatagtctatctccacgataaggaatgattatgctcgacgatgactggccggggtaaggagtaggcgtctgtttgcctttactagcagggtttccagggggtgcttcctatagctctccacttgcgtgagcggcgacatggattt

SEQ ID NO: 157320 - DNA, 328 bp, Zea mays
  Clone ID: MRT4577_75054C.1
cgaacggatgcaggtgttcatgctttatcgaggggtggttatgttgatggtgagcggataaataaaaagaagcctggcaaagctttaacaccttatgagcctggagttgtaaaacctgctgtgaaccactttctactgaagagcgaaggtgacatactggcgactgaattctgctgtgttcaccagactttcatgctcaatacaaatgtcttgagcgcacatatgactatcgcttgcttgctggacctgaatcaacatgtgattttgagaaaaaatctgtttgacatatatctgaacatatggatattcaaccaattgaaaaagcatg

SEQ ID NO: 157321 - DNA, 582 bp, Zea mays
  Clone ID: MRT4577_75056C.1
ctcctccttctcctccttcctgatccccgacctccgtccccacccatgttccgccgtctctccctcctcctcctcgccttctccatcctcttccccgccacgctcctcgcccagcccccaacggcgccgcagcagtgcccgctaaacttcaccgccctgcgccccttcctcgccccgccgctcccctccgacgacgcctcccgctgcgccttcgcgctccagtccgtccggctcctcctctccctccacctcgccgccaccggttccttcctcgtccccgcctcctcctcctgcctcccgccgctccgcgacgcgctccccttcccgctccctccgcccgatgcctgcggcctcgcgggcatcgacgcgctcctctccgctcctggatgcgccaacatctccacgcgagcggagttcgacgcccgggtgcctgcctccgcccgcagggacatcaacgccagctgcgaccgcgagctcggcgccgttccggtctgcaccacctgcaccacctcgctcagcaagacggccgcggcctacctcctgcctggatcccccgacggcggaaacaatgtcaccggctgc

SEQ ID NO: 157322 - DNA, 310 bp, Zea mays
  unsure (1)..(310): unsure at all n locations
  Clone ID: MRT4577_75057C.1
gggngacgcccgaggggagccaccacaccagcgacgcgcaggggcnancggccgcgcccgggaagcggncgcagaagcagcccaaggacccgaagcaggaccncngcgacccgccgcacaccagcgccagcgncaccaagncggcgcacacggcaccagaccgcggccaagacaaggcggccancgnggcaaccccggacgaggagcganccggcggcggcgcgcccgcggaccccnggaggcacggcagcgngcagcaggnggaggaggncaagcgccncaaccgcaacgngcccgncnggnccacggg

SEQ ID NO: 157323 - DNA, 372 bp, Zea mays
  Clone ID: MRT4577_75058C.1
tagatacaaacagatgtcccccgaggaggtgattggcaagttcatgagctttgaacttatgatcaaagactccaaacacattgtcaacttggagtaaggcgccaccttcacacctgaggtgcaacccgttgcattcaaagcaacagaagagaagaaggaagagtctacaccaagtagactcccaatcaacccctccaagcttgataatgaggaaatgactcttatcatcaagatcttctggtaaatcctcaagcaaagaaaggggaagcccgctttaagagggtttgctacaggtgtggtaagtccggtcactttatcgctaaatgtccatatacaagtgacagtgatagggacgacgacaagaaagggaag

SEQ ID NO: 157324 - DNA, 328 bp, Zea mays
  Clone ID: MRT4577_75059C.1
cgcctactgcctcacacagacacttacgctcgcccaaggcagtgcgatgtccatccgcgcccttcccatcccttctcctccccctcggcctccgcctccgctctcaacccctcctcttcgctgcttcccgccgccgcttcctccacgttcccaaagccgcctcccgggacgactctgtcctcgagcatagggcgccaatcgcctgataatatataagataacccctattacctttccttgccccagaacttcacataaatatatataccatgaaataacgcgggcatgctcgctcaccagacgacaaaaaggtcgctccatccctcca

SEQ ID NO: 157325 - DNA, 472 bp, Zea mays
  Clone ID: MRT4577_7505C.1
gctcgctcatgtccgtccgtcacaacctcctctaccacggaacgggcagagcacacccctcccccccaccagatccggaatccaccggtggcgaggtgcgaagatgatcataccggagcgctgcttcacctgcccgtaaggcgattcgggaacaagtgggacctctacctcgatctcctccaggtcgactactcggaaagggatgtctgtacgctttcgaattgatccgctactgctgcacgcgaatgctcactcgaccatgtcgacctcattgagaagttgctcaactacaacacactgtagaacactgagacaaggtaagtgacccagcatatcatgcatctgaaacgcactactgcgttcggaatatcatatatattgtagggggtatgatgcttcttctctatcaggatccaagagaggatcgctgccagtgtgaacttgcttttgctctcgaccattctaggactga

SEQ ID NO: 157326 - DNA, 154 bp, Zea mays
  Clone ID: MRT4577_75060C.1
ctcgagccgccgggccgggaaatcagaccaggagcggcgatatccgccatgtccaccatcactgccgccgctcgctggagcttccccgcccgtctccagttcctcaccagccgacgattttgattaaccgcctcctctgtagcgccgactactt

SEQ ID NO: 157327 - DNA, 354 bp, Zea mays
  Clone ID: MRT4577_75061C.1
ctctactctcgggccatttcggggttttttccctttttttagccccccataaacacaacctgcccttttatctcgcgtttccatgcatgggccagctaagcaacaagattccgcccaagacctattcattaattcacttgcccctcgaactcctggatataccacaaatttttcgccaattgccagccccctgatcttattactgggcaactcccccactaactcgcttacccacccaatccgggaacaattaaaatccctcaactggcgagccggaacaaatccatccaacaaaaaggaaagtgacaaaggcatgaaccatccttcaccccaatggcacataacaaatttttc

SEQ ID NO: 157328 - DNA, 281 bp, Zea mays
  Clone ID: MRT4577_75062C.1
ctccacagccctgggggaaaaaacaacaaccccgaccccctggtttatgggctaacaacacacaacgggggtgggctactggctgagaattaccccccggggtgagaccataactagcacacatgcgaaacgggcccctcgtgtccgggtgaggttagccgaaatctatgaccagccccgctgcccggtgggggacacacccctcctttctgaggcaaaagttcaggggaaggggagggctgtacccttcctagaaaatatgggcccgggggagctgctcc

SEQ ID NO: 157329 - DNA, 276 bp, Zea mays
  Clone ID: MRT4577_75063C.1
ctgtaatcaagactattctaaaatgaaaatcaaacatatgaccggaaatctaacatgaagcacatacagagaattgatagatgcttttaaattacactggaagtagagaaaaacgtaacataaatttttatgctctgattataagaacgaaggccgttttagaaaaggcatttgccccctctcttagagccttccactctggcccccacaatgcctgacagagtaaatctgggtcagactggatgcaaccagtgattcccaaaagagacatacaaa

SEQ ID NO: 157330 - DNA, 480 bp, Zea mays
  Clone ID: MRT4577_75064C.1
cttgcttttatttgacgaggaatgatcctctttctttccttttgcggtctccttttttgcaggttcaacaattttgtcaaatcattgctgaaacgctatgaatgccaaatcgtcatcacgttcaagatggggacgggtcctcgacagccgcttcaacgccgctaattgggtctcatcttcagtagcgtcctgcgtggcgtggtggggcgaaacaacaacagggttgacggaggaagatggagctcgttcgagcagcagtggcgagcaggcacacgtgcacctccacgttagagtagttgtcctctgctggtgccgcgacgatgttgagaaaatagcgcggcccaccgctgaggcgatgcgcgtggtgtgccctgacgcggaggcggacacagagagatcccgcataaaggccgagctgacggggcgaagatggctagcgcggaggcggagcggctgaccccagcacagatctttctcggc

SEQ ID NO: 157331 - DNA, 1234 bp, Zea mays
  Clone ID: MRT4577_75065C.1
cgggaccccacgaaaagagaggagccgggaagcaaagcgccgacgactacgccgcaagtcccaacccaacccaccctatccagaatccagggactggactgggaacgcaaggttctgggaaggcgtatgtaggcgttgccgtcttggtgcctcatcccggagctgctacttctcccctggtcgttggtcgattggagccggtagcgcgggggggatatgcacgggaatttcgggccccaggagcagattctgtggccggcgtcggttctcgccggcatcgtcatgtgcggcgccgtatatcagatgactcgacatgtcagttctcgatgtttcaaatgctacagtatgttaaataacaggcaaaaggttgagtggaacaataggggtttctctacactccatgcattggtagctgctgccgtttctttctacctggtcatgatctctgacctcttcaatgaagatgcgcacaatagcataataattgacagaaaatcatggctatccgattgcatgtttggggtctcgatcggttactttttgacagacttgacgatgatcatgctgtattttccttctttaggtggaaatgagagctagttttcctaatattgatgtttcagctcttgcatcacggactttctatgtatgcaattggtcttgctttattgagtggcaaagcacacatgtacatcctcatggtcctcttcaccgaaatcacgactccctttgtgaacctcagatggtatttggacgttgctggtcagaagacttgcaatctttacttatacaatggtgtggctctatttgttggatggctgattgctcggataatcttattcatatatatgttcacccatatgtattttcatcttgatcaggcgagatccatcttcagcttagggttctacagcttggtggcagtgccgtcggtggttgcggtgatgaacgtattttggttctggaagatactcaaggggatggtgaaaaccctttctaggaggaagcacagcgaaaatgggagaacagattagaaggaatgaaggaaggatgctactgaactgtacacatgttcatctcaacgcacttacggcactcgcattcatttctcacacagatgtaattatcttgtcttgccgtcaaagattcaaagtcggaatcccgcaactcttaaattgttgcaacagtgccacatgcaccgttactgaatatatattggccactgtcagtggct

SEQ ID NO: 157332 - DNA, 238 bp, Zea mays
  Clone ID: MRT4577_75066C.1
ttttggagaagccgtagtcgcagtaagctacttacaagaatgcttgcactcatcttcggcgtcacgcggaaattcattgtactgaagatggcactgataacatatctggcatttatcactaagtgttctacgattggtccgtggtccgtactaaccgaacctgtccttttactgtcgtatagtggaggatcgagatggatcagtgtctgcctaatttgggcatatgccattgaccact

SEQ ID NO: 157333 - DNA, 646 bp, Zea mays
  Clone ID: MRT4577_75067C.1
ccggccgggccgggcattcaaacagaacaaacagcaaactggcatgcttcacttgctgtactcgctgttagatggtcacgctatattatcaacaggccatcactagtcaccagcaatgaatgcccatgggtgaggtcttcctctggcctcagcctcctgttctgcgccaccgcatatgggtgtcaaccctactgtccacgcgccaggcctgtcctcaacacgcgccagtgctagacgacatccttcgggcgtcactctacacaggagactggccagtcgtgctcagagagctatattggaagaacgtgcatcacgtgacaccctgtcaaactacaaataataactcccgcacggaagaccatgcaacacatgaatggtgagaagcttacgcttctcaagtttagagacaccccacctatcgaccaggtacgaggagatagataagattcctcatggtgtgtggacaacatgcattaagtgatggaaaatgactcgtataccctgactatacatgggaagttgggtgtatatatctgaggagagaattgtgatgtctaggatgccgtaccccgccactataaatagacgttctatgtgcagaagcactctttgtctaagatattcaaggcttggacatgattctggt

SEQ ID NO: 157334 - DNA, 381 bp, Zea mays
  Clone ID: MRT4577_75068C.1
ggtgttcatgctcctgtgggtggcgctgcacgacgccaacatcatcccggctgcccggcggatgacggagcgccccggagggctgacacatgtgcagcgcatgggcgtagggcggctcctggtggtactggccgtgacgacagtcgagcttgtcgagaggcgcctgatacgctccatccacagcggtagctgcccgatgagcatcgtgtggcaagtgccgaagttcgtgctgatggcaggctccgacttcttctgcgacatcgcgcagctggagtccttctacagcgaggcccgcgccgagatgcgcagcatgtgctcggccgtgtacttgctggcgctgccgctggggttctacgtcaactagctggtggtgacgcttgt

SEQ ID NO: 157335 - DNA, 400 bp, Zea mays
  unsure (1)..(400): unsure at all n locations
  Clone ID: MRT4577_75069C.1
cccgggccagccacacccttccgacctagttttaggccgttttttcagttttgtttgaaaatcccaacctgccaccnccggtttcccctttccatatgtaatgtcggccctcttaatatcaactcttgttgccaattccaagtgaaaaattttgccttataatccatattgaaataataaccatcgtccattttccaaaaaaaaaaaaaaaaaattaaaaaaaaaaaaaaaaaaaaaaaaaaaaaaaaaaaatttaaataaacatttaaaaattaaaaatttatttatataataaaaaattattataaaaaataataaaaatatgggggggcccttttaaaaaaaccaaattttatttcccctcctttctaattaaatatttttttttatttttccccaa

SEQ ID NO: 157336 - DNA, 324 bp, Zea mays
  Clone ID: MRT4577_7506C.1
atggcagcaaagcgactgcaggaggctgcacgtggcttcctgatgcggcaagttgcggcagcagcgcggctacaggcagcggcttgccatcttcaggctgtggcacgcggcttcctggcgtggcgtcaagcggcggcgcggcttgccatcttcaggctgcagcacgtggcttcctggagcggcgtcaagcacggcaagcggtggcgcgactgcaagttgcgcagctcaggttgtagaactggtgagatgccacgtcttggcctttgcagcctgggcaaggttgttgccatgggatccagggagaccaaccttgtcatatgttag

SEQ ID NO: 157337 - DNA, 1105 bp, Zea mays
  Clone ID: MRT4577_75070C.1
ctgtagctagctgatctccctccgaaactctctgctcgcccgctgcctgctggaagcttggcgcggtcccggcggcggcattctccggcaatggggtgcaaggcgtgcgacaagcccaagcccagctaccgcaagggcctgtggtcgccggaggaggaccagaagctccgcgactacatcctcctccacggccacggctgctggagcgcgctccccgccaaagccgggctccagcggaacggcaagagctgcaggctgcggtggatcaactacctccggccgggcctgaagcacggcaccttctccccggaggaggaggagacggtgatgagcctccacgccacgctcggcaacaagtggtctaggatcgccaaacacctgcctggcaggaccgacaacgaggtcaagaaccactggaactcgtacctcaagaagagggtcgagggacccagcacgccgccgtccgactcagacgactcgcattgcgccaagcccggccggggcggcagcacggcgcgggagacgggagacgaccgcccggcggactactccggctcgtcggagccgcgcgagccgtcgtcgtcgcccgacacgagctgcctgacgggcacgcccaaggtcatgttcgtggactggctcgacatggactgcatgggtggtggtggtggtggcccgccgggcgcggcggcagcggcagcggcacctggtctgggcgctgctgcgggcgtggccagggtcagcacgggcgatgatcagatgacgatggatgatgggtcggcgtccggtcgtgccgacgtgtccctgcacggtacgttcggtgacagcggcggcgccggctgctgggagttccacgagagcttcgatcagatgcaggcggccggcttctgcgacctgctctcctccattggcgagtactacttcggactcgactaggctctcggccctggttggtgatcggtcgttgctcaaaggatttgcgcgttttttttttaactttgttagaagtttcgatggatggctttgtctgtgcttgtaaattgttgtcgtgtacggtatagatagagcaattttaaaggcagataaaagtcaaggacggtgacgagtc

SEQ ID NO: 157338 - DNA, 285 bp, Zea mays
  Clone ID: MRT4577_75071C.1
gctactccttgctccacccgtgccctcaaattcgtttctagatcggatgtccatttccaggtatggctacctttataacctaaagcaatatatatatatatacactacctatcaagtactacccaaaattctactgcgtcatccacacccacaaggaaagctacctgcactatggctatgcctattcaattaggcgagcgaccaaaaatgctctagagcggtgtcacttctatcaaagctacatctgtgctccctacctccatgcgctaaactgtctctcatcaa

SEQ ID NO: 157339 - DNA, 565 bp, Zea mays
  Clone ID: MRT4577_75072C.1
ttgggggtacacgccccccctctcgagttttttttttttttttttttttttttttttttttttttttttttttttttttttggagggggacagaaaaatccattccgtttaacaaaccaaattaaaggttaaacaggcagggaaaactcatccataaaaccgaacaccataatttttttttttattttaacccgctgcccttgggggtgaccggggggccactggtttgccacccaccgagtcatcggaaaaggaacggggggggtagcgagccaagcaggaaacccagtacgacccaagcaaaaaaaaaacacgggggcccatgccccccaaaaacattgaaggggaagtcttctttttaccaacccacatgtcatgaagcgaaacaggggggactcgcccatgaaaaacaggttccgggtacaaatgcaaaggggccacgggagaggacaccggggggttaccctagggctggctggctgacaacgaaacggcctttttgttttttccacccctcgtggccgagccgccctgcacttccctaagttttctttctgggcctccg

SEQ ID NO: 157340 - DNA, 482 bp, Zea mays
  Clone ID: MRT4577_75073C.1
agataaaatcaaacaatttggaattttttaaaagatcagtctcaacaaaagtttggccaacttaaggggggaaaaaactcactactcggggatccataatgtcaaaacagaaaacactacaatatgtttataagatatggtaaccgaatagaaatccagcatttgcatccaattaacaaaattatgctttgaggcgtacaaagaacttctgcttctcctgtgtggtctggaagcgaccatgcccaaactttgaagaggtgtcgataaacttgagcttgatctcctccagagcaacacgagaagtctgcttaaggagggattggcgcaatgtaataacccttttcttgggaccaacgcagcatcccttgaccatgatataatcatccttaacaacaccatagtgagggaaaccacctattgcggtaatgtctttctcggtcctatcaaactcagtaagagcagagtgagattcatctccagct

SEQ ID NO: 157341 - DNA, 354 bp, Zea mays
  Clone ID: MRT4577_75074C.1
aaattaaaacttaaatttattaaaaactatttacaatttaaattcgttcatattcttcaactcttcttctatgtactgcgtatattaaggaaacgacgactgcaatgattaagcccatcatgataaagagggaaatgacagaagctttaacccaacgaggcgctcttttgaatgtatagtgattgtgagtgtgaccatcgtcattgtcatcaggttcgtcagcggtggcataacaggaactgtctttgccatattctgtgtccaataatacattgtagcgaagtacaagagtattgcggtctggactactaagaaccttgagtttgaggattctattgaatttagcatcagcag

SEQ ID NO: 157342 - DNA, 635 bp, Zea mays
  Clone ID: MRT4577_75075C.1
ttaaatattaatagagctcctgcagagatctgggggggggggggggggggcgtccgcccccgtggtgcagctcgctccggcgctggtaacgacacctgactcgccaccaatcagagtctccactaagctacccacccattagtgagtcccacctacccacgcccccctaagctatccgtgactcagataaggaacgataacaggaaaagccctacctaccgcttacccacattcgccctgctaaggatggacaggtactcgagaagagtatttgttcatactatatcaaaagaatccagtagatagttccgcaggaggtgcgcaccaaagactaggtagagacttttactgatctgtatatcgacaactacgaggatgtacggaccgtctagagtaagagtcagaaagtcctaaatgtgttgtaggtctttgtgattgaacccttttctaaagaggtctctgtctgagttagtatgctcactactcctactatcaactatcgttacttatatgacaacccgatgcggtacgactataaccggactatcctcctccacaacgcggagaacgagagggagaccagggtaataaaccgtggtattaaggactccccattcaccttccacgcgcacagt

SEQ ID NO: 157343 - DNA, 226 bp, Zea mays
  Clone ID: MRT4577_75076C.1
atcattctctttgttgtttcacgtgaggagaaccgactagagcctgccaacatcaacaaacaactctccacattgggggagtaactactcacctacatgctcccacccagtctagatgaatccgcgctcctagggactcaaccgtatgaccccaacctgtagttcgccgacaaaacatgtatttactcacacagatattcgctgggctagtgcccaactactttct

SEQ ID NO: 157344 - DNA, 709 bp, Zea mays
  Clone ID: MRT4577_75077C.1
tccggaacattcgtcacacgcggctgcatgaacgcgtcacgatccgacctccctccaactgtccaacataaaaagctacgaacataagtagactcccctcgcctcgcctagcaagcatttgatcaaggacaggatccggtcgaagaagaagagagcctgattctcggcggcagcaccaccagctggtccatcgatcgcgccaccaaccgatggccggcgggaggaagcgggagtggctgcggaacaggatggcgacgatcgccgggacaccgggcgcgcgcagacagcagcagtcgccgcggtgggcgctgcgcgttcgcgcgctgtccgccgcgctgcgccggggcccgggggaggcacgggcacggggccgccgccgccggcctgccgcgcgtcgtcttcctccgccgcctgtacgagagcgtcgtcttccatctgctgtgggtgatagagtccgccgtcgtcctcgccacgctctgcttcttcttcctgcgtttcggcttccgcctgtgacaggagtacaggacagccatggcttgttgcccaacgtctgtccgcgttctttgccctgaaaaggatgtaccatgatacccctgttccatccagcgtgcgtgcaatccaaattgtaattaaatactatacataatcatatactatgtgagtgcccgtgcattacaacggaaacatataataatacgataatttatat

SEQ ID NO: 157345 - DNA, 1651 bp, Zea mays
  Clone ID: MRT4577_75078C.1
tttccgcggcgccggcggctctgcatgcgcgcgccctgcggaaactgatccatgatctgatcccacggcaccagcagcagcagcaacggtcgaccgccggcggccggccggccacggtgggcgcgcgcgcggtggcaaataaagagcttagagccgccggccgggatctatggggcgcgaggcggcagcgacgaggccgcccaagctgaggaggggcctgtggtcgccggaggaggacgagaagctgtacaatcacatcatccgatatggcgtcggctgctggagctcagtcccaaagctcgctggcttggagagatgcggcaagagctgcaggctgagatggatcaactacctgcggcctgacctcaagaggggcagcttctcccagcaggaggaggatctcatcgtcagcctccacaagatactaggcaacaggtggtcccagatcgcgtcgcagctgccggggaggacggacaacgagatcaaaaacttctggaactcgtgcatcaagaagaagctccggcagcagggcatcgaccccgccacccacaagccgctcaacgacgacgacaacgctgctgctgctgctgctgcggacaacgacgccgccgtggcgccgcaccaccatcgtcgtcatcaggacgaccactgcggcgccgccaatattgataataataataataacaacaacaacaacaacaatcggcagctcccctcagccgacgaccactgcttcgccatgagcagcgacgaccctctcgcgccacactccccgaccgtcagcttcgacccactgtccgtcaccaacgtccccacggcaatgcagcagggctcctacggctcgttccgctccgacaacgaccacctctgcgactacggcggcggcggcgtcgacgtggtctcggacgccgccacggcgtacagcgccccctacacaggcggcggcggcggcggagacagctccagcaacagcaacggcaccggcacctgggcctgcagcggcggcgagccgatgccgccgcacgtggccatgttcggccgcgatgctgcccaggcggcggcgtaccatcagttcgtcgacccggccaagtacagcccctggcagcagcacccggcggcgaggctccatgatcacaacgtcggcggcgctgctgcgggcttcccgatacggtccatgtcgcgggacctgccgggttcctgcttcgacctcgcccgcagcgcgctggaggacgagttcagcgtcgacttcctctgacgtacgactacgccgacgcgcgacgtacggccaggaggtcgttggtgcatgtcgtcgtccaacactcactcgatcgacagacacacacacacacatacacttttcattcactactactgctactattacctcagtcctcagagatcacccaaaaaaacaagacacacactccttgtgtctgccatattcattcgttatcccccccccccctcttttcatgtggtccggtcatactttatttggacccatcgatcaagttggttaattaacacgttttggtggtatgttatactgtgtttataataagggttttatctgtattattatatatacacctcaattatattcatgggaaccaaatttttttgttggaaaaaaaaaaaaaaaaaagcggcc

SEQ ID NO: 157346 - DNA, 667 bp, Zea mays
  Clone ID: MRT4577_75079C.1
gtgcggcgctcgaggcggcggtttcggagtgagtttactctctttttcttttgctctcactcttctgcgacgactcctcctcgctctttccttcttacgaaccggataccgtttgcttccctgctcttgctcatactctgacgaccgcagagccccccaaagaagaacctgaccccggctccttctccgacaccccgcatgactgctacagcactgtgaaacgacatcatctctctctctctctcttggttctatctccagaccccaaacgctgattcttctacctagcgctccggcactttgacttgatattgctcatgtcatgtgcattttaccacaagcattgaaaactgtccaaagaaatcctaagagatgcttgataccaaataatgtctggagaaacatgcacataacttgctggattcatgtcgaagatatctatgtgacgctgacacaattggagtggtattgatattagatgtaaaggtctattggagaattacctattgtcggagaagggattatcataacgaatctcatctcaactttcactgcctctgagcaaattaccgttatatgtgcagatatctatgctggactatcagagaaaagcatgagcttagattcttcgtcagaaagatgtggccaaacttcaaatagtacatga

SEQ ID NO: 157347 - DNA, 382 bp, Zea mays
  Clone ID: MRT4577_7507C.1
gttcaaaaaagctatttatgatggtatcatccaaacctaaaatgtcctgtaaatgtacaacactttgacaggcacacatctacctaaagagtgcaccacatcacactatccaacccttaattgctcctgttgatgacccataaataaaggttctgtggccctacatgtaggacctaaaaccaaacccagaatctcttttacagcccttgaggtaccctaactggcaacctaatatagtttcattaatacaaagaagaagatatccagactacatttgcctttttgtatcatatctacctttttattggccggctgtttaccacttgtggccggtcacaacggggaacaccctaaggtcctacttaagttagccaaaaaatac

SEQ ID NO: 157348 - DNA, 600 bp, Zea mays
  unsure (1)..(600): unsure at all n locations
  Clone ID: MRT4577_75080C.1
tttttttttttttttacacaatttttagtgctctatttttattactaaaactncatataatcctattaaaaccaagttttaattatacaaaaataaggacctgcctaaaaacccctaaaactatttttttaaacctagagaacccatttttgcgagtccaacaatatttatcccacaaatgttacttctttttgtagttctaggcaaaattcacaagctctatggtaaataataaaaacaaaccatatacagagctagggctgaaatcggcccagttggtccagcacgagagaaaattggtgccagccggcccaaagctctagactcgcgcacccgcgctctcttcgcgcgcgccggcagcggcgtcgtgacgcttccgatacgctagagcagtaaagatgaaacagccaggccgatgagtatcaccactctataaggagatcaaaatatataaacgacaacatggaatacggctgtgcttgcctggccacggtgaggcggagctacggccggcgtggtcacctgctcagagagaacggcaacagccccggcctcaggcgagttgaacgaggtaacgcagttccacctcgtgccgaattc

SEQ ID NO: 157349 - DNA, 279 bp, Zea mays
  unsure (1)..(279): unsure at all n locations
  Clone ID: MRT4577_75081C.1
taaatantaaccccggacagcctgctctctgacggagtaacattatgccacagggccattccctaactgagctcttactctagccatggcctcacggatcctgctccccctgctcgaacacctccttatcctgggcccgcattgtttcactggggctgcggcgaggcggcaactgcaccaggcacggcgagcccgggacccgaactcacaggtcaagttcgacttctccccgttcctcatccaaaacaagatccggcgcgtgaagcggcacatgggcac

SEQ ID NO: 157350 - DNA, 715 bp, Zea mays
  Clone ID: MRT4577_75082C.1
cctgccgccgccgccgttcccgttcccagttggggttccgttttttgcagccgtggcggggaagggttccaaaaaacttccgtaaccttggggaaaacacgtggtttgggagccgggcgcaggctccaaaacccaccgaaggacccaggggggggctgccagggcttccaaaaagagccattggggcaatgaggggaaaaaacctttcgttgggtcatccaatgccaggggcatggtcctgaaaaaaatgggtattgaggccaagcagcccaactccgttttccgaaggggggctcgggttcagttggttaaaaagggcaagaaaatggttgccttcgggccaaaggacggtggttggaactacattgaggaaaaggatgaggtcttgatggttggattgggccgaagggggcacgctggggaaaatattcctggggtccggttaagggtcggaaaggtttccggggggtttttgtttgcccttttaaaggaaaagaaagagaagccaaggtctagaattgtttttgctaccaaaataagcaggcgtggagttgaaacgggagggcgttaaatgattaaaaaaaagggtggtttgttatgttggcagggcattcgtgcaatggttaacctaaaattttgttggggaaaacaatttcttttcaaacttgtttctgtggagtgctatcattccatatcaaggaacttcctcttttag

SEQ ID NO: 157351 - DNA, 118 bp, Zea mays
  Clone ID: MRT4577_75083C.1
ccgaagtgggagattaagaacggtactgtttttttcaagacggcgaacgagctacagccctggagcgagatcccattcttgcaacttataaacaaaacgcttacctacgccagggagc

SEQ ID NO: 157352 - DNA, 366 bp, Zea mays
  Clone ID: MRT4577_75084C.1
attataaacggacggggaattggtcggcccggtattttgcattaacgcatttgagacctcctacacgttacaccttgctattggttttaacggtctcggcctgggtatataatcaagctttctgactataccacccatacaacaccgatggttgattacggatcgtggactaactgatgacctgatattctggcctcgccataaaagtgctgcccactacatccattggcatgaggtgcttgcataatgccctcgatcatggatttatgcagaccatttcttcaccacttttagaaataatgaatggaattatccttaggccaacccgaattggttaccaaagaatgactacgatttaccgtggga

SEQ ID NO: 157353 - DNA, 336 bp, Zea mays
  Clone ID: MRT4577_75085C.1
gctgacgccccggtcgaacacgcgaacggaggggggttatcctgcggctcagggtcgggaacctcttcaggaggctctcctggaatcgaacgcttgggagcgcggaaccagatcgcgatgcaggatgtaaaatcccgatgcttcacaagctgacgcccgtagaccacggaccaagactctctacacaacgatcttaggacatacggggaggatacagactcaaggatatactgcatcggaagacgcagaggtcccgcggatccggcctacgtagctgcactactgaggaagcaacgcagaccgccttctagggcatgaaccgaatgcaactagacg

SEQ ID NO: 157354 - DNA, 261 bp, Zea mays
  Clone ID: MRT4577_75086C.1
gtgtttggtatttttggcgcatgttcgtgcatgctaattatgagtatagccaagggacagcaaatcaagagatagggcgaaagacgggaaatagggcaagtgtgcttcgagagaaccaaggctgctacgtccgcatggttataactatgccatgtgcgtaggggcaaacaatactatgaaattgagtatttacttttcctggttcagggcacatagggaagtcaatgtataagttaataaactctaacgggaagcgataaa

SEQ ID NO: 157355 - DNA, 266 bp, Zea mays
  Clone ID: MRT4577_75087C.1
gggaaaaaaaatcttataagggaatagggggacccagtaaactaatcggaacttttttaggggtggggtaaaaaaacttttaagggccgagtgtacaaaaaaaattttaccggggaaattttaaaggggggctaaaaacctgccgggctggggggcattctttttacatggggaaaacccaccccccccttaattatccggcccctttttttttttcaaaaggctcttagatgacccaaccctggttgaaaaattaaaaattgggg

SEQ ID NO: 157356 - DNA, 334 bp, Zea mays
  Clone ID: MRT4577_75088C.1
ggcaatactaaggggccttccaataattaaaatttaggaaaacgtaaaggtacattgtatgatgggaaagaaaactaaagccactcaatgcacattacattttttttctcaacactggatcattaaccattagtccagttgttttctcataaactgagtgtaaaattaaagatttcattgggggaacacgattacttgaaagggtgcagagtcacacccaaagctatcactaccattgaatgttataccaagaggagagcacgaaagactgtgagccaggcgaaggcagagctataaaaccgtcattcttcttttggtcacaactattaccata

SEQ ID NO: 157357 - DNA, 779 bp, Zea mays
  Clone ID: MRT4577_75089C.1
cggactggcctttactttccgccctcctctactacacaaccgccacaacatgtcttttctcctccgcacttcgaccctcgtccgccagaggctcttcaccacctcggcacgtgctcgcactgccatttccctccaagatgccacagcagcacacatggcagccgccccaggcgccagtgttgtccccaagctcggaagggtcgccagatggtacctccctaccatggccatggtagccatcggttttggtgttacaaacgccctcaatgatgccaaccgcaaggtccactctgcactagagctgacccaggagcaaaagaaccagatgctcatggatgcctatggcgagcgctctagtctgcaggacatggagcgcgccattgccggtctggaagccaggctcactacgcgcaaggacaggaacaagattctcgaggaggcctatggcgataagaccagcattgaggatcttcagcgcgccatggagatttacgaggttcaatgagtgaaggcgaggcgttgaagggggggaaggttgtaagaaactagccgagcagaaacgaccagtgtcgcgtgcaacaacggacacgcacgccacaggcaggatccgaagaaggggaacgagggagaacaaggaaatccatgcgctgcgcgccatggaccccacactgcataccaggccacgagcaacggcccttacagcattcaagctgtccccggctcgtgtgctctgtggaattggaggagacagacgtcattttcgtcactcagcatagcat

SEQ ID NO: 157358 - DNA, 726 bp, Zea mays
  Clone ID: MRT4577_7508C.1
ctttctcttttatcctccggcttcccgcgatgacgccgccgccgccacggctgctcgccggcggcgaccacagtccgccccccacgtcaacctcctccccggagcaccctctcctctccgcgcacctcctcctccccgacccatccccctccaatctctcctccccgcacctcccccacgccctagccttctccttcctcacccacccgtcccctctcccgcgcctcctcctcctcctcctccacgccgccgggggccgtttccccgccttctaccactccttcgcctcggccctcctctcactccacttccccctcctgctaccccacacgcgcgctcgcctcctcctcggcgccagcaaaatcacccaaagatgtcgagtcggtgttcgagtccttactcctctccctcctccgacgtgacgtgcttcccaggagatatccgcctactcgacctcatcagcgagcattcctccttactcgtcgaactaagatacttaggtgatctacttcgcgtatttcttgcacctacgtgtactgacagaaaccgtatcgctgcgttccccaggagcgccgagtgcatcaactgcgaatatggcaagagcgcaaagaacctttaatactgcgcagagaatgcgttgaacttatgcggcacgatgctggagaataacttccatgagtgcacattaattcggagagacattgcgtgcgaacatcatgaactgct

SEQ ID NO: 157359 - DNA, 203 bp, Zea mays
  Clone ID: MRT4577_75090C.1
tatagtttgagttggagcatgatggagttattgtcctggagtaccactcctcggcgcttgccataacctgggtcagcgtacagtgcacgcctgcgtaatcgatatctttgcaaattgtctagaatcagtttactcaacgtcaggttgagacgtcatgctccagctaatgcgttcatcaattggacacctcgttgtcagttcca

SEQ ID NO: 157360 - DNA, 250 bp, Zea mays
  Clone ID: MRT4577_75091C.1
cgccggcatataccacgattttagtacggtttataaatgcttcattccagctacttcaagcggggacatttgctcatcatactgcagctgatgttatcattataatcgcggaatcagggcagatatccaatgacctgaaaccaaggttaaaacatgtcacatgcataaacagcatctgacgataccatttgcctagcttcttgagacggctatgccagacatgatgccctgctgaactatgacttgaccc

SEQ ID NO: 157361 - DNA, 125 bp, Zea mays
  Clone ID: MRT4577_75092C.1
tgcactcacaagctgaatctggcactgtttaaaagcagcctgttgctgcaatcagattgtaaccaagcataagaacgacctatagtttaaattgctctacgtgaaaacgaggtctatgttactgt

SEQ ID NO: 157362 - DNA, 260 bp, Zea mays
  Clone ID: MRT4577_75093C.1
cgagcggtcgcccttttttttttttcttatatttggatgtttttattgttcccaggttactaggatattattagggggctgaagaaacaagacccaaaaaaaccttgaccagttcttattttcaaccgcaaccactctgtacccaaaaaacgcccatggaacctccgattaaaaaatataaaaattggaaactgtactgcatgctgttccaggaaacccaatgaccaaatggacaaacacaaaattgcagaaacaaaaat

SEQ ID NO: 157363 - DNA, 182 bp, Zea mays
  unsure (1)..(182): unsure at all n locations
  Clone ID: MRT4577_75094C.1
gagagcgcgacgccgcccacgcgtacgcccacgcgtccgaatgactagccaatgtgaagcccttggatcgggcaccangaacacgccatctagcctggcttgtcaatggacacgaatcaaccccggacaatcctatgcccagccctcccatttttttatacgcggtgattcccaagggaaac

SEQ ID NO: 157364 - DNA, 450 bp, Zea mays
  Clone ID: MRT4577_75095C.1
ccaccccccccccctcgggcaaagtgttcttagactaaaataataaacattaacacatcaaaagaggtgatcaaaaaattacagtgacaccgacaaataagcgataaagccaaaacacttgtattacgtacgaaaatacaaggcccaacattctacaccatataggctttggttttaaggataccattaacacaaggataggccaaggataaccccgaacgcttcgacgccgaagaccaccgcggcctgtactaacccgacccaggatagctacgtaccggccacaatgtgcttggctttgatggcgaactatttctccgaatccgttactgattatttgacgaactctcgggctactcgtgcgtggactctgtaagttctgcgtaccgactggcgcggggaattacgatacaggtacctggacacctaccatctttgcgtatagagagt

SEQ ID NO: 157365 - DNA, 499 bp, Zea mays
  Clone ID: MRT4577_75096C.1
ggaagaaggaaacaaatttgcccttttattttgattccggaaggaaaaactgggggggtggtttcaaccctaggggggcctaaaaatggaaacccaagggaaacattgggccgggtttttcggcccacccccccgaaacgggggaatttcaccgaaggggggtcatttgggggggaaccccaaaccccggggggggggggggggttacaaagggcttttacaaggcaacgcttcacttccactggggggcccaaatgtcagggagggccaccaccctttgggaggagccccactcgttggcgaaccaggaaaagaccttgaccatgtgggcccccataaccatggggagggaggcgtcaatgggggaggaaacctcggaccccctgaagtcaacggacacaagcggcacgttaaaaaccttgaggatccccgggagctctttggccgcggggtcccggaacccctggttcacctcctgggggagggtctttttggaaac

SEQ ID NO: 157366 - DNA, 341 bp, Zea mays
  Clone ID: MRT4577_75097C.1
taaaaaaaaaaaaaaaaaaaaaaaaaaaaaaaaaaaaaaaaaaaaaaaaaaaaaaaaaaaaaaaaaaaaaaaaaaaaaaaaaaaacaaaaaaaaaaaaaaaaaaaaaaaaaaaattttgtacttttggccggagaaaaacccttaagggggaaattttgggaaaaataccaaaaaacctggggggcggtttgaaacatttttttaaagagggcccaatttcccctttaaagggagtgggttttaaaaattaattgggccggggtttaaaaaaatctcgtgaattggaaaaaaacctggcgtttaccaaaattaaataggctttggaaaaaaaatccccttt

SEQ ID NO: 157367 - DNA, 179 bp, Zea mays
  Clone ID: MRT4577_75098C.1
aggggttagctgaccaaggaatggagggtccatgctttggcatactatcctttccaaagcccttgagctacttctggttctccacggaaacccagagtggctgtggcactgagatgggccttcttcccatcttagaatgaagatctagattcaagtctgagcagagaccgcagatagag

SEQ ID NO: 157368 - DNA, 542 bp, Zea mays
  Clone ID: MRT4577_75099C.1
taaaaaaaaaaaaaaaaaaaaaaaaaaaaaaaaaggaaagaaaaaaaaaaaaaaaacaaaaaataaaaaacaaaaaacttaaaaaaaaaaaaaaaaatatatgggggcccccttaaaaaaatccaactggcccgtcggttttccacctaacgtgcctggggaattcccttgggggctccccaatttaattgccttgtgcggccgttccccttctcgcctggcttgggggaatccctgggggggccccgcccggttccccctttccgaccattcccctttcctcattggggattgtacccaccctggccccgccgatttaccttcggaggtgtggggggttccgcccggggaatcggttcccctttcatgggccttatcacccgctccttttgtttttttccttcccttcttgcgccggtttttggtttttccccttcagcccttaatttgggggttcttttttggtttccttttaagggtttacgggttcctcgccccaaatatattggtttgggtccttgtttggcttcggggtccttctt

SEQ ID NO: 157369 - DNA, 286 bp, Zea mays
  unsure (1)..(286): unsure at all n locations
  Clone ID: MRT4577_7509C.1
cgaccgacgcacccacgcgtccgaacacagtcacgtaaaaggatgttttatgcttatctcatagcgctaanggggagggatggacgcttttgctggtggggcgcatcaatatcctcgtctgcaggggttgacggaggcgtttcctcagatccctctgccttgcttggcttgatcttaagagatatcaaattaaaatatatgtgatgtgcttcggtgttgggggaaacatgttgcccaaccgtgcctgggaataggcaaacaggatggatccttctttgnncnnatg

SEQ ID NO: 157370 - DNA, 281 bp, Zea mays
  Clone ID: MRT4577_750C.1
cacctacttaagctgtatccttaagcggcgcctttattttttttttttagcaaatttgctttcggttttagtggggaataactaactttcacataaaagccattttagtttacagggttgagggggaacaaaaacacttggtagacggagttgttaataatggtttagacaactatataatcaattctgaacacaatttatgggggaacctacctggtgaggctaattagcgagcttgaattaaaatatgaaaaagatggccaaatagagccttgttattt

SEQ ID NO: 157371 - DNA, 1632 bp, Zea mays
  unsure (1)..(1632): unsure at all n locations
  Clone ID: MRT4577_75100C.1
ggaccctgggccgccggacggctacacgatactttccccctccctagggttccccgtccgttccccctcggccgcatcaggtaaattactggtctatccgccccgcattcgatctgatcccgtgattcaagcccttgcgcatcgatccgggactcctccacctgcagatctccgcggcggagtttcgtaccgtctttgtttttgcaacattcgagttgattattttggaggagtcgctctctagggttgattgagcgctgttgtttttttgtgcgacgacggtggtgtgttgattggatgttgaaagaattgtagctgtttgaggcggcaaccaagggccgcggaagcatctgcgtcgagccatggataaggggatcttcaccaacgatggctccttcatggagaggttcaagcagatgcagcaggaggcgcaggagaagaaggccgctgctgcctccgcctcatcggctcccaagcatgcgaaccccaagcaggggtttgctgttgcggcaaacaagaggccattcgagctgaagaacgctgctccggtagcctcagctggtaagctggcctttagtctcaagaaggccaaggtcgccgttgcacctgtgtttgcagccgacgaggaggatgaggatgccgtggatgttgagagggaggagcccgccaaacgccagaagtctgtgcaagctgatgctcctgcggcagctgccccgtccggngctgttgaattcggcacgaggggccaccagagggaggcgaaagatgaaatgccgccacctccttctcttcaaggtcctcctaagaagggacaccacatgggtgatttcattcctcaagaagaacttgaaaagtttatggcacggtgtaatgatgctgcagcacaaaaggctaccaaagaagccgctgagaaggctaagattcaggcggacaatattgggcacaaacttttatctaagatgggttggagggaaggcgagggtcttgggagcgagagaagaggccgtgcagatcccgttatggctggagatgtgaagaaggatcatcttggtgttggggctgtccagcctggtgaggtcacatctgaagatgacatctatgagcaatacaagaaacggatgatgcttggataccgctataggccaaaccctctgaacaatccaaggaaatcatactactgatgcgggggagttcgtctgaggggagataaatgtcaagaagttcgttattcagcatatttcttggaatgccacagatgcaaggcttccgggggttctacaaagctttgttctttgtgtagtgtgtttatctttgtggatttaaatgtctgttcaaacgtgtatcatgtttcagacaatgatgtattgctttcttggatcatccttttttctgatctcatttcagttacaagtgggagccataaggtacaaaatttgtgttgggaggggctatattttagaatggagtgtgaataactatagctagcataaggctatctccagcagattagccatcctcacatctaacagtacagtctatagtgtaaaatattgtaaaacagtgttttagttgacatacggtgaattgttggacacggtctaagtggtgtttggtagaggttggggtgactcc

SEQ ID NO: 157372 - DNA, 563 bp, Zea mays
  unsure (1)..(563): unsure at all n locations
  Clone ID: MRT4577_75101C.1
cggggaagngcccancggagcnggagcnggaggccnnccnccgcggccgggaggacgccacggcggcggcggcggcggcggcgggggccgagcagaagccngcgcacgacgncgcngcgcnggcgccgnncggcgccggnggcgngnnccccnccagcgancngnccgccnncagcnncgcngacncgaacacccgcaagggaaccggaaacanccanaancaccnnnggncccanaaccacaacgncaggcancccgcagncnccacgacgancgagncgcagncgncgaacngngcagcngcagcagcaagnccaacancggcnaccaaccngnaccngaaagagagccaggcncngggcggcacgaggggnnccgacnccgacagcganncgcngcnggacaacgaggggggcccgngcgagcagagcacgaacccacaggacgngaagaggangcgacgganggggncgaaccgggaggcngcncgacgggccaggaagaggaagcaagcccacccagcngaccnngagacacaggncgaccagcngcgaagcgagaac

SEQ ID NO: 157373 - DNA, 645 bp, Zea mays
  Clone ID: MRT4577_75102C.1
atgggtgatttcattcctcaagaagaacttgaaaagtttatggcacggtgtaatgatgctgcagcacaaaaggctaccaaagaagccgctgagaaggctaagattcaggcggacaatattgggcacaaacttttatctaagatgggttggagggaaggcgagggtcttgggagcgagagaagaggccgtgcagatcccgttatggctggagatgtgaagaaggatcatcttggtgttggggctgtccagcctggtgaggtcacatctgaagatgacatctatgagcaatacaagaaacggatgatgcttggataccgctataggccaaaccctctggtgttctgttatttctgtttgcctgatgcttctgctatttttgcagaacaatccaaggaaatcatactactgatgcgggggagttcgtctgaggggagatacaatgatgtattgctttcttggatcatccttttttctgatctcatttcagttacaagtgggagccataagctgtttcttgttagctcaagaggaccaaatccgcacactggagtaggtaaggttaacctcacctggcaggcaaggttcggacatcctctgtacgggtgtgaagtctgcaccatgtatttagtggcaatcaaagtatga

SEQ ID NO: 157374 - DNA, 971 bp, Zea mays
  unsure (1)..(971): unsure at all n locations
  Clone ID: MRT4577_75103C.1
tgtgagcagggatatctacggtagcagcatcacttggnaagttcatcacccaataaattgatgatgcagcagtatctggttgttcaacactgacagctaaaatagcagcaacatttgcttgttgtggctgagggttattattgcccacctcgttaccattctctgatgtccagtcaattcttttagtaactttacatagaacaaaggcatccttcatatcagggcaggattgacattcgttctcatctatgtagtattcatgcataatccactcagtacgttttccagtgggaggccgaccttcatgaaaaactaaagttttctttgttcctatggtcctcttatccaccttaatggcccggtcttttccagtagacttccaatacccagcaaccgttgccctatttgaccgagcaccattaggatactttctgtctcgagcagcaaagaaatgccacttgttatcctgtgttggaacattgcacttcgcaggtaaatcccatggttcatgcttgtatatatccacctctggtataatgtcatattcaattttctgaccaagtattttctttttcagatagtgagcaacgagttcagtgtccttaggatggaatccaaatcctggtggcagagccatgtcacgtagagtttccattgtatatgatctgtggtgcggagagcagagccgcgccggcgccgggacgtagccccgaccgatcgatcggaggggagagcggtaaccagcagggggaagccggagctggggccacggacggaagacggcgggcggaaggggatcgcggaagaggcggtggaggcgaagaggccgaggcggtcgcaggaaccggtcaagtctttgtgagggctggctggcgggtggggggggcggccgcggcgtggtgctgtgtctcttgccagcagacgcagacgcagcgaggggggggctggaaaagggaatgggatgcgggcag

SEQ ID NO: 157375 - DNA, 746 bp, Zea mays
  unsure (1)..(746): unsure at all n locations
  Clone ID: MRT4577_75104C.1
tggacgcctgcggtaccggtccggaattcccgggtcgacccacgcgtccggtcttgtggggcgtgtggcctcggcctcggcctccggggccttgcggggactcagcccttcggcggctctgccacaggcgcagcttctactgcgagctgctcccgccggggttcatcctgccagagactatgcggcgcaggcgtctgcggccccgaaggcaggcactgccaccgggcgaatcgtggcagtcatcggcgctgtggtggacgtccagttcgatgagggattaccacccatcctaaatgccctggaagtgcaaggcagggacagcagactggttttggaggtggcccagcatttgggggagagcacggtcagaactattgctatggatggcactgaaggcttggttagaggccagaaagtactggattcaggggcaccaatcaaaattcctgttggtcctgagaccttgggcagaatcatgaatgtcattggagaacctattgatgagagaggtcctatcaaaaccaaacaatttgctcctattcatgctgaggctcctgagttcatagagatgagtgttgagcaggagattctggtgactgggataaaggttgtggatctgctggccccatacgccaagggtgggaaaatcggactctttggaggtgctggcgttggaaagacagtactgatcatggagctaatcaacaatgtcgccaaagccaatggtggntactctgtatttgctg

SEQ ID NO: 157376 - DNA, 2192 bp, Zea mays
  Clone ID: MRT4577_75105C.1
cctcgggccggccggacggctacacgatactttccccctccctagggttccccgtccgttccccctcgggcgcatcagatctccgcggcggagtttcgtaccgtctttgtttttgcaacattcgagttgattattttggaggagtcgctctctagggttgattgagcgctgttgtttttttgtgcgacgacggtggtgtgttgattggatgttgaaagaattgtagctgtttgaggcggcaaccaagggccgcggaagcatctgcgtcgagccatggataaggggatcttcaccaacgatggctccttcatggagaggttcaagcagatgcagcaggaggcgcaggagaagaaggccgctgctgcctccgcctcatcggctcccaagcatgcgaaccccaagcaggggtttgctgttgcggcaaacaagaggccattcgagctgaagaacgctgctccggtagcctcagctggtaagctggcctttagtctcaagaaggccaaggtcgccgttgcacctgtgtttgcagccgacgaggaggatgaggatgccgtggatgttgagagggaggagcccgccaaacgccagaagtctgtgcaagctgatgctcctgcggcagctgccccgtccggggctgttgccccacccccaccaaatgatatgacagtgagacaagtcgctgaattgtcacatcagatcgtggggcaaactggcaagctttgttgccaaaaacgggagacagtttgagaatatcacacggcagaggaatcctggagatacaccattcaagtttctatttgacaaacactgtccagactacaaatattatgagtttcagcttgctgaagaggaaagggctcttgctcagtcaaaggaggctgaagcatcgaaagctaactctggcactgcaagcttcaaggcaccaggtggtacttatagaagctcatttgaacagaagtctaactatcagacacctgcatcagctttgtacggggcatatgagggtagttcttcccaaggaagctcttctagttacggtgatcatacagctccaccatcagatcctgtagcattgatggaattctatgcaaagaaggctgcactggaagaacggaagaggccaccaaggcagtcgaaagatgaaatgccgccacctccttctcttcaaggtcctcctaagaagggacaccacatgggtgatttcattcctcaagaagaacttgaaaagtttatggcacggtgtaatgatgctgcagcacaaaaggctaccaaagaagccgctgagaaggctaagattcaggcggacaatattgggcacaaacttttatctaagatgggttggagggaaggcgagggtcttgggagcgagagaagaggccgtgcagatcccgttatggctggagatgtgaagaaggatcatcttggtgttggggctgtccagcctggtgaggtcacatctgaagatgacatctatgagcaatacaagaaacggatgatgcttggataccgctataggccaaaccctctgaacaatccaaggaaatcatactactgatgcgggggagttcgtctgaggggagatgtaaggcgctgctttgctgcaattttgctcacagaactaatggttaggggatatcactaacagcattgaaagtttttgttcatcaacagaaatgtcaagaagttcgttattcagcatatttcttggaatgccacagatgcaaggcttccgggggttctacaaagctttgttctttgtgtagtgtgtttatctttgtggatttaaatgtctgttcaaacgtgtatcatgtttcagacaatgatgtattgctttcttggatcacccttttttctgatctcatttcagttacaagtgggaaccataaggtacaaaatttgtgttgggaggggttatattttagaatggagtgtgaataactatagctagcataaggctatctccagcagattagccatcctcacatctaacagtacagtctatagtgcaaaatattgtaaaacagtgttttagttgaccatacggtgaattgttggacacggtctaagtggtgtttggtagaggttcgggtgactctagatcctgtgtgcatcttaacgatgagatgtttttctttatcaaaatgaattagaaactggtgaaaattcacttttttgtttcaccggcttcagct

SEQ ID NO: 157377 - DNA, 270 bp, Zea mays
  Clone ID: MRT4577_75106C.1
acgaccttctggtcggcgccgagtaccattaagtattcatgttccacaaggagattcttcgggacgacctccacgatgatggcgggagaatactatctctgatttacttcaagctgctatggctggtgatggagaatgacaccatcaagtacttgaatctgttctaagataaccaaatcagtaactcaaatatacaacaatgcatacagctttgcaatcgttaaataatggatgaaagacgaattaagcaaacatcagtctaaaattcat

SEQ ID NO: 157378 - DNA, 412 bp, Zea mays
  unsure (1)..(412): unsure at all n locations
  Clone ID: MRT4577_75107C.1
tcgaccaacgcgtccgaaaaagacgacgaccagcttacctttactaccggcaagtgcccctgccggtcctctgggcagccagttanattgtacgactaggtatcgtcgtacgtcgtgccgcatgcatgcatgcgcagaaggccaagatggctatgcagaaagcgtagcatatatcatacatgagcaacgccaaactgtgtagatatgtgcaagttttgcagtgtgctaaatgcatgtgcgcattgaagaggcaagcagcccaatttgctactcatggccagtaatcgaacaatgataatgttgccaaaactactagcgcatgttacatcgtgtgatgcatatcactatatgagcatgtggaatcaagcatgcatcctgagatagtagctgtgctggtatatattactgcatt

SEQ ID NO: 157379 - DNA, 768 bp, Zea mays
  Clone ID: MRT4577_75108C.1
ggggccgcgaagtagtccaagtcctcatccgacgactcctcagtccactcaaccgagctcttagagtcaccaaaatcagaaaacttagatgcagatccatccgatttattaccaagttgacttctctgccagttcataatttgatggattgcttaatgatttgtgttgtcaccttgcttttatgataatcatgtggtgattgcaacagtagcactgtagtatttcctatgctttcggcagtactcggtttcctgatggacccctttctttcctgaactgttgtccatcttgcagccacggttgaaggttagaatgttgtttcatatgttatgtcactgttgggtactctgtttaagtagaagatcaatactggcatgcagccagccgagccaatagccattgtggtttagattgttctgttttgatatggctgttctggatttttgtggttatttatgaaatttgctgaactgtggacagacacgattcgtaaaatttctaatgctgttgattatgtttgtaaacgttcagtataatgcaggcatttccccccacctgacttgatctactctggaaatgttattaacttcttgttttgttctgctcctgtgcccaggatatgagctgttcagtttcagcaatgagctttgcgttgtatttgctatgcgacatttgacaaccgttgctttgtgctaatttatttgtgatatttgttttccgaccaccatggggcttgtgcaaagaaatagaaacaaacaaagtccaaaa

SEQ ID NO: 157380 - DNA, 147 bp, Zea mays
  Clone ID: MRT4577_75109C.1
tgtgaatcatgcaacaacaagcgatccatataacgatgtggagatgaactgaacttggttgttgagttgtccccgaagatcagaaaccaagttcagttgagttccacctgttatgtggttcatgcaacaacaagcgatccataaatg

SEQ ID NO: 157381 - DNA, 264 bp, Zea mays
  Clone ID: MRT4577_7510C.1
accacgcgtgcggcaccgcgagaactcgtttaatgctaactgtgtaccagtgtgaccctggacgctcattgggtacgtgaacaaggatgctcatgctgcattacagtgctaatgttggtctcatgggcaatactactgatacatatctctacggtgtcattgagattgttatacacagcaaacgttggactgaaccttcatatgataatggatggtgccactctagtgtttaaggctgtatagaaaatgaatgcggtcgatatt

SEQ ID NO: 157382 - DNA, 969 bp, Zea mays
  Clone ID: MRT4577_75110C.1
caagctaaagaagctgcagtacatgcgtgctggtacaatatccctggcaaaggaatcatcaacatcttactcttcagcgtctaggttgccaaacctatgcaaatcttgtaaactagttggtgttgagatgccatcagggattgatgaactgacaccattgcacacgcttggtgttgtcaatgctggtattggagggggcaaggccactctaaaagagctgaagaagattacccaattgcgcaagcttggagtgtccggtgtcaacaagaaaaataacaaggaattctgtgctgccatctcatgtcatgtccgcctggaatccttgtcagtgtggcttagcaagggaaatcaaggtttgaatgaaatatcgtctcaggataagcctctgcaaaaccttcagagccttaagttatatggtcttggaagtgaggtgccagcttggatgaaagatcttcccaaactcacaaagttggatttgcatatgaccatatcagcagaagttgacataattaaagtccttggggaaataaaagaactatgcactctacgtctttgtgtcaagccccttcaagatggtgatggtaagcttgatttttgtgtttgggtgaatggaatacagcagcgctgttatttaaatctcaagatcctcgagattacttgcagttcaaagttaaatatatcctttggatcagaagctatgcaaaatcttgagctgttgagagctcgctgctgtagtggatcgacattgaagtttatggagataaagaatctctctaaacaaaaactcaaggaagttcagcttattggttcccatgacactgcactcaaggatgacatggagaagcaactgaaggaacatccaaggaaacctcctttgaagctggaggaaacccggaagatgctgatctcagtatttagcaatagtattattggcgctaatcctatgtgaaacatcttactctgcttcat

SEQ ID NO: 157383 - DNA, 315 bp, Zea mays
  Clone ID: MRT4577_75111C.1
ggaaaagcaacagtagtttccttattttttgacagtttctgacaaaagcagagggggggatcccctaacaaaggggtctttttttttgggaaaaaggcaaaaattatacccctcaaaaaagaattgtaaaggaaatttagagcccaaatcgttgagagggcttagaaggccacagccttgctttgaccttgcaggtaacaggaaccgttccaacaagcgcaaaaaaagaaagagggttattccaaggaattggcaagacattctcaaggcgcaccagattaaggagtaacctattactccacccccttccaaacc

SEQ ID NO: 157384 - DNA, 586 bp, Zea mays
  Clone ID: MRT4577_75112C.1
gcccttaacgaaggactatcatgacatgcttttgaggtgcttgaacccttgcagcttccagactggcattgatatgtgcctgtagctccagctgcatatcctggtatattgtataagggcttggacagggactgagaatggcacatcgtgtacagctataatgtccgctgcttatcatgaccgttagataaagacgaaagcagagctcattgcgagccctccagatgaaccacaaggtagtgatgattttggtcattatatcatccagggtgttgggagttataagcacacttagagcatcctggacaccatcatgctcaactgaaaggggacgaaagtagggacggcctggcagagaaccagatggtcctagagaagctgcactaaaaaaataggtgagaatcattttcaagcataccacaatagcagcagtttgctgattttattggtgaagccaccagctcttgcgcagaggcgagagcacgcattagaagcttccatgtgaatgttttgagaactggggagatcttcctgttcttccaaaccctgttaagaatggataatgcctgcaatgtgatactcctag

SEQ ID NO: 157385 - DNA, 730 bp, Zea mays
  Clone ID: MRT4577_75113C.1
aaactacaaaacaggggcactgcgcgcatccgttgccgtcgcctccgccgccgccgcccgctccggcccgacccggcgggggaatggggaacatgacccggtcggactcccccgtctcgcgccgcatcgtcctctccttcctcgacttcctcaactccgttgagttagctcctggggctgaccctgaagctcttgaagtcgctaaggattgcctggagtccctttttagcatcaactcatcatcaactagcgagaggatacagccaggacttctacttgaactctttacttctctgcaagctaatgaacaagatagggcaagaccagatcccgtgtcacgatcagtgtcaaacaaaccttcctgcagtgcaagtacttccagtatccaagaagagccaaataaatgtacaacatcaaatagtgaaggccaagcggaagaaacctttgacctaggagatgagctgtttgcaaaattctttgccgcgcttgatgaaataaatttcttcaagacatcaccagctggtgctgaggatcctgatcaactttcaaaagcatcacaattcttcgatgatgcattactggaggtgcgcaagtcgggaagaaaagtggcaagcttagtagaccttgcagaattctttaatcaaaaggcaatgacttcatgagatccaaacaacacctaaaagctgtagagctgtacaccggtggcatttgattggagccgaaaaatgcc

SEQ ID NO: 157386 - DNA, 4341 bp, Zea mays
  Clone ID: MRT4577_75114C.1
atggatcctaaggggaagggaatcgtgatcaacgacaaggaaaaggagtccttcgtcaacgagccaaaagatgataaatccaacgactctggctcgggccacagacgtaaagatgggaagaagaagaagacaaggcgcatcaaggagatcgtctactacgacagcgacgaatcctcttcttcccaaaaggacgatgacaacgactacaggaagacggtcaattcgaacttttcatttgattattctcgtattccacatagttcgaattcgcatttgctttccattcctctcggcaaacctccacactttgatggggaggactacggattttggagtcacaaaatgcgtagtcatttattctctctccatccaagcatatgggagattgtagagaatggaatgaaatttgatagctcggatagccctatgtttattaacgaacaaattcataaaaatgcacaagctactactgtgttgctagcctctttgtgcagggacgagtacaataaggtgagcggcttggacaatgccaagcagatatgggagaccctcaagatttctcacgaggggaacgacatcaccatgctcactaaaatggaattggtagagggcgagcttggaaggtttgcaatgataaggggcgaggagccatctcaaacatacaaccggctcaagaccctcatcaacaaaataaggagttatggaagcacgcgatggacggaccatgacgtcgtccgactattactaaggtcatttaccgttcttgatcctcatctcgtgaacaatattcgtgagaatcccaggtacacgaagatgacgcccgaggaggtactcggaaaattcgtaagcgggcggatgatgatcaaggaggcaagatacgtggacgacgccttgaatggaccgatcaacgagcatcaaccccttgctctcaaggcaacaagaagcaaggaggtgctacctagcaaggtggcacaaattgaggcggccggacttaatgatgaggagatggctctcatcatcaaacgcttcaagacggtgctaaaaggtcacaaggggcaaccaagcaagaccaagacaaagggaaagcgctcatgcttcaagtgcggtaagattggtcattttatcgctaactgccccgataacgatagtgaccaggaacaggggaacaagagggaaaagaagaagaattacaagaaggccaagggcgaggcacacatcggaaaggagtgggactcggattgctcctccgactccgacaatgaaggactcgccgccaccgccttcaacaagtcatccctcttccccaacgagcatcacacatgccttatggcaagggagaagaaggtgagtactcgagactccacttatgcttcttctagtgataatgagtctagtgatgatgatgacatagactattcatgcttattcaagggtttagatagatctaagatagacaaaattaatgaattgattgatgccttgaatgataagaatgtgcttttaaaaaaacaagaggatttgttgtatgaagaacatgacaaatttgtagaagcacaaaaatcacttgcattagagattaatagaaataaaatgctttcttgtgagttgtctacatgtcatgattcaattgctagtttaaagagcataaatgatgatttaaatgctaaactagaaaaatctggtaaaacaacatcttgtgtagaacatgttgagatttgcactaggtgtaaggatttcgatgttgatgcctgtagtgatcatttagcttcaatttccaaactaactgaggaattggctagtcttaatgcccaacttaagactagcaagaatgatttcgataaactaaaatttgcaagggatgcctacacgattggtagacacccctcaattaaggtttatgcatccgggggttcaagctggattatcgacagcggatgcacaaaccatatgacgggggagaagaaaatgttcacctcctacgtcaagaataaggattcccaagattcaattatattcggtgatgggaatcaaggcaaggataagtctgaaacccaagggaccctcaagcgcttcctcaggagagctcaaaatgagtttgagctcaaggtgaagaagataaggagcgacaacgggtccgagttcaagaaccttcaagtggaggagttccttgaggaggaagggatcaagcacgagttctccgctccctacacaccacagcaaaatggtgtggtagaaaggaagaacaggacgctaatcgacatggcgaggactatgcttggagagttcaagacccccgagcgtttttggtcggaagccgtgaacacgacttgccacgccatcaacagggtctaccttcaccgcctcctcaagaagacgtcgtatgagcttctaaccggtaacaaacccaatgtatcgtactttcgtgtatttgggagcaagtgctacattctagtgaagaagggtagaaattctaagtttgctcccaaagcagtagaagggtttttgttaggttatgactcaaatacaaaggcgtatagagtcttcaacaaatcatcgggtttggttgaagtctctagcgacgttgtatttgatgaaactaatggctctccaagagagaaagttgttgattgtgatgatgtagatgaagaagatgttccgacggccgctatacgaaccatggcgattggagaagtgcggccacaggaacaagatgaacgacatcaaccatcttcctcaactatggtgctacccccaactcaagacgatgaacaggttcatcaacaggaggcgtatgatcaagggggagcacaagatgatcatgtgatggaggaagatgcgcaaccggcacctccaacccaagttcgagcaatgattcaaagggatcatctcgtcgaccaaattctgggtgacattagcaagggagtaactactcgatctagattagttaatttttgtgagcattactcctttgtctcttctattgagcctttcagggtagaggaggccttgctagatccggactgggtgttggccatgcaggaggagctcaacaacttcaaaagaaatgaagtttggacactggtgcctcgtccgaagcaaaatgttgtgggaaccaagtgggtgttccgcaacaaacaggacgagcacggggtggtgacgagaaacaaggctcgacttgtggcaaaaggttatgcccaagtcgcaggtttggatttcgaggagacttttgctcctgtggctaggctagagtcaattcgaatcttgctagcatatgccgctcaccattctttcaggttgttccaaatggatgtgaagagcgctttcctcaacgggccaatcaaggaggaggtgtacgtggagcaaccccctggcttcaaggacgaacggtaccccaaccacgtgtgtaagctctctaaggcgctctatggacttaagcaagccccaagagcatggtatgaatgccttagagatttcttaattgctaatgctttcaaggttgggaaagccgatccaactcttttcactaagacttgtaatggtgatttgtttgtgtgccaaatttatgtcgatgagataatatttggttcaactaaccaaaagtcttgtgaagagtttagcagggtgatgacgcagaaattcgagatgtcgatgatgggcgagttgaactacttccttgggttccaagtgaagcaactcaaggacggcactttcatctcccaaacgaagtacacgcaagacttgctaaagaggtttgggatgaaggatgccaagcccgcaaagacgccgatgggaactgacggatacaccgacctcaataaaggagactccgactatgctggatgtaaggtcgataggaagagtacatcggggacgtgccaattcttaggaaggtccctggtgtcatggaattctaagaaacaaacctccgttgccctatccaccgctgaggccgagtatgttgccgcaggacagtgttgcgcgcaactactttggatgaggcaaaccctccgggactttggctacaatctgagcaaaatcccactcctatgtgataatgagagtgctatccgcatggcggaaaatcccgttgaacacaaccgcacaaagcacatagacatccggcatcactttttgagagaccaccagcaaaagggagatatcgaagtatttcatgttagcaccaagaaccagctagccgatatctttaccaagcctctagatgagaagaccttttgcaggctgcgtagttcattctgcattttgttgcttattgtggtgctcaagttgtacaaacactccctggacctcacaagtccgttgcaaagtgatgcacatgtttag

SEQ ID NO: 157387 - DNA, 648 bp, Zea mays
  Clone ID: MRT4577_75115C.1
atggatcctaagggaaaggggatggtggtcaacgataatgagaaggaatccgtcttcaacgagccaagagacgataagcccactgactctggctcgagtcataagaagaaggacgggaagaagaagaggtgcatcaagaagatagtctactacgacagcgacgaatcttcctcttcccaaagagacgacgacgacgagaaaaagaaagcggttaattcaaacttctcttttgattattctcgtattccgcaaaattccaatgctcatttgctttccattcctcttgacctttggagctacttcatatggacctcttcggacccgtcgcctacctcagcatcgggcgaagataaaacagaaacccaagggacccaaaagcgcttcttaaggagagctcaaaatgaatttgaactcaaggtgaaaaagatcaggagcaacaacgggtccgaattcaagaatcttcaagtggaggagtaccttgaggaggaaggaatcaagcatgaattctccgctccctgcacaccacagcaaaacggtgtggtagagaggaagaataggatgctcatagacatggcgaggacgatgcttggagagttcaagatgcccgagcggttttggtcggaagtcgtgaacactgagagcacctag

SEQ ID NO: 157388 - DNA, 243 bp, Zea mays
  Clone ID: MRT4577_75116C.1
aattccctcggctacccactcatctctcactctattaaatctattactactaatttcattgctaaagacaaatctatcagcatagttactctaaaaaattgaagcgcaatcaatcaatacactaatctccaccttcactacactattaacaacaatatcatatcattaaaattccttatctacctttaattcccaatcaataaatacatcataatcatatttaccatttaaacattcaatttt

SEQ ID NO: 157389 - DNA, 3888 bp, Zea mays
  Clone ID: MRT4577_75117C.1
atggatcctaagggaaaggggatggtggtcaacgacaaggaggagtccctcttcaacgagccaagggacgacaaacccactgactcaggatcgagtcacaagaagagggatgggaagaagaagaggcgcatcaagaagatcatttactacgacagcgatgcctcctcttcttcaccaagagaagacgacgacgatgactcgtcgaaaaagagaacggttaatcaaaactactcttttgactattctcgcatgtcgtacaattcaaatgcgcatttactatctattcctctaggaaaacctccacactttgatggagaggactactcattttggagtcataaaatgtgtagtcatctattttctctccatcctagcatttgggaaatagtggaaaatggaatgcatttcaataatacggataaccctgtgattattaatgagcaaattcataagaatgcacaagctactactgtgctgttagcatctctttgcagggacgagtataataaagtaagtggcttggacaacgccaagcaaatctgggacacccttaagatctcacatgagggaaatgatgctacaatgatcaccaaaatggaactggtggaaggcgagctagggagattcgccatgatcaggggagaagagccaacacaaacctacaacaggctcaagaccctggtcaacaagattagaagctatggaagcacaagatggacggaccacgatgtcatccgactcatgctcaggtcctttacagttattgacccccatcttgtgaatcttatccgtgaaaatcctaggtacacaaagatgacgcccaaggagatactcggaaaatttgtaagcggacgcatgatggttaaggaggcaagatatgtagatgacaccttaatcggccctctgcccgtctacgagccacagcccgttgcgctcaaggcaactagcagcaaggaggcactaccaagcaaggtagctcaagtggaggctgccggcctcaatgaagatgagatgtcgcttatcatcaagtgcttcaagaccgcacttaaaggacgcaagaagtacccccaacaagaacaaaacaaagggaaagcgctcctgcttcaaatgcgtgatcagggacaagaaaagagcgggaagaaggagaaaaagaaaagctacaggaaggcaaagggtgaggcacaccttggaaaggaatgggactcagactgctcctcttccgactccgacgacgaaggactcgctgcctcggccttcaacaagtcctctctctttcccaacgaacatcatacatgtcttatggccaaggaaaagaaggatagattgctagagaagcaagaagatattttgtatgaagagcatgacaaatttattagtgttcaaaaatctcttgctctagaaattaagagaaatgaaatgctatcctctgaattgtctgcttgccatgaatctgtctctagtttaaagaatttaaatgatgatttaaatgctaaactaaagaagctagtttatgcatccgggggctcaagctggattatcgacagcggatgcacaaaccacatgacaggggagaagaagatgttcacctcctacgtcaataacaaggattcccaggatacgattatctttggagatgggaatcaaggcaaggtcaagggcttgggcaagataaccatcaccaacgagcactccatatcaaatgtatttctactagagtcgcttggttacaaccttctgtctgataaatcagaaaccgaagggaccctaaagcgctttctaaggagggctcaaaacgaatttgaccccatgaatctgcaagtggaggagtatcttgaggaagaaggcgtcaagcacgagttctccgctccctacacaccacagcaaaacggtgtggtagagaggaagaataggacgctcatcgacatggtgagaatgatgcttggagaattcaagacgcccgagcggttttggtcggaagctgtgaacacagcttgccacgccataaaccggctctacctacatcgccttctcaagaagacctcatatgaactccttatcggtaacaaacccaacgtttcttactttcgtgtatttgggagcaaatgttacattctagtgaagaaaggtagacattctaaatttgctcccagggcagtagaagggtttttactaaggtatgactcaaatacaaaggcgtatagagtcttcaacaaatcatcaggtttggttgaagtctctagcgacgttgtatttgatgatactaatggctctccaagagagcaagttgatcttgatgacatagatgaagatgatgttccgacggccgcaatgtgcacgatggcgataggtgatgtgcgaccacaggaacaacgagagcaagatcagccatcttcctccacaatggtgcatcctccaactcaagacggtgaacaacctttcagggtagaagaggccttgcaggatccggactgggtgttggccatgcaggaagagctcaacaacttcaagaggaatgaagtttggagcctggtgccacgtccaaagcaaaacattgtgggaaccaagtgggtgttttgcaacaagcaagacgagcacggggtggtgactagaaacaaggctcgacttgtggcaaaaggttatgcccaagtcgcaggtttggatttcgaggagacttttgctcctgtggctaggctagagtctattcaaattttattagcctatgccgctcaccactcttttaggctatttcaaatggatgtgaagagtgctttcctcaatgggccaataaaggaggaggtgtacgtggaacaaccccctggctttgaggatgacaggcgctctatggacttaagtaagccccaagagcatggttgggaagccgatcccactctctttacaaagacttgtgatggtgatctttttgtgtgccaaatttatgtcgatgacataatatttggttctactaaccaaaagtcttgtgaggagtttagcagggtgatgactcaaaagtttgagatgtcgatgatgggtgagttgaactacttccttgggttccaagtgaagcaactcaaagacggcaccttcatctcccaaatgaagtacacacaagatcttctcaagcggtttgggatgaaggacgccaagcccgcgaagacaccgatgggaaccgacggacatgtggacctcaacaaaggaggtaagtccgttgatcaaaaggcataccagtcaatgataggttcattactttatttatgtgctagtagaccggacattatgctaagtgtatgcatgtgtgctagatatcaatccgaccttaaggaatgtcaccttgtggccgttaagcgaattcttagatatttagtttctacgccttgcttcaggatctggtatccaaagggatctacctttgacttgattggatactcagactccgattatgtcgggtgcaaggttgataggaagagcacatcggggacgtgccaatttctaggaaggtccttggtgtcctggagttcaaagaaacaaacatctattgccctatccaccactgaggccgagtatgttgccgcaggacagtgttgtgtgcaactactttgcatgaggcaaaccctccaggactttagctacaatctgagcaaagtcccactcctatgtgacaatgagagtgcaatccgcatggcagataatcctgttgaacacaaccgcactaagcacatagacatccggcatcacttcctgagggaccaccagaaaaagggagatatcaaggtgttccatattagcaccgagaaccagctagccgatatctttaccaagccgttggatgagaaaactttttgcaggttgcgtagtgagctaaatgtcttagattcgcgtaacttggattga

SEQ ID NO: 157390 - DNA, 247 bp, Zea mays
  Clone ID: MRT4577_75118C.1
aaaaaacacaagggcgggacgtacaaaaacctataccattttgaggccaaaaaacgcacgctgatttaaagcaattttattggagtgggggagaaaacaaaaaaaaggggaaagaaaacccaatctgtggacacaagacccttgggtatacaaacaaggcggaagggaaaagaatacaaatccataacaaaggtaaaaaagaaggggtagagggaagcaacaagggagggtcgtggacccttaaaaa

SEQ ID NO: 157391 - DNA, 3847 bp, Zea mays
  Clone ID: MRT4577_75119C.1
ggatgagtaccacaaggtgagcggcttggataacgccaagcaaatttgggacaccctcaagatttctcatgaggggaacgacgccaccatgatcaccaagatggagttggtggaaggcgaactgggaaggtttgcaatgatcaggggagaggagccaacacaaacatacaacaggctcaagacccttgtcaacaaaatcaggagctatggaagcacgagatggatggaccacaacgtcgtccgacttatgctcaggtccttcactgttcttgatcctcatcttgtgaactcaattcgtgagaatcctaggtacacaaagatgacgcccgaagaaatactcggaaagtttgtaagcgggtgtatgatgatcaaggaagcaagatatgttgatgaggcattgaatggcccaatgcccatctacgagcctcaaaccgttgctctcaaagcaacaagcagcagggaggtgctacctagcaaggtggcacaagttgaggcggccggactaaacgaggatgagatggccctaatcataaagcgcttcaagaccgcattgaagggacgcaaggagtactcaaacaagaacaaggcaaagggaaagcgctcctgcttcaagtgcggtaagactggtcattttatagcaaattgtctcgataactctagtgaccaggaacaaggaaagggtgggaagaaagagaagcaaaagagctataggaaggcaaagggcgaggcacacatcggaaaggaatgggactcggactgctcatcttctgattctgacgacgaaggactcgctgctcggccttcaacaagtcctttctcttccccaacgaacgccacacctgcctcatggcaaaggagaaaaagtgatgatgaagtagactatactgaattatttaagggcttagatagatcaaaagtagataaaattaatgaattgattgatgccttaaatgagaaagatagacttctagagaggcaagaagacattctgtatgaggaacatgacaagtttgttagtgttcaaaagtctcttgccttagaactaaagagaaatgaattactatcttctgagttatctacttgtaatgaaactgtggctagcttgaagagtattaatgatgatttaaatgccaagctagaagtagttaacaaatctagttcttgtgtagaaaagattgtaatttgcaatagatgcaaggattttaatgttgatgcttgtgatgaacatttaatttccatttctaaattaaatgatgaagtggcaagtcttaatgctcaacttaagacgtgcaaaagtgattttgataaattaaaatttgctagggatggctacactgttggtagacacctcttaattaaggatgggcttggctttaagaaggaagccaagaacttaacaagccaaagggctcccattttcaacaaggaaaaagggaaggcccctatggctagttgtattcaaaagaatcatgcgttcatttatcatagaaaagtttctaggaatactcattataataggagttatggtgcttatgattcacatgctatgattgcttcaagttctacttttgtgcatggtagaagtaggcctaggaagggaaatgttattcatcatgtgcctaataaaatgcctaatgaatctgctactgtttttcatgcctgcaacactgattttgtactttcatgtaaaaataagaaagtggttgctaggaagttgggagccaaatgcaagggagataagacttgcatttgggtcccaaaggatattgtaactaaccttgtaggacccaacaagagttgggtttatgcatccgggggctcaagctggattatcgacagtggatgcacaaaccacatgacgggggagaagaagatgttctcctcctacgtaaagagcaaagattcccaagattcgatcatctttggagatgggaaccaaggcaaggttaaaggtataggaaagatagctatttcatccgagcattccatatctaatgtgttcttagttgaatcactaggatacaacttattgtctgttagtcaactatgtaatatgggatataattgtctgtttaccaatatagatgtgtctgcctttagaaggagtgatggttcactagcttttaagggtgtactagacgacaaactctatttagttaatttttcgaaggaagaggccgatctagatgcatgcttgattgctaagactagcatgggctggttgtggcatcaccgtttagcacatgttgggatgaagaaccttcaaaaacttctaaagggagaacacgtgttaggtctaacaaatgtatctttcgaaaaagatagaccttgtggagcttgtcaagcaggtaaacaggtgggaagtactcatcacaacaagaacgtgatgaccacggcaagacctctagagctacttcatatggacctcttcggacccgtcgcctaccttagcatcgggggaagtaagtatggtcttgttattgttgatgatttttcccgcttcacttgggtattccttttgcaggataaaacagaaacccaagggaccctaaagcgctttttaaggagagctcaaaatgaatttgagctcaaggtaaaaaagataaggagcgacaacgggtccgagttcaagaatcttcaagtggaggagtaccttgaggaggaaggaatcaagcatgagttctccgctccctacacaccacagcaaaacagtgtgaaaggtaggaattccaaattcactcccaaagttgtagaagggtttttgttaggttatgactcaaatacaaaggcgtatagagtcttcaacaaatcatcgggtttggttgaagtctctagcgacgttgtatttgatgaaactaatggttctccaagagagcaagttgatcttgatgatgtagatgaagatgatgttcccacggacgcaattcgcaccatggcgattggaaatcctttcaggatagaagaggccttgctagattcggactgggtgttggccatgcaggaagaactcaacaacttcaagcgaaatgaagtttggaccctggtgccatgtccaaagcaaaacgttgtgggaaccaagtgggtgttccgcaacaagcaagacgagcacggagtggtgacaaggaacaaggctcgacttgtggcaaaaggttatgcccaactcgcaggtttggatttcgaggagacttttgctcctgtggctaggctagagtcaattcgcattctattagcctatgccactcaccattccttcagatttcaatccgacctaagggaatgtcaccttgtggccgttaagcgaattcttagatatttagttgctatgccttgcttcgggatctggtatccaaaggggtctacctttgacttaattggatactcagactccgattatgctggatgcaaggttgataggaagagtacatcagggacgtgtcaattcctaggaaggtccctggtgtcttggagttcaaagaaacaaacttccgttgccatatccaccgctgaggccgagtatgttgccgaaggacagtgttgcgcgcaactactttggatgaggcaaaccctccgggactttggctacaatctgagcaaagtcccactcctatgtgataatgagagtgcaatccgcatgggcggacaatcctggttgaacacaacccgcacaaagcacatagacatccggcatcactttttgagagaccaccagcaaaagggagatatcgaagtgttttatgttagcaccgagaaccagctagccgatatctttaccaagcctttagatgagaagaccttttgcaggttgcgtagtgagctaaatgtcttagattcatgtaacttggattga

SEQ ID NO: 157392 - DNA, 766 bp, Zea mays
  Clone ID: MRT4577_7511C.1
actgttccccttaaatcgactgctcgggaacgactaccgatcacaccagcacattgcagcgaacagccacgcgcgcgccgcctccaccacttcaccagctatcgaatgcagaactccgagccttcctggcttgcagaccccgcatcctcatcctgcggtgtcatctctccgcgctcccgtctgctttctggagctccaggcgcagcctatcactcccactacgctgcgcgatgctcctgctgttccctccgtacttctcccgcaaggggacatccgagtcgctttgcaaccacagacgcttccactatgtaaactcctacgagagtcacagggtatcctcgttagtctaggccacaccatcgcacgatcggagctacccgatctacattggaggatggctactcaacaagacggcaccatgctgcagaaatatgataatgggaaaagggtgctgcagaagaccaactcaaccgaatgcgccactttaccagaagaaagtgggatgaccactcaaccacaaccattgcaatgctgacagtgaaagagagtgatcctagactgacgtgtgacaagcacaaatatagggacactcctgatgaaagtgtatgacaaacaagtacaatcccggtccgaccccgttgcacatatgtaacagtgaatggcgacggcatctgggacaagtgtgtataataagctgcagcagtcctccatggagacagttttatacagataccaactactctgatgttccatgagaaatcttctg

SEQ ID NO: 157393 - DNA, 4527 bp, Zea mays
  Clone ID: MRT4577_75120C.1
atggatcctaagggaaagaggatggtggtcaatgacaaggagaaggagtccctcttcaacgagccaagagacgacaagcccactgactcaggctcgagtcacaagaagagggacgagaagaagaagaggcgcattaagaagatcatctactacgacagcgtcgcctcctcttcttcacaaagggcgacgacgacgacaactcctcgtccaagaaaaagacgcatatgggaaattgtagaaaatgggatgcatttcgatagcactgataatcctgtttttataaatgaacaaatttataaaaatgcccaagatactactgttttgctagcgtctctttgcagggatgagtacaataaaggcgagctaggtaggttcgcgatgatcaggggagaggagccaacacaaacctacaacaggctcaagaccctggtcaacaaaatccgaagctacgaaagcacaagatggacggatcatggtgtcgtccgactcatgctcaagtcatttaccgttattgaccctcatcttgtcaaccttattcgtgaaaatcccaggtacaccaagatgatgcccgaggagttactcagaaaattcgtaaacggacgcatgatggcgaaggaggcgcgatacgtggacgatgcgctaaatggtccactgcccatctacgagccgcagcccgttgctctcaaagcaactagcagcaaggaggcgctaccaagcaagggacaagaaaagcacgggaagagggagaagaagaagaactacaggaaggtgaagggcgaggcgcaccttggaaaggaatgggattctgactactcttcatccgactccgacgatgaaggactggctgcctcggcctttgacaaatcttcgctcttccccaacgaaagccatacttgccttatggctaaggaaaagaaggatagacttctagaaaagcaagaggacatattgtatgaggaacatgataaatttgttagtgttcaaaaatcccttgctctagaaattaaaagaaatgaaatgttgtcctctgagttgtctgcttgtcatgaatctatctctagtctaaaggagttaaatgatgacttaaatgctaaactagagaaagcaaatgcaactagttcatgtgtagaacatacttacaaagatgattttgacaaactaaaatttgctagggatgcctacactgttggtagacaccccgcaatcaaggatgggcttggttttcgaaaggaaaccaagaacttaacgagccaaaggacttccgttctcaacaaggagaaagggaaggcccctatggctagtagttctcaaaagaaccatgcctatatgtatgataggaaatttactaggcatgctcataatgatagatgccatgatcatgttgttttacctggttatcatacttctcatgctatgattgcttctagctccacttatgattatggtagaaataggcctaggcgtaatcatgctgtgtctcatgcgcctaggagagtttgcaatggtcctactactgtttaccatacttgcaatacttcctttgtacttttatgtaagaacgcaaaagtagttgctaggaagttgggatccaaaagcaagggagacaaaacttgcatatgggttccaaaaactgttgtgactaaccttgcaggacccaacaagagttgggtttatgcatccgggggctcaagctggattatcaacaatggatgcacaaaccacatgacgggggagaagaagatgttcacctcctacgtcaagaacaaggattcccaggatacgatcatctttggagatgggaatcaaggcaaggtcaaaggcttgggcaagatagccatcactaacgagcactcaatatcaaatgtatttttagtagagtcgctcgggtacaatcttctgtctgtaagtcaattgtgtcacatgggttataattatctgtttacaaatattgttgtatctgtctttagaaggagtgatggttcattagcttttaagggtgtattagatgacaagctctatttagttgatttttcgaaagagaatgccgatctagatgcatgcttaattgctaagactaacatgggctggctttggcatcgccgtctagcacatgttgggatgaagaaccttcataagcttctaaagggagatcatgtgttaggactaaccgatgtctgttttgagaaagacagaccttgtgcaacatgtcaggcagggaaacaggtgggaagcactcatcacagcaagaatgtgatgacgacatcaagaccactggagcttcttcacatggatctctttggacctgttgcctacctcagcatcgggggaagtaagtatggtcttgtaattgttgatgattttccccgcttcacttgggtattctttttgcaggataagtcagaaacccaagggaccctaaagcgcttcttaaggagagctcaaaatgaatttgagctaaaggtgaagaagataagaagcgacaataggtccgagttcaagaatctacaagttgaagagtttcttgaggaggaaggcatcaaacacgagttctgtgctccctacacaccacaacaaaatggtgtggtagagaggaagaacatgacattaatcgacatggcaagaatgatgtttggagagtacaagacgcctgagcagttttggtcggaagctgtgaacacagcttgccatgccataaatcggctctacctgcaccgtctcctcaagaagacttcctacgaaatccttactggtaacaaacccaatgtctcttattttcgtgtatttagaagcaaatgctacattctggtgaagaaaggtagacattctaaatttgctcctaaggtagtagaagggtttttactaggatatgactcaaatacaaaggcgtataaggtcttcaacaaatcatcgggattggttgaagtctctagcgacgttgtatttgatgagactaatggccctccaagagagcaagttgatcttgatgatgtagacaaagaagaagttccgacggccgcaatgcgcacaatggcgataggtgatgtgcgaccacaggaactacaggaacaagatcaaccatcttcctcaacaatggtgcatcccccaactcaagacgatgtacagcaaaacgttgtgggaaccaagtgggtgttccgcaacaagcaagacgagcacgaagtggtgacaataaacaagactcgacttatggcaaaaggttatgcccaaatcgcaggtttggattttgaggagacttttgctcctgttgctaggctagagtcaattcggatattattagcctatgctgctcatcattcttttaggatgttccaaatgaacgtaaagagcgctttcctcaatgggccgattaaggaggaggtatacatggaacaaccccctggctttaaggatgacaggtatcccaaccacgtgtataagctctctaaggcgctctatggacttaagcaagccccaagagcatggtatgaatgccttagagattttcttatttctaacgcttttaaggttgggaaagtcgatcccactcttttcacaaagacatgcaatggtgatatttttgtgtgccaaatctatgttgatgacataatatttagttctactaaccaaaagtcttgtgaggagtttagcagggtgatgacgcaaaagttcgagatgtcgatgatgggcgagttgacctacttccttggattccaagtgaagcaactcaaggacggcaccttcatctcccaaacgaagtacactcaagatcttctcaagaggtttgggatgaaggacgcaaagccagcgatcgacgggcactttaacctcaacaaaggaggtaagtctgttgatcaaaaggcataccggtcaatgatagggccattactttatctttgtgctagtagaccggacattatgcttagtgtatgcatgtgtgctagatttcaatctgaccccaaggaatgtcaccttgtggccgttaagcagattcttagatatttagtttctacgccttgcttcgggatctggtatccaaaggggtctacctttgacttgattggatacttagactctgactatgccgggtgtaaggttgataggaagagcacatcaaggacgtgccaatttctaggaaggtccctggtgtcctggagttccaagaaacaaacatctgttgccctatccaccgctgaggccgagtatgttgccgcaggacagtgttgcgcgcaactgctttggatgaggcaaaccctccgggactttggctacaatctaagcaaagtcccactcgtatgtgacaatgagagtgcaatccgcttggcagataatcctgttgaacacagccgcactaagcacatagacatatggcatcacttactgagagaccaccagcaaaagggagatatcgatgtgtaccacattagcaccgagaaccagctagccgatatcttcactaaacctttagatgagaaaaggttttgcaggttgcgtagtgagctaaatgtcttagattcgcgtaacttggattga

SEQ ID NO: 157394 - DNA, 4962 bp, Zea mays
  Clone ID: MRT4577_75121C.1
atggatcctaggggcaaggggatggtggtcaatgataaggagaaggagtccttcgtcaatgatccaaaggatgacaagcctactgactcagccttggcccacaaaagaaaagacgagaggaagaagaaaacaaggcgcatcaaggagatagtctactacaacagcgacgaatcttcctcttcccaaaaggatgacgacatcgactacgagaaaaaaaagacgttccaatgctcatttgctttccattcccctcggaaaaccccccactttgatggagaggactatggattttggagtcacaaaatgcgtagccacttgttctctatccatccaagtatatgggagatagtagaaaatggaatgcactttgatagtacggatagtcccatgttcattaatgagcaaattcacaaaaatgcacaagctactactgttcttctagcttcattgtgcaggaatgaatatcataaggtgagcggcttggacaacgccaagcagatttgggacaccctcaaaatctcacatgaggggaacgacgtcaccatgctcaccaagatggagttggtggaaggcgaacttgggagatttgcaatgatcaggggcgaggagccaacccaaacgtacaaccggctcaagaccctcgtcaacaaaataaggagctatggaagcacgcgatggacggaccacgacgtcgtccgcctaatgctaaggtctttcactgtccttgatcctcatcttgtgaacaatattcgtgagaatcctaggtacaccaagatgacacccgaggagatacttggaaagtttgtaagcgggcggatgatgatcaaggaggctagatatgttgatgatgcgttgaatggcccaatccaagagcctcaaaccattgctctcaaagcaacaaggagcaaggaggcgctacctagcaaggtggcacaagttgaggcggccggacttaataatgaagaaatggccctcatcatcaagcgcttcaagacggcgctaaggggtcgcaaggagcatcccaacaagactaagacaaaggggaagcgctcatgcttcaaatatggtaagattggtcattttatcgctaattgtcccgataatgatagtgaccaggaacaagggaacaagagggaaaagaagaaggcttacaagaaagctaagggcgaggcacaccttggaaaggagtgtgactcggattgttcgtcgtccgactccgacaacgaaggactcgctgccaccgccttcaacaagtcggccctcttccccaatgagcatcacacctgcctcatggcaagggaaaagaaggtaagcactcgtgatactagtacttacgcttcctcaagtgatgaagaatctagcgatgatgaaatagactattcatgtttattcaagggcctagatagaactaaggttgataaaattaatgaattaattgatgcattggatgataagaataggttattagagaagcaagaggatcttttgtatgaagaacatgataagtttgtagaggcacaaaaatcccttgctttagaaattaaaaggaatgaaatactttcttgtgaattgtcttcatgccatgactctatttctagcttaaagagcataaatgatgatttgaatgctaagttagaagtagctactaaatcaacatcttgtgtagaacatgttgcaatttgcaataggtgtaaagatttcaatattgatgcttgtagtgaacacctagtttgcatttctaaactaaatgatgaagtggctattcttaatgctcaacttaagactagcaaaaatgattttgacaaactaaaatttgcaagggatgcctacatgattggtagacacccctcaattaaggatggtcttggcttcaagagggaagtcaagaacttgacaagtcataaggctcccatctccatcaaggagaaagggaaggcccctatggcaaatagtattcaaaagaaccatgctttcttataccatgataggaaatattctacgaatgttcatcatgatagaagttgcaatgatgttgtttcacatgcttatgattcaaatgcaatgtttgcttcaagttcttctatgatgtatgatagaagtttggctaggaaaaatgtttatgcatccaggggctcaagctggattatcgacagtggatgcacaaaccacatgatggggaaaaagaggatgttctcttcctacgtcaagaacaaggattcccaagattcaatcatattcggtgatgggaaccaaagcaaggtgaaagggttaggaaaaattgctatttcatccgagcactctatttctaatgtgttcctagttgagtcgcttggatataacttgttgtctgtgagtcaactttgtaatatgggatataactgtttattcacaaatgtagatgtgtttgtctttagaagaagtgatggttcattagcttttaagggtgtattagacgacaaactttatttagttgattttgcaaaagaggaggccggtctagatgcatgcttaattgctaagactagcatgggctggctgtggcatcgccgtttagctcatgtagggatgaagaaccttcacaaacttctaaagggagaacacatagaccttgtgcagcttgtcaagcaggataaatctgaaacccaagggaccctcaagcgcttcctaaggagagcccaaaacgagtttgagctcaaagtgaagaagataaggagcgacaatgggtccgagttcaagaaccttcaagtggaggagtatcttgaggaggaaggaatcaaacacgaattctccgctccctacacaccacaacaaaatggtgtggtagagaggaagaacaggacgctactagacatggcgaggacgatgcttggtgaattcaagacgcccgaacggttttggacggaagccgtgagcacggcttgccacgccataaaccgggtctaccttcatcgccttctcaagaagacttcatatgagcttctaaccggtaacaaacccaatatgtcttactttcgtgtatttgggagcaaatgttatattctagtgaagaaaggtagaaattctaagtttgctcccaaagctgtagaagggtttttgttaggttatgactcaaatacaaaggcgtatagggtcttcaacaaatcatctggtttggttgaagtctctagcgacgttgtatttaatgagactaatggctctccaagagagcaagtttgtgatcttgatgatgcagatgaagaagacgttccaacgaccgcaatacgcaccatggcgattggagatgtgcggccacaggaacaaaatgagcgagatcaaccttcttcctcaacaatggtgcatcccccaactcaagacgatgaacaggttcatcaagaggaggcgtgtgatcaagggggagcacaagatgatcatgcaatggaggaagaagcgcaaccggcacctccaacccaagttcgagcaatgattcaaagggatcatcccgtcgaccagattttgggtgacattagcaagggagtaactactcgttctagattagttaatttttgtgagcattactcttttgtctcttctattgagcctttcagggaagagctcaacaacttcaaaagaaatgaagtttggacattggtgcctcgtcccaagcaaaatgttgtgggaaccaagtgggtgttccgcaacaaacaagacgagcacggggtggtgacaaggaacaaggctagacttgtggcaaaaggttatgcccaagtcgcaggtttggactttgaggagacttttgctcctgtggctaggctagagtcaattcgcatattgttagcctatgctactcaccattctttcaggttgttccaaatggatgtgaagagctctttcctcaacgggccaatcaaggaggaggtgtacgtggagcaaccccctggcttcgaggatgaacggtaccccgaccacgtgtgtaagctctttaaggcgctctatggacttaagcaagccccaagagcatggtatgaatgccttagagactttttagttgctaatgctttcaaggttgggaaagccgacccaactcttttcactaagacatgtgatggcgatttatttgtgtgccaaatttatgtcgatgacataatatttggttctactaaccaaaagtcttgtgaagagtttagcagggtgatgactcaaaagttcgagatgtcgatgatgggcgagttaagctatttccttgggttccaagtgaagcaactcaaagacggcaccttcatctcccaaacgaagtacacgcaagacttgatcaagcggtttgggatgaaggacgccaagcccgcaaagactccaatgggaaccgacggacacactgacctcaacaaaggaggtaagtccgttgatcaaaaggcataccggtctatgatagggtctttactttatttatgtgctagtagaccggatattatgcttagcgtatgcatgtgtgctagatttcaatctgatccaagggagtgtcacttagtgcccgtgaagcgaattcttagagatttagtcgctacgccttgcttcgggatctggtatccaaaggggtctacctttgacttgattggatattcagactccgattatgctggatgtaaggtcgataggaagagtacatcgggacagtgttgcgcgcaactactttggatgaggcaaaccctcagggactttggctacaatctgagcaaagtcccactcctatgtgataatgagagtgctatccgcatggcggataatcctgttgaacacagccgcacaaagcacagtgacatccggcatcactttttgagagaccaccagcaaaagggagatatcgaagtgttttatgttagcaccgagaaccagctagccgatatctttaccaagcctctagatgagtcgaccttttgcacgctgcgtagtgagctaaatgtcttagattcgcggaacttggagtga

SEQ ID NO: 157395 - DNA, 5349 bp, Zea mays
  Clone ID: MRT4577_75122C.1
atggatcctaagggaaaggggatggtggtcaacaacaagacaaaggagtccatcgtcaatgagtcaagagatgataagccctcagactctggcttgagtcataacaaggacgggaagaagaagaggcacatcaagaagatcgtctactacgacagcgacaagtcttcttccccaagagacaacgaatacgaagagaaaaagaaaatgttcaattccaatgctcatttactttcaattccactcgggaaacctccgcactttgatggagaagactacccattttggagtcacaaaatgcgtagtcacctattctctctccatccaagcatttgggagattgttaaaaacggaatgctttttgatagtactgacaaccccgttttcattaatgagcaaatccataaaaatgcacaagctaccactgttttgttagcatccttgtgcagagacgagtacaataagatggagttggtggaaggcgaacttgggaggttcgcaatgatcaggggagaggagccaacgcaaacgtacaaccggctcaagaccctggtcaacaaaatcaggagctatggaagcacgagatggaccaatcacgacgtcgtccggcttatgctcaggtccttcactgttcttgatcctcatcttgtgaattcaatccgtgagaatcctaggtacacaaggatgacgcccgaggaaatactcggaaagtttgtaagcgggcgtatgatgatcaaggaggcaagatatgttgatgaggcattgaatggcccaatgcctatctacgagcctcaaaccgttgctctcaaagcaacaagcagcagagaggcgctatctagcaaggtggcacaagttgaggctgctaggctaaacgaggatgaaatggccctcatcatcaagcgcttcaagacggcactaaaaggacgcaaggagcatcccaacaaaagcaagacaaagggaaagcgctcctgcttcaagtgtggtaagactgggcactttattgctaactgtctcgataatgatagtgaccagggacaagaaaagagcgagaagagggagaaaaagaagtcctacaagaaggcgaaaggcgaggcgcaccttggcaaggagtgggatttggattgctcttcgtccgactccgacgacgaaggactcgccgcctcgtccttcaacaagtcgtctctcttccccaacgagcgccatacttgcctaatggcaaaagagaaaaaggtaaacgctcgagatacccctatgtatgcttcttcaagtgataatgaatctagtgatgatgaagtagactacacaggtttattcaaaggtttagatagaactaaaattgataagaccaataaattgattgatgccttgaatgagaagcatagattgttagagaagcaagaagatattttatatgaagagcatgacaaattcattagtgtacaaaaatctcttgctttagaagtaaaaaggaatgagatgctttccttcgaattatctacttgccatgaaactgtgtctagcttaagaagtattaatgatgatttaaatgctaagctagaagttgttaataaatctagttcttgtgtagagcatgttgttatctgtaatagatgtaaggattttgatgttgatgcatgtgttgagcaccttacctctattacaaaattaaatggtgaagtggctagtcttaatgcccaacttaagactagcaaaaatgactttgataaactaaaatttgcaagggatgcctacactgttggtaaacacccctctattaaggatgggcttggctttcgaaaggaagccaagaacttaacaagtcaaagggctcccatttccgcccaggagaaagggaaggcccctatggcaaatagtgctcaaagaaatcatgctttcatctatagtgatagaaagttttctagaaatgctcataggagttatgcttatgattcacatgctatgattgcatcaagttcttcttttgtgcatggtagaaatatgcctaggaaaaatgttgcccatgtgcctaggaaagtttgtaatgaaccttctacaatttaccatgcttgcaatacttcttttgcaatttgtcgtaagaataagaaagtgattgctaggaagttgggggccaagtgcaagggagacaagacttgcatttgggtcccaaagtctattataactaaccttgcaggacccaacaagagttgggtttatgcatccgggggctcaagctggattatcgacagcgaatgcacaaactacatgacgggggagaagaagatgttcacctcctacgtcaagaacaaggattcccaagatacaatcatatttggagatggggatcaaggcaaagtcaaaggcttaggcaagatagccatcactaatgagcactctatctctaatgtatttctagtagagtcgctaggctataatctgctgtttgttagtcaattgtgccacatgggttataattgtctatttacaaatgtagatgtgtctgtctttagaaggagtgatggttcactagcttttaagggtgtactagatggcaaactctatttagcggatttttcgaaagaggacgccgatctagatacatgcttaattgctaagactagcatgggatggctgtggcatcgccgtctagcacatgttgggatgaagaaccttcacaaacttctaaagggagaacatgtgttaggtctaacaaatgtgtttttcgaaaaagatagaccttgtgcagcttgtcaagcaggcaaacaggtgggaagcactcatcatagcaagaatgtgatgaccacatcaagacctttggagctacttcacatggacctcttcggacccgtcgcctacctcagcatagcgggaagtaagtatggtcttgttgttgttgatgatttttcccgcttcacttgggtattctttttgcaggataaatcaggaacccaagggaccctcaagcgctttctaaggcgagctcaaaacgaatttgagctcaaggtgaaaaagattagaagcgacaacgggtccgagttcaagaaccttcaagtggaggagttccttgaggaggaaggaatcaagcacgagttctccgctccctacacaccacaacaaaacggtgtggtagagaggaagaacatgacgcttatagacatggcaaggacgatgcttggagaattcaagacgcccgagcggttttggtcgaaagctgtgaacacagcttgccacgccacaaaccgggtctaccttcatctcctcctcaagaagacgtcgtatgaacttctaaccggtaacaaacccaacgtatcttattttcgtgtatttgggagtaaatgttacattctagtgaagaaaggtaggaattccaaatttgctcccaaagctgtagaagggtttttgttaggttatgactcaaatacaaaggcgtatagagtcttcaacaaatcatcgggtttggttgaagtatctagcgacgttgtatttgatgaaactaatggctctccaagagagcaagttgatcttgatgatgttccaacggacgcgattcgcaccatggcgattggagatgtgcgaccacaggaacaccagcagcaagatcaaccttcttcctcaacgatggtgcatcccccaactcaagatgatgaacaggtccctcaagaagaggcgtgtgatcaagggggagcacaaaatgtccaagatgtggaagaagaagcaccacaggcccctccaactcaagttcgggtgacgattcaaaggaatcatgccatcgaccatattttgggtgatataagcaagggagtaactactcgctcacgtctagctaatttttgtgatcattactcgtttgtctcttctattgagcctttcagggtagaagaagccttgctagatccggactgggtgttggccatgcaggaagagctcaacaacttcaagcgaaatgaagtttggacactggtgccacgtcccaagcaaaacgttgtgggaaccaagtgggtgttccgcaacaaacaggatgagcacggggtggtgacaaggaacaaggctcgacttgtgacaaaaggttatgcccaagtcgcaggtttggactttgaggagacttttgctcctgtggctaggctagagtcgattagcattttgttagcctatgtcgctcaccattcttttaggttgttccaaatggacgtgaagagtgctttcctcaacgggccaatcaaggaggagatatacgtggagcaaccccctggctttgaggatgaacggtaccccgaccatgtgtgtaagctctctaaggcgctctatggacttaagcaagccccgagagcatggtatgaatgccttagagattttctaattgctaatgctttcaaggttgggaaagctgatccaactcttttcactaagacttgtgatggtgacctatttgtgtgccaaatttatgtcgatgacataatatttggttctactaaccaaaagtcttgtgaagagtttagcaggttgaactacttccttgggttccaagtgaagcaactcaaggacggcaccttcatctcccaaacgaagtacacgcaagacttgctcaagcggttcgggatgaaggacgccaagcccgcaaagactccaatgggaaccgacggacatgtagacctcaacaaaggaggtaagtccgttgatcaaaaggcataccggtctatgatagggtctttactttatttatgtgctagtagaccggatattatgcttagtgtatgcatgtgtgctagatttcaatccgacccaagggagtgtcaccttgtggccgttaagcgaattcttagatatttagttgctacgccttgctttgggatctggtatccaaaggggtctacctttgacttaattggatattcagactccgattatgctggatgcaaggttgataggaagagtacatcagggacgtgccaattcctaggaaagtccctggtgtctttgagttctaagaaacaaacctctgttatcctatccaccgctgaggccgagtatgttgcagcaggacagtgttgcgcgcaactactttggatgaggcaaaccctcagggactttggctacaatctgagcaaagtcccactcctaggtgacaatgagagtgcaatccgcatggcggacaatcctgttgaacacagccgcacaaagcacataggcatccagcatcactttttgagagaccaccagcaaaagggagatattgaagtgttttatgttagcaccgagaaccaactagccgttatctttaccaagcctttagatgagaagaccttttgcaggctgcgtagtgagctaaatgtcatagattcgcgtaacttggattga

SEQ ID NO: 157396 - DNA, 366 bp, Zea mays
  unsure (1)..(366): unsure at all n locations
  Clone ID: MRT4577_75123C.1
nacggaacagcggaggcagagggngagctcggccggcggcgagaacccggacgacgacggccggagcnggaggaagggcggccagaaggagacncncggagccaagcacccaagggaagcacaacgaccgcacgcaaacacgnaanganngaagggaagggaaccgcgcacngaccgacgaccaacgacgggccaaaccgcgcaggggcgacaaccgcggcncgcacacggacncgcaggggngccaggcgacgaagcaggngcagcgcaccgacgaggacccgacgcngcacgacgngaacaaccacggagaacacaccngcgccccccacaggccggcggcggcggaacacaacccgaacgcgc

SEQ ID NO: 157397 - DNA, 4752 bp, Zea mays
  Clone ID: MRT4577_75124C.1
atggatcctaagggaaaggggattgtgatcaatgataaggagaaggagtccttcgtcaacaagccaaaagatgacaagcctaccgactcgggctcgggtcacaaacgaagagatgggaagaagaagaagacgaggcgcatcaaggagattgtctactacgacgacagtgacgagtccacttcttctcaaaaggacaacgacgacaacgactacgacaaaagaaagacagttaattcaaacttttctttcgactactctcgtattccgcaaagtacaattactcatttgctctccattccacttggcaaacctcctcactttgatggagaggactacggattctggagtcacaaaatgtgtagtcacttgttctctctccatccaagcatatgggagatagtagagagtggaatgaaatttgatagtaatgatagtcccatgttcattaacgagcaaattcataaaaatgcacaagctactactgttcttctagcttcattgtgcagggacgaataccataaggtgagtggcttggataatgccaagcagatctgggacaccctcaagatctcacatgaggggaacgacgtcaccatgctcaccaagatggaattggtggaaggcgaactcaggagattcgcgatgataagcggggaggagccaacccaaacatacaacaggctcaagaccctcatcaacaagataaggagctatggaagcacacgatggatggaccacgacgtcgtccgcctaatgctaaggtcctttaccgtccttgatccacatcttgtgaacaatattcgtgagaatcctaggtacacgaagatgacgcccgaggagatccttggaaagttcgtaagcgggcggatgatgatcaaggaggcgagatacgtggacgacacgttgaacggtccaatccatgagcctcaacccattgctctcaaggcaacaaggagcaaggaggcgctacctagcaaggtagcacaagttgaggcggccgggcttaatgatgaagaggtggcccttatcatcaagcggttcaagacgacgctaaaggttcgcaaggagcatcccaacaagaacaagacgaaggggaagcgctcctgcttcaaatgtggtaagattggtcattttatagctaattgtcctgataatgatagtgaccaggaaaagaagagtggaaaatgggaaaagaagaagaattacaagaaggcgaagggcgaggcacatcttggaaaggagtgggattcggattgctcctcgtccgactccgacaatgaaggactcgcagccaccgccttcaacaagtcatcactcttccccaacgagcatcacagatgcctcatggcaaaggagaagaaggtatgtactcgaaacaatactacttatgcttcttcaagcgaggatgagtctagtgatgatgatgaaatagattattcatgcttgttcaaaggcttagatagaactaagatcgataagattaatgaattgattgatgctttgaatgacaagaataggttattagaaaagcaagaggatttgttgtatgaagaacatgataaatttgtaggggcacaaaaatctcatgctttagaagttaaacgaaatgaaatgcttgcttgtgaactatctacttgccatgagacaatttctagcttaaggagcataaatgatgatttgaaagctaagtcagaaatagctagtaaatcaacatcttgtgtagaaaatgttgtaacttgcaataggtgtaaagattttgatattgatgcttgtagcaaacacctagcttcaatgtctaaattaaacgatgaagtggctagtcttaatgcacaacttaagactagcaaaagtgaatttgataaacacccctcaattaaggatggacttggcttcaagagggaagccaagaacttaacaagccataaggctcccatctccgcaaaggagaaagggaaggcccctatggctattagtgctaaaaagaaccatgctttcatgtatcatgataggagatattctagaaatgcctatagaagttatgatacttatgactcatatgctatgactgcttctagttcccatgttgtgcatgatagagatatacctaggagaaatgttgttcctaggaaaattaatgaaccttctacaatatatcatgcttgcaatgattcctttgctatttgtagaaaggataagaaagtttatgcatctgggggttcaagctggattatcgacagcggatgcacaaaccacatgacgggggagaagaagatgttcacctcctacgtcaagaacaagggtccccaagattcaatcatattcggtgatgggaaccaaggcaaggtgaaaggcttagtcaagattgcaatctcaaatgaacactctatttctaatgtgtttttagttgattcacttggatataatttgctatctgttagtcaattatgtaatatgggatataattgcctattcacaaatgtagatgtgtctgtctttagaagaagtgatggttcattagcttttaagggtgtattagacggcaaactctatttagttgattttgcaaaagaggaggtcggtctagatgcatgcttaattgctaagactagcatgggctggctgtggcatcgccgcttagcacatgtgggaatgaagaaccttcacaagcttctaaagggagaacacgtgataggtctaacaaatgttactttcgaaaaagatagaccttgtgcagcttgtcaagcagggaaacaggtgggaagctctcatcatgccaagaatgtgatgacaacatcaagacccctggagttacttcatatggacctcttcggacccgtcgcctatctaagcataggaggaagtaagtatggtcttgttatagttgatgatttttcccgcttcacttgggtattctttttgcaggataaatctgaaacccaagggaccctaaagcgcttcctaaggagagctcaaaacgagtttgagctcaaggtgaagaagataaggagcgacaatgggtccgaattcaagaaccttcaagtggaggagtatcttgaggaggaaggaatcaagcatgagttctccgctccctacacaccacaacaaaatggtgtggtagagaggaagaacaggacgcttatagacatggcgaggacgatgcttggagagttcaagacccccgagcgcttttggtcggaagccgtgaacacggcttgccacgccatcaacagggtctacctgcatcgcctcctcaagaagacgtcgtatgagctactaaccggtaacaaacccaatgtttcgtattttcgagtttttgggagtaaatgctacattctagtgaagaagggtagaaattccaaatttgctcccaaagccgtagaagggtttttgttaggttatgactcaaatacaaaggcgtatagagtcttcaacaaatcatcgggtttggttgaagtctctagcgacgttgtatttgatgagactaatggctctccaagagagcaagttgttgattttgatgatgtagatgaagaagaagttccaacggccgcaatacgcaccatggcgattggagatgtgcagccacaggaacaagatgagcgagatcaaccttcttcctcaacaaaggtgcaacccccaactcaagatgatgaacaggaggcgtgtgatcaagggggagcacaagatgatcatgtaatggaggaagaagcgcagccggcaccttcaacccaagttcgagcaatgattcaaagggatcatcccgtcgaccaaattttgggtgatattagcaagggagtaactactcgatctcgattagttaatttttgtgagcattactcctttgtctcttctattgagcctttcagggtagaagaggccttgctagaaccggactgggtgttggtcatgcaggaggagctcaacaacttcaaaagaaatgaagtttggacactggtgcctcgtcccaagcaaaatgttgtgggaaccaagttgttccaaatggatgtaaagagcgctttcctcaacgggccaatcaaggaggaggtgtacgtggagcaacccccgagcttcgaggatgaacggtaccccgaccacgtgtgtaagctctctaaggcgctctatggacttaagcaagccccaagagcatgggtgatgactcaaaagttcgagatctcgatgatgggcgagttaagctacttccttgggttccaagtgaagcaactcaaggatgggaccttcatctcccaaacgaagtacacacaagatttgatcaagaggtttgggatgaaggacgccaagcccgcaaagactccaatgggaaccgacagacacaccgacctcaacaaaggaggtaagtctgttgatcaaaaagcataccaatctatgatagggtctttactttatttatgtgctagtagaccggatattatgcttagtgtatgcatgtgtgctagatttcaatccgatcctaaggagtgtcacttagtggctgtgaagcgaattcttagatatttagtcgctacgccttgtttcgggatctggtatccaaaggggtctacctttgacttgattggatattcagactccgactatgctggatgtaaggtcgataggaagagtacatcggggacatgccaattcttaggaaggtccttggtgtcatggagttctaagaaacaaacttccgttgccctatccaccgcagaggccgagtacgttgccgcaggacagtgttgcgcgcaactactttag

SEQ ID NO: 157398 - DNA, 838 bp, Zea mays
  unsure (1)..(838): unsure at all n locations
  Clone ID: MRT4577_75125C.1
gcatccaaattcctccccgggcagataactgtggcagtcagtcaagcagcaggtcccgagcggtggcggcggcgaccacgtgcgcggcggcgatggtgaggactgaggagctatcccgtatagaggggctgtgcctgtgcgcgaagtgagccacatagcggcggcgagcacgttcgaagcccacgaaaaatggcctcccgcctcttaaccagatcagcggcgtcgcgcctcgtttcccacctccaccgcaagacgccaggcattactccctgcctcctcacccgtggccctgccttggcgtccctcttggggcccactgatggcctcccccacgccgctgactccactctgctccgcgttccgatgcggtggctctcctctccgtcctcggaggcggtggcggaggctccgatgaccgcggacggcctgactgtagactcaatcgccgacaaggggtggacgattcttcccgaagccgagagcgactggcgcagccatgccgcggccgtcgcacagtcagtcaaggtcatcaaaaagcgcctcaagtggggatggatacttgagagaacgaagcaattggctgtggtgttggagaagccagacctctgggaagacccagtttttgctgggagggttagccgtgagcagggtgagctcatgggcaagattaagtcagtgaaccaatttgagcaggaattgattgaacacattgagatgctacggcttgcacgtgaagaaaacgataatgaacttgagatggaaagcatgaaggctttagctgatatgagaagagtgcaaggagaaagaacttaatgcgtactntctggagacatgactc

SEQ ID NO: 157399 - DNA, 1678 bp, Zea mays
  Clone ID: MRT4577_75126C.1
ccccttcctttctcctttcgcctccgcctccgactacggcttcagtttagcctccaagcaggggcgcggcgcggggtattctgtccgtcgttgagggtagagagtcacttgcaccgggggagcggagatgaagccggttgtggggatcgtggtgtcgaacaagatgcagaagtcggtggtggttgcagtggaccgcctctttcacaacaaggtatacaaccgctatgtcaagcgcacctccaagttcatggcacacgacgatgacgacttctgcaacattggcgaccgggttaggcttgatccttttaggcccttgagcagacataagcactggggttgttgcttgaattctccgcagagctaaggtgtacgttccaccagctgcaacagcgttcagtgaacgtggtagcaaatttcaacagctggtgttggtaccaatgatccttcacatccatttgaaacaacctgcgacttgggcataaccttttgccacaagtctagccttgttccttgtcaccaccccatgctcgtcctgtttgttgcggaacacccacttggttcccacaacgttttgcttgggacgaggcaccagtgtccaaacttcatttcgcttgaagttattgagctcttccacaccgttttgttgtggtgtgtagggagcggagaactcgtgcttgactccttcctcctcaagatactcttccacttgaaggttcttgaactcggacccgttgtcgctccttatcttcttcaccttgagctcaaattcattttgagctctccttaggaagcgcttgagggtaccttgggtttcagacttatccttgccttgattcccgtcaccgaatatgattgaatcttgggaatctttgttcttggcgtaggaggtgaacatcttcttctcccccgtcatgtggtttgtgcatccgctgtcgataatccagcttgagcccccggatgcataaaccttcttctcctttgccatgaggcaggtgtgatgctcgttggggaagagagacgatttgttgaaggccgtggcggcgagttcttcgtcatcggagtcggacgaagaacaatccgagtcccactcttttccaatgtgtgcctcgcccttagccttcttgtaaaccttcttgttctctctcttcccattctttacttgttcctggtcactatcattatcgggacagttagcaataaagtgaccaatcttaccacacttgaagcaggagcgctttcccttcgtcttgctcttgttgggatgctccttgcaacctttgagcgtcgtcttgaagcgcttgatgatgagggccatttcatcctcatttagcccggccgcctcaacttgtgccaccttgctaggtagcgcctccctgctacttgttgctttgagagcaacagtttgaggctcgtgaatcgacattgggccattcaacgcctcatcaacatatcttgcctccttgatcatcattcgcccgcttacaaactttccgagtatttcctcgggcgtcatcttggtgtaccttagcataagtcggacgacgtcgtggtccgtccatctcgtgcttccatagctcctgattttgttgaccagggtcttgagcctgttgtacgtttgagttggctcctcccccctgatcattgcgaaccttcctagttcgccttccaccaactccat

SEQ ID NO: 157400 - DNA, 111 bp, Zea mays
  unsure (1)..(111): unsure at all n locations
  Clone ID: MRT4577_75127C.1
gtgctggcgaatcggcgcttgagcgttgtgccggaatcgcggtcctatcgaccatcgggacagtgatatgttcctgtntctcttcggtgacactgccntagttttgtttgt

SEQ ID NO: 157401 - DNA, 424 bp, Zea mays
  Clone ID: MRT4577_75128C.1
aaaccccccaaaaaggttttttttttttggggggggaacgggtcctgtaaaaaaaaacggggcacatgcccgtttagccagatagccaaaacaaaccatccatccatcccgggttattattttaaaaaagttttacaagcagggcctgcctgttcggggaaaaaacaccagtcccctgaaagctaaaggaaaggaccgttccaagggccccagggggggttagtccaataaagcaggactactaaaagggggccgggagccaatccaatcctaacaaaggaccccggggttaattggggattttgaacggaggggtggcgggaaaacttccattcttttttgccaccagccgtggcccccttggtttttttgcaacaagcccgggaagctttgacgtcaatgctttttgggggaaacgtctttc

SEQ ID NO: 157402 - DNA, 115 bp, Zea mays
  Clone ID: MRT4577_75129C.1
ccttgctttattctttggatgacgagtataaggagcatgtgcttgaataatcaccctggatttgataatggtgggattctgtggttccatagcttgactgagttcccacatggca

SEQ ID NO: 157403 - DNA, 267 bp, Zea mays
  Clone ID: MRT4577_7512C.1
ccgtacatccgccccctcatcgcagccgcctctctcccgaccaaaagccctagctagctagacccaccccatccatggcgaccatccccaccaccggctccgcctccctcctccggggctccgccgccctccagagggacgggaggtcaaccaggccgtcgtcggcggccaggccgctgccggggcgacgcgcgcgctcgttgtcggacgtgcgcgcctccgccaaggacatcgccttcgaccaggcgtcgcgctccgtgcctccag

SEQ ID NO: 157404 - DNA, 1631 bp, Zea mays
  Clone ID: MRT4577_75130C.1
atggcgcaccggacagtccgctcgatttgtcgttgtgtggagataaatctgtatccaccgatagatatgggtaattctatgagatttttttatcgtgcgtataaatatgtgatagagaggagttcgtcacagagcccgcggtcgcaggcggtggcgggggcgccattcctgtggatatctgtcatggatcccgtcaagatgggcaccggcgtgcaggcctacatctcctaccgcgtcatcaccaagaccaacctccctgaatttgagggaccagagaaaattgttattcgacgctatagtgattttgaatggttgcatgatcggcttgctgagaggtacaaaggcgtttttatacctccccttccggagaagaatgctgttgagaaattccggtttagcaaggagttcattgaattgcgtcgtcaagctttggatttatttgttaacaggatagcttcacaccctgaactcaagcaaagtgatgtcttgaggacatttttgcaggcagatgaagagataatggatagggcaagatcttatgagaccggtatttttaagaaaccatcagattttttacagatgtttaaggacgtacagtcaaaagtcagtgatgttgttctgggaaaagaaaagcccgtggaggaatctactcctgaatatgagaagcttaaaagttacatatttgagctagaaattcatttagcagaggcccaaaaacaagcataccgtcttgtgaaaagacacagagaacttggacaatctttggcggacttcggaaaggcgattaagcttttgggctcttgtgaaggagatttgatggaaaaggtgttttctgaagttggttcaaagtcagagatgttgtcaataaagctacaaagagaggcagacaaccttctctttaactttgaagaacccttgaaagattatgtgcgtgctctacaatctataaaagccactatgctggatcgagctaatgctttcaggcagcactttgatttggatcaggagaggaagtataaagagcttaatcttgaaaaattgaagttcatgaaccctgagaagtatgccgaagcagaatctgagtttagaggggcaagttgctgtaactttccattgaggaattctttacatagccttgtggacgagttgaaagcagacagtgaggaggctacgaagaagtttgaacacatagtaagactaatgaacgaagagctctctcgtttccaggagcagaaaacagctgacattggactcgcattccatgaatttgccaagggtcaggctaagctagctaaggacattgcggatgcatggcgcagcgtcctcccaaagctcgaagcttgttccacatcataaagtgtgatccgtgtttcccctataatgtttgggataggggttggcaactggtaaggttttggctgtttttttccccagcctgttttgaccctgattcctgtatacttgaactgcgggatggaaatgtaccagctgttagattcagttgacatcatttcttgctgtttgagcctgtaaccatcgtctcttcttagatcaattgacacaactgctggaatcgcgtaataatggtaatcaataatgaaaaaatgctgtcccccggtgctggttcctgt

SEQ ID NO: 157405 - DNA, 782 bp, Zea mays
  unsure (1)..(782): unsure at all n locations
  Clone ID: MRT4577_75131C.1
ttggccgggagataccaaaccctaaccttagtcggccgttccgcaggcccgccggcggcgacgccttgtgtgccgcgtccgtgattctcttgccagggaagcgtttggaaggggactccctgcctagtgcactggccgcagtgacgcgcggccgaggcgcggatcggggaggggaggacggctgtggcgagatggcgggtgacgtcgcgacctcgccagccccggcgccgctgtccgtgtcctcatcgtcgcagaaccaccaccaccacggccccacgaccgcccgcggtctcctctgccacgccggcgccggtgcctccgctggtgtggtggcggcgacgttcgtgtgcccactcgatgtcatcaagaccaggttccaggtccacggctggcccaagcttgccacaggtagtgtaattattgggagcttgcagcagattgctcaacaagaaggtttccggggaatgtatcgcggcctatccccaactattctggcactcttgcctaactgggcggtttactttactgtgtatgagcagcttanaagttttctttcttccaacgatggaagccatcaactttctttaggggcaaatgttgttgctgcatcatgtgctggagctgcaacaactattgtaacaaatccactttgggtcgtgaagacaagatttcagacccaaggaattagagccgggccaatcccgtataaaggtacacttgctgccttgagaagatagccatgaagaagcatccgaggctatacagtggcctggnccctgcct

SEQ ID NO: 157406 - DNA, 1829 bp, Zea mays
  Clone ID: MRT4577_75132C.1
ggccgggccggttttcacaaagggggtctgaagctgacctcttttccccgtcgcttcgccgtcccgcaccagggaggagaggaggcttcaccgcgaagctcgccatgatctcgccggagaggagttcgtcacagagcccgcgaccccacgcggaggcgggggcgccattcctgtggatatctgtcatggatcccgacaagatgggcaccggcgcgcaggcctacatctcctaccgcgtcatcaccaagaccaacctccctgaatttgaggcaccacagaaaattgccattcgacgctatagtgattttgcatggttgcatgatcggcttgctgagaggtacaaaggcgtttttatacctccccttccggagaagaatgctagaaattccggcacagcaaggagttcattgaattgcgtcgtcaagctgtggatttatttgtcaacaggatccattcacaccctgactgacgccaaagtgatgacgaatacacggaggagcacaccgatgaagatatagaagctgcggcaagatcttatggcagcaactaaataatggactgagttagctgacaataggccatttgattctatcccatgtttggtgcatgtagtgtatcatgtttcgtttaccatctctattggtatgatcagagctctggctatcttttcaagaccatgctgagtgtacagaacttggacaatctttggcggactttggaaaggcgattaagcttttaggtgcttgtgaaggagatttgatggaaaaggtgttttctgaagttggttcgaagtcagagatgttgtcaataaagctgcaaagagagccacgcgtccgtccttttactttgaagaacccttgaaagattatgtgcgtgctgtacaatctataaaagccactatgcttgatcgagccaatgctttcaggcagcacttcgatttggatcaggagaggaagtataaagagcttaatcttgaaaaattgaagttcatgaaccctgaaaagtatgccgaagcagaatctgagtttcgagagttgaaagcagacagtgaggaggctactaagaagtttgaacacatagttagactaatgaatgaagagctcgctcgtttccaggagcaaaagacagatgatattggactcgcattccatgaatttgccaagggtcaggctaagctagctaaagatattgcagatgcatggcgcagcgtcctcccaaagctcgaagcttgttccacatcataaatgtgatttgtgtttcctcatgatgtttgggaaatgggatagggggttggcagctggtgagtttaggctgtttttttcccagcctgttttgacactgattactgtatacttgaactgcggtttggaaatgctccagctgttaggttcagttgacgtcatttcttgctgtttgagcttttaaccgtcttcttttcttagatcaattgaaatagctactggaatctcgtgatattgataatcaatgatgtaccatgatgctactttctggccgtcttcttttgttagatcaactgaaatagctcctggaatctcgtgatattgataatcaatgatgtaccatgatgctacttcctggaacttctttagcttgattttttttcctgaagtgttcaagcgagaaatagatagcaggatttagagggctcttaagtcttaaagcatctatataagagaggctctaaacgtgaccctattttaaatatagggtttagaaacataaaacactttttcaagagcggctctattttaaaatttcataaaaaattatagggctcggtctttcgagttctaaatatagtactccat

SEQ ID NO: 157407 - DNA, 424 bp, Zea mays
  Clone ID: MRT4577_75133C.1
aaatcatggatgctttaacaaaattatgtttacaccaagcttggttcaccaaaaaatcaatatttaatttttcgaactcaacccccaacaaatcaatattaccttccattttactgaaataatcaacacattccttcaaccttagccttaaaaatgaatcaatggattggtacctccttccattttttttttcctacctttaccccttggttttaaaagggggcagtcttggaccttaaacctgcttggaccggttcgtttaaattagggaccacaaacctgtaaataatttggttggcaaagggaagtttaaattaaaaaatgaataggaggttctgctgaaatagcctaaggcttccttgttcctttcctgctttccttttagagattaaccttaacctttggaaacctttttttattaaac

SEQ ID NO: 157408 - DNA, 1657 bp, Zea mays
  Clone ID: MRT4577_75134C.1
gtgataacctctacacaagtcgggacggaaaagccaggcagggaaaaaatccatttccctttcttctgaagtcgtcctcttcttcccgtcgcttcgccgtgccgcacctgcgaggagaggagacttcgccgcgaagctcaccatgatctcgccggagaggagctcgtcacagagccagcggtcggcggcggcgggggcgccgttcctgtcgatctccgtcacggatcccgtaaagatgggtaccggcgtgcagtcctacatctcctaccgcgtcatcaccaagaccaacctccctgaatttgagggaccagagaaaattgttattcggcgctatagtgattttgaatggttgcatgatcggcttgctgagaggtacaaaggcatttttataccccctcttccggagaagaatgctgttgagaaattccggtttagcaaggagttcattgaattgcggcgtcaagctctggatttattcgttaacaggatagcttcacaccctgaactcaagcaaagtgatgtcttgaggacatttttgcaagcagatgaagagataatggatagggcaagatcttatgagactggtatttttaagaaaccggcagatttcatacagatgtttaaggatgtgcagtcaaaagtcagtgatgttgttctgggaaaagaaaagcctgtggaggaatctactcctgaatatgagaagcttaaaaattacatatttgagctagaaaatcatttagcagaggcccaaaaacaagcataccgtcttgtgaaaagacacagagaacttggtcaatctttggcggactttggaaaggcgattaagcatttaggtgcttgtgaaggagatttgatggaaaaggtgttttctgaagttggttcgaagtcagagatgttgtcaataaagctgcaaagagaggcagacaaccttctctttaactttgaagaacccttgaaagattatgtgcgtgctgtacaatctataaaagccactatgcttgatcgagccaatgctttcaggcagcacttcgatttggatcaggagaggaagtataaagagcttaatcttgaaaaattgaagttcatgaaccctgaaaagtatgccgaagcagaatctgagtttcgagagttgaaagcagacagtgaggaggctactaagaagtttgaacacatagttagactaatgaatgaagagcttgctcgtttccaggagcaaaagacagctgatattggactcgcattccatgaatttgccaagggtcaggctaagctagctaaagacattgcggatgcatggcgcagcgtcctcccaaagctcgaagcttgttccacatcataaatgtgatttgtgtttcctcatgatgtttgggaatgggatagggggttggcagctggtgagtttaggctgttttttcccagcctgttttgacactgattactgtatacttgaactgcggtttggaaatgctccagctgttaggttcagttgacgtcatttcttgctgtttgagcttttaaccgtcttcttttcttagatcaactgaaatagctactggaatctcgtgatattgataatcaatgatgtaccatgatgctacttcctggaaaaaaaaaaaaaaaaaaccacaaaaaaataaaaaaaaaaaaaacacccccc

SEQ ID NO: 157409 - DNA, 1505 bp, Zea mays
  Clone ID: MRT4577_75135C.1
ttttccctcgaggccggccgggctcttcttcccgtcgcttcgccgtcccgcaccagggaggagaggaggcttcgccgcgaagctcgccatgatctcgccggagaggagttcgtcacagagcccgcggtcgcaggcggtggcgggggcgccattcctgtggatatccgtcatggatcccgtcaagatgggcaccggcgtgcaggcctacatctcctaccgcgtcatcaccaagaccaacctccctgaatttgagggaccagagaaaattgttattcgacgctatagtgattttgaatggttgcatgatcggcttgctgagaggtacaaaggcgtttttatacctccccttccggagaagaatgctgttgagaaattccggtttagcaaggagttcattgaattgcgtcgtcaagctttggatttatttgttaacaggatagcttcacaccctgaactcaagcaaagtgatgtcttgaggacatttttgcaggcagatgaagagataatggatagggcaagatcttatgagaccggtatttttaagaaaccatcagattttttacagatgtttaaggacgtacagtcaaaagtcagtgatgttgttctgggaaaagaaaagcccgtggaggaatctactcctgaatatgagaagcttaaaagttacatatttgagctagaaattcatttagcagaggcccaaaaacaagcataccgtcttgtgaaaagacacagagaacttggacaatctttggcggacttcggaaaggcgattaagcttttgggctcttgtgaaggagatttgatggaaaaggtgttttctgaagttggttcaaagtcagagatgttgtcaataaagctacaaagagaggcagacaaccttctctttaactttgaagaacccttgaaagattatgtgcgtgctctacaatctataaaagccactatgctggatcgagctaatgctttcaggcagcactttgatttggatcaggagaggaagtataaagagcttaatcttgaaaaattgaagttcatgaaccctgagaagtatgccgaagcagaatctgagtttagagggttgaaagcagacagtgaggaggctacgaagaagtttgaacacatagtaagactaatgaacgaagagctctctcgtttccaggagcagaaaacagctgacattggactcgcattccatgaatttgccaagggtcaggctaagctagctaaggacattgcggatgcatggcgcagcgtcctcccaaagctcgaagcttgttccacatcataaagtgtgatccgtgtttcctcatgatgtttgggaaggggttggtagctggtgaggtttaggctgttttttttttccagcctgttttgacacggattcctgtatacttgaactgcgggttggaaatgtaccagctgttagattcagttgacataatttcttgctgtttgagcctgtaaccatcattttttcttagatcaattgacacaactgctggaat

SEQ ID NO: 157410 - DNA, 402 bp, Zea mays
  Clone ID: MRT4577_75136C.1
gaccatgtgaaagcgcatccatgggggattttaccgtaacacaagaagacaactttctttttgtttttgggaaactgacgcctggcatctacggagaaagaaactgtattacatcggatctaatatctgcgacaagtgttgtccgaacatcatttaatgcccttcactgcagaccaagtaaaaggagcaacgcattgctgattatgacaatgaaccgtatttgtcaaaagatactttccagactatagcaaaaatggctgttgctaatggacaagcaccatgtggaacagtacaattaactacaatgtctactacagttgtatctgctgatatacaggaaagaatagcatcatcaggatcaacaggtactggtgcctcaatttacacagctattcataaaat

SEQ ID NO: 157411 - DNA, 330 bp, Zea mays
  Clone ID: MRT4577_75137C.1
ggttgaataggttaagcatacctgggatagaaccaagtacgggagtgggtatcatgcaacaaaatggcttatgggaggaactcaaaatccagatgatatgggttggtttttgcaattttccccctcaaacaattgagctgtttcgggcatcacttaattgatgtatctgtagcttgtagcctaactggttataactactcagcaaggcactgttactggaagccaaactttgcaactcagccctggaataccataattacagtccaatggtgaaaagtactaaaagatcatcagttgagacatatcatgatctggcaattcatatactac

SEQ ID NO: 157412 - DNA, 289 bp, Zea mays
  Clone ID: MRT4577_75138C.1
atcatgcctcaagcttatcatgacggccaccgtggaccagcggctgtatctccccctagaaggctgtaggctctaatcatggttacgagtgagcaggcgacgccccagtctcccgctcaagtacgactcaccgcgcacacagagccatatatgatgtgatacggggaggacaacatagtgcatcacgaagagcttgtgcacttagagtacgacgacgaatggacgggcgagagattctttgctaaccccgactaagaggtcgcaaagaaggtctagtgctatttcaaga

SEQ ID NO: 157413 - DNA, 283 bp, Zea mays
  Clone ID: MRT4577_75139C.1
gtccatatcactgatcataactacgagaaatcgagactataagagatgagacgacacttacgactagacaaacttgtgttgtggcttggctcgtttggctcgtgagctagctcacgagctaattcgagctgggggattagagaacccgacctaaaaggctgcttgggttggttccaaaataaaaacaggccaggtcaaccaagtattcaaccacaaggtttttggtccagccttagcaattatggataaggttccaaagggcaccataaaaaaggcggtttgg

SEQ ID NO: 157414 - DNA, 282 bp, Zea mays
  Clone ID: MRT4577_7513C.1
ggccgggatatcatttcagttcagccttcttgacttgtactgaggtaggtctcgtaggtctcgtctgagttggcaacgaccatgcctgccgtctcggccgccgcctgctgcgccgccacaacgccggcaaacgaggtggcggaggacctcctcggcttcctccgcgttctcagagacggcaccgtgctccggtcgccggcggacccagtgttctgaccggccaccttccccggcagccacccgtccgtgcagtggagagaggccgtctacgacaagcccaag

SEQ ID NO: 157415 - DNA, 392 bp, Zea mays
  Clone ID: MRT4577_75140C.1
ggcacgagggcctatcgaaacaagaggcagagagaaagaactacgagacaaggaggcggcgcagcgcctctatttgcaagtcaaatctgaggtggagggctgcatcaactatctgaaggagaagagggaggaggacccctacagaagtatactgcccaggcttctctaccaagcacttcatggtcccgatgcagaaatacccacatttgaaccatgaaatgttcacttcgagaataccaattgtttatattgttcgttcttatgtttttttttcttgcattgtcaaaaaaaattgattgttaccattgtcctcaaaagaattatgatggctgattctatcgtgtagcccatttaaagcatatacaatagaggtcaacagaaggtcatcgctc

SEQ ID NO: 157416 - DNA, 635 bp, Zea mays
  unsure (1)..(635): unsure at all n locations
  Clone ID: MRT4577_75141C.1
tcgcaggccgtccgggaaagctccacaacctgtcccatctccatcctctgcctcccctgcatctccggccgggcgggcatggccatgtccatggcgatgtcaaaggtcttcacctcgcgccattcggaacatttgcaccaccgccttgtggcggcgagctcccaggcagcggcgccgcggctgccacttctcccgcggagtcctggcctagcggcggtcacagtcgcctaccgtccgcggctccggccggcgagccccaggtcgacatcgagtgagtcggacctttcccctaccccgccttcggaacgcaccatgacggcctgggacctcgccagcctctgggtcgggctcgtcgtcggcgtgccgtcctactacctcgcgggcagcctcgtggacctcggcatgtccgcgctccagggcgtcgccaccgtcgccttcgccaacctcatcgtcctcgccacgctcgtcctcacggctgcgccggcggtcacgcacggcctgccgttcccggtgctcgcgcgcgccgccttcggcgtncgcggggcgcacgttccggcagtcatccgcgccctnatcggctgcggctggttcggcctctagtcctgggtccggggccgcgccatatttttgctcct

SEQ ID NO: 157417 - DNA, 244 bp, Zea mays
  unsure (1)..(244): unsure at all n locations
  Clone ID: MRT4577_75142C.1
ggaagcttacaggngacgagggcagcacaaaagggggggaaagcaggaaaannggacgcaaaaccgngcannggagccgcgaacagaggcgacacaacccacnangangcnggcgcaaacacagccgcancaggngaacccaacgccggaggaaccgcnggcgncccangagnagaaggggagccaaccggngaagacanggaacaggcgcnaaaccgcgccgggggcaaggcnggaaacaagg

SEQ ID NO: 157418 - DNA, 236 bp, Zea mays
  Clone ID: MRT4577_75143C.1
ccctttcgttcggttgcagctgttgcacacaataacatctactagccggtctttgacttgctgcgtaatgaaacgaacagacctgggaggtgaaatgaatatcaaaactcacaaggaataatattagctgtgtgtcgcaatgaccgtggaacgtgtcttggctccagagaagagtctgacaagtttctgaaaggatgattgctgtaccttcagctttacttcctgattgcaacaac

SEQ ID NO: 157419 - DNA, 5265 bp, Zea mays
  Clone ID: MRT4577_75144C.1
atggatcctaaggggaagggaatcgtgatcaacgacaaggaaaaggagtccttcgtcaacgagccaaaagatgacaaatccaacgactctggctcgggccacagacgtaaagatgggaagaagaagaagacaaggcgcatcaaggagatcgtctactacgacagcgacgaatcctcttcttcccaaaacgacgacgacaacgactacaggaagacggtcaattcgaacttttcatttgattattctcgtattccacatagttcgaattcacatttgctttccattcctcttggcaaacctccacactttgatggggaggactacggattttggagtcacaaaatgcgtagtcatttattctctctccatccaagcatatgggagattgtagagaatggaatgaaatttgatagctcggatagccctatgtttattaatgaacaaattcataaaaatgcacaagctactactgtgttgctagcctctttgtgcagggacgagtacaataaggtgagcggcttggacaatgccaagcagatatgggacaccctcaagatttctcacgaggggaacgacatcaccatgctcactaaaatggagttggtggagggcgagcttggaaggtttgcaatgataaggggcgaggagccaacccaaacatacaaccggctcaagacccttatcaacaaaataaggagttatggaagtacgcgatggacggatcacgacgtcgtccgcctaatgctaaggtcatttaccgttcttgatcctcatctcgtgaacaatattcgtgagaatcccaggtacacgaagatgacgcccgaggaggtactcggaaaattcgtaagcgggcggatgatgatcaaggaggcaagatacgtggacgacgccttgaatggaccgatcaacgaacatcaaccccttgctctcaaggcaacaagtagcaaggtggcacaaattgaggcggccggacttaatgatgaagagatggctctcatcatcaaacgcttcaagacggtgctaaaaggtcacaaggggcagccaagcaagaccaagacaaagagaaagcgctcatgcttcaagtgcggtaagattggtcattttatcgctaactgccccgataacgatagtgaccaggaacaggggaacaagagggaaaagaagaagaattacaagaaggccaaggacgaggcacacatcggaaaggagtgggattcggattgctcctccgactccgacaatgaaggactcgccgccaccgccttcaacaagtcatccctcttccccaacgagcgtcacacatgccttatggcaagggagaagaaggtgagtactcgagactccacttatgcttcttctagtgataatgagtctagtgatgatgatgacatagactattcatgcttattcaagggtttagatagatctaagatagacaaaattaatgaattgattgatgccttgaatgataagaatgtgcttttagaaaagcaagaggatttgttgtatgaggaacatgacaaatttgtagaagcacaaaaatcacttgcattagagattaagagaaatgaaatgctttcttgtgagttgtctacatgtcatgattcaattgctagtttaaagagcaaaaatgatgatttaaatgctaaactagaaaaatctagtaaatcaacatcttgtgtagaacatgttgagatttgcactaggtgtaaagatttcgatgttgatgcctgtagtgatcatttagtttcaatttccaaactaactgaggaattggctagtctcaatgcccaacttaagactagcaagaatgaatttgataaactaaaatttgcaagggatgcctacacgatcggtagacacccctcaattaaggatggacttggcttcaagagggaagccaagaacttaacaagccataagactcccattcccgctaaggagaaagggaaggcccctatggctactagtgttaaaaagaaccatgcctttttgtatcatgatagaaaaaattctagaaatgcttttagaagttatgatgcttatgattcacatgcttatgattcttatgctatgactgcttctagttctcatgttgtgcatgatagaaatgttggtagaaggaatgttgttaatattcctaggaaagttaatgagccttctacaatataccatgttttgaatgcttcctttgcaatttatagaaaggatagaaaggtttatgcatccgggggttctagctggattattgatagcggatgcacaaaccatatgacgggggagaagaagatgttcacctcctacgtcaagaataatgattcccaagattcaattatattcggtgatgggaatcaaggcaaggtaaaaggattagttgagtccttgggatataatttgctatctgttagtcaattatgcaacatggggtataactgtctatttacaaatgaagatgtgtctgtctttagaagaagtgatggttcactagcttttaagggtgtattagacggcaaactttatttagttgattttgcaaaagaggaagccggtctagatgcatgcttaatagctaagactagcatgggctggctgtggcatcgccgcttagcacatgtggggatgaagaaccttcacaagcttctaaaaggagaacacgtgataggtttgactaacgtgcaattcgaaaaagatagaccttgtgcagcttgtcaagcaggtaaacaagtgggaggagcacatcacagcaagaatgtgatgaccacttcaagacccctggagctgctgcatatggacctcttcggacctgtcgcctatctgagcataggagggagtaagtatggtctagttattgttgatgacttttcccgcttcacttgggtgttctttttgcaggataagtctgaaacccaagggaccctcaagcgcttcctcaggagagctcaaaatgagtttgagctcaaggtgaagaagataagaagcgacaacgggtccgagttcaagaaccttcaagtggaggagttccttgaggaggaagggatcaagcatgagttctccgctccctacacaccacatcaaaatggtgtggtagagaggaagaacaggacgctaattgatatggcgaggactatgcttggagagttcaagacccccgagcgattttggtcggaagccgtgaacacggcttgccacgccatcaacagggtctaccttcaccgcctcctcaagaagacgtcgtatgagctactaaccggtaacaaacccaatgtatcgtactttcgtgtatttgggagcaagtgctacattctagtaaagaagggtagaaattctaaatttgctcccaaagcagtagaagggtttttgttaggttatgactcaaatacaaaggcgtatagagtcttcaacaaatcatcaggtttggttgaagtctctagcgacgttgtatttgatgagactaatggctctccaagagagcaagttgttgattgtgatgatgtagatgaagaagatgttccgacggcccctatacgaactatggcgattggagaaatgcggccacaggaacaagatgaacgagatgaaccatcttcctcaactatggtgctacccccaactcaagacgatgaacaggaggcgtgtgatcaagggggagcacaagatgatcatgtgatggaggaagatgcgcaaccggcacctccaacccaagttcgagcgatgattcaaagggatcatcccgtcgaccaaattctgggtgacattagcaagggagtaactactcgatctagattagttaatttttgtgagcattactcctttgtctcttctattgagcccttcagggtagaggaggccttgctagatccggactgggtgttggccatgcaggaggagctcaacaacttcaagcgcaatgaagtttggacactggtgcctcgtcccaagcaaaatgttgtgggaaccaagtgggtattccgcaacaaacaggacgagcacggggtggtgacgagaaacaaggctcgacttgtggcaaaaggttatgcccaagtcgcaggtttggatttcgaggagacttttgctcctgtggctaggctagaatcaattcgtatcttgctagcatatgccgctcaccattctttcaggttgtaccaaatggatgtgaagagcgctttcctcaacgggccaatcaaggaggaggtgtacgtggagcaaccccctggcttcgaggatgaacggtaccccgaccatgtgtgtaagctctctaaggcgctctatggacttaagcaagccccaagagcatggtatgaatgccttagagactttctaattgttaatgctttcaaggttgggaaagccgatccaactctttttactaagacttgcaatggtgatttgtttgtgtgccaaatttatgtcgatgacataatatttggttctactaaccaagagtcttgtgaagagtttagcagggtgatgacgcagaaattcgagatgtcgatgatgggcgagttgaactacttccttgggttccaagtgaagcaactcaaggatggcactttcatctcccaaacgaagtacacgcaagacttgctaaagaggtttgggatgaaggacgccaagcccgcaaagacgccgatgggaaccgacagacacacagacctcaacaaaggaggtaagtccgttgatcaaaaagcataccggtccatgataggttctttgctttatttatgtgctagtagaccggatattatgcttagcgtatgcatgtgtgctagatttcaatccaatcctaaggagtgtcacttagtggcggtgaagcgaattcttagatatttagttgctacgacttgcttcgggctctggtatccaaaggggtctacctttgacttagttggatactcagactccgactatgctggatgtaaggtcgataggaagagtacatcggggacgtgccaattcttaggaaggtccctggtgtcatggaattctaagaaacaaacttccgttgccctatccaccgctgaggccgagtatgttgccgcaggacagtgttgcgcgcaactactttggatgaggcaaaccctccgggactttggctacaatctgagcaaagtcccactcctatgtgataatgagagtgctatccgcatggcggaaaatcctgttgaacacagccgcaccaagcacatagacatccggcatcactttttgagagaccaccagcaaaagggagatatcgaagtgtttcatgttagcaccgagaactag

SEQ ID NO: 157420 - DNA, 4938 bp, Zea mays
  Clone ID: MRT4577_75145C.1
atggatcctaaggggaagggaatcatgatcaacgacaaggagaaggagtccttcgtcaacgagccaaaggatgacaagcctaccgactcgggctcgggccacagacgcaaagatgggaagaagaagaagacaagacgcatcaaggagatcatctactacgacgacagtgatgagttcacttcttcccaaaaggacaacaacgacgacgactacaagaaaaagaaaacggtcaattcaaacttttcttttgattactctcgtattcctcaaagtacaaatgctcatttattatctattccacttggtaaacctcctcattttgatggagaggactacggattttggagtcacaaaatgcgtagtcacttgttctctctccatcctagtatatgggagattgtagagagtggaatgcactttgatagtacggatagtcccatgtttattaatgagcaaattcataaaaatgcacaagctactactgttcttctagcttctttatgcagggatgaataccacaaagtgagcggcttggataacgccaagcaaatttgggacaccctcaagatctctcatgaggggaatgatgtcacaatgctcaccaagatggagttggtggaaggcgaactcgggagattcgctatgataaggggagaagagtcaactcaaacatacaaccagataaagacccttgtcaacaagataagaagctatggaagcacgtcttttactgtccttgatcctcatcttgtaaacaatattcgtgagaatcctaagtacaccaagatgacgcccgaggagatacttggaaagttcgtgagtgggcgaatgatgatcaaggaagaaagatacgtggacgacgcattgaatggtccaatcaatgagcctcaacctcttgctctcaaggcaacaagaagcaaggagacggtacctagtaaggtggcacaaattgaggctgccggacttaatgatgaagagatggctctcatcatcaagagattcaagacggcgctaaaaggttgcaaggggcagccaagcaagaccaagacaaaggggaagcgctcatgcttcaaatgtggtaagcttggtcattttattgctaactgtcccgacaatgatagtgatcaggatcaagggaacaagagggagaagaagaagaactataagaaggcaaagggcgaggcgcatctaggcaaggagtgggattcagattgctcctcttccgactccgacaatgaaggactcgccgccaccgccttcaacaagtcatccctcttccccaacgagcgtcacacatgccttatggcaagggagaagaaggtatgtactcgaaactctacttatgcttcctcaagtgaggacgaatctagtgatgaggatgaaatagattattcatgtttatttaagggtctagatagaaccaaggtagataaaattaatgaattgattgatgccttgaatgataagaatagacttttagaaaatcaagaggatttgttatatgaagaacacgacaaatttgtagaagcacaaaaatctcatgctttagaagttaaaagaaatgaagtactttcttgtgaattatcttcttgccatgaaacaatttctagcttaaggagcattaatgatgatttgaatgctaggttagaaatagctagtaaatcaacatcttgtgtagaaattgttgaaacttgcaataggtgtaaagactttgatattaatgcttgtagcaaacatctagtctcaatttctaaattaagtgatgaggtggctagtcttagtgcccaacttaaaactagcaagagtaattttgataaactaaaattttctagggatgcctacacggttggtagacacccctctattaaggatggacttggcttcaagagggaagccaagaacttaacaagccataaggctcccatctccgccaaggagaaagggaaggcccctatggcaagtagtactaaaaagaaccatgcttttatgtacaatgatagaagacagtcttataggagttgtaatgcttacaatgcttttgatgcacatgcctatgattcctatgctatgtttgcttctagttcttcctatatgcatggtagagatatgcctagaaagaatattgttcatgttgctaggaaagttatggatggtccttctacaatttatcatactttaaatgctttctttgctatttgtaaaaaggataggaagatagttgctaggaaattaggggcaaaatgcaagggtgataaaacttgcatttgggtccctaagacaattgtgactaaccttgtaggacccaacaagagttgggtttatgcatccgggggttcaagctggattatagacagcggatgcacaaaccatatgacgggggagaagaagatgttcacctcctacgtcaaaaacaaggattcccaagattcaataatattcggtgatgggaatcaaggcaaggataagtctgaaacccaagggaccctcaagcgcttcctaaggagagctcaaaatgagtttgagctcaaggtgaagaagataaggagcgacaacgggtccgagttcaagaaccttcaagtggaggagtttcttgaggaggaagggatcaagcacgagttctccgccccctacacaccacaacaaaatggtgtggtagagaggaagaacaggacgctcattgatatggcgaggacgatgcttggagagttcaagacccccgagtgcttttggtcggaagccgtaaacacggcttgccacgccatcaatagggtctaccttcatcacctcctcaagaagacgtcgtatgagctgctaaccggtaacaaacccaatgtatcgtactttcgtgtatttgggagcaaatgttacattctagtgaagaagggtagaaattctaagtttgctcccaaagctgttgaagggtttttgttaggttatgattcaaatacaaaggcgtatagagtcttcaacaaatcatcgagtttggttgaagtctctagcgacgttgtatttgataagactaatggctctccaagagagcaagttgttgattgtgatgatgtagatgaagaagatgttctgacggccgctatacgcaccatggcgattggagatgtgcggccacaggaacaaaagaagcaagatcaaccttcttcctcaactatggtgcaccccccaactcaagatgatgaacaggttcatcaacaagaggcgtgtgatcaagggggagcacaagatgatcatgtgatggaggaagaagcgcaaccggcacctccaacccaagttcgagcgatgattcaaagggatcatcccgtcgatcaaattctgggtgacataagcaagggagtaactactcggtctcgactagttaatttttgtgagcattactcctttgtctcttctattgagcctttcagggtagaagaggccttgctagatccggactgggtgttggccatgcaagaggagctcaacaacttcaagcgcaatgaagtttggacattggtgcctcgtcccaagcaaaacgttgtgggaaccaagtgggtgttccgcaacaaacaggacgagcacggggtggtgacgaggaacaaggctcgacttgtggcaaaaggttatgcccaagtcgcaggtttggactttgaggagacttttgctcctgtggctaggctagagtccattcgtattttgctagcatatgccactcaccattctttcaggttgttccaaatggatgtgaagagcgctttcctcaacgggccaatcaaggaggaggtgtacgtggagcaaccccctggcttcgaggatgaacggtaccccgaccacgtgtgtaagctctctaaggcgctctatggacttaagcaagccccaagagcatggtatgaatgccttagagatttcttaattgctaatgctttcaaggttgggaaagccgatccaactcttttcactaagacttgtgatggtgatatatttgtgtgccaaatttatgtcgatgacataatatttggttctactaataaaaagtcttgtgaagagtttagcagggtgatgacgcagaaattcaagatgtcaatgatgggcgagttgaactacttccttgggttccaagtgaagcaactcaaggacggcaccttcatctctcaaacgaagtacacgcaagacttgctgaagcggtttgggatgaaggatgccaagcccgcaaagactccgatggggaccgacggacacactgatctcaacaaaggaggtaagtccgttgatcaaaaggcataccggtcaatgatagggtcattactttacttatgtgctagtagaccggatattatgcttagcgtatgcatgtgtgctagatttcaatccgatcctaaggagtgtcacttagtggcagtgaagcgaatccttagatatttggttgctacgccttgcttcgggctctggtatccaaaggggtctacctttgacctaattggatattcagattccgactatgctggatgtaaggtcgataggaagagtacatcggggacatgccaattcttaggaaggtccctggtgtcatggaactctaagaaacaaacttccgttgccctatccaccgctgaggccgagtatgttgccgcaggacagtgttgcgcgcaactactttggatgaggcaaaccctcaaggactttggctacaatctgagcaaagtcccactcctatgtgataatgagagtactatccgcatggcggaaaatcctgttgaacacagccgcacaaagcacatagacatccggcatcactttttgagagaccaccagcaaaagggagatatcgaagtgtttcatgttagcaccgagaaccagttagccgatatctttaccaagcctctagatgagacgaccttttgcaggttgcgtagtgagctaaatgtcctagattcgtggaacttggattga

SEQ ID NO: 157421 - DNA, 301 bp, Zea mays
  Clone ID: MRT4577_75146C.1
ctgtttaagattttcagaattttgggctttttaactaatgaaacatggccaggctttgcggtcgtttttgattacaagtgagctttcccaaattggccacctttggatcttgcaactgtggttcctacactctaacctgctgtaatcgatcttctatttaaaatgctttctctagatcccatcaagaggatcaccttccgcgctttccttttgcactactactttatggacctcttgcactccttgcattatatggattgattgataaaccatttttccttcccttcttcctctttaaatt

SEQ ID NO: 157422 - DNA, 199 bp, Zea mays
  Clone ID: MRT4577_75147C.1
ccgggggcctggtcgccaagccgatcctgaccaggcctcgaggctgttcggcgtctctagcggcatgaagcggatgcgcgacgacgacgacaccggcgaggaacaagccgaccaccgggccccaaccgatgggaaaaccggagccttcgatcccgaaccatcgcatggagccgtcgccgaagtcgccggaccagcatcc

SEQ ID NO: 157423 - DNA, 731 bp, Zea mays
  Clone ID: MRT4577_75148C.1
ccgggattacaccaccaaacaacaaccactcaccacactcaaccacctcacaacaacacttcaccaataccccttttcgataccccactagtacaaacaacaatcacaatggctggagctatggaaaagatcaaggccaaggtcgagaacgtcctccacaaggacaaggacaccacacacacaggcacctctggcacacacaccactggtacacacaccactggcacacacaacgaccctactggtcctcacggctcgcacgctgccaaccaggctgatccccgcgttgactctgaccgtttcggtgccgcaggtaacactgctggcgctggcggtgtcggtgctggccagtacaatggcgccacaggtactcacggtacccacggcaccactggctctggcctgactggctcgcacaccacccacggcagcgaccctaccggcccccacgactcccacctcgccaacaaggccgacccccgtgtcgactctgaccgcgttggcactgctggcaacaccggcagcgctgctggcattcctcacgagactcacacttcaggtcagcacacctacaggactgatggcagcaagctgcccgagcctctccctgaagataggtctcatgctgaacctcactcaggtgccggcttgactcacagcagtcacggacacaacaccaccggcaccggcttgactggctcgcacactacacacggcagcgaccccaccgg

SEQ ID NO: 157424 - DNA, 4851 bp, Zea mays
  Clone ID: MRT4577_75149C.1
atgtcgcccgaagaagttcttgggaagttcgtaagcgggcgaatgatgattaaggaggcaagatacgtggacgacgcgttgaacggtcctattcatgagcctcaacccattgctctcaaggcaacaagaagcaaggaggcactacctagcaaggtggcacaaattgaggcggtcggactaaatgatgaagagatggctctcatcatcaaacgcttcaagacggtactaaagggtcacaaggggcagccaagcaagaccaaggcaaaagggaagcgctcatgcttcaagtgcggtaagattggtcatttcatcgctaactgccctgataatgatagtgaccaggaacagggaaacaagagggaaaagaagaagaattacaagaaggcaaagggcgaggcgcatctaggcaaggagtgggactcggactgctcctcttccgactccgacaatgaaggactcgccgccaccgccttcaacaaatcaaccctcttccccaacgaatgtcacacatgccttatggcaagagagaagaaggtatgtactcggaattctacctatgcttcttcaagtgaggacgaatctagtgatgaggatgaagtagattactcatgtttgtttaagggcctagatagaaccaaggtagacaaaattaatgaattaattgatgccttgaatgataagaacatacttttagaaaagcaagaggatttgttgtatgaagaacatgataaatttgtagaagctcaaagatctcatgctctagaagttaaaagaaatgaaatactttcttgtgaattatcttcttgccatgatacaatttctaaattaaggagcatcaatgatgatttgaatgctaagttagagattgctagtaaatccacctcttgtgtagaaaatgttgtagcatgctctaggtgtaaagatattaacattgatgtttatagtgaacacctagcttgcatttctaaattaaatgaagaggtagctagtctgaatgcccaacttaagactagcaaaagtgattttgaaaaactaaaatttgcgagggatgcctacacggttggtagacacccctcaattaaggatgggcttggcttcaagaaggaagccaagaacttaacaagccataaggctcccatctccgccaaggagaaagggaaggcccctatggcaagtagcactaaaaggaatcatgcttttatatataatgataggagacaaactagaaatgcttgtaggagttataatgcttatgatgattttaactcacatgccatgtttgcttctagttcttcctttatgcatggtagaaatatgcctagaaagaatattattcatgctcctaagaaagtagtgaatgaaccttctacaatttattgtgctttaaatgcttcctttgctatttgtagaaaggataagaaaattgttgctaggaagttaggggcaaaatgcaagggagacaaaacttgcatttgggtccctaaggatatttgcactaaccttgtaggacccaacatgagttgggtttatgcatccaggggttcaagctggattatcgacagcggatgcacaaaccatatgacgggggagaagaagatgttcacctcctacgtcaagaataaggattcccaagattcaatcatattcggtgatgggaatcaaggcaagggcgacgtgggggttcctccgaagccgaggttgagtctgccttccgttgccgtggccgagcccgagccaaggggtcgggcgaggcggaagtcgttcggccgaggccagggcggagtccgagccctggggtcgggcgaagcggagtttcgtcgtcttccgggtgttagcccgagtccgagccctggggtcgggcggagcggagttcgccgtcttccgggtcttagcccgagtccgagccctggggtcgggcggagcggagttcgccgtcttccgggtcttagcccgagtccgagccctggggtcgggcggagcggagttcgccgtcttccgggtcttagcccgagtccgagccctggggtcgggcggagcggagttcgccgtcttccgggtcttagcccgagtctgagccctggggtcgggcggagcggagttcgccgtcttccggtcggagtggcgcaggcggcgctgtccttctgtcagactggccagtggagcggtggagtgacggcggtcacttcggctctgccgagggcgcgtgtcaggatagaggtgtcaggccacctttgcgttaaatgcccctgcaatttggtcagtcggtgtggcgatttagtcaaggtggcttctgagcgaagccaaggcctcgggcgagccggtgatgtgtccgccataaaaagggggcctcgggcgagacggaagtctctcgaggataagtctgaaacccaagggaccctcaagcgcttcctcaggagggctcaaaatgagtttgagctcaaggtgaaaaagataaggagcgacaacgggtccgagttcaagaaccttcaagtggaggaattccttgaggaggaagggatcaagcacgagttctccgctccctacacaccgcagcaaaatggtgtggtagagaggaagaacaggacgctcatcgatatggcgaggacgatgctaggagagttcaagacccccgagtgcttttggacggaagccgtgaacacggcttgccatgccatcaacagggtctaccttcaccgcctcctcaagaagacttcgtatgagctgctaaccggtaacaaacccaatgtatcttactttcgtgtatttgggagcaagtgctacattctagtgaagaaaggtagaaattctaagtttgctcccaaagcagtagaagggtttttattaggttatgactcaaatacaaaggcgtatagagtcttcaacaaatcatcgggtttagttgaagtctctagcgacgttgtatttgatgagactaatggctctccaagagagcaagttgttgatcttgatgatgtagatgaagaagatgttccaacggccgctatgcgcaccatggcgattggtgatgtgcgaccacaggaacacttggagcgagatcaaccttcttcctcaactatggtgcatcccccaactcaagacgatgaacaggttcatcaacaggaggcgtgtgatcaagggggagcacaagttgatcatgtgatggaggaagaagcgcaaccggcacctccaacccaagttcgagcgatgattcaaagggatcatcccgtcgaccaaatactgggtgacattagcaagggagtaactactcgatctcgattagttaatttttgtgagcattactcctttgtctcttctattgagcctttcagggtagaggaggccttgctagatccggactgggtattggccatgcatgaggagctcaacaacttcaagaggaatgaagtttggacactggtgcctcgtccgaagcagaatgttgtgggaaccaagtgggtgttccgcaacaaacaggacgagcacggggtggtgacgagaaacaaggctcgacttgtggcaaaaggttatgcccaagtcgcaggtttggatttcgaggagacttttgctcctgtggctaggctagaatcaattcgtatcttgctagcatatgccgctcatcattctttcaggctgtaccaaatggatgtgaagagcgccttcctcaacgggccaatcaaggaggaggtgtacgtggagcaaccccctggcttcgaggatgaacggtaccccgaccatgtgtgtaagctctctaaggcgctctatggacttaagcaagccccaagagcatggtatgaatgccttagagactttctaattgttaatgctttcaaggttgggaaagccgatccaactctttttacaaagacatgtgatggtgatttgtttgtgtgccaaatttatgtcgatgacataatatttggttctactaaccaaaagtcttgtgaagagtttagcagggtgatgacgcagaaattcgagatgtcgatgatgggcgagttgaactacttccttgggttccaagtgaagcaactcaaggacgacaccttcatctcccaaacgaagtatacgcaagatctgctaaagcggtttgggatgaaggacgccaagcctgcaaagactccgatgggaaccgacggacacaccgacctcaacaaaggaggtaagtccgttgatcaaaaagcataccggtccatgataggttctttgctttatttatgtgctagtagaccggatattatgcttagcgtatgcatgtgtgctagatttcaatctgatcctaaggagtgtcacttagtggcggtgaagcgaattcttagatatttagttgctacgccttgcttcgggctctggtatccaaaggggtctacctttgacttggttggatactcagattccgactatgctggatgtaaggtagataggaagagtacatcggggacgtgccaattcttaggaaggtccctggtgtcgtggaactctaagaaacaaacttctgttgccctatccaccgctgaggccgagtatgttgccgcaggacagtgttgcgcgcaactactttggatgaggcaaaccctcagggactttggctacaatctgagcaaagtcccactcctatgtgataatgagagtgctatccgcatggcggaaaatcctgttgagcacagccgcacaaagcacatagacatccggcatcactttttgagagaccaccagcaaaagggagatatcgaagtgtttcatgttagcaccgagaaccagctagccgatatctttaccaagcctctagatgagaagaccttttgcaggctgcgtagtgagctaaatgtcttagattcgcggaacttggattga

SEQ ID NO: 157425 - DNA, 823 bp, Zea mays
  Clone ID: MRT4577_7514C.1
actatacgcccataaaaaaaaaagctccggcgcgccagtgctacaaaccaccggtaccacagcgtccacctacccgtcctccgcctcgagaagcgtcggcgaggccatggcgcggaagaagatccgggagtacgactccaagcgcctcctcaaggagcacctgaagcgcctcgcaggcatcgacctccagatcctctccgcgcaggtcacacaatcaacggatttcacggagctttcaaaccaggagccatggctctcgtcgatgaagttggttgttaaacctgacatgctgtttggcaagcgtgggaagagtggccttgtagccctcaacctagatcgtgctcaagtccgccaatttgtcaaggagcgattaggagttgaggtcgagatgggtggatgtaaggctccaattacaacattcatagtcgagccatttgtgccacacgatcaagagtattatctctcaattatgtcagacaggcttggttgcaccattagtttctcagagtgtggtggtattgagattgaggagaactgggacaaggttaagacaatctttcttccaacagagaagccaatgacacttgatgcatgcgctccattgattgccactcttcccttggaagtccgcacgaaaataggcgatttcattagagggtcattttctgttttccaagacttggatttctcatttatggagatgaacccattcaccctggtaaatggtgaaccataccctctcgacatgagaggtgaactggatgacacagctgcttttcagaaactatagaaagtggggtgacattgaattcccctctacctt

SEQ ID NO: 157426 - DNA, 377 bp, Zea mays
  Clone ID: MRT4577_75150C.1
gtcccaacacccatgtctgccacggaaaaattgtcgattcatgatggtactccacttggtccagaggatgtgaagacttataggagtattgttggtgctcttcagtacttatctcataccaggcctgatcttgcgttcgcaatcaacaaagcttgccaatatcttagcgctccttcaaccgtgcactggacagcagtcaaacgaattctgagatatgtcaaaggtacactccgcatgggtcttaaattttgtcgatcagcatctcttgttgttagtggcttctccgatgctgactgggcagggtgtcctgatgatcgcaaatctactggtgggtacgctgtgtttcttggttccaacttaatctcatggtgtgcgaa

SEQ ID NO: 157427 - DNA, 792 bp, Zea mays
  unsure (1)..(792): unsure at all n locations
  Clone ID: MRT4577_75151C.1
gccggccgggctgccatccacaaccaaacaacaacaacaaccactcacaacaactcaaccacctcacatcaacacttcatcaataccccctttgataccgcactagtacaaacaacaactcagaatggctggagctnatggaaaagatcaaggccaaggtcgagaacgtcctccacaaggacaaggacaccacacacacaggtaccactggcacacacaccactggcacacacaacgaccccactggccctcacggctcacacgccgccaaccaggccgacccccgcgttgactctgaccgtcttggtaccgcaggtaacactgctggtgctggcggcgtcggtgctggccagtacactggctccacaggtactcacggtacccatggcaccactggctctggcctgactggttcgcacaccacacacggcagcgatcctaccggccctcacaactcccaccttgccaacaaggctgacccccgcgttgactctgaccgtgttggcactgctggcaacactggcagcgctgcaggcattcctcacgagactcacacttcaggtcagcacacctacaagactgacggcagcaagctgccagagcctcttcttgaagataggtctcatgctgaacctcactcaggtgccggcttgactcacagcagtcacggacacaacaccggcagcggtctcaccggcagcagcactcaccaccacagcgaccctactggtcctcacgactccnagcttgccaacaaggccgaccctcgcgtcgactctgaccgctacgctc

SEQ ID NO: 157428 - DNA, 5008 bp, Zea mays
  Clone ID: MRT4577_75152C.1
atggatcctaaggggaagggaattgtgatcaacgacaaggagaaggagtccttcgtcaacgagccaagggatgacaagtccaatgactcgggctcgggccacaagcgaagagatgggaagaagaagaagacaagacgcatcaaggagatcgtctactacgacagcgatgagtcctcttcttcccaaaaggacgacgaccacgacaaacaaaggaaaccggttaattctaacttttcttttgactactctcgtattccgcaaagttcaaattcacatttgctttccattccactcggcaagcccccacactttgatggggaggactacggattttggagccacaaaatgcgtagtcacctattctctctccatcctagcatatgggagattgtagatagtggaatgcactttaatagttcggatagtcctatattcattaatgagcaaatccataagaatgcacaagctactactgttcttctagcctcattgtgcagggatgaatataataaagtgagtggcttggataacgccaagcaaatctgggataccctcaagatctctcatgagggaaatgacgctaccttgctcaccaaaatggagttggtggagggcgagcttggacggttcgcgatgataaggggcgaggagccaactcagacatacaaccggctcaagacccttatcaacaaaataaggagctacggaagcacgcgatggacggaccacgacgtcgtccgactaatgctcaggtcctttaccgttcttgatcctcatttggtgaataatattcgtgagaatcccaggtacaccaaaatgtcgcccgaagaagtcctaggaaaatttgtcagcgggcgaatgatgatcaaggaggcaaggtatgtggacgacgccttgaatggaccgatcaacgagccgcaaccttttgctctcaaagccacagggaacaaggaggcgctacccagcaaggtggcgcaaattgaggcggccggtcttaatgaagaagaaatgaccctcattatcaagagattcaagacggtgctaaaaggtcgcaatggacagccgagcaagactaagaccaaggggaagcgatcatgcttcaaatgcggtaagcttggtcattttattgctaactgtcccgataatgatagtgaccaggaaaagggaaacaagagggaaaagaagaagcattacaagaaggcaaagggcgaggcgcatctaggcaaggagtgggactcggattgctcctcgtccgactccgacaatgaaggactcgccgccaccgccttcgacaaatcaaccctcttccccaacgagcgtcacacatgccttatggcaagggagaagaaggtatgtactcgcaactctacctatgcttcttcaagtgaggacgaatctagtgatgaggatgaagtagattattcatgtttgttcaagggcttagatagatctaagatagacaaaattaatgaattaattgatgccttgaatgaaaagaatatacttttagaaaagcaagaggatttgttgtatgaagagcatgataaatttgttgaggcacaaaaatcctatgctttagaagttaagagaaataaaatgctttcttttgaactatctacttgtcatgaaaccatttctactttgaaaggtgtcaacaatgatttaaatgctaaattagaagtagcaaataaatccaattcttgtgtagaacatgttgaaatttgtactaggtgtaaagattttgacattaatgcttgtagtgaacacctagtttcaatttccaagcttaatgatgaactggctagtcttaatgctcaacttaagactagcaagaatgatttcgataagctaaaatttgcaagggatgcctacacaattggtagacacccctcaattaaggatggacttggcttcaagagagaagctaagaacttaacaagccataaggctcccattcccgccaaggagaaagggaaaggcccctatggctagtaatgtgcaaaagaaccatgcttttatgtattatgataggagacaaactagaaatgcttataggagttataatgcttttgatgattttgactctcatgccatgtttgctcctagttcctcttatgtgtatgatagaaatgttactaggagaaatgttgttcctaagagaaatactattcatcatgtgtctagaaagaatgctattcatgctcctaggaaagtagtgaatgaaccttccacaatttattatgctttaaatgcttcctttgctatttgtagaaaggataagaaaattgttgctaggaagttaggggcaaaatgcaagggagacaaaacttgcatttgggtccctaaggatatttgcactaaccttgtaggacccaacatgagttgggtttatgcatccgggggttcaagctggattattgatagcggatgcacaaaccatatgacgggggagaagaagatgttcacctcctacgtcaagaataaggattcccaagattcaatcatattcggtgatgggaatcaaggcaaggataagtctgaaacccaaggaaccctcaagcgcttcctcaggagagctcaaaatgagtttgagctcaaggtgaagaagataaggagcgacaacgggtccgagttcaagaaccttcaagtggaggagttccttgaagaggaagggatcaagcacgagttctccgctccctacacaccacagcaaaatggtgtggtagagaggaagaacaggacgctcatcgacatggcgaggacgatgctaggagagttcaagacccccgagtgcttttggacggaagccgtgaacacggcttgccacgccatcaacagggtctaccttcatcgcctcctcaagaagacgtcgtatgagctgctaaccggtaacaaacccaatgtatcttactttcgtgtatttgggagcaagtgctacattctagtgaagaaaggtagaaattctaagtttgctcccaaagctgtagaagggtttttattaggttatgactcaaatacaaaggcgtatagagtcttcaacaaatcatcgggtttggttgaagtctctagcgacgttgtatttgatgagactaatggctctccaagagagcaagtttttgattgtgatgatatagatgaagaagatgttccgacggctgctatacgaactatggcgattggagaagtgcggccacaggaacaagatgagcaagatcaaccctcttcctcaattatggtgcatccctctactcaagacgatgaacaggttcatcaaaaggaggcgtgtgatcaagggggagcacaagatgatcacgtgatggaggaagaagcgcaaccggcacctccaacccaagttcgagcgacgatccaaagggatcatcccgtcgaccaaattctgggtgacattagcaagggagtaactactcgatctcgattagttaatttttgtgagcattactcctttgtctcttctattgagcctttcagggtagaagaggccttgctagatccggactgggtgttggccatgcaagaggagttaaacaacttcaagcgcaatgaagtttggacactggtgcctcgtccgaagcaaaatgttgtgggaaccaagtgggtgttccgcaacaaacaggacgagcacggggtggtgacgagaaacaaggctcgacttgtggcaaaaggttatgcccaagtcgcaggtttggatttcgaggagacctttgctcctgtggctaggctagagtcaattcgaatcttgctagcatatgccgctcaccattctttcaggttgtaccaaatggatgtgaagagcgctttcctcaacgggccaatcaaggaggaggtgtacgtggagcaaccccctggcttcgaggatgaacggtaccccgaccatgtgtgtaagctctctaaggcgctctatggacttaagcaagccccaagagcatggtatgaatgccttagagactttttacttgctaatgctttcagggttgggaaggccgatccaactcttttcactaagacatgtgatggtgatttgtttgtgtgccaaatttatgttgatgacataatatttggttctactaaccaaaagtcttgtgaagagtttagcagggtgatgacgcagaaattcgagatgtcgatgatgggcgagttgaactacttccttgggttccaagtgaagcaactcaaggacggcaccttcatctcccaaacgaagtacacgcaagatctgctaaagcggtttgggatgaaggacgccaagcccgcaaagactccgatggggaccgacggacacaccgacctcaacaaaggaggtaagtccgttgatcaaaaagcataccggtcaatgataggttctttgctttatttatgtgctagtagaccggatattatgcttagcgtatgcatgtgtgctagatttcaatccgatcctaaggagtgtcacttagtggcggtgaagcgaattcttagatatttggttgctacgccttgcttcgggctctggtatccaaaggggtctacctttgacttagttggatactcagactccgactatgctggatgtaaagtcgataggaagagtacatcggggacgtgccaattcttaggaaggtccctggtgtcatggaactctaagaaacaaacttccgttgccctatccaccgctgaggccgagtatgttgccgcaggacagtgttgcgcgcaactactttggatgaggcaaaccctcagggactttggctacaatctgagcaaagtcccactcctatgtgataatgagagtgctatccgcatggcggaaaatcctgttgaacacagccgcacaaagcacatagacatccggcatcactttttgagagaccaccagcaaaagggagatatcgaagtgtttcatgttagcaccgagaaccagctagccgatatcttcactaagcctctagatgagaagaccttttgcaggttgcgtagtgagctaaatgtcttagattcgcggaacctggattga

SEQ ID NO: 157429 - DNA, 921 bp, Zea mays
  Clone ID: MRT4577_75153C.1
caaaagtcttgtgaagaatttagcagggtgatgacgcacaaatttgagatgtcgatgatgggcgagttgacctacttccttgggttccaagtgaagcaactcaaggacggcaccttcatctcccaaacgaagtacacacaagatttgctaaagaggtttgggatgaaggacgccaagcccgcaaagactccgatggggaccgacggacacaccgacctcaacaaaggaggtaagtccgttgatcaaaaggcataccggtcaatgatagggtctttactttatttatgtgctagtagaccggatattatgcttagcgtatgcatgtgtgctagatttcaatccgatcctaaggagtgtcacttagtggcagtgaagcgaattcttagatatttagtcgctacgccttgcttcgggatctggtatcctaaggggtctaactttgacttaattggatactcagattccgactatgctggatgtaaggtcgataggaagagtacatcagggacgtgccaattcttaggaaggtccctggtgtcgtggagttctaagaaacaaacctccgttgccctacccaccgctgaggtcgagtacgttgccgcaggacagtgttgcgcgcaactactttggatgaggcaaaccctccgggactttggctacaatctgagcaaagtcccactcctatgtgataatgagagtgctatccgcatggcggataatcctgttgaacacagccgcaccaagcacatagacatccggcatcactttttgagagaccaccagcaaaagggagatatcgaagtgtttcatgttagcaccgagaaccagctagccgatatctttaccaagcctctagatgagtcgaccttttgcaggctgcgaagtgagctaaatgtcctagattcgcggaacttggattga

SEQ ID NO: 157430 - DNA, 294 bp, Zea mays
  Clone ID: MRT4577_75154C.1
aacatgcttactgttctatagtccaacctaaatacgagtcactggaagcagctttacaacatcgctactcgtaaatccctccccccacctcaacttaataacattgcatcacattccccttttgccaactggcctcctaccgaaatcccccagtctgataacacttctcaacatttgatcaggatgaatgcctaatagaacccgccctgtaacatcgcactaaactcgaaaactgttttgcttactcacagccataccgttactgtcgtcaacgacgttgctcccgcatacttt

SEQ ID NO: 157431 - DNA, 1288 bp, Zea mays
  Clone ID: MRT4577_75155C.1
cctcgaggccggccggtaccgtgtgacgctgtggatatctgacccactctcgtcgcacgcaacgcaagtagcaaagcaggacccatcctctcccatctctcggtctccccatcccaacccgccgccgccgccgcttctcccgtctccagcgcccacagcgccattgtatccgcggggcgagctgagtcaccaagctggtctagggcccatccatttggaaccctcgcgagaagcaaagcgggcggagcgccagcgttcttagatcgattgctcgccaggctgttggcgaggagtcgtcaaccctcacggcagccatgtctgtggagctcatcctgtggcttttctccttcgtctccgtcatggtcctcatcggcctcaccgcataccagcttatctgtctgtcagatttggagtatgattatatcaacccatatgattcatcgtctcgcatcaacgctgtggtgctgatagaatactcactccaaggggccctgtgtgcttctttcctcttgacattgcattggttcccgtttctagtcatgacaccagtaacatactaccatgtcaaactgtatttggctcggaaacatcttgtagatgtcactgaaatttttagacaattaagtgacgagaagaagtacaggatgatcaagcttgccttctacttctgcctatttattataactatttacaggcttgtaatgacagctgtgatgttgtttattgatgaggacataaatttggcagaaactaggagtatctagacttcgccaccaacttgtcatggggatggagcagagttgtagcttgaaccagggagaccacaactcaatgccttgacttagttgtgagaaacaagatcagtttgtgccctgtagctggaggagctaacctggtactccttttaccctaaatcgtaagttgttttagttttttctagatgcatagcttttacgatgtatcctccagatgcatagtaaaagttatatatttagaaaaaacagaacaacttataatttggaatggagtattcatttcatccatcagattgtgatgtacaatgaattcccatagtttggtccatcggtaccatgtttgtaaattgggcagtcaatgatgtgcatcactgcaggatgaacgcacgtttggtaattgttgtgcaattctttgtacttgtggacaagtgctgtattctacacattgtttgcatacagacgatgtgtggttggtgtcataatttaccactaaacctttggtaaaaaaaaaaaaaaaaaaaaaaaactcgtgc

SEQ ID NO: 157432 - DNA, 4881 bp, Zea mays
  Clone ID: MRT4577_75156C.1
atggatcctaaggggaagggaattgtgatcaacgacaaagagaaggaatccttcgtcaacgagccgaaggatgacaagcctaccgactccggctcggggcatagacggaaggaagggaagaagaagaagacaaggcgcatcaaggagatcatctactacgacgatagtgatgagtctacttcttcccaaaaggatgatgacaacgactacaaaaagacggtcaattcgaacttttcatttgattattctcgtattcaacatagttcgaattcgcatttgctttccattcctcttggcaaacctccacacttcgatggggaggactacggattttggagtcacaaaatgcgtagtcacctattctctctccatccaagcatatgggagattgtggagaatggaatgaaatttgatagctcggatagccctatgcttataaatgaacaaattcatagaaatgcacaagctactactgttctcttagcgtctttgtgcagggaagagtacaataaggtgagtggcttggacaatgccaagcagatatgggacaccctcaagatctctcacgaggggaacgacatcaccatgctcaccaagatggagttggtggagggcgagcttggacgattcgccatgataaggggagaggagccaactcaaacgtacaaccggctcaagactcttatcaacaaaataaggagctacggaagcacacgttggacggatcacgacgtcgtccgcctaatgctcaggtcctttactgttcttgaccctcatctcgtgaacaatattcgtgagaatcccaggtacacgatgatgacgcccgaggaagtacttggaaaattcgtgagcgggcggatgatgatcaaggaggcgagatacgtcgacgacgcgttgaacggtccactccacgagcctcaacccattgctctaaaggcaacgaggagcaaggagtcgctacctagcaaggtggcacaagttgaggcagccgggctcaatgatgaagagatggctctcatcataaaaagattcaagacggcgctaaaaggtcgaaagggacaaccaagcaaggccaaaaccaagggaaagcgatcatgcttcaaatgcggtaagcttggtcattttattgctaactgtcctgaaaatgatagtgaccaggagcaagggaaaaatgggaagagagagaacaagaaggtttacaagaaggccaaaggcgaagcacaccttggaaaggagtgggattcggattgctcttcgtccgactccgacgacgaaggacttgccgccactgccttcaacaaatcggctctcttccccaacgagcatcacacttgcctcatggcaagggaaaagaaggtaatcactcgtaatgctaatacttatgattcttctagtgatgatgaatctagtgaggatgagattgattactctagtttattcaagggattggatagaactaagatagctaagattaatgagttgattgatgccttaaatgaaaaggatagaatcttagagaaacaagaagaccttttgtatgaagaacatgataaatttgttagtgcacaaaattcacttgctctagaagttaaaagaaatggaatactttcttgtgaactttctacttgcaatgaaaccatttcttctttaaaaggtgaaattaatgttttaactactaaactagaagtagcaagtaactcttgtgttgaaaatattacaatttgcactaggtgtaaggattttgatgttaatgcttgtagtgaacacttagtttcaatttcaaaactaaatgatgaaatggctagtcttaatgctcaacttaagactagcaagagtgaagttgataaaataaaatttgcaagggatgcctacacgattggtagacacccctcaattaaggatggtcttggcttcaagagagaggccaagaacttaacaagccataaggctcccatcttcgtcaaggagaaagggaaggcccctatggctaatagtgctaaaaggaaccatgctttcttgtaccatgataggagacatgctagaaatgcttataatgattctgattcacatgtttatgattctcatgccatgtttgcttctagttcttcctataagcatgatagagatatgtgtaggagaaatgttgtgcatatgcctaggagaaattttgctcatgttcctagaaaagttgtgaacaaaccttctaccatttattatgcttgcaatgctccctttgctatttgtagaaagggtaagaaggtttatgcatccgggggatcaagctggattatcgacagcggatgcacaaaccatatgacgggggagaagaagatgttcacttcctacgtcaagaataaggattcccaggattcaattatattcggtgatgggaatcaaggcaaggataagtctgaaacccaagggaccctcaagcgcttcctcaggagagctcaaaatgagtttgagctcaaagtgaagaagataaggagcgacaacgggtccgaattcaagaatcttcaagtggaggaattccttgaggaggaagggatcaagcacgagttctccgctccctacacaccacagcaaaatggtgtggtagagaggaagaacaggacgctaatcgatatggcaaggacaatgcttggagaattcaagacccccgagtatttctggtcggaagccgtgaacacggcttgccacgccatcaacagggtctaccttcatcgcctcctcaagaagacttcgtatgagcttctaaccggtaacaaacccaatgtatcttactttcgtgtatttgggagcaagtgctacattctagtgaagaaaggtagaaattctaagtttgctcccaaagctgtagaagggtttttgttaggttatgactcaaatacaaaggcgtatagagtcttcaacaaatcatcgggtttggttgaagtctctagcgacgttgtatttgatgagactaatggctctccaagagagcaagttgttgattgtgatgatgtagatgaagaagatgttccgacggccgctatacgaaccatggcgattggagaagtacgaccacaggaacaagatgaacgagatcaaccttcttcctcaactatggtgcatcccccaaccgaagatgacgaacaggtacctcaagtggaggcgcttgatcaagggggagcacaagatgatcaagtgatggaggaagaagcgcaaccagcacctccaacccaagttcgagcgatgattcaaagggatcatcccgttgaccaaattctgggtgatattagcaagggagtaactactcgatctcaattagttaatttttgcgagcattactcctttgtctcttctattgagcctttcagggtagaggaggccttgctagatccggactgggtgttggccatgcaggaggagctcaacaacttcaagagaaatgaagtttggacgctggtgcctcgtccgaagcaaaatgttgtgggaaccaagtgggtgttccgcaacaaacaggacgaacacggggtggtgacgagaaacaaggctcgacttgtggcaaaaggttatgcccaagtcgcaggtttggatttcgaggagacttttgctcctgtggctaggctagagtctattcgtatcctgctagcatatgccgctcaccattctttcaggctgttccaaatggatgtgaagagcgctttcctcaacgggccgatcaaggaggaggtgtacgtggagcaaccccctggcttcgaggatgaacggtaccccaaccacgtgtgtaagctctctaaggcactctatggacttaagcaagccccaagagcatggtatgaatgccttagagactttctaattgctaatgctttcaaggttgggaaagccgatccaactctttttactaagacatgtgatggtgatttgtttgtgtgccaaatttatgtcgatgacataatatttggttctactaaccaaaagtcttgtgaagagtttagcagggtgatgacgcagaaatttgagatgtcgatgatgggcgagttgaactacttccttgggttccaagtgaagcaactcaaggacggcaacttcatctcccaaacgaagtacacgcacgatctgctaaagcggtttgggatgaaggacgccaaacccgcaaagactccgatggggaccgacggacacaccgacctcaacaaaggaggtaagtccgttgatcaaaaagcataccggtcaatgataggttctttgctttacttatgtgctagtagaccggatattatgcttagcgtatgcatgtgtgctagatgtcaatccgattctaaggagtgtcacttagtggcagtaaagcgaattcttagatatttggttgctacgccttgcctcgggctctggtatccaaaggggtctacctttgacttagttggatactcagactccgactatgctggatgtaaggtcgataggaagagtacatcagggacgtgccaattcttaggaaggtccctggtgtcatggaactctaagaaacaaacctccgttgccctatccaccgctgaggccgagtacgttgccgcaggtcagtgttgcgcgcaactactttggatgaggcaaaccctccgggactttggctacaatctgagcaaagtcccactcctatgtgacaatgagagtgctatccgcatggcggaaaatcctgttgagcacagccgcacaaagcacatagacatccggcatcactttttgagagaccaccagcaaaagggagatatcgaagtgtttcatgttagcaccgagaaccagctagccgatatcttcactaagcctctagatgagaagaccttttgcaggttgcgtagtgagctaaatgtcttagattcgcggaacttggattga

SEQ ID NO: 157433 - DNA, 195 bp, Zea mays
  Clone ID: MRT4577_75157C.1
ggattccaagcagcaccggaaggtgttgccgaactgctccagagcatcactatcccagcgatccgtagggtgaccaggaagggcggcgccaagtgcatttagtgagctcatatacgaggagaccggcggaggagctcaagatcttcctggagaacagcgaccaggaccccgtcccctacaccgtagtatcgatcc

SEQ ID NO: 157434 - DNA, 438 bp, Zea mays
  Clone ID: MRT4577_75158C.1
ggaggagttcgggttccagcaggagggcgtgctccgcatcctctgcgaggtccccgttttccgagtccaccctcagggctcgtggacgatgaacaagcaaggacgcgcgcctgctcctgttactggagcagcgaaacgccgccgcgaggtctggcggcggactcccaacaaccttctctgtagcattggttgagcgcgaggacataacataactggattgtttctgttggttttactgccaatattttatcgctctatgtgacgtggtgtggcgagggattgagtccatagcctgtcctcgcgctgatacaataactgttgcaattatctctctatctgctgaacctaactgatattgactgggtaatggatccgtctgggatggctcgaattatggcaaaattgatgtagtaacgaagggtgttacgtgtactgtcg

SEQ ID NO: 157435 - DNA, 167 bp, Zea mays
  Clone ID: MRT4577_75159C.1
gcgaagtggatactctagccggcgagctttgctcccggctgtaatatataggaatgtgtagtctcttgaccttagtgtattttctctgggttatagggttcttgtaaagttaccacatgtacttttgcccttttagaccctatggaatagtaaacttactattttct

SEQ ID NO: 157436 - DNA, 752 bp, Zea mays
  Clone ID: MRT4577_7515C.1
ggattgcctcgaggaccaaaaggcagaagaaagaccagccataccacacgaccgcagaggagtagcaagagcccgggggagaaatgagcgcggcggcgggcgggctgcggcggctgctggcggcggcggcaacggcgggagccgcggaggtgcgggcgtccatcttcggccacgcgctgaaccctacggggaggcgcgcggcgacgaagctcctgcggaagaaaatggtcggcgaccaggtggcgcagtggtacccctacgacatcaagcgcgacgacccgctcgtcatggcgcgcgaggagaaggagcgtctggctaaactggaaatgctgaagcgtcgtggcaagggcccgccgaagaagggtcagggaaggcgtgccgtcaagaggagcaagtagtcgagctgtgctacctatcaatgctcatctctgtttctggagcttgccttgttcttacatgctgtaacgtactacactactaccagtgatttgtcgggtgagtgggcgacgatagatgcaaaaaaaaaaaaaccgccttttctatcaagtttagcttacagatgttttttcctcttcaaattgcaatgaaaccgccttctatgttggatggctgatgtgcttacagtagagttcatgatgctgacacctaattaagtaccggctacagtgtttcggtgataatttccaggatggaccaggtgcctttcggtccgtcaagattaggatgaaataaattcgggatctgaattaatc

SEQ ID NO: 157437 - DNA, 726 bp, Zea mays
  Clone ID: MRT4577_75160C.1
cctcgaggccggcccggccgggatatctgacccactctcgtcgcacgcaacgcaagtagcaaagcaggacccatcctctcccatctctcggtctccccatcccaacccgccgccgccgccgccgccgccgccgcttctcccgtctccagcgcccacagcgccattgtatccgcggggcgagctgagtcaccaagctggtctagggcccatccatttggaaccctcgcgagaagcaaagcggacggagcgccagcgttcttagatcgattgctcgccaggctgttggcgaggagtcgtcaaccctcacggcagccatgtctgtggagctcatcctgtggcttttctccttcgtctccgtcatggtcctcatcggcctcaccgcataccaggtatttggctcggaaacatcttgtagatgtcactgaaatttttagacaattaagtgacgagaagaagtacaggatgatcaagcttgccttctacttctgcctatttattataactatttacaggcttgtaatgacagctgtgatgttgtttattgatgaggacataaatttggcagaaactaggagtatctagacttcgccaccaacttgtcatggggatggagcagagttgtagcttgaaccagggagaccacaactcactgccttgacttagttgggacaaaccagatcagtttgtgccctgaagctggacgagctaaactgccactccttttac

SEQ ID NO: 157438 - DNA, 535 bp, Zea mays
  Clone ID: MRT4577_75161C.1
agcagtggtaccaacgcagagtacttttttttttttttttttttttttttgggaaagccgatccaactctcttcacttagacttgcgatggtgatctttttgtgtgccaaatttatgtcgatgacataatatttggttctactaatcaaaagtcttgtgaagagtttagcagggtaatgacgcagaaattcgagatgtcaatgatgggcgagttgaaccacttccttgggttccaagtgaagcaactcaaggacggcaccttcatctcccaaacgaagtacacgcaagacttgctaaagcggtttgggatgaaggacgccaagcccgtaaagactccgatgggaaccgacggacacaccgacctcaacaaaggaggtaagtccgttgatcaaaaagcataccggtcaatgataggttctttgctttacttatgtgctagtagatcggatattatgcttagcgtatgcatgtgtgctagatttcaatccaatcctaaggagtgtcaccccgcgtactctgcgttgttaccactgct

SEQ ID NO: 157439 - DNA, 2027 bp, Zea mays
  Clone ID: MRT4577_75162C.1
ttgtctggtcctggagcaattccttctctgaaaatgggagaatattgatcatggtattaacaaatgggagaaggtagtgcacctgttctagtattatacctgtccagattttgtaggcctcactaccaaaatttgttagctatttaacttttattattgctggaatatgacaactctgaatcatgctatgtgcactttatttgctgagatatatatattttttatttttactagtatgtgctagagaagaaccataagtaatatttttgttgtaattatttagtattcagcagttcagcatgaactgttgattccacatatagttggcttaacaatgattaatgaaagtggttcttagtttgttctggtagggtacagctataatttagctggactattctctgggtgacaactgattttagtccatcagatatgagcaagcacccaattttttattgttacatgtggaaagaaaatctcccttgaccctgttcttgaaattttacagtcatgacaatagtttctaagcactctgcttgagttttcagttgatttagagttcttttttccactgttgaggattaagtataatgccccctggcattggaactagttttgatctcatgaactagtgaacttattttggtgggatatctgagatgcttttctaaatttaatttttgccaggctttaatatctgaatgaatatgaactagttttttttattcaggtatttggctcggaaacatcttgtagatgtcactgaaatttttagacaattaagtgacgagaagaagtacaggatgatcaagcttgccttctacttctgcctatttattataactatttacaggtttgacttaggttatatcttaattaatatttgagggaatcggaatacaatatgcattcatttgctagtgctaaatgatatcagttattaaaaaacatctaggacattatgaaaccatgataaatggccatgtctccataccgttccttccatgttgtaagaacagaaatttctttatattaatgtttttattctgtaagtcaacttagttttctcattggaaaatattctgaagtctacacacttgttggtggtttgaagagagtactgaagggttagtgagaatatgacttgggaaatcaaatatggtgttgtcttcactctgtcttcaagcatacaaacaaccatgagcaatattattcagtattataggcgtggccttagatatacctaccttactgattttggtagtggcagattaattgtttgcatatgctgttacttattttggaatttgttctagcaagtagttccctgccagctaagaacaatatgttgcataatctaactgctcgcattttctattgaatttaacaggcttgtaatgacagctgtgatgttgtttattgatgaggacataaatttggcagaaactaggagtatctagacttcgccaccaacttgtcatggggatggagcaggtactcagccacgttttgttactggcaaatgcatatgaaaatgtttatggtataatgggttgaagttgtcgtgttgcagagttgtagcttgaaccagggagaccacaactcaatgccttgacttagttgtgagaaacaagatcagtttgtgccctgtagctggaggagctaacctggtactccttttaccctaaatcgtaagttgttttagttttttctagatgcatagcttttacgatgtatcctccagatgcatagtaaaagttatatatttagaaaaaacagaacaacttataatttggaatggagtattcatttcatccatcagattgtgatgtacaatgaattcccatagtttggtccatcggtaccatgtttgtaaattgggcagtcaatgatgtgcatcactgcaggatgaacgcacgtttggtaattgttgtgcaattctttgtacttgtggacaagtgctgtattctacacattgtttgcataaaataaaaatgaggtttttttttttttttttggacggggtt

SEQ ID NO: 157440 - DNA, 4995 bp, Zea mays
  Clone ID: MRT4577_75163C.1
atggatcctaaggggaagggaatcgtgatcaatgacaaggagaaggagtccttcgtcaacgagccgaaggatgacaagactactgactcgggctcaggccacaagtgcaaagacgggaagaaaaagaagacaaggcgcatcaaggagatcgtctactacgacgatagcgatgagtctacctcttcccaaaaggacgacgacaatgactacaggaagacggtcaattcgaacttttcatttgattattctcgtattccacatagttcgaattcgcatttgctttccattcctcttggcaaacctccacacttcgatggggaagactacggattttggagtcacaaaatgcgtagtcacttattctctctccatccaagcatatgggagattgtagagaatggaatgaaatttgatagctcggatagccctatgcttataaatgaacaaatccatagaaatgcacaagctactactgttctattagcatctttgtgcagggaagagtacaataaggtgagcggcttggacaacgccaagcagatatgggacaccctcaaaatctctcacgaggggaatgacatcaccatgctcactaaaatggagttggtggagggcgagcttggacgattcgcaatgataaggggagaagagccaacccaaacttacaacaggctgaagacccttatcaacaaaataaggagctacggaagcacgcgatggacagaccacgacgtcgtccgcctaatgctaaggtcatttaccgttcttgatcctcatttggtgaacaatattcgtgaaaatcctaggtacaccaagatgtcgcccgaagaagttcttggaaaatttgtaagcgggcgaatgatgatcaaggaggcaaggtacgtggacgacgcattgaatggtccaatccatgagcctcaacccattgctctcaaggcaacaaggagcaaggaggcgctaccaagcaaggtggcgcaagttgaggcggccgggctaaataatgaggagatggccctcatcattaagcgcttcaagacggcgcttaaaggtcgcaagggacagccaagcaagaccaagacaaaggagaagcgctcatgcttcaaatgcggtaagcttggtcattttattgctaactgtcccgataatgaaagtgaccaggaacaagggagcaagagggagaagaagaaggcatacaagaaggcaaagggcgaggcacatctaggcaaggagtgggattcagattgctcctcctccgactccgacaatgaaggactcgccgccactgccttcaacaagtcatccctcttccccaacgagcatcacacatgccttatggcaagggagaagaaggtgagtactcaagactccacttatgcttcctctagtgataatgagtctagtgatgatgatgacatagattattcatgcttgttcaagggcttagatagatctaagatagataaaattaatgagttgattgatgctttgaatgataagaatagattactagaaaaacaagaggatcttttatatgaggagcatgataaatttgttagtgcacaaaattctcttgctctagaaattaaaagaaatgaagtgctttctagtgaattatcttcttgtcatgaaaccattgctactttaaaaggtgttaataatgatttaaatgctaaactagaagtggctagtaaatctaactcttgtgtagaacatgttatggtttgcactaggtgtaaagattttaatattgatgcttgtagtaaacacctagtttcaatttctaaattgaatgatgaagtggctagtcttaatgcccaacttaagactagcaagagtgattttgataaactaaaatttgcaagggatgcctacacaattggtagacacccctcaattaaggatgggcttggcttcaagagggaagtcaagaacttgacaagccataaggctcccattcccactaaggagaaagggaaggcccctatggctactagtgccaaaaagaaccatgccttcttgtatcatgataggaaaaattctagaaatgcttttagaagttatgatgtttttaattcacatgcttatgattcttatgccatgactgcttctagttcttcctatatgcatggtagaaatgtgactaggagaaatgctattcatcatgtgcctagaaagaatattattcatgctcctaggaaagtagtaaatgaaccttctacaatttattgtgctttaaatgcttcctttgctatttgtagaaaggataggaagatagttgctagaaaattaggggcaagatgcaagggagacaaaacttgcatttgggtccctaaggatatttgtgctaaccttgtaggacccaacatgagttgggtttatgcatccgggggttcaagctggattatcgacagcggatgcacaaaccatatgacgggggagaagaagatgttcacctcctacgtcaagaataaggattcccaagattcaataattttcggtgatgggaatcaaggcaaggataagtctgaaacccaagggaccctcaagcgcttcctcaggagagctcaaaatgagtttgagctcaaggtgaagaagataaggagcgacaacgggtccgagttcaagaaccttcaagtggaggagttccttgaggaggaagggatcaagcatgagttctctgctccctacacaccacagcaaaatggtgtggtagagaggaagaacaggacgctaatcgacatggcgaggactatgcttggagagttcaagacccccgagcgtttttggtcggaagccgtgaacacggcttgccacgccatcaacagggtctaccttcaccgcctcctcaagaagacgtcgtatgagcttctaaccggtaacaaacccaatgtatcttactttcgtgtatttgggagcaagtgctacattctagtgaagaagggtagaaattctaagtttactcccaaagctgtagaagggtttttattaggttatgactcaaatacaaaggcgtatagagtcttcaacaaatcatcgggtttggttgaagtctctagcgacgttgtatttgatgagactaatggctctccaagagagcaagttgttgattgtgatgatgtagatgaagaagatgttccaacggccgctatacgaaccatggcaattggagaagtgcggccacaggaacacgatgaacgagatcaaacatcttcctcaactatggtgctacccccaactcaagacgatgaacaggttcatcaacaggaggcgtgtgatcaagggggagcacaagatgatcgtgtgatggaggaagatgcgcaaccggcacctccaacccaagttcgagcgatgattcaaagggatcatcccgtcgaccaaattctgggtgatattagcaagggagtaactactcgatctcgattagttaatttttgtgagcattactcctttgtctcttctattgagcctttcagggtagaggaggccttgctagatccggattggatattggccatgcaggaggagctcaacaacttcaagcgcaatgaagtttggacactggtgcctcgtccgaagcaaaatgttgtgggaaccaagtgggtgttccgcaacaaacaggacgagcatggggtggtgacgaggaacaaggctcgacttgtggcaaaaggttatgcccaagtcgcaggtttggactttgaggagacatttgctcctgtggctaggctagaatcaattcgtattttgctagcatatgccgctcaccattctttcaggttgtaccaaatggatgtgaagagcgctttcctcaacgggccaatcaaggaggaggtgtacgtggagcaaccccctggcttcgaggatgaacggtaccccgactatgtgtgtaagctctctaaggcgctctatggacttaagcaagccccaagagcatggtatgaatgccttagagactttttaattgctaatgctttcaaggttgggaaagccgatccaactctttttacaaagacttgtgatggtgatttgtttgtgtgccaaatttatgtcgatgacataatatttggttctactaaccaaaagtcttgtgaagagtttagcagggtgatgacgcagaaattcgagatgtcgatgatgggcgagttgaactacttccttgggttccaagtgaagcaactcaaggacggcaccttcatctcccaaacgaagtacacgcaagatctgctaaagcggtttgggatgaaggacgccaagcccgcaaagactccgatggggaccgacggacacaccgacctcaacaaaggaggtaagtccgttgatcaaaaagcataccggtcaatgataggttctttgctttacttatgtgctagtagaccggatattatgcttagcgtatgcatgtgtgctagatttcaatccaatcctaaggagtgtcacttagtggcggtaaagcgaattcttagatatttggttgctacgccttgcttcgggctctggtatccaaaggggtctacttttgacttagttggatactcagactccgactatgctggatgtaaggtcgataggaagagtacatcggggacgtgccaattcttaggaaggtccctggtgtcatggaactctaagaaacaaacctccgttgccctatccaccgctgaggccgagtacgttgccgcaggtcagtgttgcgcgcaactactttggatgaggcaaaccctccgggactttggctacaatctgagcaaagtcccactcctatgtgacaatgagagtgctatccgcatggcggaaaatcctgttgaacacagccgcacaaagcacatagacatccggcatcactttttgagagaccaccagcaaaagggggatatcgaagtgtttcatgttagcaccgagaaccagctagccgatatctttaccaagcctctagatgagaagaccttttgcaggctgcgtagtgagctaaatgtcttagattcgcggaacttggattga

SEQ ID NO: 157441 - DNA, 2074 bp, Zea mays
  Clone ID: MRT4577_75164C.1
tttattttattttttttttttaccaaaggtttagtggtaaattttgacaccaaccacacattgtctgtatgcaaacaatgtgtagaatacagcacttgtccacaagtacaaagaattgcacaacaattaccaaacgtgcgttcatcctgcagtgatgcacatcattgactgcccaatttacaaacatggtaccgatggaccaaactatgggaattcattgtacatcacaatctgatggatgaaatgaatactccattccaaattataagttgttctgttttttctaaatatataacttttactatgcatctggaggatacatcgtaaaagctatgcatctagaaaaaactaaaacaacttacgatttagggtaaaaggagtaccaggttagctcctccagctacagggcacaaactgatcttgtttctcacaactaagtcaaggcattgagttgtggtctccctggttcaagctacaactctgctccatccccatgacaagttggtggcgaagtctagatactcctagtttctgccaaatttatgtcctcatcaataaacaacatcacagctgtcattacaagcctgtaaatagttataataaataggcagaagtagaaggcaagcttgatcatcctgtacttcttctcgtcacttaattgtctaaaaatttcagtgacatctacaagatgtttccgagccaacaagtaccaagaacagggtcaagggagattttcacatgttaaaaaattgggtgccatatctgatggactaaaatcagttgtcacccagagaatagtccagctaaattatagctgtaccctaccagaacaaactaagaaccactttcattaatcatttttaagccaactatatgtggaatcaacagttcatgctgaactgctgaatactaaataacaaacacaaaaatattactcatggttcttctctagcaaatactaattaaactaaaaaatatatatatctcagcaaataaagtgctcatagtacatttcagagttgtcattttccagcaaaaataaaagttaaatagaaattatattttggtagtgggcctacaaaatctggacaggtataatactagaacaggtgcactaccttctcccatttgttaaaaccatgatcaatattctcccattttcagagaaggaattgctccaggaccagacaatacggcacggcccaaactaatctgataactccaaattaaggcatagaatcgtgacatccctggctctaactactaaaatacatatttcttacttagctgtttcattgagccattgagagttgtagatcattttaaatattatttaaagatgtgaatacagccaaaagtatgaacagcatgatatccaatgctgaatatcatgagtattctgccagaattaacatcaacccaaagcaagtaatacatacagtttgacatggtagtatgttactggtgtcatgactagaaacgggaaccaatgcaatgtcaagaggaaagaagcacacagggccccttggagtgagtattctatcagcaccacagcgttgatgcgagacgatgaatcatatgggttgatataatcatactccaaatctgacagacagataagctggtatgcggtgaggccgatgaggaccatgacggagacgaaggagaaaagccacaggatgagctccacagacatggctgccgtgagggttgacgactcctcgccaacagcctggcgagcaatcgatctaagaacgctggcgctccgtccgctttgcttctcgcgagggttccaaatggatgggccctagaccagcttggtgactcagctcgccccgcggatacaatggcgctgtgggcgctggagacgggagaagcggcggcggcggcggcgggttgggatggggagaccgagagatgggagaggatgggtcctgctttgctacttgcgttgcgtgcgacgagagtgggtcagatatccacagcgtcacacggtacactgctgtatgctgcactgcatgccattcgaaggcagtacaaacgacagttcactcctgacttttggacctttttt

SEQ ID NO: 157442 - DNA, 4992 bp, Zea mays
  Clone ID: MRT4577_75165C.1
atggatcctaaggggaagggaatcgtgatcaacgacaaggagaaggagtccttcgtcaacgagccaaaagatgacaagtccaacgactcgggctcgggccacagacgcaaagatgggaagaaaaagaagacaagacgcatcaaggagattgtctactacgacgacagcgatgagtccacttcctcccaaaaggacgacgtccacaacgactacgagagaaggaaaccggtcaattcgaacttttcttttgactactctcgtattcctcaaagtactaatgctcatttattatctattccacttggtaaacttcctcattttgatggagaggactacggattttggagtcacaaaatgcgtagtcacttgttctctctccatcctagcatatgggagattgtagaaaatggaatgcactttgatagtacggatagtcccatgtttattaatgaacagattcataaaaatgcacaagctactactgtgttgctagcctctttgtgcagggacgagtaccataaggtgagcggtttggacaatgccaagcagatctgggacaccctcaagatctctcatgaggggaatgatgtcaccttgctcaccaagatggagttggtggagggcgagcttggacggttcgcaatgataaggggcgaggagccaactcaaacatacaaccggctcaagacccttatcaacaaaataaggagctacggaagcacgcgatggacggatcacgacgtcgtccgcctaatgctaaggtcctttactgttcttgatcctcatttggtgaacaatattcgtgaaaatcctaggtacaccaagatgtcgcccgaagaagttctggggaagttcgtaagcgggcgaatgatgatcaaggaggcaagatatgtggacgacgcgttgaacggtcctattcatgagcctcaacccattgctctcaaggcaacgaggagcaaggaggcgctaccgagcaaggtggcgcaagttgaggcggccgggctaaataatgaggagatggccctcattattaagcgcttcaagacggcgcttaaaggacgcaagggacagccaagcaagaccaagacaaaggagaagcgctcgtgcttcaaatgtggtaagattggtcatttcattgctaactgtcccgataatgaaagtgaccaggaaaaggggaacaaaagggagaagaagaagcattacaagaaggccaagggcgaggcacatatcggaaaggagtgggattcagattgctcctcctccgactccgacaatgaaggactcgccgccaccgccttcaacaagtcatccctcttccccaacgaacgtcacacttgcctcatggcaagggagaagaaagtaagcactcataatactagtacttatgcttcttcaagtgaggatgagtctagtgatgatgatgagatagattactcatgcttattcaagggattagatagatctaaaattaataagatcaatgagttgattgatgccttgaatgacaagaatagattactagaaaaacaagaggatcttttatatgaggagcatgataaatttgttagtgcacaaaattctattgctctagaaattaaaaggaatgaaatgctctctggtgaattatctacttgtcatgaaaccatttctactttacaaggtgttaacaatgatttaaatgctaaattagaagtagcaaataaatctaattcttgtgtagaacatgttataatttgtactaggtgtaaagattttgacattgatgcttgtagtgaacacctagtttcaatttccaaacttaatgatgaattggatagtcttaatgctcaacttaagactagcaagaatgatttcgataagctaaaatttgcaagggatgcctacacgattggtagacacccctcaattaaggatggacttggtttcaagagggaagccaagaacttaacaagccataaggctcccatctccgccaaggagaaagggaaggcccctatggcaagtagtactaaaaggaatcatgcttttatgtatcatgataggagacaaactagaaatgcttataggaattataatgcttttgactctcatgccatgtttgcttctagttcttcctatatgcatggtagaaatatgtctaggagaaatgctattcatcatgtgcctagaaagaatatcattcatgctcctaggaaagtagtgaatgaaccttctacaatttattgtgctttaaatgcttcctttgctatttatagaaaggataggaaaatagttgctaggaaattaggggcaaaatgcaagggagacaaaacttgcatttgggtccctaaagatatttgcactaaccttgtaggacccaacatgagttgggtttatgcatccgggggttcaagctggattatcgacagcggatgcacaaaccatatgacgggggagaagaagatgttcacctcctacgtcaagaataaggattcccaagattcaattatattcggtgatgggaatcaaggcaaggataagtctgaaacccaagggaccctcaagcgcttcctcagtagagctcaaaatgagtttgagctcaaggtgaagaagataaggagcgacaacgggtccgagttcaagaaccttcaagtggaggagttccttgaggaggaagggatcaagcacgagttctccgctccctacacaccacagcaaaatggtgtggtagagaggaagaacaggacgctaatcgatatggcgaggacgatgcttggagaattcaagacccccgagcgtttttggtcggaagccgtgaacacggcttgtcacgccatcaacagggtctaccttcatcgcctcctcaagaagactttgtatgagctactaaccggtaacaaacccaatgtatcttactttcgtgtatttgggagtaaatgctacattctagtgaagaagggtagaaattctaaatttgctcccaaagctgtagaagggtttttgttaggttatgattcaaatacaaaggcgtatagggtcttcaacaaatcatcgggtttggttgaagtctctagcgacgttgtatttgatgagactaatggctctccaagagagcaagttgttgatcttgatgatatagatgaagaagatgttccaacggccgcgatacgcaccatgacgattggagatgtacggcctcgggaacaattggagcaagatcaaccgtcttcctcaactatggtgaatcccccaacccaagatgacgaacaagtacttcaagtggaggcgcatgatcaagggggagcacaagatgttcaagttgaagaggaagaagcacctcaggcacctccaacccaagttcgagcggtgattcaaagggatcatcccgtcgaccaaattttgggtgacattagcaagggagtaactactcgttcaagattagttaatttttgtgagcattactcctttatctcttctattgagcctttcagggtagaagaggccttgctagatccggactgggtgttggccatgcaggaggagctcaacaacttcaagagaaatgaagtttggacgctggtgcctcgtcctaagcaaaatgttgtgggaaccaagtgggtgttccgcaacaaacaagacgagcacggagtggtgacgaggaacaaggctcgacttgtggcaaaaggttatgcccaagtcgcaggtttggactttgaggagacttttgctcctgtggctaggctagagtccattcgtatcttgctagcatatgcctctcaccattctttcaggttgttccaaatggatgtaaagagcgctttcctcaacgggccaataaaggaggaggtgtacgtggagcaaccccctggcttcgaggatgaacggtaccccgaccacgtgtgtaagctctctaaggcgctctatggacttaagcaagccccaagagcatggtatgaatgccttagagatttcttaattgctaatgctttcaaggttgggaaagccgatccaactctttttactaagacttgtgatggagatttgtttgtgtgccaaatttatgtcgatgacataatatttggctctactaataaaaagtcttgtgaagagtttagcagggtgatgacgcagaaattcgagatgtcaatgatgggcgagttgaactacttccttgggttccaagtgaagcaactcaaggatggcaccttcatctctcaaacaaagtacacacaagacttgctaaagcgggttgggatgaaggacgccaagcccgcaaagactccaatgggaaccgacggacacaccgacctcaacaaaggaggtaagtccgttgatcaaaaagcataccggtcaatgataggatcgttactttacttatgtgctagtagaccggatattatgcttagcgtatgcatgtgtgctagatttcaatccgatcctaaggagtgtcacttagtggcggtgaagcgaattcttagatatttagttgctacgccttgcttcgggatctggtatccaaaggggtctacctttgacttaatcggatactcagattccgactatgctggatgtaaggtcgataggaagagtacatcggggacgtgccaattcttaggaaggtccctggtgtcatggaactctaagaaacaaacttccgttgccctatccaccgctgaggccgagtatgttgccgcaggacagtgttgcgcgcaactactttggatgaggcaaaccctcagggactttggctacaatctaagcaaagtcccactcctatgtgataatgagagtgctatccgcatggcggaaaatcctgttgagcacagccgcacaaagcacatagacatccggcatcactttctgagagatcaccagcaaaagggagatatcgaagtgtttcatgttagcaccgagaaccagctagccgatatctttaccaagcctctagatgagaagaccttttgcaggctgcgtagtgagctaaatgtcttagattcgcggaacttggattga

SEQ ID NO: 157443 - DNA, 4986 bp, Zea mays
  Clone ID: MRT4577_75166C.1
atggatcctaagggaaaggggatggtggtcgacaacaacgagaaggagtctatcttcaacgagccgaagaatgacaagtctaccgacttgggttcaagccacaagcgtaaagatgggaagaagaagaagacaaggcgcatcaaggagatcgtctactacgacagcgacgaatcctcttcttcccaaaaggacgacgaccacaacgactacgagaaaaggaaaccggttaattcgaacttttcttttgactactctcgtattccgcaaagttcaaattcgcatttgcttcccattccacttggcaagccccctcactttgatggagaggactacggattttggagccacaaaatgcgtactcacttgttctctctccatcctagcatatgggagattgtagagagtggaatgcaatttgatagctcggatagccctatgtttataaatgaacagattcataaaaatgcacaagctactactgtgttgctagcctctttgtgcagggacgagtacaataaagtgagcggcttggacaatgccaagcagatatgggacaccctaaagatttctcacgaagggaacgacatcaccatgctcactaaaatggagttggtggagggcgagcttggaaggtttgcgatgataaggggcgaggagccaactcaaacatacaaccggctcaagacccttatcaacaaaataaggagctatggaagcacgagatggacggaccatgacgtcgtccgactattactaaggtcctttaccattcttgatcctcatttggtgaataatattcgtgagaatcccaggtacaccaaaatgtcgcccgaagaagtcctaggaaaattcgtcagcgggcgaatgatgatcaaggaagcaaggtacgtggacgacgccttgaatggaccgatcaacgagccgcaaccttttgctctcaaagcaacaagaagcaaggaggcgctacctagcaaggtggcacaaattgaggcggccggacttaatgatgaagagatggctctcatcattaaacgcttcaagacggtactaaagggtcacaaggggcagccaagcaagaccaagacaaaggggaagcgctcatgcttcaagtgcggtaagattggtcattttatcgctaactgccccgataatgatagtgaccaggaacagggaaataagagggaaaagaagaagaattacaagaaggcaaagggcgaggcgcatctaggcaaggagtgggactcggactgctcctcttccgactccgacaatgaaggactcgccgccaccgccttcaacaaatcaaccctcttcccaaacgagcgtcacacatgccttatggcaagagagaagaaggtatgtactcggaactctacctatgcttcttcaagtgaggacgaatctagtgatgaggatgaagtagattactcgtgtttgtttaaaggcctagatagaaccaaggtagacaaaattaatgaattgattgatgccttgaatgagaagaacatacttttagaaaagcaagaggatttgttgtatgaagaacatgataaatttgtagaagctcaaagatctcatgctctagaagttaaaagaaatgaaatgctttcttgtgaattatcttcttgccatgatacaatttttaaattaagaagcattaatgatgatttgaatgctaagttagaaattgctagtaaatccacctcttgtatagaaaatgttgtaacgtgcactaggtgtaaagatattaacattgatgcctatagtgaacacctagcttgcatttctaaattaaacgaagaggtagctagtcttaatgcccaacttaagactagcaaaagtgattttgagaaactaaaatttgctagggatgcctacacggttggtagacacccctcaattaaggatgggcttggcttcaagagggaagccaagaacttaacaagccataaggctcccatctccgccaaggagaaagggaaggcccctatggcaagtagcattaaaaggaatcatgcttttatatatcatgataggagacaaactagaaatgcttataggagttataatgcatatgatgattttaactctcatgccatgtttgcttctagttcttcctttatgcatggtagaaatatgtctaagaaaaatgctatgcctagaaagaatgttactcatgctcctaggaaagtagtgaatgaaccttctacaatttattgtgctttaaatgcttcctttgctatttgtagaaaggataagaaaattgttgctagaaaattaggggcaaaatgcaaggaagacaaaacttgcatttgggtccctaaggatatttgcactaaccttgtaggacccaacatgagttgggtttatgcatccgggggttcaagctggattatcgacagcggatgcacaaaccatatgacgggggagaagaagatgttcacctcctacgtcaagaataaggattcccaagattcaattgtattcgatgatgggaatcaaggcaaggataagtctgaaacccaagggaccctcaagcgcttcctcaggagggctcaaaatgagtttgagcttaaggtgaagaagataaggagcgacaacgggtccgagttcaagaaccttcaagtggaggaattccttgaggaggaaggaatcaagcacgagttctccgctccctacacaccacagcaaaatggtgtggtagagaggaagaacaggtcgctcatcgatatggcgaggacgatgctaggagagttcaagacccccgagtgcttttggacggaagccgtgaacacggcttgccatgccatcaacagggtctaccttcaccgcctcctcaagaagacttcgtatgagctgctaaccggtaacaaacccaatgtatcttactttcgtgtatttgggagcaagtgctacattctagtgaagaaaggtagaaattctaagtttgctcccaaagcagtagaagggtttttattaggttatgactcaaatacaaaggcgtatagagtcttcaacaaatcatcgggtttggttgaagtctctagcgacgttgtatttgatgagactaatggctctccaagagagcaagttgttgattgtgatgatgtagatgaagaagatgttccaacggccgcgatacgaaccatggcgattggtgatgtgcgaccacaggaacacttggagcaagctcaaccttcctcctcaaccatggtgcatcccccaacccaagatgacgaacaggtacctcaagtggaggcgtgtgatcaagggggagcacaagatgatcatgtgatggaggaagaagcgcaaccggcacctccaacccaagttcgagcgatgattcaaagggatcatcccgtcgaccaaattctgggtgacattagcaagggagtaactactcgatctcgattagttaatttttgtgagcattactcctttgtctcttctattgagcctttcagggtagaggaggccttgctagatccggactgggtgttggccatgcaggaggagctcaacaacttcaagaggaatgaagtttggacactggtgcctcgtccgaagcaaaatgttgtgggaaccaagtgggtgttccgcaacaaacaggacgagcacggggtggtgacgagaaacaaggctcgacttgtggcaaaaggttatgcccaagtcgcaggtttggatttcgaggagacttttgctcctgtggctaggctagaatcaattcgtatcttgctagcatatgccgctcatcattctttcaggttgtaccaaatggatgtgaagagcgctttcctcaatgggccaatcaaggaggaggtgtacgtggagcaaccccctggcttcgaggatgaacggtaccccgaccatgtgtgtaagctctctaaggcgctctatggacttaagcaagccccaagagcatggtatgaatgccttagagactttctaattgttaatgctttcaaggttgggaaagccgatccaactctttttacaaagacatgtgatggtgatttgtttgtgtgccaaatttatgtcgatgacataatatttggttctactaaccaaaagtcttgtgaagagtttagcagggtgatgacgcaaaaattcgagatgtcgatgatgggcgagttgaactacttccttgggttccaagtgaagcaactcaaggacggcaccttcatctcccaaacgaagtacacgcaagacttgctaaagcggtttgggatgcaggacgccaagcccgcaaagactccgatggggaccaacggacacaccgacctcaacaaaggaggtaagtccgttgatcaaaaagcataccggtccatgataggttctttgctttatttatgtgctagtagaccggatattatgcttagcgtatgcatgtgtgctagatttcaatccgatcctaaggaatgtcacttagtggcggtgaagcgaatccttagatatttagttgctacgccttgcttcgggctctggtatccaaaggggtctacctttgacttggttggatactcagactccgactatgctggatgtaaggtcgataggaagagtacatcggggacgtgccaattcttaggaaggtccctggtgtcgtggaattctaagaaacaaacctccgttgccctatccaccgctgaggccgagtacgttgccgcaggacagtgttgcgcgcaactactttggatgaggcaaaccctcagggactttggctacaatctgagcaaagtcccactcctatgtgacaatgagagtgctatccgcatggcggaaaatcctgttgaacacagtcgcacaaagcacatagacatccggcatcactttttaagagaccaccagcaaaagggggatatcgaagtgtttcatgttagcaccgagaaccagctagccgatatctttaccaagcctctagatgagaagaccttttgcaggctgcgcagtgagctaaatgtcttagattcgcggaacttggattga

SEQ ID NO: 157444 - DNA, 274 bp, Zea mays
  Clone ID: MRT4577_75167C.1
ccaaccacaaggcctgtggataggagtatattaatattcatgtttatgtggaatgacatattaaaccagatcgccacttcataaaatgcattgaaagtaactaccgaagcttgcagacaacgtgagacgtttgtgatgggcccacaaaaccgcgatccggtcgtggagcacccacgcgacgaggctgtgcaccatgacgccgtcgaaggacaccggagtgtacttgaaggcgtccttggccacggggtacgccaccggcaggcagaagagcacg

SEQ ID NO: 157445 - DNA, 126 bp, Zea mays
  unsure (1)..(126): unsure at all n locations
  Clone ID: MRT4577_75168C.1
ctctaccatncttnggcantncacactcangcacagctgctaagcntcgtcactgantgtgntaccgtagtgtaggccnagaaagtaangcatgtcttagctttgtatgccagttcgaancnngtg

SEQ ID NO: 157446 - DNA, 864 bp, Zea mays
  Clone ID: MRT4577_75169C.1
cattggtacctcgagccggccgggaaaaaaaaaaaaaaaaaaaacgaccggccatgaccaccgagttcctcagggtgaagaagttccaccaggacgaggccgcccggagccggagactgaaagagctgcagccggagctgtcgctcggcccagtgtggccgggcttggcaaccggtggtggcctggcagccaagagctcctcgatcgagtctcatggaagcccccggaagaagaggaagaactatacggcggccggctgggactgggaggtgcatcagcagccgcccgcgagcctggatctccagctcaaccaccccctgcctctcgactgggagcagtgcctcgacctccaatctgggaggatgtattacctgaacaggaagacgctgaagaagagctgggttcgaccccgggagcagaacgtggacctcaacatctccacagctcccgacgaggatgagccagggaaacccgctggcaccttgttccctggaggcaacatggtggccgtgccgtgcgccaactgtcacctcctagtcatgctctgcatgtcctccccatcctgccccaactgcaagttcgtgcagccgctgccaccttctgttgtgccgcctgcctatccgaggctcggtgccgccgtcaagccgctggagaccctcagccttctccattaggcgcatgcacgcgcgctccactgggagaagcttgtagaaaggaggaaaccaaagttgagttgtgtggtgcatgggttagtattactattacctgggtaatgggtgtatgaatgtgaaatcatgcgtgcatataaaaaggggtacggtcggttgcacgaatcaaacaaatcaatcaaatctactttatttc

SEQ ID NO: 157447 - DNA, 169 bp, Zea mays
  unsure (1)..(169): unsure at all n locations
  Clone ID: MRT4577_7516C.1
caaccccgccccanagcgaggcgacgccgaggcatctcancnccggcgaagggaaggggcgaccgnnccagggancngancnggcaganngngaggaagaacaacnccnnccgggngaagcagnnnggcaacggcaangccaaggggcagnncaccaaggagcccaaca

SEQ ID NO: 157448 - DNA, 283 bp, Zea mays
  Clone ID: MRT4577_75170C.1
gttcctgaacaagcaaacggctttctccattttccttgagtgcacagatagggcgtcgtggggcatgaactttgcgaacgtgaaccacatggtgctcttcaactacccccacgacccgagcaagtacgtgcggagcgactggcggacatgtccgcagagcgtgcagaaacggcaaggcgttcgagttcacggtgggcaaacatgtgtccctggccagtagtgcgatggagagcaacatgacagagcacccgctgcacgacttgccgaagcgtctaaagaccct

SEQ ID NO: 157449 - DNA, 240 bp, Zea mays
  Clone ID: MRT4577_75171C.1
ggattacagcatattatataaaagggacaaatagtatattggaagaaatcaggattacagcattacaggagcccttcagtattggtgccatatttcgagcagcaccccggacaaccagtcgaaagtctcttttcaatccaacatgttttgcacctgtcaataagaaatatgcctcattgtcccgaaacacggcatatttcttattgacaggtgcgcatgacgccgtgtttcgggacctcg

SEQ ID NO: 157450 - DNA, 281 bp, Zea mays
  Clone ID: MRT4577_75172C.1
ctcaacctccatgagaatgccaccatacctgctgatccttctcctgatgcaagacaagatcgtgagttcttcgacaccattgctattggttctagtgattcccacgaccaatatgcctttgaggctgatgtgttcacccattgtgatgagaggtttctgtgccaagagagtgctaacctggcggctctccaagatgagctcatggaggagaacagcttgagtgatctccttctcactgttgcagatgcggttgaggctggagattcaagccttgccttggc

SEQ ID NO: 157451 - DNA, 421 bp, Zea mays
  Clone ID: MRT4577_75173C.1
tcatcctaaaaaaaaaaaaaaaaaaaaaaaaaaaaaaaaaaaaaaaaaaaaaaaaaaaaaatcataaaagaaacatctctctttaagaaagagccaagcttactttccccttcataccactccatatcttttttataatctcacctaaattcaatccactcacccctctttttacaacataatcactcttaaaaccctttctttacccaacttaattcaccttcaccacatccacctttctccaattccccaaataaataatattcccccacctaccccttttcccaacatttttccatcctaaaaacccaatcctaccccccctttataaactcattaaaccctaattttctaattaatactcccataaaaacccctaccacttccatccccctaacaccctctcctttccctttcttcc

SEQ ID NO: 157452 - DNA, 246 bp, Zea mays
  Clone ID: MRT4577_75174C.1
cctggaaggaagacagctcttcgatgtcagtgtgggtgtcggtcgtagtctgcctgaagaccggtgatggttcaccttagaagcatgggatgctcatcatcacactaaaaacctgtgctgttgtgttgctgtgtctatcccagtaatagttcagttggtaccttatgttcgaggtttgttgtaagtagactgataaatcacaattgcaggacccagtctgctcattaaagctcgtggggaagaatg

SEQ ID NO: 157453 - DNA, 717 bp, Zea mays
  Clone ID: MRT4577_75175C.1
ctttctcacccgtctcgatccccaatatccgacatgactctctcgtcgcctggccagcgtcccgcatcacatatgcgcgcgaatctacccaccacccacgcgctgaatgatgtccacccgcacgagttcatcctggcctactccgcccacctcaagtgctccgccaagatgtagctccctgagtgctctgacattgcgaatacttcctctctcactgagattcctccttatgatcctgactggaactacatcacggctgtatccattgttaggaagatctacctatggtaaggcatcatagcgctgggctttcagaagatctacggcggccgacagaggaatggctcccgaccgccactcttctggatcataagtgacgctgatgcacgctacatactgcaacaactgcacatctatgcttatcatctatgtgctatcacctacggtatactcctcatcatcaatcacgaatatgtacgatcatgaaccaagtgaatgagaaagttcgctgtttagatcgtgaacagtcgtcactcttatgtgttcaatggtgtcatgtctgatggttgacaagactgtgctctatttgctcttttggcgtaggattttcaagatcgtaggacttgtaagtatattgtatctagatatggctccacactatgctccccgaggtcctaatgtgatatcaggactcaattctcgaatctaatatatatg

SEQ ID NO: 157454 - DNA, 588 bp, Zea mays
  unsure (1)..(588): unsure at all n locations
  Clone ID: MRT4577_75176C.1
aaatgcatcctacttcactcccatggtctgaccaaattctcaaccaaattctaccctcaactgatctaaaccgtctggacagcagcctcataaactgaatcagtctcagcaagctccttcttcagttgtgcaatcctcgcctggatctcatctttaatggctgcatctgctatgagggttgttgtagtctgatatatcgtgactttccttgctgtgccaagttgttcctctgtagcattttcaaccaacaaaccctgagttgttaccaagcccaagtttctgatggtagtctgctggcagagtatcattatgcttcagtttaaactaccatgcaccttgaaatagtgagaagtaaactaatgagcccttggactgaaaagccaatcagaaaatatatgcggatagattatatcctcagattactattataagtactgttgtttggtgatttgaccaaacacatgacataattcctttgatagttggttgttctttgaaggtagcacatttgtagacatgaacacctnctctaatactgcattataggatcagagtttgtgttccctatatagttagatagtgttcttt

SEQ ID NO: 157455 - DNA, 337 bp, Zea mays
  Clone ID: MRT4577_75177C.1
gaccaaccaacatcaaaagggtagtcaataaaactacctctcaccaaaaagtttgtagttctctatttattacaaccacctacaggaccaccaaactactccactactatataaaacttcttaaaaaatatataaatcagactaatatccccatatcttactcatacactgtcatacctaataaatcaatacacaaagcaactcttaaggatattctcctcaatctcctctcttttctcaacccaaacacctttcattgtaccatcaacacaatcaactaaaaaattcattctgtcctacaatactcctaattcttaacatcataatcaatataata

SEQ ID NO: 157456 - DNA, 435 bp, Zea mays
  unsure (1)..(435): unsure at all n locations
  Clone ID: MRT4577_75178C.1
cgcgtccgcccacgcgtccgtaaaagcagacaatgaagaccttcgagttgattgactcaaatgaattgagagcccgggggatacacccattggatacgaggacaaaaagaaaatgttgaactcaaaagctgaccgtgaagacctttgagttgactgataatcaaatcaattcaaagcttgggggctacacccattgggtgcacctacagtgcatctaatanatataggaatggaacaacactgccttgaaaaagcttggaagaaacaaaggacattgttcctccttagagtctcgagccaactactctcaaaagttggcttgagcctcgggggcttgtgggggatagacatcccctggtcctcatgaacactaaaacgtatcacgggccgcctaaagggcctnctactgggtcatcctatgggatgggccggcag

SEQ ID NO: 157457 - DNA, 3648 bp, Zea mays
  Clone ID: MRT4577_75179C.1
atgaaggactcgccgccactgccttcaacaagtcatccctcttccccaacgagcgtcacacatgccttatggcaagggagaagaagtttgttcaagggattggatagaactaaagtagataaaattaatgaattgattgatgccttgaatgaaaaagatagactcttagaaaaacaagaggaccttttgtatgaagagcatgacaaatttgtagaggcacaaaaatcttatgctttagaagttaaaagaaatgaagtgctttctagtgaactatcttcttgtcatgaaaccattgctactttaaagagtgttaatgatgacttaaatgctaaactagaagtagctagtaaatctaattcttgtgtagaacatgttgagatttgcactaggtgtaaagatttcgatgttgatgcttgtagtgatcatttagtttcaatttccaaattaactgaggaattggctagtcttaatgcccaacttaagactagcaagaatgaatttgataaactaaaatttgcaagggatgcctacacgatcggtagacacccctcaattaaggatggacttggcttcaagagggaagccaagaacttaacaagccataaggctcccattcccgctaaggagaaagggaaggcccctatggctagtagtgtgcaaaagaaccatgcttttatgtatcatgataggagacaaactagaaatgcttataggagttataatgcttatgatgattttgactctcatgccatgtttgcttctagttcttcctatatgtatggtagaaatatgtctaggagaaatgcttttcatcatgtgcctaggaagaatattattcatgctcctaggaaagtagtgaatgaaccttctacaatttattgtgctttaaatgcttcctttgctatttgtagaaaggataggaaaatagttgctaggaagttaggggcaaaatgcaagggagacaaaacttgcatttgggtccctaaggatatttgtgctaaccttgtaggacccaacatgagttgggtttatgcatccgggggttcaagctggattatcgacagcggatgcacaaaccatatgacgggggagaagaagatgttcacctcctacgtcaagaataaggattcccaagattcaattatattcggtgatgggaatcaaggcaaggataagtctgaaacacaagggaccctcaagcgcttcctcaggagagctcaaaatgagtttgagctcaaagtgaagaagataaggagcgacaacgggtccgagttcaagaaccttcaagtggaggagttccttgaagaggaagggatcaagcacgagttctctgctccctacacaccacagcaaaatggtgtggtagagaggaagaacaggacgctcattgatatggcgaggacgatgctaggagagttcaagacccccgagtgcttttggacggaagccgtgaacacggcttgccacaccatcaacagggtctaccttcatcgcctcctcaagaagacgtcgtatgagctactaaccggtaacaaacccaatgtatcctactttcgtgtatttgggagcaagtgctacattctagtgaagaagggtagaaattctaaatttgctcccaaagctgtagaagggtttttgttaggttatgactcaaatacaaaggcgtatagagtcttcaacaaatcatcgggtttggttgaagtctctagcgacgttgtatttgatgagactaatggctctccaagagagcaagttgttgattgtgatgatgtagatgaagaagatgttccgacggccgctatacgaaccatggcgattggagaagttcagccacaggaacaagttgaacgagatcaaccttcttcctcaactatggtgcatcccccaactcaagacgatgaacaggttcatcaacaggaggcgtgtgatcaagggggagcacaagatgatcacgtgatggaggaagaagcgcaaccggcacctccaacccaagttcgagcgatgattcaaagggatcatcccgtcgaccaaattctgggtgacattagcaagggagtaactactcggtctagactagttaatttttgtgaacattactcctttgtctcttctattgagcctttcagggtagaagaggccttgctagatccggactgggtgttggccatgcaagaggagctcaacaacttcaagaggaatgaagtttggtcgctggtgccacgtcccaagcagaatgttgtgggaaccaagtgggtgttccgcaacaaacaagacgagcacggagtggtgacgaggaacaaggctcgacttgtggcaaaaggttatgcccaagtcgcaggtttggactttgaggagacttttgctcctgtggctaggctagagtccattcgtatcttgctagcatatgccgctcaccattctttcaggttgtaccaaatggatgtgaagagcgctttcctcaacgggccaataaaggaggaggtgtacgtggagcaaccccctggcttcgaggatgaacggtaccccgaccacgtgtgtaagctctctaaggcgctctatggacttaagcaagccccaagagcatggtatgaatgccttagagacttcttaattgctaatgctttcaaggttgggaaagccgatccaactcttttcactaagacatgtgatggtgatctgtttgtgtgccaaatttatgtcgatgacataatatttggttctactaataaaaagtcttgtgaagaatttagcagggtgatgacgcagaaattcgagatgtcaatgatgggtgagttgaactacttccttgggttccaagtgaagcaactcaaggacggcaccttcatctctcaaacgaagtacacgcaagacctgctgaagcgatttgggatgaaggacgccaaacccgcaaagactccgatgggaaccgacggacacaccgacctcaacaaaggaggtaagtccgttgatcaaaaagcataccggtcaatgatagggtcattactttacttatgtgctagtagaccggatattatgcttagcgtatgcatgtgtgctagatttcaatccgatcctaaggagtgtcacttagtggcagtgaaacgaatccttagatatttggttgctacgccttgcttcggactctggtatccaaaggggtctacctttgacttgattggatattcagactccgattatgctggatgtaagatcgataggaagagtacatcggggacgtgccaattcttaggaaggtccctggtgtcatggagctctaagaaacaaacttctgttgccctatccaccgctgaggccgagtatattgccgcaggacagtgttgcgcgcaactactttggatgaggcaaaccctcagggactttggctacaatctgagcaaagtcccactcctatgtgataatgagagtgctatccgcatggcggataatcctgttgaacacagccgcactaagcacatagacatccgacatcactttttgagagaccaccagcaaaagggagatatcgaagtgttttatgttagcaccgagaaccagctagccgatatctttaccaagcctctagatgagaagaccttttgtaggttgcgtagtgagctaaatgtcttagattcgcggaacttggattga

SEQ ID NO: 157458 - DNA, 208 bp, Zea mays
  Clone ID: MRT4577_7517C.1
gggaaaaacacttcccattcatcaaatattaatatatgaaataaacaacacttttcaacatatttctacaacaaaaaccagggcaaaatttttatttgtccacacacatttgtgtcttacatgcaactttttattaaacacgtcttcgttattacttacacacatttattcacatcctgattacaccgttttttgtttcttccgaaac

SEQ ID NO: 157459 - DNA, 114 bp, Zea mays
  Clone ID: MRT4577_75180C.1
ggcggatcgggaggagcagttgcggcactcgtagctcgaggtgcatggcacccacgcgaggtggctgccggagtcaagcatcacggggagcggatacaccaagacgcccccaga

SEQ ID NO: 157460 - DNA, 4983 bp, Zea mays
  Clone ID: MRT4577_75181C.1
atggatcctaaggggaagggaatcgtgatcaacgacaaagagaaggaatctttcgtcaacgagccaaaagacgacaagcctaccgactccggctcggggcatagacggaaggaagggaagaagaagaagacaaggcgcatcaaggagatcatctactacgacgatagtgatgagtctacttcttcccaaaaggatgatgacaacgactacaaaaagacggtcaattcgaacttttcatttgattattctcgtattcaacatagttcgaattcgcatttgctttccattcctcttggcaaacctccacacttcgatggggaggactacggattttggagtcacaaaatgcgtagtcatttattctctctccatccaagcatatgggagattgtagagaatggaatgaaatttgatagctcggatagccctatgtttatcaatgaacaaattcataaaaatgcacaagctactactgttctcttagcatctttgtgcagggaagaatacaataaagtgagcggcttggacaatgccaagcagatatgggacaccctcaagatctctcacgaggggaacgacatcaccatgctcaccaagatggagttggtggagggcgagcttggacgattcgccatgataaggggagaagagccaactcaaacttacaaccggctcaagacccttatcaacaagataaggagctacggaagcacgcgttggacggatcacgacgtcgtccgcctaatgctcaggtcatttaccgttcttgatcctcatctcgtgaacaatattcgtgagaatcccaggtacacgatgatgacgcccgaagaagtacttggaaaattcgtgagcgggcggatgatgatcaaggaagcaagatacgtcgacgacgcgttgaacggtccactccacgagtctcaacccattgctctaaaggcaacaaggagcaaggagtcgctacctagcaaggtggcgcaagttgaggcggccgggctcaatgatgaagaaatggctcttatcattaaacgcttcaagacagtactaaaaggtcacaaggggcagccaagcaagaccaagacaaaggggaagcgctcatgcttcaagtgcggtaagattggtcattttatcgctaactgccccgataatgatagtgaccaggaacagggaaacaagagggaaaagaagaagaattacaagaaggcaaagggcgaggcgcatctaggcaaggagtgggactcggactgctcctcgtccgactccgacaacgaaggactcgccgctaccgccttcaacaagtcatccctcttcccaaacgagcatcacacttgccttatggcaagggaaaagaaggtaatcactcgtaacgctagtactaatgattcttctagtgatgagtcgagtgatgatgatgacatagactattctagtttgttcaagggattggatagaaataaaattgataaaatcaatgaattgattgatgcattaaatgagaaggataaactcttagagaaacaagaggatttattatatgaagagcatgataaatttgtagaagctcaacgatctcatgctctagaagttaaaagaaatgaaatgctttcttgtgaactatcttcttgccatgagacaatttctaaattaaagagcattaatgatgacttaaatgctaaactagtagaagcaaatagatccaactcttgtgtggaacatgttgaaatttgcactaggtgtaaggatgttgatattaatgcgtgcagtgaacacttagtctccatttcaaaattgaatgatgaattagctagtcttaatacccaacttaagactagcaaaagtgaatttgaaaaactaaaatttgcaagggatgcctacactattggtagacacccctcaattaaggatgggcttggcttcaaaagggaagccaagaacttaacaagccataagactcccatctccaccaaggagaaaggaaaggctcctatggctaatagtgttaagaagaatcatgctttcatgtattatgataggagatattctagaaatacttttagaggtcatgatgtttttgattcacatgcttatgactcttatgctatgactgcttctagttctcatgttatgcatggtagaaatgtgcttagaagaaatgttgttcatcaaatgcctaggagaaatgttgttaggaaagtagtgaatgaaccttctacaatttattgtgctttaaatgcttcttttgccatttgtagaaaggataagaaaattgttgctaggaagttaggggcaaaatgcaagggagacaaaacttgcatttgggtccctaagaatatttgtgctaaccttgcaggacccaacatgagttgggtttatgcatccgggggttcaagctggattattgacagcggatgcacaaaccatatgacgggggagaagaaaatgttcacctcctacgtcaagaataaggattcccaagattcaatcatattcggtgatgggaatcaaggcaaggataagtctgaaacccaagggaccctcaagcgcttccttaggagagctcaaaatgagtttgagctcaaggtgaagaagataagaagcgacaacgggtccgagttcaagaaccttcaagtggaggagttccttgaggaggaagggatcaagcatgagttctccgctccctacacaccacagcaaaatggcgtggtaaagaggaagaacaggacgctcatcgacatggcgaggacgatgctaggagagttcaagacccccgagtgcttttggacggaagccgtgaacacggcttgccacgccatcaacatggtctaccttcatcgcctcctcaagaagacttcgtatgagcttctaaccggtaacaaacccaatgtatcttactttcgtgtatttgggagcaagtgctacattctattgaagaaaggtagaaattctaagtttgctcccaaagctgtagaagggtttttgttaggttatgactcaaatacaaaggcgtatagagtcttcaacaaatcatcgggtttggttgaagtctctagcgacgttgtatttgatgagactaatggctctccaagagagcaagttattgattgtgatgtagatgaagaagatgttccgacgaccgctatacgaaccatggcgattggagacgttcggccacaggaacaatatgaacgagatcaaccttcttcctcaactaaggtgcatcccccaactcaagacgatgaacaggttcatcaacaggaggcgtgtgatcaaggaggagcacaagttgataatgtgatggaggaagaagcgcaaccagcacctccaacccaagttcgagcgatgattcaaagggatcatcccgtcgaccaaattctgggtgacattagcaagggagtaactactcgatctcgattagttaatttttgtgagcattactcctttgtctcttctattgagcctttcagggtagaggaggccttgctagatccggactgggtgttggccatgcaggaggagctcaacaacttcaagcgcaatgaagtttggacactggtgcctcgtccgaagcaaaatgttgtgggaaccaagtgggtgtttcgcaacaaacaggacgagcacggggtggtgacgagaaacaaggctcgacttgtggcaaaaggttatgcccaagtcgcaggtttggatttcgaggagacttttgctcctgtggctaggctagagtcaattcgaatcttgctagcatatgccgctcaccattctttcaggttgtaccaaatggatgtgaagagcgctttcctcaacgggccgatcaaggaggaggtgtacgtggagcaaccccctggcttcgaggatgatcggtaccccgaccatgtgtgtaagctctctaaggcgctctatggacttaagcaagccccaagagcatggtatgaatgccttagagatttcttaattgctaatgctttcaaggttgggaaagccgatccaactcttttcactaagacatgtgatggtgatttgtttgtgtgccaaatttatgtcgatgacataatatttggttctactaaccaaaaatcttgtgaagagtttagcagggtgatgacgcaaaaattcgagatgtcgatgatgggcgagttgaactacttccttgggttccaagtgaagcaactcaaggacggcaccttcatctctcaaacgaagtacacgcaagatctgctgaagcggtttgggatgaaggatgccaagcccgcaaagactccgatgggaaccgacggacacaccgacctcaacaaaggaggtaagtccgttgataaaaaagcataccggtcaatgatagggtcattactttacttatgtgctagtagaccggatattatgcttagcgtatgcatgtgtgctagatttcaatccgatcctaaggaatgtcacttagtggcggtgaagcgaatccttagatatttagttgctacgccttgcttcgggctctggtatccaaagggatctacctttgacttgattggatactcagattccgactatgctggatgtaaggtcgataggaagagtacatcggggacgtgccaattcttaggaaggtccctggtgtcatggaattctaagaaacaaacttccgttgccctatccaccgctgaggccgagtatgttgccgcaggacagtgttgcgcgcaactactttggatgaggcaaaccctccgggactttggctacaatctgagcaaagtcccactcctatgtgataatgagagtgctatccgcatggcggagaatcctgttgagcacagccgcacaaagcacatagacatccggcatcactttttgagagaccaccagcaaaagggagatatcgaagtgtttcatgttagcaccgagaaccagctagccgatatcttcactaagcccctagatgagaagaccttttgcaggttgcgtagtgagctaaatgtcttagattcgcggaacctggattga

SEQ ID NO: 157461 - DNA, 270 bp, Zea mays
  unsure (1)..(270): unsure at all n locations
  Clone ID: MRT4577_75182C.1
cngtcattttttttttttttttttttttttatagggttttttaggtagtgaaggggaaaaaaaaagcagcaaacaaaaggaacacaggatccgctgaggaccgggtgcccaggggacacgcttagaacgggccccatttaaaccgagttgaaggcaaaccataaacaaggggagttcctgggcagttgccccttgtcctttaaaagttccgggggggaaaccaaaccggaatggacgtttgagggaaatcaatgaaaaagggccagcaca

SEQ ID NO: 157462 - DNA, 1464 bp, Zea mays
  Clone ID: MRT4577_75183C.1
aagcaatcacgagacgggaggggttggcctttcgcctctagggttccgggtcgcccaccaccttaccggaaatggcaattgcgggacgcgcccccaatcactcaccacccctttcgtctcgccctttttaacccaatcccctctccacgactccaccgccggccgggacccatctcctgagtcctgctgcctgcgctcgcctcagctcctttcttccccgccccttggcttttgcttggttgcatcgggccggtcgagccggagaggaaaagctagctagcagctaccagctctcggccggcggtggtagtctgcctgcagctggggttagaagctgcaagggttgggagccatggggaggggtcgggtggagctcaagcggatcgagaacaagatcaaccgccaggtcaccttcgccaagcgccgcaacggcctgctcaagaaggcgtacgagctctccgtgctctgcgacgccgaagtcgcgctcatcatcttctccaaccgcggcaagctctacgagttctgcagcggacagagcatcaccaaaacacttgagaggtatgaaaaaaacagttatggaggaccagatactgctgtacagaacaaggagaacgagttagtccagagcagtcgtaatgagtacctcaagctgaaagcgaaggtggataatttacagaggactcagaggaatttgcttggtgaagatctggggtcacttggtgtcaaagagcttgagcagcttgagaagcaacttgattcatccttaaggcacataagatccacaaggacacaacatatgcttgatcagctcactgatcttcagaggagggagcaaatgctgtgtgaagcaaataagtgccttagaagaaagctggaggagaccagcaaccaggtgcatggccaagtgtgggagcacggtgccaacttactcggctacgagaggcactctcctcaacagcaggccccatcacatgttggcaatggtttgttctttcatcccctggaagctgcagcagagccaaccctgcagatcgggttcgctcctgagcatatgaataacttcatgccaacatggctaccctgaagatggatcttgaggcaaaggaaataaataaagatgcggtggcagcatcatactctatgcaagctaagagtgacagctgtgtttcagtcacatatatgatctagtctgtgtgtcaatgtgtcgaaaaacatgtctgtgattttgttatatgaatgtaacgcgcaatgaaacatgcaggactagttgcttttgcttgtcgatgcgtttgcgtgtatccgtataaattaaaggctataagccacatcgtatatgcgtactgcacatgcgtgcatatctgttctgtgtaaaaaaaacaccccagaggattacgcgtgcaaggcctaaaaaaaaaaaaaaaaaaaaaaaaaaaaaaaaaaaaaatataaaaaaccccccccccc

SEQ ID NO: 157463 - DNA, 5010 bp, Zea mays
  Clone ID: MRT4577_75184C.1
atggatcctaaggggaagggtatagtgatcaacgacaaagagaaggaatccttcgtcaacgagccgaaggacgataagcctaccgactccggctcgggccaaagacggaaggaagggaagaagaagaagaccaggcgcatcaaggagatcgtctactacgacagcgacgagtctacttcttcccaaaaggacgaggaccacaacgactacgagagaagaaaaccggttaattctaacttttcttttgactactctcgtattccgcatagttcaaattcacatttgctttccattccactcggcaagcccccacactttgatggggaggactacggattttggagccacaaaatgcgtagtcacctattctctctccatcctagtatatgggagattgtagagagtggaatgcattttgatagttcggatagtcccatgttcattaatgaacaaattcataagaatgcacaagctactactgttcttctagcttccttgtgcaggaatgaataccataaggtgagcggcttggataacgccaagcaaatctgggacaccctcaaaatttctcatgaggggaacgacgtcaccttactcaccaagatggagttggtggagggcgagcttggacggttcgcaatgataaggggcgaggagccaacgcaaacatacaatcggctcaagacccttatcaacaagataagaagctacgggagcacgcgatggacggaccacgacgtcgtccgcctaatgctaaggtcatttaccgttcttgatcctcacttggtgaacaatatacgtgaaaatcccaggtacaccaagatgtcgcccgaagaagttcttgggaaatttgttagcgggcgaatgatgatcaaggaggcgagatatgtggacgacgccttgaatggtccgatcaacgagccgcaacctctcgctctcaaggcaacacgaagcaaggaggcgctacctagcaaggtggcacaaattgaggcggccggactcaacgatgaagagatggctctcatcatcaagagattcaagacggcgctaaatggtcgcaaggggcagccaagcaagaccaagaccaaggggaagcgctcatgcttcaaatgcggtaagcttggtcattttatcgctaactgtcccgataatgaaagtgaccaggaaaaggggaacaaaagagaaaagaagaagcaatacaagaaggcaaagggcgaggcgcatctaggaaaggagtgggactcggattgctcctcctccgactccgacaacgaaggactcgccgccactgccttcaacaaatcggctctcttccccaacgagcgtctcacatgtcttatggcaagggagaagaaggtgagtactcaagactccacttatgcttcttctagtgatagtgagtctagtgatgatgacatagattattcatgcttgttcaagggcttagatagatctaagatagataaaatcaatgaattgattgatgcattgaatgaaaaggataggcttttagaaaagcaggaggatttattgtatgatgaacatgataaatttgtagaggcacaaaaatcatatgctttagaagtaaaaagaaatgaaatgctttcttatgaactatctacttgtcatgaaaccatttctactttacaaggtgttaacaatgatttaaatgctaaattagaagtagcaaacaaatctaattcttgtgtagaacatgttgaaatttgtactaggtgtaaagactttgacattaatgcttgtagtgaacacctagtttcaatttccaagcttaatgatgaactggctagtcttaatgctcaacttaagactagcaagaatgatttcgataagctaaaatttgcaagggatgcctacacaattggtagacacccctcaattaaggatggacttggcttcaagagagaagctaagaacttaacaagccataaggctcccattcccgccaaggagaaagggaaggcccctatggctactagtgctaaaaggaaccatgcatttttgtatcatgatagaagacaaactagaaatgtaagtcatgatgcttatgattcatatgtttatgattctcataccatgtttgctcctagttcctcttatgtgtatgatagaaatgttactaggagaaatgttgttcctaaaagaaatgctattcatcatgtgcctagaaggaatgttattcatgctcctaggaaaatagcaaatgaaacttccacaatttattatgctttaaatgcttcctttgctatttgtagaaaggataagaaaattgttgctaggaagttaggggcaaaatgcaagggagacaaaacttgcatttgggtccctaaggatatttgcactaaccttgtaggacccaacatgagttgggtttatgcatccgggggttcaagctggattattgatagcagatgcacaaaccatatgacgggggagaagaagatgttcacctcctacgtcaagaataaggattcccaagattcaatcatattcggtgatgggaatcaaggcaaggataagtctgaaacccaagggaccctcaaacgcttcctcaggagagctcaaaatgagtttgagctcaaagtgaaaaagataagaagcgacaacgggtccgagttcaagaaccttcaagtggaggagttccttgaagaggaagggatcaagcacgagttctccgctccctacacaccacagcaaaatggtgtggtagagaggaagaacaggacgctcatcgacatggcgaggacgatgctaggagagttcaagacccccgagtgcttttggacggaagccgtgaacacggcgtgccacgccatcaacagggtctaccttcatcgcctcctcaagaagacgtcgtatgagctactaaccggtaacaaacccaatgtatcgtactttcgtgtatttgggagtaaatgctacattctagtaaagaagggtagaaattctaagtttgctcccaaagctgtagaagggtttttattaggttatgactcaaatacaaaggcgtatagagtcttcaacaaatcatcgggtttggttgaagtctctagcgacgttgtatttgatgagactaatggctctccaatagagcaagttgttgattgtgatgatgtagatgaagaagatgttccgacggccgctatacggaccatggcgattggagaagtacggccacaggaacaagatgaacgagatcaaccttcttcctcaactatggtgcaacccccaaccaaagatgacgaacaggtacctcaagtggaggcgcttgatcaagggggagcacaaaatgatcaagtgatagaggaagaagcgcaaccggcacctccaactcaagttcgagcgatgattcaaagggatcatcccgtcgaccaaattctgggtgacattagcaagggagtaactactcgatctcgattagttaatttttgtgagcattactcctttgtctcttctattgagcctttcagggtagaagaggccttgctagatccggactgggtgttggccatgcaagaggagttaaacaacttcaagcgcaatgaagtttggacactggtgcctcgtccgaagcaaaatgttgtgggaaccaagtgggtgttccgcaacaaacaggacgagcacggggtggtgacgaggaacaaggctcgacttgtggcaaaaggttatgcccaagtcgcaggtttggatttcaaggagacttttgctcctgtggctaggctagaatcaattcgtatcttgctagcatatgccgctcaccattctttcaggttgtttcaaatggatgtgaagagcgccttcctcaacgggccaatcaaggaggaggtgtacgtggagcaaccccctggcttcgaggatgaacggtaccccgaccatgtgtgtaagctctctaaggcgctctatggacttaagcaagccccaagagcatggtatgaatgccttagagatttcttaattgctaatgctttcaaggttgggaaagccgatccaactctttttactaagacttgtaatggtgatttgtttgtgtgccaaatttatgtcgatgacataatatttggttctactaaccaaaagtcttgtgaagagtttagcagggtgatgacgcagaaattcgagatgtcgatgatgggcgagttgaactacttccttgggttccaagtgaagcaactcaaggacggcaccttcatctcccaaacgaagtacacgcaagatctgctaaagcggtttgggatgaaggacgccaagcccgcaaagactccgatggggaccgacggacacaccgacctcaacaaaggaggtaagtccgttgatcaaaaagcataccggtcaatgataggttctttgctttacttatgtgctagtagaccggatattatgcttagcgtatgcatgtgtgctagatttcaatccgatcctaaggagtgtcacttagtggcggtgaagcgaattcttagatatttggttgctacgccttgcttcgggctctggtatccaaaggggtctacctttgacttagttggatactcagactccgactatgctggatgtaaggtcgataggaagagtacatcggggacgtgccaattcttaggaaggtccctggtgtcatggaactctaagaaacaaacttccgttgccctatccaccgctgaggccgagtatgttgccgcaggacagtgttgcgcgcaactactttggatgaggcaaaccctcagggactttggctacaatctgagcaaagtcccactcctatgtgataatgagagtgctatccgcatggcggaaaatcctgttgaacacagccgcacaaagcacatagacatccggcatcactttttgagagaccaccagcaaaagggagatatcgaagtgtttcatgttagcaccgagaaccagctagccgatatcttcactaagcctctagatgagaagaccttttgcaggttgcgtagtgagctaaatgtcttagattcgcggaacctggattga

SEQ ID NO: 157464 - DNA, 416 bp, Zea mays
  Clone ID: MRT4577_75185C.1
gacaaggcccttttttatttattaccactgaaaaaacatagcccggaatggggatgcgaaaaaattctcctaaaatacaactgggcgggggattgtttcaaattttgggcgggggggcgtcggattcagggccccagcctggaggctcgatgttgggccaatcccctttgcaaccaaacctgatgtaaaggctttttttccctgctagctttttgtctgataaggggagctgcttgagtgcaacaaggcaaccctgcacaacaacccgggtgtactccgggtcccatccgccgagctttaccaccacgtccgcctttgtgtaaaaaacgcttccactggtcacgctccttggggctttcttttttgaactagccttgacacttgggtcggacaccgatagccaaaccgtgaaccca

SEQ ID NO: 157465 - DNA, 1752 bp, Zea mays
  Clone ID: MRT4577_75186C.1
tgggaccctcgaggccggccgggtgtcgaaaaaatgtctgtgattttgttatatgaatgtaacgcgcaatgaaacatacaggactagctgcttgcttgacgatgcgtttgcgtgtatccgtataaattaaaggctataagccacatcgtatatgcgtaaaaaaaaaaaaaaaaaaaaaaaaaaaaaaaaaaaaaaaaaaacccatctcctgagtcctgcctgcgctcgcctcagctcctttcttccccgccccttggcttttgcttggttgcatcgggccggtcgagccggagaggaaaagctagctagcagctaccagctctcggccggcggtggtagtctgcctgcagctggggttagctgcaagggttgggagctagccatggggaggggtcgggtggagctgaagcggatcgagaacaagatcaaccgccaggtcaccttcgccaagcgccgcaacggcctgctcaagaaggcgtacgagctctccgtgctctgcgacgccgaagtcgcgctcatcatcttctccaaccgcggcaagctctacgagttctgcagcggacagagcattaccaaaacacttgagaggtatgaaaaaaacagttatggaggaccagatactgctgtacagaacaaggagaacgagttagtccagagcagtcgtaatgagtacctcaagctgaaagcgagggtggataatttacagaggactcagaggcaagttgactctacgtttgagttgtatcttcgcaacaaaaggaatttgcttggtgaagatctggggtcacttggtgtcaaagagcttgagcagcttgagaagcaacttgattcatccttaaggcacataagatccacaaggacacaacatatgcttgatcagctcactgatcttcagaggagggagcaaatgctgtgtgaagcaataagtgcctttagagaaagctggaggagaccagcaaccaggtgcatggccaagtgtgggagcacggtgccaacttactcggctacgagaggcactctcctcaacagcaggccccatcacatgttggcaatggtttgttctttcatcccctggaagctgcagcagagccaaccctgcagatcgggttcgctcctgagcatatgaataacttcatgccaacatggctaccctgaagatggatcttgaggcaaaggaaataaataaagatgcggtggcagcatcatactctatgcaagctaagagtgacagctgtgtttcagtcacatatatgatctagtctgtgtgtcaatgtgtcgaaaaacatgtctgtgattttgttatatgaatgtaacgcgcaatgaaacatacaggactagctgcttgcttgacgatgcgtttgcgtgtatccgtataaattaaaggctataagccacatcgtatatgcgtactgcacatgcgtgcattatctaaagggcgtgattgaaagcctgcatagattctaggttaggttccacgggtgcaggtagcgtaatgtttggatgcctgtattggtctttggaccaagctggattcatggaactagaaaaaaaatataaaatattttgccttttttctgcaagctaagagtcacaccgcacgcgtccgcacatatatgatctagtctgtgtgtcaatgtgtcgaaaaacatgtctgtgattttgttatatgaatgtaacgcgcaatgtaacatacaggactagctgcttgcttgaaaaaaaaaaaaaaaatatccgtataaattacaggctaag

SEQ ID NO: 157466 - DNA, 4989 bp, Zea mays
  Clone ID: MRT4577_75187C.1
atggatcctaaggggaagggaatcgtgatcaacgacaaggagaaggagtccttcgtcaacgagccaaaggatgacaagcctactgactcgggctcgggccacaagcgcaaagatgggaagaagaagaagacaaggcgcatcaaggagatcgtctactacaacgatagcgatgagtctacctcttcccaaaaggacgatgacaacgactacaggaagacggtcaattcgaacttttcatttgattattctcgtattccacatagttcgaattcgcatttgctttccattcctcttggcaaacctccacacttcgatggggaagactacggattttggagtcacaaaatgcgtagtcacttattctctctccatccaagcatatgggagattgtagaaaatggaatgaaatttgatagctcggatagccctatgcttataaatgaacaaatccatagaaatgcacaagctactactgttctattagcatctttgtgcagggaagagtacaataaggtgagcggcttggacaacgccaagcagatatgggacaccctcaagatctctcacgaggggaacgacatcaccatgctcactaaaatggagttggtggagggcgagcttggacgattcgcaatgatgaggggagaggagccaacccaaacttacaaccggctcaagacccttatcaacaaaataaggagctacggaagcactcgatggacggaccacgacgtcgttcgcctaatgctaaggtcctttaccgttcttgatcctcatctcgtaaacaatattcgtgagaatcccaggtacacgatgatgacgcccgaggaggtatacgggaaattcgtaagcgggcggatgatgatcaaggaggcgagatacgtcgtcgacgctctaaacggtccaatcaatgagcctcaacctcttgctctcaaggcaacaagaagcaaggaaacactacctagcaaggtggcacaaattgaggcggtcggacttaatgatgaagagatggctctcatcatcaagagattcaagacggcactaaaaggccgcaaggggcaaccaagcaagaccaagacaaaggggaaacgctcatgcttcaagtgtggtaagcttgatcattttattgctaactgtcccgacaatgatagtgatcaggatcaagggaacaagagggagaagaagaaaaactataagaaggcaaagggcgaggcgcatctaggcaaggagtgggactcggactgctcctcttccgactccgacaatgaaggactcgccgccaccgccttcaacaagtcatccctcttccccaacgagcatcacacatgccttatggcaagggagaagaaggtgagtactcaagactccacttatgcttcttctagtgataatgagtctagtgatgatgatgacatagactattcatgcttgttcaagggcttagatagatctaagatagataaaattaatgaattgattgatgccttgaatgataagaataggcttttagaaaagcaagaggatttgttgtatgaagaacatgacaaatttgtagaagcacaaaaatcacttgcattagagattaagagaaatgaaatgctttcttttgaactatctacttgtcatgaaaccatttctactttaaaaagtgtcaacaatgatttaaatgctaaattagaagcagcaaataaatctaattcttatgtagaacatgttgtaatttgtactaggtgtaaagattttgacattgatgcttgtagtaaacacctagtttcaatttccaagcttaatgatgagttggctagtcttaatgctcaacttaagactagcaagaatgatttcgataagctaaaatttgcaagggatgcctacacgattggtagacacccctcaattaaggatggacttggcttcaagagggaagccaagaacttaacaagccataaggctcctatctccgccaaggagaaagggaaggctcctatggctagtagtactaaaaggaaccatgcttttatgtatcatgataggagacaaactagaaatgcttataggagttataatgcttatgatgattttgactctcatgccatgtttgcttctagttcttcctacatgcatggtagaaatatgtctaggagaaatgctattcatcatgtgcctagaaagaatattattcatactcctaggaaagtagtgaatgaaccctctacaatttattgtgctttaaatgcttcctttgctatttgtagaaaggataggaaaattgttgccaggaagttaggggcaaaatgcaagggagacaaaacttgcatttgggtccctaaggatatttgcactaaccttgtaggacccaacatgagttgggtttatgcatccgggggatcaagctggattatcgacagcggatgcacaaaccatatgacgggggagaagaagatgttcacttcctacgtcaagaataaggattcccaggattcaattatattcggtgatggaaatcaaggcaaggataagtctgaaacccaagggaccctcaagcgcttcctcaggagagctcaaaatgagtttgagctcaaggtgaagaagataaggagcgacaacgggtccgaattcaagaaccttcaagtggaggaatttcttgaggaggaagggatcaagcacgagttctccgctccctacacaccacagcaaaatggtgtggtagagaggaagaacaggacgctaatcgatatggcgaggacaatgcttggagaattcaagacccccgagtgtttttggtcggaagccgtgaacacggcttgccacgccatcaacagggtctaccttcatcgccttctcaagaaaacttcgtatgagctactaaccggtaacaaacccaatgtatcttactttcgtgtttttgggagcaagtgctacattctagtgaagaaaggtagaaattctaagtttgctcccaaagctgtagaagggtttttattaggttatgactcaaatacaaaggcgtatagagtcttcaacaaatcatcgggtttggttgaagtctctagcgacgttgtatttgatgagactaatggctctccaagagagcaagttgttgattgtgatgatgtagatgaagaagatgttccgacggccgctatacgaaccatggcgattggagaagtacggccacaggaacaagatgaacgagatcaaccttcttcctcgactatggtgcatcccccaaccgaagatgacgaacaggtacctcaagtggaggcgcttgatcaagggggagcacaagataatcaagtgatggaggaagaagcgcaaccggcacctccaacccaagttcgagcgatgattcaaagggatcatcccgtcgatcaaattctgggtgacattagcaagggagtaactactcgatctcgattagctaacttttgtgagcattactcctttgtctcttctattgagcctttcagggtagaggaggccttgctagatccggattgggtattggccatgcaggaggagctcaacaacttcaagcgcaatgaagtttggacactggtgcctcgtccgaagcaaaatgttgtgggaaccaagtgggtgttccgcaacaaacaggacgagcacggggtggtgacaaggaacaaggctcgacttgtggcaaaaggttatgcccaagtcgcaggtttggactttgaggagacttttgctcctgtggctaggctagagtcaattcgtatcttgctggcatatgccgctcaccattctttcaggttgtaccaaatggatgtgaagagcgctttcctcaacgggccaatcaaggaggaggtgtacgtggaacaaccccctggcttcgaggatgaacggtaccccgaccacgtgtgtaagctctctaaggcgctctatggacttaagcaagccccaagagcatggtatgaatgccttagagactttttaattgctaatgccttcaaggttgggaaagccgatccaactcttttcactaagacatgtgatggtgatttgtttgtgtgccaaatttatgtcgatgacataatatttggttctactaaccaaaagtcttgtgaagagtttagcagggtgatgatgcagaaattcgagatgtcgatgatgggcgagttgaactacttccttgggttccaagtgaagcaactcaaggacggcaccttcatctcccaaacaaagtacacgcaagatctgctaaagcggtatgggatgaaggacgccaagcccgcaaagactccgatggggacagacggacacaccgacctcaacaaaggaggtaagtccgttgatcaaaaagcataccggtcaatgataggttctttgctttacttatgtgctagtagaccggatattatgcttagcgtatgcacgtgtgctagatttcaatccgatcctaaggagtgtcacttagtggcggtgaagcgaattcttagatatttggttgctacgccttgcttcgggctctggtatccaaaggggtctacctttgacttagttggatactcagactccgactatgctggatgtaaggtcgataggaagagtacatcggggacgtgccaattcttaggaaggtccctggtgtcatggaactctaagaaacaaacctccgttgccctatccaccgctgaggccgagtacgttgccgcaggtcagtgttgcgcgcaactactttggatgaggcaaaccctccgggactttggctacaatctgagcaaagtcccactcctatgtgacaatgagagtgctatccgcatggcggagaatcctgttgagcacagccgcacaaagcacatagacatccggcatcactttttgagagaccaccagcaaaagggagatatcgaagtgtttcatgttagcaccgagaaccagctagccgatatcttcactaagcctctagatgagaagaccttttgcaggttgcgtagtgagctaaatgtcatagattcgcggaacctggattga

SEQ ID NO: 157467 - DNA, 330 bp, Zea mays
  Clone ID: MRT4577_75188C.1
attggaaaaattcggctgccccccccccctggttttaaaaaaaggaaaaaccggggccaccaggaaaaaatttgcaattgcacctatttgaaaacccaacaactttttaattcccgggccggctccctatctaaaaaaaaggacaaaaaccaccttgccctgcaattcaagggacatttaacaaaacaaacacgttcttttataaccagggaaacattttaacattttttttggaaaaagggtccccattgggaaaaaaaaaaaaaaaagcttaaaaatgtgaccccaaatcccaaaaaacggcacccttttttacaagtttaataaaaa

SEQ ID NO: 157468 - DNA, 298 bp, Zea mays
  Clone ID: MRT4577_75189C.1
aagaagccaccggtcaagggtacgccaaaacggcaaacatctctcggccaccacaatttagaaatgtaaatcgtgccactaagtcggggcacatgacaaaagaccctataacgaataatacaatcttccatcacctcaaagtcgactactgacctacattgctcgacaacatctatcacaccaagacaaagatcggatgcaacacccaactagcattcaactcctagccactcgaatactgaatattctgagcgatagttaggccaagtagaggatgaaacgtgtttctgcgcttgtt

SEQ ID NO: 157469 - DNA, 377 bp, Zea mays
  unsure (1)..(377): unsure at all n locations
  Clone ID: MRT4577_7518C.1
gctcggagcccccgtacggccgccgcgtgcgtggactcgcccttggcgggggccgggccggggggcaagcttcgtccttcccgacgggcaggcttttttttttttgttgttttttttttttttggttgggtggggttctggggtgggccgtgggctggggagtcgtggtggggcgtggggggtttggtggggcttgccctgggggggggggggggggggccttttttttttntttcttattcttttctcttttggaaggcgttccgcgaggcgcgttttgtcgggttccctgggttccgggccgctttggggtggtcgccctcgggaccgggggtgccttccctgtgtgcctggccggggcggccggtcgagggggg

SEQ ID NO: 157470 - DNA, 613 bp, Zea mays
  Clone ID: MRT4577_75190C.1
ctggccgggccttcctagtctatgccgcgagaccgccccatggactctacatatatacttacatactgatatgtccgtagcgtgggtaccttgcttggatgggcgcgatgatgtcataactaaagagggtgggtgcgcttgccgtattcatggatggccatggatctgaccgcatgacgttacatacttccttaccgctatcgtgctgcttatatattacaagacgctgtcaaacacccatctgcatctagggtgggcgattgactcagcatggactttacacctgatatgatatttggtacaatatcaagtcacctagtgtctacttgctgcctactcacatgagttgccaccatatcggccctcaagctgcacctccagctactgtttatgactactaactgcgccttgctgaatcgtcgtcatagctgacccgtggttgaaattaggatactgaagcgactgcacacagcctccggggaggatccctaatgatgaaccagctggtgagactaggcctttacctgctcctcattatgtgggccctattcactctacgactgacaaccgtgaaaccagcgccctcaacggaactaatgaaggtggccacgca

SEQ ID NO: 157471 - DNA, 141 bp, Zea mays
  Clone ID: MRT4577_75191C.1
aaagggacacttcaactaatctttaaggggcaaacttgtcccttacccccttatcataaagcacattaaagccacggctttttacggggcccccccccattatgaaacggctactactgtgccattcaaaaagggcactcc

SEQ ID NO: 157472 - DNA, 373 bp, Zea mays
  Clone ID: MRT4577_75192C.1
aggggtggctcatggccttcgccaagggctaccgcgtcggcggcggcccgctcgggaaagggctcaacaaggggtaccccggaggggccttcaacccgttgggcctggccgacaacccggacaccgccgccgagctcaaggggaaggagctaaagaacggccgccttgccttgttttccatgttcgacttttttgggcaggccatcgtaaccggcaagggccccattgaaaacctttttgaccactttaccgaccccgtggccaaaaacgcctgggcttaccccacgaactttgtccccggcacctaactgactgagcaacgccgtacatggttacttccatcaaacccatccattcttccgtccgtccggcc

SEQ ID NO: 157473 - DNA, 2238 bp, Zea mays
  Clone ID: MRT4577_75193C.1
gaaacaaacacccaaatcaaacccgcgcgtcgccagccgcagcaccaatggcgtgcgtcgccgcgctcttcgcctccccggcgctcctcccctttcccctccaccacctcgtccatggcctcctgctcgtgccgcctccgccccgccgtcgtcgcccgcgcgccgcgccagcagccgcggggccggcgcgcgctccggcgcttcgatgaggtggaaggggtgtcgaagaaacggcgcggcatcggaggcggtggcggcgtcggcgctggcgggtcgcagccgtcgtcctcgcgcagggatagggggctttccgtcgatttcaaggagccgcaggttgctgagtttgatgatcttgaagaggacaaattccttaatgctgtcgtcaaggtctattgcactcatatcgcacccgattatggtcttccttggcagaagcaaaggcaacattcaagtagtgggagtgcttttatgattggggatggtaaactcttgacaaatgcgcattgcgttgagcacgacacccaggtcaaagtaaagagaaggggagatgacaaaaaatatattgccaaggttttagctaggggtgttgaatgcgatcttgcgttgctatctgttgagaatgaagagttctggagaggaacagaggcacttcattttggtcgtttgccatgccttcaggattcagtaactgttgtgggatatcctcttggtggagacactatatctgtaacaaaaggcgttgtgtcgcgcattgaggtcactccatatgcacatggaacatcagatcttcttggcattcaaattgacgcagccataaatcctggaaacagtgggggaccagcctttaatgatcaaggggagtgcattggtgtggcatttcaggtgtacaggtcagatgaagctgaaaatattggatatgttattccaactacagttgtatcccatttcttaaatgactatcagaaaaatggaaagtacacaggatttccatgtttgggtgtcttacttcagaaattggaaaatccggcattgcgtgaaagcttaaaagtaccttcaagcgagggtgttcttgttcgtcgggtggaacctactgctccagcaagcagtgttttgcgaaagggagatgtaattgttagctttgatggtatcgcagtaggatgtgaagcaacagtaccatttcggtccacagaacggattgctttccgctatctcacaagccaaaagtatgcaggcgatattgcccagctaggaatcattcgtgatggcaattccatgaaagtccagactattttgcagccaagaaaacatttagtgccgtttcatgttgaggggggacaaccttcttatctgattgttgctggccttgtcttcacacctttaacagaaccatttatagaggaggaatgcgaagatacactagggctgaaattgttagcaaaagcacgttactctctagcaacctttgagggggaggaaattgttattgtgtcgcaggttttggcgcacgaggtcaacattgggtatgagcacatgggcaatcaacaagtcatgaaactaaacggaaccacaataaagaatatccatcaccttgctcatcttgtggacacctgtaaagacaagttcctgacgttcgaattcgaagacgacttccttgttgttttgcatcgagaagaagcggatgctgcatcatcggacattctcaaggaacatgccataccgtccatacggtcatctgatctatcagaaccatatgcagaagcaaacaataacgagatacagaaaacaagcgaggattttggtgaaagtcctgtcacaaactttgagatggggatcgattgtctcttgtgggcatgatcgttctcttttaatggatgagctactgaggatgaagtttcagctaaatctgcagtagtgaaatgcaagcatctgccggcgaacaacggtggtcgtaggaatactctcccaatgtgtagtgcatgcaatgcaagtaccttgcggcaaagccgagtcatgttgtatgttagcatagacagaattgagagatatgctgtacgctaggagccataggatgatttgttcattttcaatctttaggcagtcaggaattaagggattgtgcaatttgtccaccagcgatcctgtaaagctcggacatgcaaatatgcaatagaccgtccagaaattttgttggtttaaaaaaaaaaaaaaagcggcccctactggaaaacttagggcggc

SEQ ID NO: 157474 - DNA, 209 bp, Zea mays
  Clone ID: MRT4577_75194C.1
aggaagtggtggaagcagcaggggaagaaggcataggaggggagaagatgtagttcacccacttaaagtttctctggaagatctttacaatggcacctcaaagatgctctctctttcgcgcatgtcatctgtccagtgcacgggaagggttcgagtctagtgcctcatgaggtcctggttaccaggctcaggcatgtagtcactattcg

SEQ ID NO: 157475 - DNA, 229 bp, Zea mays
  Clone ID: MRT4577_75195C.1
gggccccaaaaaaaaaaaattcatattaaatgttttttactaaaccatatttttcaaacaacctactattttaacccattaacaacccaacttaatccccaacatcacatccccctttcatcagctagaataatacccaagatgcccttaccaaaacgttcttcccaacatattcgcaaactgaatcgcccatgtgaccccccctataaccccgcattaatcgcggttc

SEQ ID NO: 157476 - DNA, 379 bp, Zea mays
  Clone ID: MRT4577_75196C.1
ggagcctttgcggccatacctgctcctctggcgcggggcgacctgtcttaggtcttcacctcccaaaagctcctccagctcgacccgccggagatctgcaggctcacgcaggtcaaccacgcattccgtggagccgagggggctgacttcctatgggaagccaagctaccggaaaactacaactatctgatggagctctaacagagcgacgacaaaggcaagcacaagctacagcacgccagtaagaaagagatctacgctaggctcgccaaacctgtgccttttggcgacggcaagaacgaattctggtcacacaagaacaaatgcatgatctgcatggcactgtcgcccaaagcactggtgattactgagattgatg

SEQ ID NO: 157477 - DNA, 320 bp, Zea mays
  Clone ID: MRT4577_75197C.1
caccaaaacacatgggcgccaccaaaaacacgaccatcatcatcctccccaccccagcgacacgtgccgcaccccaaaccagagcagatcatctggaaagcacaacagccccaggaagacgaaaactccaccgactcccgccatcaggctcaaacactactagacagcgccagagctgatgggaccaaaaaaaaaccagcggatgcccccaacggggaagctgcaaacgggcatggaaagccaaagaagaacacaaacttcttgccatacaagggagatgggtccaaagtacaagttccaacaaaacgaaacccaagcaa

SEQ ID NO: 157478 - DNA, 216 bp, Zea mays
  Clone ID: MRT4577_75198C.1
ttaataatttttgatgatactgtttgaacagggggggctttttttggtgatgagaggtgaaaacccacgagaaaaggggggcaaaaaccgaaaaaccagaagaaaccgtgtgagatcttttttacgatggcgggcctgctcttggcggacaccgagggacaaaaagcccgacaatttaggagatgctaaaatctactagatcctaagggggcgcct

SEQ ID NO: 157479 - DNA, 1349 bp, Zea mays
  unsure (1)..(1349): unsure at all n locations
  Clone ID: MRT4577_75199C.1
tctcgaggccggccgggcatgcaatatattctctgtgcgagtttacggaccagacccggaccatgagaggagggatatcgtttttcctctttagtcccagataactcttgtggtacacatcgacgcgacactctgacacgctacggcctctcggcggggcccggcaacagaccgggcagcagcacggcagccatggcgtcgagttcgaccctggatttggcgatgggccccggcgccctcctcccccgcagcgcggtcccgtacgcctccttcgctccaggaaggggaaggagcgcgagcggaacgaggagcaggaatctggcgctctccgcttcctcctccaacggtgcagcagtgccatccctgacaacagattcggagaagaagggcccagtgataatggaaattccactggaccaaatccggaggccactgatgcgaacgcgggccaatgatccagtcaaggtgcaagaactcatggacagtatccgtgtcatcggcctccaagtacctattgatgtgttggaggtcgatggggtctattatggcttctctggatgccaccgctacgaggctcaccagcgccttggtctcccaaccatccgctgcaaagttcgccgtgggacaaaggaaacactgaggcaccatatgcgatgagttgaattttattcagttacaaagtgatctgtgtatctagagctaaaacagaagcttccatggtcttttcgtcgtctcgtctgtaattctccatacctgtaaatgttgtccaaacagagtggtgaatagtacttctgtacccagcagcatcagaaaatgttaattttgcctacaacactcttttcgatcagtggatggatgagtaccacccgctcagtagatcattccatttctacgagatttttgtaaaaaaagaaaaatgcagcagcagtcggcacgctgtgtcatttagatcatctagaaaaccagaaaaaacgagtcatgtaacttgtttggctcgtgcaaaaaaatattcaaaaccaagtttgcttatactggatgttgatgtgtcatgctatgttggggcacactaataaaagtttggagatttaatttatatgtcaagtttgagagctcaaatgttaagtttgtgcttattacgactgctncaattgatgaagcagggatacgaagatttggacggtcactttatggactgtacgcgagcaagctacctgaaaggacaaatgaaatgggtggggtctatgctggctattgggtccactagatagagaaatgggtataccctgggttaatatctggtcaaagatgccagagggaaaaggatgggagaaactttacctnagtggagg

SEQ ID NO: 157480 - DNA, 2385 bp, Zea mays
  Clone ID: MRT4577_7519C.1
cggtccggattcccggtcgacccacgcgtccgcttctccttcttggcggctgcggccatttttttcttctttctctcttctattctatctcttaaaccctagatttgatctgggtttttcctgattccatttagggtttctctatcttctttttttttttcttcttcttcttctttctctttggtcgcatccccttttatccgagaaggatctatccaaatctttgtttgtcgaatctcctctcatggctaccgttgctcctcctgctgatcaagctacagatctgttgcagaaactatccttggactcgccagcaaaagcttcagagatccctgagcctaacaagaagactgccgtctaccagtatggaggcgttgatgttcatggtcaagttccttcttatgatcgatctttgacaccaatgcttcccagtgatgctgctgacccttcagtttgctatgttcctaatccttacaatccctaccagtattacaatgtatatgggagtggtcaagagtggactgactacccagcttacacaaatcctgagggtgttgacatgaattctggaatttatggagagaatgggactgttgtgtatcctcagggttatgggtatgcagcgtatccttactcgccagcaactagccctgctccacagcttggcggggaagggcagttgtacggtgctcagcagtatcagtatcctaactattttccaacagtggaccgtatgcttcatctgtggctacacctacccagccggatctctctgcaaacaaacctgctggtgtgaagacactacctgcggatagcaataatgttgcttctgctgctggtatcacaaaaggaagtaatggatcagctccagtgaaaccaactaaccaggctacccttaacacctcaagtaatttgtatggtatgggtgctccaggaggaggtttggctgctggttatcaggaccccaggtatgcctatgaagggtattatgctcctgtgccgtggcacgatggctctaagtactctgatgtgcagagacctgtttctggtagtggagttgcatcctcctattctaagtctagcacagtaccttcatcgaggaatcaaaactaccgctcaaattctcactacacgagcgtgcaccagccttcatcagtgactggctatggtacagctcaggggtactacaacaggatgtatcagaacaagttatatggtcagtatggtagcacagggagatctgctttgggttatggttcatctgggtatgattcaagaacaaatggaagaggatgggcggccacagacaacaaatacagaagctggggcaggggtaacagttactattacggaaatgagaacaatgtagatggtttgaatgaacttaacaggggacctagagctaagggcacaaagaaccagaagggaaatctagatgatagcttagaggttaaggagcagactggagaatcaaatgtaactgaggttggggaggcggataacatatgtgttgttcctgacagagaacagtacaataaagaagatttcccagtggattatgcaaatgccatgttctttatcatcaagtcatacagtgaagatgatgtgcacaagagcattaaatataatgtttgggctagcacaccaaatggaaacaagaagcttgctgcagcataccaggaagctcaacagaaagctggcggctgtcccatctttctgtttttctcggtcaatgcaagtggacaatttgttggtcttgctgaaatgacaggaccagttgatttcaacacaaatgtggagtactggcagcaagataagtggaccggctctttccccctcaagtggcatattgtgaaggatgtgccaaacagtttactgaagcatattactttagagaacaatgagaacaaacctgttaccaacagcagagacacacaagaggttaagttggagcaaggtttgaagattgtgaaaattttcaaggagcatagcagcaagacttgcattttggatgatttctcattctacgaggttcgacagaagactatcttggagaagaaagccaagcaaacccagaaacaggtaagcgaggagaaggtaaccgatgaaaagaaggaatctgcaactgcagagtcagcgagcaaggaatctcctgcagctgttcaaacgtccagtgatgttaaggttgctgagaatgggtctgttgctaaaccagtcacaggcgatgtggtggcaaatggttgctaactaagaggatggtgtcgctcacggcatgggcataaaactgactagagatgaagatatgaacaatcccgtttaacgtttctcttgagaagaagattgccgtgagccttgaagcatggaaggagctttagtacctgagac

SEQ ID NO: 157481 - DNA, 304 bp, Zea mays
  Clone ID: MRT4577_751C.1
gtcacggtctgggagctgactaaacagcggccactgtggttcatgccgctgccagacaactggtttattcaacattccgagaagccagatttttctcccaagtgaaaaagtttttagaatatgcttgtggaaatccgaaaaggaagaaccactcccacttagatcagatgtgtcctataatggggaacttaggggtgtatacttaataacacacagattttatgggctatcggacagaaccaaaagttctttgcccaggtggaaggtaaaatcgcggacctcccggaggagaggtgggggtttt

SEQ ID NO: 157482 - DNA, 411 bp, Zea mays
  Clone ID: MRT4577_75200C.1
tgattatctttaatcagtttttataagcaaattccattgttcctgctattggaacgtaacactgtttacacagcataattgaagttgcaggggagacaggctaaatctgacttcatctgtactcactttcactaagcattgaatggccttaccactcttctgcaagatggaggaagactgcaaaacttagtgcccatcacactgaaggaaggggtgtggctcttttcctgcttctgtactgctacctaactttgtggttagctttggattttaatatctgtatctgctttagattcaagcccataagttttgaagtgacttcagcttcattgtgaaatagctctcttcatatttcatagctacatttcaacaatgctgaactttctactttgatttttagatactttattt

SEQ ID NO: 157483 - DNA, 2542 bp, Zea mays
  Clone ID: MRT4577_75201C.1
gggggggaaaagcgacatagagtcaaatgttaacatccaaattgtgcagggtaggcagctcgtctcagcgattaaatgtcgcatccattcgaatgccaggcattgaacttgaaacagactttaagtgattgatatttctggttattggttctcttaaaggtaataaaactcaaaaagaaacatctcaagagctaccaaaaaataccaattgtacactcagatctaaagcgtatgtttcgttacagaactccggttattgatctcttcaagggaacattgccccactttcaccatgtaggatctcttgcaactgcagcctccaacagcactgggatttgttgaaaccacaaatgttgaacgtataagttcttccccagatccaaattgtgcagggtaggcagctcgtctcagcgattaccagccgcagacacaagagcaccttgctgtgaacttgtaacaggtttgaacttcgaaggaaaagataattttggtgctgtgattgatttcactgtgaggagtgaaatgaggctaagtattgggcaagtccatcgaaatgttcttgcgctggcatcttctcggtcatgttttgttctgggagatcgtgtttcgttcaggatgctgtcccaaccacgggtagctggatttcatcagactgcttggcgtggtagtcaaattttggaagataacaggggaggaccattgactcttgctagcctagaagtgcaaagcagggttgaatatggaaaaaaggggaaaatggaacgaactggaggtccaaagccaagttcaagagcttcttccctctatgtgaaaccaaaggtttcttcaaatgtcaaaccagcaaagagtgccttgatgaagccagctgggataaagaagacactgaaggtagatgaggctctgttttcggccaagtcatttgaagaacttggtttgccacctttgcttgttgaccagttgaacaaggaaggtctgactgccccaactgaggtccaatccgcagcaattcctataatagcacaaaagcatgatgttgtgatccagtcatatactggctcagggaaaactcttgcttatcttcttccaattctttctgatataggccctctgaagaggactatggaacaagaccattctgagaaaagatcaggtatagaagcagtcatcgttgctccttcgagagaattaggaatgcagattgtgcgagaagtggagaagattttgggtcctaatgacaaaagactggtccagcaacttgttggcggagctaatcgttccaggcaggaagaagcattgaagaagaacaaaccaatcattgttgtcggaacacctggccgtatttctgaaatttctgcagcaggtaagctacacactcatggctgccgttttcttgtactggatgaagtcgaccagcttctgtcttttaattaccgtgaagatatgcatagaattttggagcatgttggaaggagacctggaggcacatctagggatattcttggcccacttgcgagacgatctgagcgtcagactatcctggtttctgcaacaataccattttcagttatacgagcagcaaggagttggggtcatgatccagttctcattagagctaaaagtgtagttccacttgattcaatcactgtgccaagacctgcgttatcccaaagtgacgctaaccccagttcgtcatcgcagtcagtgaaccaagctgctgttggcagcttgccgccatctttggaacactactattgtacggccaaggcgcagcacaaggttgacacattacggaggtgcatccatgctctggaagcacagacagtgattgcatttatgaacaacaccaagccactgaaggatgttgtgtttaagttggaggcccgtggtatcaaagccactgagctacatggagaccttggaaagcttgcaaggtcgacagttttgaaaaagttcaaggatggtgaattcagagttctcgttacgaatgagctgtctgccagaggactggacgtgccagaatgtgaccttgtggttaatctggaccttccaactgactccacacattatgctcacagagctggaagaactggacgtcttgggcggaaagggatcgtggtcacaatatgcgaagaaagcgagggatttgttgtaagaaaaatgcgcaagcagttagatgtggccatcaagccatgcgagttcactgaaggcgagcttgttgtccacaaggaggaagatgtggaataaaatcttcataatgcacatgactacttctttttacctgtagcgtttttgcaatagtttcgtatttcaaaatgctggcctctggccctttgcttgtactaccgaattttcatactgtcggggttaaagtttttgaatcaccttgctcgaccaagtcttacctaccctagagagattcctggcactagatgaatactgagggaaacacgtgtcttgtggtttactgagggaacctatgtgtttatgtttggtggaaagaagcatcagttactctattggttcactaaaaaaaaaaaaaaaa

SEQ ID NO: 157484 - DNA, 784 bp, Zea mays
  unsure (1)..(784): unsure at all n locations
  Clone ID: MRT4577_75202C.1
agagcatccagcttgaagtttcgaactcccagtctcccactattagcaagcaaaaccaagcggatcaaaaggacgtacttcctgtgggaagagagggttgtgtggaggagccatgggtttggatacgccttcatgccattttgactctagaagagcaacaattgtatgctatttggctaaactattgttcccaatatctgggttcacatgcctcctactgcttgtctacgttttattctttaagaggaagacttcaagaagagcacatctaccgcaactttcttttggtgagcattttgtgaaagttacttacaatgatctagcccaagcaacaggcggtttctcagaatccaacttgattggaagaggaagctatggattggtttacagtgggaaattgatggaaattaagattgaagtggctgtcaaggtttttgaccttgagatgcaaggagcggagacaagcttcttggcagagtgtgaagcgctaagaagtattcatcatcgaaatcttgtttccatcgtaactgcatgctcaagtatagatatgacaggcaattctttcaaggctttaatttatgagctcatgcctaatgggaacctgnataaatggatacatcccanaggtgacgagacagttccaaagcgtctaagcttaactcanagaattgcagttgtcgtcaatgtagctgatgcattggattacttacaccatgactgtggaaggcccactgtccattgtgacttgaagccgagcacatccttctcgatganatatgaatgc

SEQ ID NO: 157485 - DNA, 885 bp, Zea mays
  Clone ID: MRT4577_75203C.1
tttttttttttttttttttctgtaaaggtaatcaagcacgccggcgccccgctgccgttgtatcgcggcactatatcattgagggctccatttctcggcaggaaacctcgtcatttccctgtaccgacaacctagtatgaaatttacacgggacagagattcaacctctttggaagacaggttcgtgcggatatcagcccatcccaaggcaaatttctgcgtggaaacgcatccggcctctggacgtcgggcgactttccacttctcgagcatgtcgcgtctcctctcgcctcttgctcggagtcgctcgagcacgccgtcgccccgcttccgcttgcctgagcacgctgccactagagtcgcccgacgttgccgtctccgtcgactgccgttgctcgagcacgcccccgctcctctcgcctggaggctggagtcgcctgagcacgtcgccttctttggcctagagtctccgagcatgttgtcgcctcagtcactccgcctcctcaggtgaggggttagccagcgctgctcgcatcttcatgccctttctactttctgcttgtccttgctcagtttctcatagatctagggaagaaaaggtgcgggcagaagtagtttcttgtagatgtaaattggtggtagctagcctgtcgttctggatcttgggaagaaaaggtggtgtctgctattattgtttgttgttactgtcgagcgacatatattcttagttctggttttagcactccgtccgatccagaaatattgtgttttatttccttcctctcttgttcatgttccaaatttcctagcttgtctctctctgtgtggtattaaaaagatgtgtaagtgacacattcttggcgtggagctcgttctgtgatgttg

SEQ ID NO: 157486 - DNA, 263 bp, Zea mays
  Clone ID: MRT4577_75204C.1
tattcttggcacacaggaggaacagggcgggtgaagtagaagtccgggtgagattcgagggttttggtgcgggtgaagatgagtgggtgaatgtcaagaatataataaaacacgatcacatctgatagagtgtttcaagatccgatattctcaggttgatgcggccatagttctaattatgaagacgtttatggttctgagccacattcttgtaataaccgatctttatcagcagtttatgtttcctgttaagccatttgtta

SEQ ID NO: 157487 - DNA, 758 bp, Zea mays
  Clone ID: MRT4577_75205C.1
gccggcctggccggggaaaacccgtcatttgtttctcctccgtgcacagctagcttcctctgtcctcttctacgtcagtgacagtgaaatcacggctgagtggcgccaccgcccgtggggcccatcaccggtgcgcgcgctcaataacgagtgagcgcgccaccgtcgagcggcctttcggcggtgcgcacaaggccagcggtcgaggcgccatttccttagtcgactagggtctccgtctctccgactgctagttttcctgcatattcgagaaatatatggatcttttctgctcttcaggtccttctcttggttataggcctcctatagtcctatccaggccttcctgtatcaaataccaatcataggttggattatgcagtaccgattcgagattcagaaaaggagaaatttcaaaattttcggtttctcatcattctggtgttgaacatctgaagcagcgaatcttgtgacgccatttcaggtgcctgtcatcgttgacaagtagcaaaagtgcaggcttgttcaatgcacctaatgaaatcactgccaactagtagaaattttatttttaatcacaaactaatgttttatgacagcatatcctcggctataagtttctatgaataaatcaagcgtcaaagatcacggcacaactcgctacgccatatgtattagtgtgactaggtgaatatgttttaaaatcacggtacatacataggcagacgctcatgcatgcgaaaaaaaaaaaaaaaaaa

SEQ ID NO: 157488 - DNA, 749 bp, Zea mays
  unsure (1)..(749): unsure at all n locations
  Clone ID: MRT4577_75206C.1
tacgcctgcaggtttcggtccggaattcccgggtcgacccacgcgtccgtgctgaatagccggtgggagtccatcatgtgggtgccagtggggcctggttggttcctttcctgcaggttgggctgggccacagggtttcctgtggccaaaagtggtgcctggagcaggcctagctggcagggacctcggctgtgtgtgtgcatgtgtgcttgtgtctttgcagtgcagtgtgactctggtgttggggtgctggtgctgggtggcagttcctttctctgtgagctggggtggcaactgctagctggcactggaacagtcagggtgacccattgcctacctctctgcaactaaagagccctctgggcctatattgctgttattcctactgagctgttcctatttcttttttacagtttttaaaaattcttttttaaaaccaaaatgaacaatattttcctcctgcctctttggggttgagcctgggtctgcagactgaatgtaaccggggcagctgcccctccctatcattttccctagtcctggtgcttgggcatggttgaacctgcctctccaaggcccagaagcccttcttgcccaaaggcttccctgattctgagccctgcctgcctgngcttcctcaggagaatatgcttttccataatttccaaggaatgtcccttgttagaggtacttatttttattgagaaccacacccttccccatatacctttttgagatgtggaactgga

SEQ ID NO: 157489 - DNA, 318 bp, Zea mays
  unsure (1)..(318): unsure at all n locations
  Clone ID: MRT4577_75207C.1
ccccgggnaacagtcaaattttttttatgnagtagctcccttgnaaaagcatttggggggagggggccggtgtctgaggnaaaagcaccaccaccacctgtttcaccaccgcaagccagaggaggagggcgcctccggcgaggtcgtctccgagatgaaggtgtagcaccncatgctcttggtttattctcggcgtggctcggcgccgttgtggggggggggggcgccctgctcgngnngcccngtgcctgttgtgtccctngttcgtgctcgggctccgggtcntggtggtggtggtcgccgtctccgtcgtgggct

SEQ ID NO: 157490 - DNA, 641 bp, Zea mays
  unsure (1)..(641): unsure at all n locations
  Clone ID: MRT4577_75208C.1
tgggaccctcgaggccggccgggccgggacgtcaaaccgaaggaaccaagcatatagcgtagactgcgtagtcgatcatgaaggatgggggcatgaagggagtggctggtgcggtggtggccgtactgctggttctgcagctcatggcagctccaccgacggccatggccgcccgctcgccgcacggagccgtgcctgatggctccctcgccacgacgcccaaggtgacgatgctgtcggccacgctgtgctacacgggggagacatgcaaatacactccctgcttcactcctgcttgctcctgcagctttagtgatcgcctctgctacgtcatatttactcctgttgcctgagggccattccgttaagccactgctcgtacatgcgccggccgacgacgaccgctgcctcgtgagcttctgttcaataagttatgcatgtgttcaggccttcagggcatccaatatccatggatgctttatgtattatgtatatatgtattanataatttagtcctgtcagggaacgtaaccggcagaaaggggggtgttgttttatccacgtaagttttctggtgattaaataaaggggatatggtggggtgtgtggtaaaaaaaaaaaaaaaaaaggcccctagggnc

SEQ ID NO: 157491 - DNA, 945 bp, Zea mays
  Clone ID: MRT4577_75209C.1
ctcgaggccggccgggccgggttccgactctcggcaacggatatctcggctctcgcatcgatgaagaacgtagcaaaatgcgatacctggtgtgaattgcagaatcccgcgaaccatcgagtttttgaacgcaagttgcgcccgaagccttctggcggagggcacgtctgcctgggcgtcacgcaacaaggcagaacgcacccttctctcagtctcagcgccgtctttcttcgttacctgcccccgctccccgaaggctcgaaccctttacagccggcgaagaagatgcacctgtggccatcgctccggatccgcgactcgttcaagcacggctacctccagaagctggagctcaacctcggcaacatgaagcgcgcgcagcggcagcgccagggccggcagggagagagccaggaggaccaggacggccagcccggcggcaacgggaaggcgccgctgctcgaggaccgctcgccatcggggtccgtgcttgccggcgcgctcgagctcgcctgggacgccgtcttgctcctcacctgctgctgctgttgcttctgctgcggagcttgtagcgacgaagaggatcacccaactgcccgctaagaagcaacttcaggtgcctgataattcatcagatcacgaaaaccagataatttgtgggcataatgaattggagtcaaatagttcaaatagttttgatcagctttgtacatatggttttctattcatccttatgccgcccatagatgtcattgataaacgggaaaaaggatccttaatttttttgttggaaacccgttgtgtaggtattttgggcgtgtaatcaggtcgtatctgtatttaggataatctgtggggttgctgtttctcaccgacacaaaggcgtttagtccaggtgatgcttgcagcgcatgaatgccgagtctcttgctcccctcggtttac

SEQ ID NO: 157492 - DNA, 279 bp, Zea mays
  Clone ID: MRT4577_7520C.1
actccaaatacrtrtgcrrtraaacartaatcacctacacaccatttattaattcaacctttaaacccttactrcatacaatrcaatcrtaaartacaarcaatrtrcaarcrtacacattrtrtcraaacaacatacatatmacrgctrcttcattattcarrtcgaacahacaggctcagctagccccggcgttttattgtaactattrctcratttcrcrcacaaraaaatrcracrccragcacaamrcctraarrccccrccwctccaccratr

SEQ ID NO: 157493 - DNA, 583 bp, Zea mays
  Clone ID: MRT4577_75210C.1
tcgaagccggccgggccggaatactatagagagagcatagtccatcatgaaggatggcaataaggaagtggccggcgcgcggtagatcatactgctgtttctgcagctcatggcagctccatcgacgtcatgtgccacccactcgccgagcgcaacctcggcgtatgtgtctatcgccactacatgcaaggggaacaatgctggctttcacgctgtggtacacggggagagacatgcaaatacactccctgcttcactcctgattgctcctgacatgtttagtgatcgcctctgctacgacatatttactcctgatgcttgagatgaagacattccgcgaagccacaactcttacatgcatgcgccggccgacgacgacgacgctgcctctcgtgagcttctgttcaagtgatgcatgtttcaaggcatccatggatgctttacgtatatgcgtattaattagccgtgtcagggaaccggacagaagggggtgttgttttatttacgtcttctggtgatcaaagaaagggcaaatatatgttgaatgcgtggcaataaaagaccaaataaacagccctaaaac

SEQ ID NO: 157494 - DNA, 367 bp, Zea mays
  Clone ID: MRT4577_75211C.1
agctagaagtcgtacgtgcgggattgatataaaggctgagtgcatctagtagtcgatctaatacacgtgtttacacattggaagcgtactctggcaggccagaagtacgctcacaaaacgaagcccaatgcatggggagattcagactattgtgatcaaacaaagagtacccttaaccgcccgttcagctaacggacatactagaaactcgttaacggtcgctcattatagaccatgcatgcattgaagcacggtcaccaatgtgtaccctacagatagagtaacacacacaagatgatccaaaaaggaactaagggattcaatgagatggttcacagtccatataagcatcaccagcgatggatcg

SEQ ID NO: 157495 - DNA, 570 bp, Zea mays
  Clone ID: MRT4577_75212C.1
aaacaatcagatagagagagcatagtcgatcatgaagggtggcaagaaggaagtggccggtgcggtggtggccatactgctggttctgcagctcatggcagctccaccgacggccatggccgcccgctcgccgcgcggagccgtgccggatggctccctcgccacgacgcccaaggtgacgatgctgtcggccacgctgtgctacacgggggagacatgcaaatacactccctggttcactcctggttggtcctggagctttaatgatcgcctctggtaacgtcataattactcccggtggttgaggtgaaggcatttcccgaaagcaccaatcttaaatggatggggccggccaagaacaacaaccttgctctcctggggttctggtccaggggaggatggttccaaggaatcctggaaggtttaacgaaaaggggaataaataacccgggccaggaaaccgacaaaaagggggggtggtttaattaacgcctccgggggaccaaaaaaagggaaataaaaggtggatggggggcaaaaaaaaaaaaaaaaaaggccccaagggccccc

SEQ ID NO: 157496 - DNA, 636 bp, Zea mays
  Clone ID: MRT4577_75213C.1
ggccgcttttttttttttttttttgttttttttttttttttttttttttttttttttttttttttttttttttttttttttctttttttttttttttttttaacaagggcccccatttaacccaaagggttttttagcaacaactaaaaaccgggcccctcgccagggggcaaaaaatcgcaagggccaacctgggaagcccttggcaacagggagctaggaattctgaaacaaaattcaaaagcagcccaagcccacggtttggaaacagggaaacgctggaaaaccaaagggaacccccaaatagatccaaccccccaaaaaatttttcatccggccctataacaaatcacaaaagcagcttgggcaatccccaacaagcatttgcaaaggggacgggggggcccctttacctggcacggaacctttaaacttctcccagttccccaggtgcctttggggcaccccgcacaagaggggaaccttgcattttcaaccacaggctccaatgcctaaaaaccatccaacatcccaggggaaaagccccattgccacctcaggttccaggcccaaggcccggccattttacgatccaacaaaaaagcattgttttttggcatgttctggaaccaattt

SEQ ID NO: 157497 - DNA, 224 bp, Zea mays
  Clone ID: MRT4577_75214C.1
gccggccgtcccaggactcgactccaatgccgctctattctcagtacgcaaggccgctacctaattctattgccacctcctcgatctccttcaggcgctcaggcgttcggataagataacgggactaaagggcttctttcatttacctaatgggggacggcgatggagaaccggaggatggcgacggggctcccaaaaacacgacactccgagggcacagcata

SEQ ID NO: 157498 - DNA, 725 bp, Zea mays
  unsure (1)..(725): unsure at all n locations
  Clone ID: MRT4577_75215C.1
tctctctctctctctctctctctctctctctctctctctctctctctctctctctctctctctntctctctctctctctctctgtcgatcatgaagggtggcaagaaggaagtggccggtgcggtggtggccatactgctggttctgcagctcatggcagctccaccgacggccatggccgcccgctcgccgcgcggagccgtgccggatggctccctcgccacgacgcccaaggtgacgatgctgtcggccacgctgtgctacacgggggagacatgcaaatacattggctgcctcactcctgcttgctcctgcaactatagtgatcgtctatgctacatcatatttactcctgttgcttgaggccattccgcgaagccacaactcttacaatatgcatgcgccggccgacgacgacgcgcgctgcctctcgtgagcttctgttcaagtgatgcatgtttcaaggcatccatggatgctttacgtatatgcgtattaattagccgtgtcagggaaccggacagaagggggtgttgttttatatttacgtcttctggtgatcaaataaaggggaaatatatgttggatgtgtgcaatgcataaaaaaaaaaaacaaaaaaacaaaccccaaaaaagaaacacataacaaaaaaaggcccctaggggcgcggccgctctaaaaatgccccaacgcccggggtccatcaataacaaatgaatccccc

SEQ ID NO: 157499 - DNA, 282 bp, Zea mays
  Clone ID: MRT4577_75216C.1
catggaacatccgtatataacaaggaggcaagtgcaaaaccaacaggggggggctttaaagacatttgctggtttcaacaaaattgatcttgcacggaacaggtgtgcgccagactgaactttaacttgcggcgtaagctgatcattgctactagcatgcattgggataatgatgtggaggacctatagatgttacttgcggtctacttgatgcagctggatggaattctcaacagaatcgtgtcggatcgggagcatattgatgacacagaagactacgtt

SEQ ID NO: 157500 - DNA, 163 bp, Zea mays
  Clone ID: MRT4577_75217C.1
cctgggcttggcttactgctgctgagttcacagcttcctgccaaacgacgatgtgcaacatcaggtcacacgaccttgttgggatcatgacttgatggtatcagcctgcgccacaagtacgatgagtcagtgtcgtacatcgcggagcccctagcagcgctca

SEQ ID NO: 157501 - DNA, 668 bp, Zea mays
  unsure (1)..(668): unsure at all n locations
  Clone ID: MRT4577_75218C.1
aaatcccttttccccttaaaggaaaaaaaggcctccgcaaaccctaacctcacgggcggcggcggcggcggcagagatggaccccgactcagtggcgaaggcgttcgtcgagcactactaccgcacgttcgacaccaaccgggcggcgctggtggggctgtaccaggagggctccatgctctccttcgagggcgagaagttccagggagccgccgccatcgccaccaagctcacctccctccccttcaccaagtgcgcccacaccgtcgtcactgtcgactgccagcccgccggccccacgggcggcatgctcgtcttcgtctccggatccctccaagtcgacggcgagcaccacatcaagttctcccagatgttccacttgatgccaatcggaccagggaacttctatgtgcacaacgacatgttccgcctgaactacggctaagaatcttaccaaaggtcgtgcttccccatggaagacagaatgttctgcaaaaggaaacaattcggttgtggtttttgtgtttgatggtgaaaaactttgtggtgctttcatgccaacagcttatgaaatccactgaggatgaaacataacaccctttatggacctgngtctgaaaattgtactgtggtcattctcacatcaatgttatgtggaggtcaatggg

SEQ ID NO: 157502 - DNA, 2395 bp, Zea mays
  Clone ID: MRT4577_75219C.1
aaaaaaaaaaaaaaaaaaaaaaaaaaaaaaaaaaaaaaaaaaaaaaaaaatggccgggccgggcccggccgaggaaccgatcagagagagagagagagcgcatagtcgatcatgaagggtggcaagaaggaagtggccggtgcggtggtggccatactgctggttctgcagctcatggcagctccaccgacggccatggccgcccgctcgccgcacggagccgtgccggatggctccctcgccacgacgcccaaggtgacgatgctgtcggccacgctgtgctacacgggggagacatgcaaatacattggctgcctcactcctgcttgctcctgcaactatagtgatcgtctatgctacatcatatttactcctgttgcttgaggccattccgcgaagccacaactcttacatgcatgcgccggccgacgacgacgctgcctctcgtgagcttctgttcaagtgatgcatgtttcaaggcatccatggatgctttatgtatatgatatgcgtattattaattagccgtgtcagggaaccgggcagaagggggtgttgttttatttacgtcttctggtgatcaaataaaagggaaaaaaaaaaaaaaaaaaaaaagaaaaaaaaaaaaaaaccccctgttcctcctgtcatcttctcctcctcagaaacccaccaaccccgtccagccgccggctgtctcggccgccgccgccgccgccgccgccctatcccggtccttcaggcgaaccaggttggtcatggccttcaacaagatcaaggtctccaaccccgtcgtcgagatggacggcgatgagatgaccagggtgttctggaaatctatcaaggacaagcttatattccctttcgtagacctcgacatcaaatattttgacctcgggcttccacaccgtgatgctaccgacgacaaagtcacagtggaggctgcggaggccacactcaagtacaatgtggctatcaagtgtgccaccattacaccagatgaagcaagggtaaatgagtttggcttgaaggctatgtggaagagcccaaatggcacaattaggaatattctgaatggcactgtgttcagagaaccaatcatctgcaaaaacatcccacggcttgttccagggtggacaaaacccatttgcatcgggaggcatgcattcggtgatcagtaccgggcaactgatgcagttatcaaggggccagggaagcttaaattagtttttgagggaaaagaagagcaagttgagctggaggtgttcaacttcactggtgcaggaggagttgccttatcaatgtacaacactgacgagtccatccatgcctttgctgacgcttctatggccactgcttatgaaaagaaatggccattgtatcttagcaccaaaaacactattttgaagaaatatgatggcaggttcaaggacattttccaggaggtgtatgaagctggttggaaaaccaaatttgaagctgccggcatatggtatgagcaccgccttatcgatgacatggtagcatacgcacttaagagtgaaggagggtatgtctgggcttgcaagaattatgatggagatgtgcagagcgatttcttagctcaaggttttggctcattgggtttgatgacttcggtactggtgtgccctgatggaaagacgatcgaagctgaagctgcccatggtactgttacccgtcattaccgtgttcaccagaaaggaggtgaaactagtacgaacagtattgcctcaatctttgcgtggacaagaggacttgcacacagggcaaagcttgatgacaatgctagactacttgacttcacccagaagcttgaggctgcctgcgttggagccgtcgagtctgggaagatgaccaaggaccttgcccttctcgttcacggatcttcaaatatcacgaggagccattacctgaacacggaggagttcattgacgctgttgctgatgagctcagatcaaggctggcagccaactcgaacctttgaaatccttgccgaagttgtggtgctttcctgcgcgacgctttcgaaccgtttttattatgtcgccattttctttccctgtgccaccaccctgatgaatgaagaaggcctgagctaggcgaacatctgcaggctgcagcagtatgccaaatcattatcattaccgttaccattaccaattggagattgccgtagatttccgcgattatgggaactcatttacctgattatctgatacgtttgaaataaaaggtcgcccattcagaatgatttctggttgtctcttcatctgtgtccgatttcgtgctagccattggatttttgttacttgtcaatctcgaaagacccgttaccggcttttatcgtgataaacattggaattggtttgtgcc

SEQ ID NO: 157503 - DNA, 250 bp, Zea mays
  Clone ID: MRT4577_7521C.1
taacaattatatacccataccctttacatcaaagatgagaaatatcatcaaacagaacaattatttatcaaaggtcctatcatattgcagtttgacatacgtagactatactacaatcataacaaaaaatgaacgttactatcctaaaaaacacaaatatgttctgaacatgatagcgcaacaacatatgacatcttcagcttgacctatagatggtcacctgtccactaaatcaaagggaacacattat

SEQ ID NO: 157504 - DNA, 2486 bp, Zea mays
  Clone ID: MRT4577_75220C.1
cgactgactctcggcaacggatatctcggctctcgcatcgatgaagaacgtagcaaaatgcgatacctggtgtgaattgcagaatcccgcgaaccatcgagtttttgaacgcaagttgcgcccgaagccttctggcggagggcacctctgcctcggcccggccgggaaaccaatcagatagagagagcatagtcgatcatgaagggtggcaagaaggaagtggccggtgcggtggtggccatactgctggttctgcagctcatggcagctccaccgacggccatggccgcccgctcgccgcgcggagccgtgccggatggctccctcgccacgacgcccaaggtgacgatgctgtcggccacgctgtgctacacgggggagacatgcaaatacactccctgcttcactcctgcttgctcctgcagctttagtgatcgcctctgctacgtcatatttactcctgttgcttgagttgaggccattccgcgaagccacaactcttacatgcatgcgccggccgacgacgacgacgctgcctctcgtgagcttctgttcaagtgatgcatgtttcaaggcatccatggatgctttacgtatatgcgtattaattagccgcgccctcgcttgcgctcgtggccggccgggccgggagtctcacccacaagagacacaaacctagcgcaacaagcaatcgaaaaagagatttggctacaaccaattaaccatattggccagcagtgtacgtgggaacgatggccctcatgcaggagagtagtagccaggatttgctccaagctcacgacgagctcttgcaccattccctgtgcttcgccaaatcgctcgcgctcgccgtggcgctagacctccgcatccccgacgcgatccaccaccacggggccggcggcgccacccttctccagatcctcgccgagactgcgctccacccaagcaagcttcgcgcccttcgccgcctcatgcgcgtgctcaccgtcacgggcatcttcagcgtcgtcgagcaaccaccagcaggtggtggtgatgattcaaccgtccacacgtcggacgacgaagctgtcgtcgtctacaggttgacggcagcctcccgcttcctcgtcagcgacgacgtgagcacggcgaccttggctccctttgtgagtctggcgctccagcctatcgctgcctgtccgcacgccctgggtatctccgcgtggttccggcaggagcagcacgagccgtccccgtatggcctggcgttccgccagaccccaacgatctgggaacatgctgacgacgtaaacgccttgctgaacaaaggcatggccgcggacagccgcttcctcatgccaattgtgctgagggagtgcggcgagacgtttcgtgggatcgactcgttggttgacgtcggtggtggccatggtggcgccgccgccaccatcgccgccgccttcccccacctcaagtgcagcgtgcttgacctcccgcacgttgtcgccggtgctccgtctgatggcaacgtgcagttcgtcgcaggcaatatgtttgagagtattccacctgcaaccgctgttttcctcaagaaaactctacatgactggggtgacgatgagtgtgtcaagatattgaagaattgcaagcaagccatatctccacgggatgcaggtgggaaggtaataatcttggatgtggtagttggatataaacagtcaaacataaagcatcaagagacacaagttatgtttgatttgtatatgatggcggttaacggagttgagcgtgacgagcaagagtggaagaagatcttcactgaagctggattcaaagactacaaaattctacccgtcattggtgatgtatcggtcatcatcgaggtctatccttgaatgctttgtgaacaaaggcctccataataaactgaagaccaagaaggtgttgatagtatattatgaattgttatttgtcctgtacacttgattctttgcgtatttgtaatgacaagttgagtaattgtgtttttgttaatgaggaattaaaaaaagcatttcaagttacaagcgtaccagtggcggacctaaaaaacttcaaaatcctgggttgattctttgagtatttgtagtaaccccatgagtaattgtgtttttttgttaatgtggcttatagtgcgcattccccaatgtatgatatgttattttctctcattttggtgtagatgtgtgttggagtagtccctctattattacatcaatacaacatgagccttaaaaaaaaaaagggggtacccacttgattctttgagtattggtagtaacgacaagctgagtaattgtgtttttttgttaatgtggtcttatagtgcgcattccacatgatgtatgatatgttattttctctcattttggtgtagatgtgtgttggtcaagtagtcgataggcaactctattatgcttgacatcaataagacaacatggaagcctttgatttgttgtgtc

SEQ ID NO: 157505 - DNA, 367 bp, Zea mays
  Clone ID: MRT4577_75221C.1
caagcaacatagaaagggccagggcagcagcaacaacagagcagcaatggggaccaagatattaagccgtacttatgctgacttgcgtctttcgtgcatgatgttagttaacagcgacaatgtttccctcaatgctcacaagctcctatagcttgccttgttaccccataccttccatgagggatagctcaagtaagtaatacccaggtgttcaatcctataggctgcaacaagcaatgggaggaggagacacccccccatcaccctgggtgggggaacatgcggcagtcctatgtggggtgcagggataggaacaaacgatggtggggcagggaggtgtgaggcacaatgctgcctgggaagaacc

SEQ ID NO: 157506 - DNA, 296 bp, Zea mays
  Clone ID: MRT4577_75222C.1
ggacgcgaacacacgacttttttgaaggtttgtttgaatcgaaccgtaagggctagatatggggaggatataaacacaacagcagaatcgaactctatattgcgaatggagacacgctccgatgttggtttttcttatttgcgactgcaacgactggaatcgagtacaccaaaacatccagaaagaccaacgccacgggcgcacaatcaaaagagaactttttaaagaaaaaatggccagaacgaacagcatcaaggagaaattacagtgtcaacattggggacaatcgggtaaac

SEQ ID NO: 157507 - DNA, 281 bp, Zea mays
  Clone ID: MRT4577_75223C.1
aaaaccaaactggacacttggatgcatcccatattttgcaattttttggccccgtccaagagagagaaagggggggggagcctttttccctggatgggggtgatgatccatggaccaggttcccaaaatttggcttgatccaaggttccaaccctcggggtttgttttggtttttttcaaaaaaaccgcccttccagttttttttaatattatgactaccagggttgtgctatactggacctactggggccgttgggttagtttttcacggggcggtggca

SEQ ID NO: 157508 - DNA, 356 bp, Zea mays
  unsure (1)..(356): unsure at all n locations
  Clone ID: MRT4577_75224C.1
tcttagggagctgttgggttacgagctggacttaccgtccaacacagtggttcggtgccgagcatagatgatccagatttgnngcctcggtgccgggcccgtctcgcgaggcacggcttgcctgtctggtgcgtggggggaggtgcggctttttttcttcgncccaatggcctcggtccgcctgctggtgtgcttcgctggttccttgctgcggcnntgttggcagcctctttcttcacaggctcttccttctctggccgggtccgctccctggggcgcggggggggcctgtgggggttgatgcgcccgtgggctccgggggtgccgcgcctctgcttctgggcttgggtcacctg

SEQ ID NO: 157509 - DNA, 406 bp, Zea mays
  Clone ID: MRT4577_75225C.1
cccacgcgtccgtggccgcttgggcggtcgcgtggggatacagactacaggatcggtggggatgtgacgagtgacccctgaacggcttgatgctgattgcgcatcgcgatcttggagatgcttatctgaaagcaatgcgcagggtgaggacgtgatggaggatcacctgatcaagggcatgggggaggttgccttgtcccggatctggcttacgaacgtgaagttgactgggggtgcccttgtccaggcggacaagtgcgaggctgtcatgcgcagcactgttgatgggcacccgagggcgcgcacactattgacttccatgtcttggaccagcttcttttcaaattaggttgactgctatggcaactaggtggacgaggacttgtgctatgcttctgtatctacg

SEQ ID NO: 157510 - DNA, 276 bp, Zea mays
  unsure (1)..(276): unsure at all n locations
  Clone ID: MRT4577_75226C.1
cccgcgttcgccccgcgttcgtttctccctgccgggtggtgcngccaggctgagcccttgcgcgtggtccctctgtgcgggtgcgcctcctcccctcttatttcgcgccctgctgcgtggcctgtttttgtaggcgtggtccctggtcgcgcgtgctgttggtccccccttggttggccgtctgtcttgcgtcggcgtctatgcccgttgtacctcgcgtctccgtcgtctctgttttggttcctctttgtcgttcttttgtggttggggttttgc

SEQ ID NO: 157511 - DNA, 378 bp, Zea mays
  Clone ID: MRT4577_75227C.1
cagaaaagaaggggagcaggagcaggacgctgtcctcctcctttccatccgatccagggtctcctttccaatccatcgcagtctcagacaccacagcccagcagccatgcactcatctgcagctctctcctctcctagttctagcttccctgttcctgccccgataattcgctaactgttcgatctgctcctcccgggcctccttgtgtctactgctgctccctttgctttcgttgctactgttccatctcgtaggtttcgttgctgtcccctgcaggccaccacttgagcgatctgtaagcagataagattgaggccggcggcctccgaaataaaaaagatcctgcaagaaaaaaaaaagaaatatctagggcgaga

SEQ ID NO: 157512 - DNA, 965 bp, Zea mays
  Clone ID: MRT4577_75228C.1
gcacgaggaggggtataacctcgccggagaagacagctatccccatggaccgaagcatatcacctggtatcagctccaggttatcctcaccaccaccagccgcccatccctcaccaccaccagccgccgcgccatttgccgccgcaacgccctcccacccgccctctccaactctagatgcattcactcggctcgaagagaagtgggatcaattcgttgtgatgttccatcgctacaaggagaagacagagaaggaactccaagcagcggtgcggcttcaggcggcagcgcgagggttcctggcacgccgccaggtacagtcccttcgtggggagaagcaccttgctgtggcctccagggccaccccatggccgtcatcacatgagcaggccgtggtgcgcctgcaagccgcagtgcgcggcttccttgttaggcgggcggtgcggaagctgcacttgctgatcagctcatcgctgcaccaactcgcagcctgcgcgcccaaccaccaggtctcgtctatactttttgaaccccctgcagaagtcgagatctgggtatgcagcccccctgcacggccaaagagggtcgtctccttcattcgggcaactgccttggtgctggacagacccaacataagaacgagctggttcctccttcacctttcatccaacgtgaaggccgcagttcagctctttccttgggatccaggaggacatagctgcagttcaaatttatattttagttccacaattattttttattttcgtcttaaataataaaggtaagctgagatgtaaaaggcttaaccttaagtcatgtcaggtaagtctatggcagctcgaggacgagttggtcctcaagggagggggagatgtcatgggcatcatagggagcggtcactcatgtggggccgcacctatgcgcgccaaaagcgagaggccgcagggggcgctggcagcagcgcg

SEQ ID NO: 157513 - DNA, 375 bp, Zea mays
  Clone ID: MRT4577_75229C.1
atggccacgtgcacgaggacctccttctgtggcgtcgttgtcggtggccgcaccagctccctatcgctcgtcctcttgacgaagccctctaggagcagctccaccaagtccgcgtctacggggctccacgtgccatgcgtcggtgggccgtgcagcactcgccccctttcgggtgagaggacaccaaattcgaggaaggtatgggaatgggaaatgtggcacagaggtgtgggaatgggaaacagagaagaggccacggttgtgggacccacctgtcagacgattgtacgaccagagacatgggaatggaaatggaaatggcagaaccaggaatggcagcctaccccttaccgtcttaatagtagtaaagattag

SEQ ID NO: 157514 - DNA, 419 bp, Zea mays
  Clone ID: MRT4577_7522C.1
agttgatcatggcgtcttggctcactaaccaccaccacttttctcttcaaacatataaccatgccatggggggcgcgtgttcacaaagatagataggtccaccacaagccctcatgcatcagtatccagggagggtggtggcccgtggtccacatacatgctatgccagatcacgttgcactcctctccgtgccggctttgggccctggttctcctgcaggcgttccatttcacgttcctgatgaggtccttcaaccttactctgacgctggcacgccacctgccgcaagcgtgcattgcgttccacggagtcgcgttcttgtacggatcctagctgcctcggaacactggctcctccaacccagccgccgtgcccgtgctgcatgcgccgaaccaccaccgttacgcctctcttcgcc

SEQ ID NO: 157515 - DNA, 628 bp, Zea mays
  Clone ID: MRT4577_75230C.1
cgggagtgtcggagtaaaccctaccggacctatcgtcacgcgactgcgggagttgcttgcttcttctgccgctctctcgctccgtcccttccgcccatggagacctcgctgcgcttgcgcagtggcggcggcctccgcatccacgccaaggagaagctgcccctccacacaagccccgccggagttactaccccgagttacctcgctctctttgtcaggcacttctactcgcagctatcagccaatctcggagctggcgtccagttgcacaacggcgatgacctcgcctacagttttcgcgccaagaaggccgtcctgttcaaaccatataatgggttcctaggtctgaaccttaaagggcgcctacttaccgataaagagttgaagccgacgaagacaactggatccgttgaactggcatggaccatacttgacttgaaacagggccaagacgtaaggctcaaagttggttacgaattgtgtgacaaggtgccttatttccagctcagagagaacggttggacgctgaatgcttatatggatgggaaatgggatgttagatttgaaatgtgaatccacttgctcagtagtgttaccaattctacttgtctgtactgcacttggaact

SEQ ID NO: 157516 - DNA, 343 bp, Zea mays
  unsure (1)..(343): unsure at all n locations
  Clone ID: MRT4577_75231C.1
cttttccaactaactccaaatcttnttttcctgctacaccctggtcccgaaaataactgtctcgagaatgatgccaacgtgtacctttcattttggcttgaccatctcctcctctctctgcaacaagcttcctcactaaacccgactccatgcttcacacacaaaactttgaatgagatacaaactntcgcgatccccaatccatttgatccctcctttcccatactaatatcagctaggatgcaagattgttactctcgtcactgacaagaacattggccttttctttcgatatgcattcaccattatgttcaaaaaagttctaagcaagtcccacagttct

SEQ ID NO: 157517 - DNA, 1134 bp, Zea mays
  Clone ID: MRT4577_75232C.1
gggtacctcgaggccggccgggccgggacacagcccataacgatggcccccggcctattcgggctcgcctaccatctctcctccggtccttcctatcataccggcgggcggcgcggggcagctaatcggcaatccggcttcgcctcgtcgcagtccaatccgcactcaccgccgccctcccgcccctcacctgcccgcggcagtgtcggagtaaaccctaccggacctatcgtcacgcgactgcgggagttgcttgcttcttctgccgctctctcgctccgtcccttccgcccatggagacctcgctgcgcttgcgcagtggcggcggcctccgcatccacgccaaggagaagctgcccctcggccacagctcgctgctgcaggctcatgcggagctcgacctccacacaagccccgccggagttactaccccgagttatctcgctctctttgtcaggcacttctactcgcagctatcagccaatctcggagctggcgtccagttgcacaacggcgatgacctcgcctacagttttcgcgccaagaaggccgtcctgttcaaaccagataatgggttcctaggtctgaaccttaaagggcgcctacttaccgataaagagttgaagccgacgaagacaactggatccgttgaactggcatggaccatacttgacttgaaacagggccaagacgtaaggctcaaagttggttacgaattgtgtgacaaggatcgtcgcacaggggctgtgattgggactggtcgttgccgtagcactgctcctcgcctctacatcctcgacagcttgcgccttacttagttcacttcatcatctacgacccgtgtgctttctgcagcctcagttcgtgccgcctcttttgcccaatggcatcaccgtctaggtcatttgtatggctcgcgtctgtccaccttaataaaatcaggttgtttaggtcatacgtgatctgaatgaagtttccattgtaagggttgtcatcttggaaaacaaatacaacttccttattttaccagtgactctcattctgctagaccatttgatcttgttcactctgatgtttggggcccaactcctttggtttcaaaaggtggaaataaatattatgttatttttgttg

SEQ ID NO: 157518 - DNA, 805 bp, Zea mays
  unsure (1)..(805): unsure at all n locations
  Clone ID: MRT4577_75233C.1
tgggtacctcgaggccggccgggataccatatcttcacaccatctatacacacaacccccccccccaccccacacacacacacacacacacacacacaccgaaacaatgggcgaatcaacctccccgcagcccgtctccgtcctcttcgtctacctgtggaaacatctcgtcgctcaacaatggcagaaggcgtcttccagtcccttacacgacccgccggaaaacccccacacccactgatatcccacatcgactcatgcggcaccggcgcataccacataggctccgatccagactcgcgcacaatggctaccctccgcaagaacaacatcacttcgtaccgccactcggcccgcaagttttcgcccgtcaccgactttgacaagttcgactacatcttcgccatggacgatgacaacctggcggacctggagagcttgcgccagagggaggtcaagaagagaggtggcgaggacggcatcgggcaggtcatgttgtttggcgagtttggtggcaagaggaggaagtacaggggcagggagatgggcgaggagattgctgatccatactatggcggcgacgatggattcaccattgcctacgagcaggcccagagatttagcaaggcgttcttggaaaagctggaggcgggagagttgagctgagattgtgggcgttgggcatggcaccaacggtgatggttggaanactcgtcgatgagcggagtctcgttttgatacccatagactggccatgagctagagtgcattgtacattacacgaatcatatcgttttgttccaaa

SEQ ID NO: 157519 - DNA, 180 bp, Zea mays
  Clone ID: MRT4577_75234C.1
ggaaaattactgggggattacccaaacaaacccaaaatacacaccaaacgactaaaggcccacatcaccagggaacccttccacctcacacctaacaaccacacctgcagaaggggtcattccaaactgtccacttctcgctaacatgccggaaagaaaatacatgtagaatgggagaac

SEQ ID NO: 157520 - DNA, 238 bp, Zea mays
  Clone ID: MRT4577_75235C.1
cggacgcgtgggcactcgcccggaggcgttttacatgcaagctttagcagccgccaagcaggtcttgtgcgtcaagcaccacacagacaccggatggctctcctggtgctgctccgttgtgctgtacctcctggcgtttacgctgacccggcagagcacctattgatgactctggcgctgccacctcggctgctcgaggaagtcctctattgtgcctactccgagatgttcggagagg

SEQ ID NO: 157521 - DNA, 854 bp, Zea mays
  Clone ID: MRT4577_75236C.1
agctcgcctccccatctcgtacgcgccgccgccgccgtcgtcccgtccgtcgccgcaatccccatcgcgctttgaggtgcaagcaggagcagcccgggcaccggggtacgggatgaagaagaggaagaaggtggaggaggacgaggaccagaagcagccggcggcggaggagagctcctgtggggtcgaactgctgccggagatcctccgggagatcctgtcgcgggtgccgtaccggtcgctgtgccgcttcaggtgcgtgtcgaaggcgtggctggcgctctgctccgacccggccgtccgcaggaggtcgccgcagacgctctccggcttcttctgctactcccagcacgacgtcggcggcggccagcgccgtgacgccctcggcttcctcaacctgtccgggcggggccggccgctggtcgacgacccctccctccgcttcgtgcgcgtgcgcggctactgcgacgtcacgcccctgcactgctgcggcggcatcctcctctgctactgcgagaaggcggccatgagcgacgacgggaactacgtcgtgtgcaaccctgccaccaaggagatctgggccgtgctgcccgtgccccgaaacaagatcatgacacgcctcaacaccgcccgcctctgcttcgaccccgccgcccccggccgattcgtggtgtttgtgttcgtgcaaagttttcgcgggattcagacggtggagggctattcctcggacactggacggtggacctccatgcggagcgagtggaccccaagaccctcctcctccgtgaggattcagaatgcgtcttctttgacggcactttgcatttgggcgacgccgaccattctgatgccga

SEQ ID NO: 157522 - DNA, 277 bp, Zea mays
  unsure (1)..(277): unsure at all n locations
  Clone ID: MRT4577_75237C.1
ttttcttaactgacacgctccgtcgccaatattcctggcactcaccagctcggatcatcagtgctaaccggaaagtgccattctaaagactctggaacattgctagattgcatatcgaattttctacccgtcttgctagggatattatcagatgcggngccaacgaaatgcgatggctgggcagaggatgctattgcttccctatgatctctggaagagcggcgggaccaggaaagctagtccttagagtaccgtcttcgagacagggtccttggac

SEQ ID NO: 157523 - DNA, 566 bp, Zea mays
  Clone ID: MRT4577_75238C.1
ttcaattcgagacgtaccgctttgcctcagcccccgggggcaccggcagcaaaccccactaccactcccttagaggtgacctgaatgaccacttcactaccaatccactgaatggtggcaaaaagaggaaccgagggatgggcgacgttgggaaagaaaatcaggaggaggaggcatgcccagcgtccgagacactttgggacgtctcgcgacagcctcgttgggaggaggaaacggctacgaatacgggtacgccgggttcgagttaagggaagaccggaagtggtttccgcgattggtaccgaccgtgatcgccgcgtgaatagcactattcgtcgtctagaggtacaaactgaactgggccatgaactcgttgccagatcggcgaccactgcgactgcgcttgcctcccacggtgcgcctaccgttcgctgcgagagagcccgatgctcgtgccggcctcctccgctgagacatagcatgcaagatctggactgcgatccaagagctcatcaagaccgcagtggacagcttattaggtcgatctggctccatgttggactgat

SEQ ID NO: 157524 - DNA, 417 bp, Zea mays
  Clone ID: MRT4577_75239C.1
atccactcccgatcagcagctgatcgctcactcttgcagctcgatcattctttagctgctctagctctagccctagctagtagctggcgcactcggtcgtgtagtcatcagccttctgatcgtcacccatggccactgccgaggtccagaccgccgctgttttggacactgctgaaactgcaagctcgaaatccactgctatcgccaaaagtgctcctgacgagcctgtccccgccatctgtgccaccgatgcggagccagttgccctggaggagaccgatccagctgccgacgctgagcccgaggcggtccccgtggaggcggaggaagagactccaaatgaggcggagccggagccgtctgctgctgtagaggtgaaggttgggggatgggacccaacagaaaggagcaagaact

SEQ ID NO: 157525 - DNA, 607 bp, Zea mays
  Clone ID: MRT4577_7523C.1
agagatagagagcaaagcagagcagatacacagccggagagagagagagaaggagggtgtgagcggaaggcggcgtgcgcatggcaggaggagagcatggagccaatggcctgcaaccgcaagagcaagaccacaccggagctctggaggaaggcagaggaggagcgaatcaaccagcagggtgtgaggattcagagcaagctctgagcagcaccggcaatcagcccatgatcttcgtccaattcgtgcagaaggtcctcgccgagatcctggggacctacctgctcatcttcgccggctgcgcggcggtggccgtgaaccagaggacggccggcacggtgacgttcccgggcgtctgcatcacctggggcctggccgtcatggtgatggtctactccgtcggccacatctccggggcgcacctcaaccccgccgtcacgctcgccttcgccacctgcggccgcttcccgtggaggcaggtcccggcctacgcggcggcgcaggtgaccgggtccacggcggcgagcctcacgctgcggctgctgttcgggagcgagccggggcacttccttcgggacggtgccgtccgggtcggacgtccagtcgc

SEQ ID NO: 157526 - DNA, 387 bp, Zea mays
  Clone ID: MRT4577_75240C.1
ctagcttctgtccagttggtcacccatagcatagccattacacagatcagtcacgaaaactaccggagcttaacaagcaagcacacacgctagaagcaaggaggctgagggtcagagcagcctggggctggtgtaggggccgtggaggatgctgtcggcgatggcgtggtaggcggcctccgtcaggtggacgccgtcccagttggcgtacgccgacgggtcggcgcacacgctggacccccgcacgccgcagctcgccttggggttgaagttgtacggccccccgccgccgcagcacgtcttcagcggcccctgcttgaacccgaactgcttggggttcttggcgaaagacatggccgcgccgtagtagtcggcgtacatgatccg

SEQ ID NO: 157527 - DNA, 473 bp, Zea mays
  Clone ID: MRT4577_75241C.1
caaacggacaaggatggccaaagtatggcccttcattgtatatatatatagggagccaaggctttggggtacatgtggacatggaattgcttttgcttacgtgacatggaaacccatcctgatggccattgctacaaatcctaaaaaaaccctaaatggcggtaacaagacataaaaaaatgggggacatgagtttctccgtaaaaaagtcgatcctttgaagcctttcctccagccccagtttggatgatgcatcgtcgtccctcgctgtccctcccttgttgttaaacttcagcctttgatcatttttttgggcgttgccatcaccagggatcgcatcgaccctgcaaataaactgggaaagcaatgggtcaggtgcagaatctttgtatggcctgctgtagggctgctggggttctcccttttcatagaaaaagttcacttggtatgttgctgggctgggggcaacccca

SEQ ID NO: 157528 - DNA, 480 bp, Zea mays
  Clone ID: MRT4577_75242C.1
aaaagaggggggcattaaacaaccaaaatagcacaaaacatacaccccccaggcccgaagcaaggaacgacccaaaaaaaaccggaccaggccccaaaaccaaccggctacaaaactgggaacaggaagggaacaaacaaaagaatcacaggtggaagatttaaaaaaaagggacttccctgcaccgcaacaccctaccccttgagccggccaaaaaaccccggcttcccaacgggaggcgggaagccaccggccccaaattaggacaaaggggcaaaaaacctgagctggatcccccccaaccccagccggaaaagctgcttcaggagggaccgggggaggggcaccacccccttctttgggcccacacaaaaaccctgggacaacagggaggcacccttcacgaaaccaaaaggggggaagccccccacgggagggaaggccctcccaagcccggaaaactctggggaggcaacgggg

SEQ ID NO: 157529 - DNA, 412 bp, Zea mays
  Clone ID: MRT4577_75243C.1
tttttttttttttttttttttttttttttttttttttttttttttttttttttttttttttttttttttttttttttttttttcaaggccaaaataagggccttcccctggcggaccccccccccaatacttgtaaccgggttttaccaacagcaacttggaaactggggggggcaaaaaccctggaaaaaccaaaatggaaactggggagggggaacttgtttacccctgggctgccccccgctgggggttccactgttaaatttttgccccccgttccttggtgccttccccaaccgggttccggttccggttcctaaaccccccgggttaaggggggcccccgactttttcggggattgggtttcttttgtttttcctgggggtgccactgcccctacgggagtaaggg

SEQ ID NO: 157530 - DNA, 1019 bp, Zea mays
  Clone ID: MRT4577_75244C.1
acgtgaaaaacaaaattatacactgttgcattatttggtgggcttagacactattgtacatcagtgggatatggaatgtgcatattagaattgttatagtttgttagttgcgtagttaatacatgtatgttttcagttatatatattagacctttataagaaacacaactctgtatatttgcaagtatggaacgtggccgacaatattattttacaccaggaggtgccttagcagcacaggtggcgccttagtctggttcctgttctagtaaggctgcatacaatgcattcttctttgtgtccatcaagtttgtgccttggaggagaatttggagatcctcggcaaccctggggtgtaaattttttttgtgtcttgctgtcaaaaagtggtctggatggctaatcaaaattgtacaaacaatattgtacaaacatagtttaacgcatcctgctgctagcttattgtgtgatcaagctgaagagaccatcctgcatattttagtttcttgtattttcgctcggcaggtctggaccttggtattacagaagcttggacttgtggcactagcacctgattctgatgtaacaagtttccccagctggtggtgtggtgctatcaagaagatacctaaggacgtgaggaaatgatttaacacttaaattatcctggtagcttggaaaatatggaagcatcgaaatgcatgtgttagctcaaacgtgcaaatggttttacaggcggtgggtactgagagaatcctttggtgctctccaggagcttctgctctttaggagctgctcccccccccccccttcagattaggtttgagttttcctggctgtggttatttgattttttttaggtgtgggtgtgtgagtctcaaggttttcctgggagaaggttccatgccctctccccctggtgttctttcttccatcttaatgaaatgacatgcagctcttctgcatggttcgagaaaaaattactgtaaggtatctctatctaatatcagaagcaatat

SEQ ID NO: 157531 - DNA, 260 bp, Zea mays
  Clone ID: MRT4577_75245C.1
tttgtcttccatacacccgctctgattctataagtcaatttttataatgttccaagcgtttcaccttacaaagaccgtcccaagcaactatgattctttaagcgatttcatatataaaattgaatgggctgttttccttgatgttctcttcaactagttgtataggtgtgacaccaattattttatttattatttttgaaataaaacatgtcaactaatggtaggttggaaactttaatacctgtttgataaatttcata

SEQ ID NO: 157532 - DNA, 402 bp, Zea mays
  Clone ID: MRT4577_75246C.1
acacttgcatgaagaatcgttgcaaccaaactacatggtgtcaatacagaatatttcgagctcgaattccatgctcgaagtttgcgccgggcatacaatcagatggggttgatacaaatgaacgtgaaacctgccctatgaataccaaacttatatgcacttgactaacggccacatgaaatattacatttgagcccttccacccctgacaagtgcattcacaaggtcaaacggggaacaaattcagaccctctttacagacgatcaagtactatgcacatggcccattggctgcaatcaatcgttcagtgtgcttaacaagctgaaatagaaaaactggagaactttacttgatagcacacgctacatgatgtggatacaaatctgggggatccagacagc

SEQ ID NO: 157533 - DNA, 522 bp, Zea mays
  unsure (1)..(522): unsure at all n locations
  Clone ID: MRT4577_75247C.1
gggggggggggggggggggtaaaaaaaaaatttttttttttttttttttttttttttttttttttttttttttttttttttttaancccaaaattaggaaggggggcattaccccaaattcgaaaaattgatttatgaaacaccctctgagggggggggggggggtttttttaaccaaaaacccccattgtttaaaagggaaagaataaaacccgaaatttccccccccaaaatgagaaatacctggaaaagagggggaggtacctaaaaacccaagcgggtagcctaaatatcaactagctaaatttggccactgcattatactactaggccgattcaaaaacattcaaaatcatccagggctaccacaaaaacccccaaggactggagcaatgtcagtgaccaacaacctcaaaacggtgctaccaaatgcccgagaaaaccccaagcactcttttaaggggggggcgcatgtcaacttccccccttcatgagcatcatcaaaatacttgatgtcaaaaa

SEQ ID NO: 157534 - DNA, 186 bp, Zea mays
  Clone ID: MRT4577_75248C.1
taccaggcctacatccactcatccacataatttttcattattaggttttcttaattgtttgtgatagccataaaaacaaaggtcgccaaatcgcaaatcatattctattcttccacctcaacactatctccaatatcccttcaatctcctttataacttatcattctaatcctttccttatttctt

SEQ ID NO: 157535 - DNA, 366 bp, Zea mays
  Clone ID: MRT4577_75249C.1
tgcagttctacaccatggcctctgtcctactttccttcctaattcaactaattacggggggaattccaaaaagagggggtgaattttatctaaatcaaactccattcccggactgagatatatacaaggaagcaaactctaatcgtgctgctgtgcgccagcttttgttgccctgattgcacagatccttttcacattatatttattaggctaagcaatttatcccaaacaaagtgctcatatattgtaattccaaggcttattcataataattccaggatattcatgcctcgtgcactaacatatactgccattactaatggactaattcttaccaaggactagaaatattctagggaatcaaaa

SEQ ID NO: 157536 - DNA, 293 bp, Zea mays
  Clone ID: MRT4577_7524C.1
tctttcggcacctctcactatttagtctttcaattaagcttgctaggtattgaccattatggtttgtgctcttatgatgactgcctttttcatgctgattctatccactgtccagttgatggtaattgtcggtgcaaaggcgctattgttgcatgcggacaccgtgcctatggctcggctgctgttcttgggggtccatgagcgttcatcctccgggaggacgagcaactgtccatgcaccgtcatgacttcgtggtgttgcttcgttttgtataggacggggtttgataact

SEQ ID NO: 157537 - DNA, 290 bp, Zea mays
  Clone ID: MRT4577_75250C.1
cacgcgtccggagatttaaacgaggatcctcttaccttgctgaaccagctattaaccaatggtcctgaagcattcaaagaggagaggataaactaattccttaaccttcttcaccatgctcgccaagttgtatcaattactcactatccaatccatcggctatatacttacctcctagatgatatgcatgctaaacatgcctactcatgtactaacatatatctttccctaaagtgcctagatccacagagtaatgcactattgtcttacatgaagatttcgaataacat

SEQ ID NO: 157538 - DNA, 310 bp, Zea mays
  Clone ID: MRT4577_75251C.1
tccctactctacgccactcgtccttcttcggatcccacaccgatgaaaggataatatatcgagggtcagaataatttctgggtagttattttccataatctcgtgccacaccaacgactatttctactccctcatggccaatgccaatgaccacgtcaagctactcgtcatctacttcatagccccctgttgcagttggtgccaaatgatcgcccccgtgtactcatactgctccagcaagtacccttccgcagtctttctagaagtctacattctactaactgctggaactctcgaacatctacttctt

SEQ ID NO: 157539 - DNA, 309 bp, Zea mays
  Clone ID: MRT4577_75252C.1
attcactgaacacactcaccagattttgcttgctatgctggtgaccaccgagacagacgagcgatggagacctctagcgtactggctgctccagcgcttctccaactaccatggagcaggatgttgaaacggcgacttgctgctgtacggcttctgagctgatgccccgcggggagtcgctcggcgccgcaccaggacgacggtgtgccacgtggtggggaacttcctgtacgcgtccgacgccgcgctgatcgaggcgctcgcggaccccgagctcctcgcctacttccccgccagctcgagctcgtc

SEQ ID NO: 157540 - DNA, 312 bp, Zea mays
  unsure (1)..(312): unsure at all n locations
  Clone ID: MRT4577_75253C.1
gggtgctacaggatgcacccggccgggtcctcgctgctgtcgttggggcgcgctctggcnncacgtcagacgtgcacccgtcgacgggcaccnnntcatccccgccgggacccaccccgcgatggtgaacatgnntgggccattaccgcnnacgacccanngacgttgtgggccgatgccgaccgggagttcccagccccggagaggggttcattggggtccaccnnngagttcccgatcattgggnngtcggacctcagtgcttcgcgccgttcggggggcgggccggcnngcagctgcnncccgggaagg

SEQ ID NO: 157541 - DNA, 434 bp, Zea mays
  Clone ID: MRT4577_75254C.1
gactagttttagatcgtgctgggctccttcttgttctggttcgaggcggtgcgcagggttgacggcctggagatcattgacgcgagcaagactccgctcttggctgcgtgggcggaacggtttggagggagtgtagaagcgaaggagggggtgccggtgcctgaggcggacttggcggtacagtacatcaataagtttcgtgcccctgccatcgacgctgcgaagttagcgagttcagaatgagttcaggccaccaaagctggaagaggtaaacggtggggtaacagttgctatgatccttccaattccaaccgaataatgttgaaacttgaaagattattatattgataaatatgtagcgggttgactaatttttcatctgattatgttgttccagtcgtctgctctgcaataaatatgattattttggtgtg

SEQ ID NO: 157542 - DNA, 1251 bp, Zea mays
  Clone ID: MRT4577_75255C.1
cgcttccaccgcaacagccgcctggccgcgtacacgggcgtcattgacgactcgggcttcacgtcggacggggccaccgagggctacggctacatgaggacgacgacgcacgcgaccggcgccaccgcgggaaccaaggtcggccgtggcttcccgcagcacgtcaggagcccgagcgcgagctggataccgagcatcggggaggaggacgatgaggaggatgaagaggttgtcgtcgttgaagaggaccgcgtgccgcgggagtggacggcccaggtggagcccggcgtccagatcaccttcgtctccaccgccggcggcgctggcaacgacataaagcgaatccgcttcagccgcgacatgttcaacaagtgggaggcgcagcggtggtggggagagaactacgaccgcgtggtggagctctacaacgtgcagacgttcagccggcagcagggcgtctcgacgccgacgtcctccatcgacgatgccacgcagagagactcgtcgttctactcccgcgccggctcgacgagggacagcccggtgatcctgccgccgacagccgtgggcagggagcagccgatcgcccgcgccacctcgtgcagggccacggccgcggcggcttccacggcccgagccgcgtgcaacccatcgtccagtgcggtgccggaccctcgggaccacgtgtgggcgcaccacttcaacctgctcaactccgcgccggcgccggcaccggccgctccgcacctcgacccgtcgcgcgctaccacgtcgtccctggacgaggcgtccgtgtccgtgagcaacgcgagcgacctggaggccacggagtgggtggagcaggacgagcccggcgtgtccatcaccatccgcgagttcggcgatggcacccgcgagctccgccgcgtccgcttcagccgggagaggttcggcgaggagagggccaaggtgtggtgggaccagaacaggaaccgaatacacgcgcagtacctgtgacgtcggactcggagctagctgttgggtgtgcagtacacgcgttggatggaagccaagccaccaatccatggacaatagtagcgtagggctgagtcagtgatactattgcgactactgtctactagtgctagtttttacagggtgaacagaggtgaaagaggtccacggaatggagcctgtgtaaaacatgtttgctactactactgatctgggtttgtgtgttgatgaccaatgtattttttttcttgatgagct

SEQ ID NO: 157543 - DNA, 2143 bp, Zea mays
  Clone ID: MRT4577_75256C.1
aattgccccccggaagaagccgcaccaggagcaaattcctcctctctcgagggcggttgcgtgctcgcgtgaagaaggccggggccctatctctccgatcgcggtagggcgttcgcagcgccgattcgagccgacgattggccgtccgcgaaggttaaacaaaatcaaatccccctgttcatgtgttatggcagggcatcatcataataacacacatgcctccaggatggatcatgtgaacaggttccagagtgaagcacagccttttggcccaaagttatttatgcattctagaactgatgcagcaaatggagctctaccatcaggttatgtgggcgcaccaataagaccaaatggcattccattctcaagtcacaccgggcaatctcatattcagcacagtgatgctcctggaaccatgcttgcatcctattctggctatcctcttgctggaagctccagtagcacctatgcaccacataatgctcatcatctgcctgctttgagctatccacataggtctgatgataacttcattccgagttcccatatggatgacagaagggttgcactgaagcggagaaatccaattatttatccagtggatggagtcaataatgggagctgttatgctggcagttcatctaatcctcagttcccatgctacatgccttctaattctattcctgctcctgaaccctgccctcctcgaataacatcaaatatgggttcaagctactggactgatcagccctttggtagcaatggaggatctcagaggaatgtgagaggtcgccatgatcacaatcctatccatttgggacacaatccaggtgtagcttgcgcaacaagcagcactcatgggccaccacaccatgctaatgtaattggtcctcaaagtacagcagtgccacaaaatagagcatatttttctatacctccaagagtgactgccccaggcagcgatggaaactgtagcatggttttcagggaagggacatactactctgctccgcagaggaccaacataaatgccccccctgtcctagcacctcctggttcttctgatagtctacattttgtgcatggtgggtatgccccaagagcagcccctcctaacagcatcagcacatatcctgccccggcttttgcgactcctaacaactcagtgacagttacccatgagcctgatatcccttgctatcgacctgccgtccctggctatccgcctgctacctcagcagcagcagcagcagcaagtgttcatgctgaaggtgctgctgcatcttcgagacatctaggtcatgtggctctaggttccagtggtagtgcaaggagtagaaggctgagggattcataccatgcttttcgtccactggttattgaagaaaataacttgagaggaccagcaaccgagcgttttatgatgctaaatcagttatttatccatgaatcgagagaagattctgaccctcactgggacatgaggctggacattgatgatatgagttatgaggagctgctggctttgggagaacgaataggcaatgtcaacacgggcctagctgatgaaaaactttcaagctgtgtgacggagataccctgctgcagctctgcccgtactcatgatgataatgagagcgcaagatgtgtaatttgcctggaggattacaaattcgaggactctgtcgggaagctaaaatgcaatcacaagtatcacgcagactgcatcaagaaatggctgcaggtgaagaacgcttgcccagtctgcaaagcttctgcggcagatgacggcggaggcaccgaatgaagcgccctgccgcccccattcaccctatctcaggcgaagctgtactggctgatctggtttgctgtgtgtaaataatggtcctgaaacggattatttgtgagctgaattaaactcgacatgtaaatttaatcctcaagctagttgcaaattgatggcagcggttagccctacgtgtcagccgtctgacgtaactgcagagagaaaacgtttgcatgcatatgtacagctcgatccaatagaggttattaaatgttaacaatttattagttaaaaaaaaggtctttacgacgtccaaaaaaaaaaaaaaaaaaaaaaaaaaaaaatttaataaaa

SEQ ID NO: 157544 - DNA, 1630 bp, Zea mays
  unsure (1)..(1630): unsure at all n locations
  Clone ID: MRT4577_75257C.1
ccgaaaacaaattgttggcttaagctcaaggatgactattgacaaaatatgaaacattacaacaaacgtctgagacagacatctatgaaaccgtgcataattttctcataaatacatgaccaacaaaccatctctttgtcaatctgggtgactttagctgctctgatgatgtgcccgtaaaactgagaaaactgtacctaagcacctgcttgccatacaccaaccatgtttctgctcatttgtcgcaaggggcagatagttaatctgtgaaggtgataacgatgccagctgacttaactggtgcctgtggtcacatcgggtctggccattcaaaactatatgagcagtccaagcagtttgttcatatgctgaactctaccttgactgccactgagaggaccctctgttgtattctggagaatttccaaaaggaggacggcgttgaggtgccaaaggcactgcaaccttatatgggtggaatagagtttcttcctttcaagcaacctttggatgtgaaacaagcttctgactccaaatcaaacaagtccaaatcaaagggaaatgctgcttgagctggatgaggaacactatgttaatttttgggcctaccagtacacaatacccatagcatgactatggcgttgcaggggcggctgccgcagcgtcgcggaagctcgacctctatgacgcgaggcaagcaatgccggcgcgtcccgtgaagagcacccgcacagggaggccctctcggcggacgcatgacggcgatgggcgcaccggttagtgtggatcgtctctggcctcgacctcccgccacctcaactctacatgccctggcttgctccgcaaggcatgatatgctgttcgggaagcctgngaagagtggtctcgtggctctcaacttggatttcgatcaagtcaagccggttatcaaggagcggctggggattgaggttgcactgtgtggaagcaaggcattgcccggtgtgacttgagaatggaatgccatttggtcttattggtgcgcccacataacctgatggtagagctccatttgctgcatcagttctagaatgcataaataactttgggccaaaaggctgtgcttcactctggaacctgttcacatgatccatcctggaggcatgtgtgttattatgatgatgccctgccataacacatgaacagggggatttgattttgtttaacctgaaaaaatatagggttggcattagtattctagaaaagcaagttgcagctgcaaatatacttgtagatttagaaacaaaatatatacagagaaccacaaatacttagacttctgtaataaactaaaaagaatcattcagaccttagaaccgcaagatgtgagattacagtcacacaggctagagctgccagtgccaaaacccaaatattccatcatatccagtgtcttatttaactttggtgcaacacacaacacaaatgaagtcctcgtcatatatccaagaagactagaaaccatgccgacgtaattaacaaagtaaacataaaactttttgactacagtatgtagtttacagaattaaactagagaaggaatcatcatcatacttgcataatagtctgctacaaaataaaacccggccgg

SEQ ID NO: 157545 - DNA, 240 bp, Zea mays
  unsure (1)..(240): unsure at all n locations
  Clone ID: MRT4577_75258C.1
gggaaccccgcggggaatctgtccctgctagaagtacattatttaaagataaatttaaattgattgtatcaaattaatacaaatttaacaaacaagattgaaaattacaagagatatctactttagagtttagttttctattttataacatgtcatgcactgagttcttactataattttaacaagtaaattgactaacttggataaaatagtttcgtggggcgggtacacgggngaacg

SEQ ID NO: 157546 - DNA, 113 bp, Zea mays
  Clone ID: MRT4577_75259C.1
ggccttaagaagtgttgtagtagtagtggtagtaattaccattaggtggtgggtctgatgacgattcctgagtagaatagttggagtcatgtgattacgttggagctgttgca

SEQ ID NO: 157547 - DNA, 286 bp, Zea mays
  Clone ID: MRT4577_7525C.1
gcacgcaggcaacacagacggtactcctttcaatctgaatatactgtattcacacatcgatgtaacgtggcaaagtaaaatcttgcgctgtcataacatcacgacaatatgccattcgtgcgacagcaatttttggagcaggttccagagggacaggacttgaacaatattgactaccaactcctggcattctgagtgcagagaaaagtgaggcagaaccacatggtcacttctaggacagacttactgcaacaagaccttatatgctgctagggtacatgaacac

SEQ ID NO: 157548 - DNA, 701 bp, Zea mays
  Clone ID: MRT4577_75260C.1
gccggtttccaaacatcatatcttggcgccattgctccgaagattgatccgtatccagcaccgacaactagctatcaataatggctgacgtcatcaacgctggagcagcaactgcatcgtatgctcgagacgagcggcggagccaccaccctgtgctgcgtcttcgtgtccgccgctcgaccataaggacgacgaagatgaccacggcagcggcggctggccgcgcccgtcttgtcgcgttctcggcggagagagacgtcgcggccgagggcaacacgatacctcatcgacgtggcggagctcgtcgccctcctcggtagggccttccccatactcttctcgcgcaaggacacgtggccgcagtgcgaccgggccgtgttcatccgaaaggcggcctggagtctgcatccgaacgcccagaggatggacgatactcagatggtgtggcccaactgcaacgggcgtcggcaagctcagacagatcaacaagtatctaaataatcccatccaccatgcctgctactgactaagctcatatacatgtgctgatgtgcatgcatgcaccaaccaaactgctccttagtataaggtcttaattatatctcctctccgacaatgtctgaatgtatatgctgagtgagtgataatctcggatggcatataacctgttgcgttgctacaaaacatgttgtccaataaca

SEQ ID NO: 157549 - DNA, 326 bp, Zea mays
  Clone ID: MRT4577_75261C.1
gtgaacacctattgcaaagtgtataaaaaaaaaatatacaacatcactactttaaataggaaatctgtgaatataaaaaagaccaaatcataaatgaagatatcatacagtgaaataatcacataataaagggggcggcgcgttttaaagaatcccagttttcttcctcgggcttgccacatcatattttttttttagggacccctaaattaaattaggtggccgtattttaacaacggggatcttggaaaaaccctagtgttcccaaattaaattgccttgtggcaaccccccttttagccaggggtggtaataccaaagaggct

SEQ ID NO: 157550 - DNA, 409 bp, Zea mays
  unsure (1)..(409): unsure at all n locations
  Clone ID: MRT4577_75262C.1
tatttcngcacgaggcgcaggggcgcgcggggggtgtaccaccaaattccaacccctactgctaaatatttcaggatcactacgcattattcctaccttactgcgatcaatttaatgagaggatccatggagactccatcatcaacagcgccttccaaaggagcgacagacacaaagggggggtggggcaccactacttatatgtgcagtgtcacatattccttaatctggccacatttaccaccgcattgagaaagatcaacccctttaaaaccttcaaagaatccggctcggacccctccatctactttcttgacatcaatcttgacagagaagctgacctcacttcaccaaggtaaagaggagcctatgctcactcaaaccttgaacaaggatcacttcttcccta

SEQ ID NO: 157551 - DNA, 811 bp, Zea mays
  unsure (1)..(811): unsure at all n locations
  Clone ID: MRT4577_75263C.1
tcgggactgccgctttggctctcgctgctccatctctgcggctatcactcccgcccagaccgtcagcaacatcaagatgctcacctccaagagccaggctctccaggcccctgctcagtccatcaccatcatcaacggacctctcatcgttatcggccagggaccattcccccagatcattgctggctttaccgacatcatcaccactgtcactacttccatcgctcagatggatggctctgagcctgtcaaggctggccctgattccgacgccatcttcgacgcattccgtgagtttgtccgcgtccaccaggttctcctgaacatccttattggcaaggctggcctcttcaccactgtccccatcattggccaacctgtcgccgctgtcctcagacagcttgagggtgttgtcgacaccatcgctttcatgctcatcgacagcgtccagtctcgttctgctgacctcatcaaggaggccaacaacctcggcgccaccctcgacgtctgcatcaactcttaccagggtcttgcctaaataccttccaactgagtagcctggcccctcaaccaaaaagaccgttccatggggattttgcctggcaactcccagtgaagataccggttctggaagatacatgaataatggacagtggtcatcaagccactatgttgtgatgggaaaaaaaaggagtagttttcttcagcagaaactacctctagtgcgattcttttcttctgctgtattcgattgtttatacatggtcgccctttctgttaataacttttnnttggatatacatatatttgg

SEQ ID NO: 157552 - DNA, 265 bp, Zea mays
  Clone ID: MRT4577_75264C.1
gtgctggccacccaaggccacacccaggtgctgattcaccagctgagccgtcgccgcagccagagtccgttccgccgcagccacggacaggtgcagcgagtggccttccaccctgcccggcccttcctgttggtggcgtcccagcgcagcaccgcctctaccacctgctgcgccaggagctcaccaagaagctgatgcccaactgctagtgggtgatcagcctgcggtgcacccctgcagtgacaacgtcatctgtgggagctac

SEQ ID NO: 157553 - DNA, 280 bp, Zea mays
  Clone ID: MRT4577_75265C.1
ccggcacgcggcaggtgtatcacgtacaccgtgaatgagaccgggctccttggggcaggtccaacgatgaagctagttctacgaccgtgagcggagggaggaccatgatcgtgcgtgcggtgggcagcgttatgggcgctgatcaccatattgggacgctcgtagtccatgcaaccacgaacagcgcagtcagtgcataggacctccaactgtcataggaggcgctagtgtgagtgagtcagtctcctaggggcgcacgagcgggctccttcaggcgcca

SEQ ID NO: 157554 - DNA, 571 bp, Zea mays
  unsure (1)..(571): unsure at all n locations
  Clone ID: MRT4577_75266C.1
tttnttttttnttttttttnttttttntttttttttattttttttttttttttttttttttttttttttttttttttttttaaaaaagaacgcaaataaatgcatgcgggggagccaaaacgaaaaaaaagcaaatagctagctcggccttattggtaaaccataagttacatacgtcaaaaaaaaaaacaaaattggagagcactacatggaggggagaagctagaaaaaccggacgtcgccggcacaaaaacgatatcaccataaaaaaagcagcagcatgcatatcggcgggcttcgttccccatgggggggcggcgggcaaacaaaaattgcagggggtgcacttgcaactgtaaccgaaactgcaaccgggggagggcttggggccggactcccccggggccttaaaatcggaaaaaggtgttttttccggggcgaaacccaaaaacaagggggcctgcgccgcggggcttttttcctccagggggggggactttttgccccacttgcagcttgagccccaattgcaacttgatccccaactgaaaaacatcctgcttggcttttg

SEQ ID NO: 157555 - DNA, 395 bp, Zea mays
  Clone ID: MRT4577_75267C.1
tagggctcgtcgcggcaggtgccatgtccggtgggctggccgcatggcttcgtgtggggagcctgcatggccctccctgtgcatgagccgcatggccctgtgtaggcaggcagacgcaccgcgcatggccgaggcgcgctgctctgcgcatggccttgttgtgcatggcccgcaccgtcggtgcgctggggacagggcttgtccgcgccgagccttgccgtcgcggcgccgtccggtgtggtatagttgtggccaccgacgacataaaaatttcacgcatacagtgaaagcggagaggaagagtaggttccataccattatccttctccaactaggagcgatctgttttcttcctaccagcaatttctctccgttttctcgcgagtcgtgctgat

SEQ ID NO: 157556 - DNA, 423 bp, Zea mays
  Clone ID: MRT4577_75268C.1
gaaaaaaaaaattacccaaaaagagaaaaaagaaaaaaaaaaaaaaaaaaaaaaattaaagccgccgaaaaccatgaaacacacgtcagccttcctcgcggggaggctaaccactccattcctggcaccaaccgccctcccgcgccgccgccaggatcaagggtcagcgcccccggcgtggaagaagtgcaggccgcgggaaccggggggatcccacaaccaattaagccgggcagctcaaagtggcccctccgaggatcacaagccagattgcaaagaacttcagaaacgacaataagtgcgccagggatgcgatggtgggcccccactagggtggtgacgcataccccgaccccgtgtcccgggaccatgaaaaggagcccgctattagtgccacaataggggggaggaaattcaggaggt

SEQ ID NO: 157557 - DNA, 484 bp, Zea mays
  unsure (1)..(484): unsure at all n locations
  Clone ID: MRT4577_75269C.1
gttgctagatcagcggcagagcatgaatgtgtggcgctttgtacagacaatgaatcagtacgtaaacatttcacacctgtatactaatgatgattatgcggttgaaaaactcgataccgaattgaggggaagttaccgtgtacttaattgctttgaattaattttcaggagatatgacttgactgaacagctaaagctgcttcagtgtagaaccctgatttttgttggcgagaattcccagtttcacgccgaagctgttcacatgacatcgaagctcgacaggagatattgtgctctagttggaggtaactaaacagtaatctagtgcttgtttacctgtacctccacattctttgttacttgtttgtaaacaccaagtctggcaaaatgggcatgtgttgcaggtccaggcatgtggatccntcgtgactgaggagcaaccacacgcaatgctcataccaatggagtacttcttcatgggata

SEQ ID NO: 157558 - DNA, 549 bp, Zea mays
  Clone ID: MRT4577_7526C.1
gttatttgtgccgtgtgagctcagatggcctgcgtgcactatagtgatcccaggcacgtccgggaataagatggtgctcgaggcagtagcagcggggagttctggatctgccgaaccttgagcacgtagagcagggaactacgtaaagaacgcacaggatgaacagccggttcaacaccagcgcatgcttcatgttcagtttgtagttcatttgcttctgctaaatttgctctgtgatggacgactcttgtgtcacttgcacttcaggatccagttggtttttgatggcaaactaacgcaggacctgattacacagtgcattgagcccctctgatcggtcccatcggtaactcactggtgcttgaaccacgaacaaccggtcgctttgtataatctgctgaacctggaagccacacgacttgaacgagggggatctgcactcatcttgacatgcacgtgactacctgtgcctgtggctgacccaccagcactagatcaaggatgataatgccgtcgatgtagcagttcctcactggcggtgaacagcac

SEQ ID NO: 157559 - DNA, 718 bp, Zea mays
  Clone ID: MRT4577_75270C.1
gtgcggcgctcgaggcggccggtcttccaaaaagtgggagaaaatgagcgcggggaaagctttatcctttcaactctcatgctccgcactccgcagttttcctgcttgctcgagctgctgccctgctgctccagtgctccacaaccagccggagtgagagaagccgtcaaacacctcgctctgtcgccgctcaccgtcaaatacgtcgctgcaacgccatctgcgacctccgtccttcgcgcctctggagccgtggagtctggcgtgggtaaatctggattttgaaggttatcttcaaaagttgatacgccctgccagctatgtgtcccgccatcaggagcaatgaaacttacaggatcaatcacgtctccactcgtcatagcagtattgaatatgggatctaaatagaaaattattttattgttgttgtatcatgtacgcctgccgccgctagtgaatagccagtacggcatgtgcacaattcatatagtgtcattgcccatataacacggatctagtgttgtacttggtcctccatccgatacgatgggctggcacgattaagtggtcggcacgattaggcacgacttagaccactggtagtttgtagatgtgattgtgatatgtacttgcgattatgattgtgatttattatggttttaagcacaataaattcactttataatggtataaaaaaaaaaaaaaaaaaatcgtacgt

SEQ ID NO: 157560 - DNA, 739 bp, Zea mays
  Clone ID: MRT4577_75271C.1
acgcgtccgggcggagtgctccgtcgacctcaagctcggcgggctaggcgagatttgggcggtggaccgcacaaccacgaaggagcgggtggctgcaaccgcagctccgtccgccaccccgatgaagcgcccgcgcttgcggcccggcggcgccggcggggcacagtgcccgtcgtgcgcggtggacggctggggggccgacctaagcaagtgccgcgactaccaccgccgccacaaggtctgtgagacgcactccaagacgcccatcgttgtcgtcaccggccgcgagatgcgcttctgccagcagtgcagcagggttctatattcataagcatgttgttgcaccacacaacctttttgttttatatgttgtcatctgatctctggtgaaaaggagggagatgagctacggaggaaatctgatgttatggaattctaagaaaagtctagatttccacaggtccagtggtgccactgatgtcaagtcagcagaaacgattcttgagcatgagtatgcgtcgatgctctttttccctgaggcaatgctactcctatgcacagtgatgtagtagcaacggagaactgtcattaattggatacttcttatcctaattgcaggcgtatcatttagcttggggtttgaattatcggattgccctaccatactgcttagctaaagcccttgtcaaaatgcataattagaagcaactattaaagaaagatcaggtagtttgctact

SEQ ID NO: 157561 - DNA, 264 bp, Zea mays
  Clone ID: MRT4577_75272C.1
accacgcctcctcaccaatctttttcgcattatacgaaacctacatagggcatcattgtactgcactcggggaccactgacttataataccatccttgcccacagtcccacaccatgaaccatgatgaccatgatggcaattagcccccacgactccttcttctcccggtggaacttcatgtggccggttcttgacaagagcatcattcatggcaccttattcgtcgtttgtgatgacagcttcgttaaggtcactgaggactc

SEQ ID NO: 157562 - DNA, 816 bp, Zea mays
  Clone ID: MRT4577_75273C.1
attcccttcttgcgacgaagcaagtcgagggacagatcgcagcggcgatggccgacggagaggacgccgccgccgcccgccgccgcacggccatatccgactaccgcaagaaactgctcaactgcagggagcttgaatcgcgcgtcggcactgtgagggaaaaccttaaaattgctaggaaagatttcgcaaagactgaagatgacttgaagtcactgcaaagtgttggacaaataataggagaggtcctccgtcctcttgataatgaacgctttattgttaaggctagcagtggtccaagatatgtcgtcggttgccggagtaaagtggacaaggaaaagttaacttctggaactcgtgttgtgctggacatgacaactttgacaatcatgcgcactctgccaagggaggtggatcctgtggtgtataacatgctacacgaagatccaggcaatgtcagttactcggctgtaggtggcttgtctgatcaaatcagggaactcagggaatcaattgagctgcctttaatgaaccctgaattgtttctcagggttggaattaaacctcccaagggtgttctactctatggcccaccaggaactgggaagacattattagcgagggctattgccagtaatattgatgctaactttttgaagattgtgtcaagtgctataattgacaaatatatcggagaaagtgctcgtttaatcagagaaatgttcggctatgcacgcgatcaccaaccgtgcattatcttcatggatgaaattgatgcaattggtgggagaagatttagtgagggaaccagtgccg

SEQ ID NO: 157563 - DNA, 703 bp, Zea mays
  Clone ID: MRT4577_75274C.1
cctcgaggcggcgggttcgttcctcacagctcctaaggtaagatcaaaatctcttctccacctcactacataacataccctaggatatcgattcctctgctctgcaataatgtacgatccctcctcctctcatcacctggtctgggcgcatgaacctggcatgaggagctgctcttgttgttgttgcggatcgggacgtcaccggctgcgaagagctgcgttgaggtgacgtcaccggaggagtcgtgcctcgactactatatgagaagtacggcgtcgccctccactacgcgctgcgctgcagcgcactcgatcaacacacaagcatcgacttgggagaatcgtaacgccaactgctattgcatcaatcacaatgacgtgactgacctcggcatctgcatgtcattatggcctgcgcatcaaacatctcatccaagtacagtgactcctgtcaagtggcgatcaaatcaacctgatagtgaaccgagataaaatgatctaaggaatcataccgtaaacaactcactccttgcatagaaccgaacatgtccttaccaagcatgcaatgcccttgctaacaaagatgacataccttaccttgagacgtgcgtcacactggcacgtaatgtagaaaaggattatgtgaccactacaggtcagatcaattagtgtaccgccactcaatgacatgcaagtggtgcta

SEQ ID NO: 157564 - DNA, 518 bp, Zea mays
  unsure (1)..(518): unsure at all n locations
  Clone ID: MRT4577_75275C.1
tcgggccgtctttctaccgtacgggactttctccgaacgactaacctgcggcggcgccagcgcctgagaccagcggtcattcgggtgggacccaatttgctcttgctaatgggaccaccctctgtctactgggttggcctcgccgaagccctcctgactccagctgcgttaaatacgatagttcttgcccttcaaacttgcctttggcaaagaaccgtctaccaagctagaaggggggcgccgagactcctacacttttccccttggagtggttatccatcagtgaccattttagccctgtcttactatcagccaccttttgaaatttcaaatgcaaatggtgggtcggaacctattctttctattagctacctctcatgagcgaacactgaatagcccttgccttactggagcgcaccgctattgtcatggaacactgcatgcacctatagcatacgctgcacttncaggaagcttaaatatgggcaacaactgactatactcacctgttgggtggt

SEQ ID NO: 157565 - DNA, 391 bp, Zea mays
  Clone ID: MRT4577_75276C.1
gattatttatattgtgtctttctttttctttgtttcttctttgtgtgagaggcaacagttgcacatatctctcacgaatccaaaaagctaccatgacattatttctttccttcgcagctaacaaaataaataggcctctccatacacagtaattattcctccgtttcaacccccaaaatataaagcacaacatctcacctgaagacacttcctccatactctcttaattgcgttacaccatttactaaattctactaagccttagaatcaccctcacatccgcgaccaaacccctctatagctatcttttttgcttttgtaccaagaccaatcctcacataacaatcagaaaatatttttaatgcaccaaacaattacatgctacttacaa

SEQ ID NO: 157566 - DNA, 1708 bp, Zea mays
  Clone ID: MRT4577_75277C.1
taccattgggccctcgagccggccaccgggccggtccaggtccaccccacccgagacagagaccaaccgccgctgccccatctccggattccgctcctaaaaccccgccagccagcggtgccgccgccggtgacatggacgacggcgacactcccagacgcaaatccgtcccagattggctgaacagcccgatctggtctgcgcctccgccgtctccacgccacagctcccttccccccacggcaccgtccccccctcagccgccaccatctcctctgccctctccccagccacggcgggatccgactcccatccctcctcccaacgccccacgcgacgccgatgtttcagacgacgaaggcaagggcgcgggcgccccgtcgtgcgcccacctcgtcgctgagttcaaagtcgcgctggataggaaggtggtggatctggcagagctccggaggctcgcatgccagggcgtgcccgacgccgctggtattcggcccatcgtctggaagcttctcttgggatatgtgccaactgatcgtgctctatggccgtatgaactggagaaaaagaggtcccaatactgtgatttcaaagatgaacttctggttaatccttcagaagttactcgaagaatggaggaaatgacagcttctgaaagagaggaacataatgctgaaggcaccggtgtgctaccaagggcggaaatcgttcgtgatgagcatcccctaagccttgggaaaactagtgtttggaaccaatacttccaggagtctgagattgtagagcagattgatagagatgttaagcgcactcatccggagatggaatttttcaatggggactcttcagattcgctgtctaatcaggagtcactaaagcgtatacttacaatatttgcaaaattgaatccgggtataagatatgtacaaggaatgaatgaggttttggcacctctctattatgttttcaagaatgaccctgaccaaagtcaagctgctttagcagagccagatgccttcttctgttttgtcgagctgcttagcgggttccgagacaacttttgcaagcaacttgacaacagcgtggttggcatacgctccacaattactacactgtcacagcttctgagaagacacgacgaggaactctggcggcatttagaagttgtaaccaaggtcaatccacagttctacgcattcagatggatcaccttgctgctaacgcaggagttccagttccgtgactgcctcagcctgtgggacacactgttgggcgacccagaggggcctcaggctacgttgttgcgggtctgctgcgcgatgctaattcttgtccggagaaggctcttggctggcgatttcactgcgaatctcaagcttctccagaactacccacccacaaacatcgaccacatcctacacattgctaacaagctgcgagggccgcttcctttctgaccagttggatcccttgcgtactttgttaccgtatacggttttgtgctagactatgtttatccagggaaagaaagctgcgttaagaactctttaaatgaacctacaaagcaaaaaaaaaaacacgaaaaaaaaaaaaaaaaaagaaacaaagaataaaaaataaaaattttaataatgggaaaaaaaaattaatagaaattaactagtgtttttaggggtaaaaataggaaactttttaaatgggggggggc

SEQ ID NO: 157567 - DNA, 242 bp, Zea mays
  Clone ID: MRT4577_75278C.1
tttattttttgactaaaatgttaacagaaacaacttcaactggatcatgccacgtcaggtgcacacacataaaggcagagcaaaagaaccatttcctccttagagactaaaacaggtgcttaacggctatgctcttcatgcgttcccacctctgtgacgctgcaagccttattgtgtgcacaggtcaagccgcatcttgtacagcacatttgcctgaccaccccggggacgattgggctgac

SEQ ID NO: 157568 - DNA, 639 bp, Zea mays
  Clone ID: MRT4577_75279C.1
aaggaaaagatactttattattattcatcttaaaagggaaaaacactcagtatcaaagtacaatcgccaaatttttattggggaagtgagaaacgacgatgaaggaaagccttgaagctttgacagatctaccaaacttaataaaggccacgaacttttccagtttcagggtcaatatcaatctcgtaaaaacaaggtcttgtaggaagtccaggcattgtactcattgtaccaaccaggggatatatgaaaccagctccaatgcttcctcttacatccctaattggcaatacaaaccctgaaggggctcctttctttgatgcatcatgtgagaatgagtactgggttttcgacatgcatatgggaagattcgagaagccttgttgggtgtacatctcaatctgtttctctgcctggtctgaatattcaacaccactggctccatatgacttagctattgcctcaattttgtctttgataccaatgtccaatgggtagagaaacctgaggggctgtgtaatgttttgacaagctttttcaaccgcgataccaagatccaccgctcctttaccactatgagcatggtgggagcagaccacagcatcaaaagcaccggcatccattgaaaatttcctaact

SEQ ID NO: 157569 - DNA, 2154 bp, Zea mays
  Clone ID: MRT4577_7527C.1
gtcctcgctcatagcaggcgccaggcggcagtgactcatcactactagtgggcagaccagtgagctagcgactgtaccatgcagcagctgtaggagagcctggtggtaggtaggataggagtagcgccagccgccaagtgcgcgtccgggctggctgcttcggcgagcaggagggagccgcaccgccgggctcccgcaatgtcgcctcctccgcccccgccgctgctgcgcaacgagctgtcgcgcaggacggcggtgctgggcctgcgcctgtgggtgctggtgggcatcgccgtcggggccgccttcgtgctgctcctcgtgctcatctccctccacctcgccgcggcgcggcggaggcggcccaggaagggcgtcgcgcacgcgcccgcgcacgcgccggcgggggcgccgccgctgtccccgtccaccatcccgcccgtgtccaaggagatccaggaggtggccgtccacgtcggctcgctccgccactacctcgagacggggcacgcgttcctcaaggacggcggcggcggcgacggtgagtccgtggcgtacgggtcgcagcgcgtccacatcgaggccggcaagggccagcgcatggtcgcggcggcttccgacgcgctgtcggcggccgtgggccccgaggtgtcgcacctcggctggggccactggtacacgctgcgggagctggaggaggccaccgccgcgttcgctcccgagcacgtcgtcggcgagggcgggtacggcatcgtctaccgcggcgtcctcgccgacggctaccaggtcgccgtgaagaacctcctcaacaacaggggacaagccgagcgggagttcagggtggaggtggaggccatcggccgcgtccggcacaagaatctggtccggctactgggctactgcgccgagggcgcccaacggatacttgtgtacgagtacgtggacaacggcaacctcgagcagtggctgcacggcgacgtcggggcagtgagcccgctcacctgggacgtccggatgaacatcgtgctcggcatggccaaagggatcacgtacctgcacgaggggctggaacccaaggtggtgcacagggacatcaagtcgagcaacatcctgctggacaggaggtggaacccgaaggtctcggacttcggcctcgccaagctcctgggggcggacagcaactacgtcaccaccagagtgatgggaacgtttggctacgtggcgccagagtacgctagcaccggcatgctgaacgagaggagcgacgtgtacagcttcgggatcctgatcatggagatcatctccggccgaagccccgtcgactacgccaggcctgccggagaggtaaaccttgtagagtggctcaagaacaaggtgaccaacagggactacgaggccatcgtggacccgaagctgccggagaagccgtcctccaaggctctcaagaaggcgctcctggtcgcgctgaggtgcgtggatcccgactcgcagaaacggcccaagatggggcacgtaatccacatgctcgaagtcgacgacttcccgtatcgagaggaccgtcgaactcttcggccgggcaacggcagccccctggagaaggcgaggaatccggcggcggggtcatgcgacggcagcagctgctacgggggcgacacgaccaccgcgagcacgccgtccagactagtgcaggacatgtagtagtgatgtgtttgtagccagctgctgctggccttctgagctctgcctgcgggctgcggggcaacatggagatggacatgctgcaactctgctccgtcgttaattaaaggttcccttcctaggtgttgattttggactcaacagtgacttgacgtaagttttgccgcccgatggccaactgtttgtatagggaactgctgctcttcatctcaggccctaagtttgactgttctttgattcgcgtcatgatgtaaaaataaaagcgtgcgtctgtattggtcagctcctacagtcttcagacagaagtgctagaccaaggattgatttttgaaccatcgtagaatagtttcgttaaatcgtctccaccagtggagctaattcgctaaggtgtttaagacagcttcgctttttatttttttttattattatctcactgtcatatgggttccatatgtc

SEQ ID NO: 157570 - DNA, 322 bp, Zea mays
  Clone ID: MRT4577_75280C.1
tacataatcgatccatatcctccttaagtgagcatcttaaccaaccgacctcacactattaatcatcgacttcctactcttacctcttcaaatacattattatcagttacacaagcttatcaaaatcattccttctttttcaattcacacataatctcttccatcccatacactatatcaccatcatctttaaatttctctctccgcattatcaccatctataacattcccatcaaacttcatatttttgtacacctatatccaataatcattcatatctattactatgtcatacttcataatatcttctgtaaccattttt

SEQ ID NO: 157571 - DNA, 232 bp, Zea mays
  Clone ID: MRT4577_75281C.1
caaaggaacccatgctgcgagggattgatttttctagttgcctgaactctctgacgttaaaacatctcaacccgaaacatcctaagagctaggggaaaatacctaccgggcgctcagatctttaggtgctgttgggctcctcaaccccggggatggatcccttaaaggggacattgaagctttttcaccatgaatgaacttttgccactggggcctccttctgttctgggat

SEQ ID NO: 157572 - DNA, 130 bp, Zea mays
  unsure (1)..(130): unsure at all n locations
  Clone ID: MRT4577_75282C.1
ggggacctttatcccgttaaaaggtttcggctcggctttngggtgggtttctcttttcncccggccttttcgattccgggggtggggatttacagttggatgctttccccctccttnccgggtnttgttt

SEQ ID NO: 157573 - DNA, 171 bp, Zea mays
  Clone ID: MRT4577_75283C.1
gtgatcgttgctctacatccgttcatcctggtggttttgtgaggtcgaaagcagcgatcgaatgagaagatgctgaagaagctgtgggatgtcatggtgaccaggcctcgaggattgactggactcgggaggtgcaggaaggccatcatcgtacgtgcgcgcatcatcaac

SEQ ID NO: 157574 - DNA, 553 bp, Zea mays
  Clone ID: MRT4577_75284C.1
tttttttttttttttttttttttttttttttttttttttttttttttttttttttttttttttttttttttttttttttttttttttttttttttttttttttttttttttttttttggaggggggaaaaatggggggggggagggggggggggtttaattgggggcccccaaaaaaaaacatgtaaaaaaagcccaaagggaaagagttttgggtgatctagccaccattaaggggtttgtggaaccaaaaaggggggctcccaaaagggaaagggggaaaccaggggggccttaaacccaaaacccccccagtttgccctcaaaaagccggcccaaaaaaaaaacctggaaaaccctggccaaaaaaagggccccccactaaaaaagggccttggggaccgcccccccgctaaggttctcgtaaaaaattgctggacggaaaattggggcctttacccaggggtgttaaaacgggattttgaaaagggcccaaaaaaactgggttttttgcccaaaaagggggaaaaagctaatttttggaatgccgctcg

SEQ ID NO: 157575 - DNA, 604 bp, Zea mays
  Clone ID: MRT4577_75285C.1
tgggtacctcgaggccggccgggactcgcacccgttgcggcctgcgtgcactgcatccggcgcggcccggtccaccgcggcgggaggagtagagtaggcctctgccgacgagggtgcgctgcttgctgggagcctgggagtgtgcaggagatggccttcgccgtcacgctcacgccgcttcgggcaactgctgtccttgccggatggaggcggcgcccaggggtgactcctccgcggttcgccgtagtcctggcgacgtctaccggagtcggcggcgaacggaccccgccgacgttcaggcgcctaagggaggagctcctccagctccacgccgaagccgacctcacccaatccaaagcaaatagcgagagggtaagacttgtgcggttgactgaggcggctgagaatcttaagaagcgagctgcaaccagtgtccgaatgggcaaagagagcgaggctgtggatttacttgtgcagaagaagaaattgaccaaagccctagagaacattaaagagcgcattgaggcgcttgacatgctttcgggaaagattagtgaggtaatttcgatgaagcaaaacatgttaattgaatatgcccttgcgt

SEQ ID NO: 157576 - DNA, 230 bp, Zea mays
  unsure (1)..(230): unsure at all n locations
  Clone ID: MRT4577_75286C.1
tgagcattcanaatcacaccaagtttatttcactagcaacaacctaacaacaggggcggcttttatattatccctccttgctctacttgcgctttttgcgagcgcaacaaatgcgtacattatttcacaatgcttacttgttcctagttccattattctacagaatctccctccatttaacatattggttttctaacacttttctttgcatccctttttttctacaacca

SEQ ID NO: 157577 - DNA, 693 bp, Zea mays
  Clone ID: MRT4577_75287C.1
cgggctcgcactccctccctccctcccacccacttcctctcctctcgctttctcctctctctcgttcttgacactccttgtgatcgccacccgcgcggccacaatattgctgcagatcgatcgagataggcgaacggcagtcggcaggcgagaaggaagtgctgacgcctcgtttccgtcgcacgcactactactcgccgtccgtttccgacagtccgcggggcccgcggagcgtaaagcaaggacgcagccaagggagagagggggagggaagcaagtggatctgtgctagctgttgcggtattctccggaacactctccaccaggcacagagcaggtgtgctcagaatatgcagtcatctgcgatggcgttcttccctagcgttgccacggcgaagctggagctgaactctctgtacaggaagtacgtggacatgttcggtgtatcatcaaacaactctaccgttggctctcacaccatccacaagatgtcgcaccttcctgtcctgctggtcgatcgtacattcttcagcaccggtactgctattcagagcattgccatcagctatggagctcttattcgtaggtggttactgggcggaacttctgttgcacagcacacgaacacgatgatatccccgtgctgctatgaactcgcttccttgctgtggcttcctgccattctttgccagc

SEQ ID NO: 157578 - DNA, 438 bp, Zea mays
  Clone ID: MRT4577_75288C.1
aaaaaggggcccccctttaataaaaaacacatgggggagatgggccatccctggggcaaattaaacggtctattgggggatttaatcttttttttacaaaaggaaataacgggggcagggcccccattaataatgggtttttcattacaataacaagcccgggaaaggcgattaaaatttcagcaagaaggggcgtatttccagggggcccagggcaacgcccaggagcacgacaataaacggggccaccttttaccggggcaggaccactttaaggggcccaaaaaactctccaggggagcgggttaatctttgactttttttgatttggggaaagggtagtctcggccagtcccttgaaaggtctttttccaaaaacctttttaaaataaacctttggtacctttgaaaatctggggccccccccagcttggaaaa

SEQ ID NO: 157579 - DNA, 138 bp, Zea mays
  Clone ID: MRT4577_75289C.1
acccttctctatctaagctgcgcagctgtagggagggtcgatcggtacgcgccttttcgatatgacgccggcaggcaaacgggggctgagctgcaaggtgcttaagtgggggagcgccagggttatccaagtcacgac

SEQ ID NO: 157580 - DNA, 272 bp, Zea mays
  Clone ID: MRT4577_7528C.1
ggaaaatcgtatttgcctccaaaaaaaaaaatattttgagcgaacaccaaaaaaaaaagatgaggggaaaagaaagaataagatgtagagcaacaaagaaaaaaaatgggacatttgggtgtgaattatttaatgtagctataattgggggggcgtctttcgattcattacttactttccccgtctttcactgtatttggcgcttctttttgtattacagttctggtcatttcttggcttttcactccttatttctcttcggcattttcttg

SEQ ID NO: 157581 - DNA, 2082 bp, Zea mays
  Clone ID: MRT4577_75290C.1
ttttttgaccatgccaaccataacaaatttattgagcgccacacagttagtagaacagccattagcataggaagtgcaaccgagccctacagttgttatctacgaactgtacaaaccaggccaagataaagagaagtggaaagagaagtatttacatccatcaaactagcctctactcaagtaaccagagttaacacgcactcatctagctacgcattctccctcagctgaatcccaatcacgaccagatccacagcgcatagtacgcaagggtggcgttcttcaacctgcacagcgtcagcaggaagtactgcatctgggcgaagcagacgcccaggttcagagccacggccagaacgtgtccggccgagtgaaccttcctgccagggaaggtccagaagaacgagccccacgaccagctgaggccgcaggacacgacgcacgtcagggcgaacgtcgcggccgtgtaacccaccggcatgcgcgttcctccgccaaccccgatctggacttccatgatcagtggaatcgcgacctggcaaattaccatcacgatggcaccgatggcgaacgtcacctcccggccgaactgtttcgctgagaatgcagatccaagaactccgcaggaggtcaccagaaccagcagaacgttgccgatcaccgctgggctgctcctggaactcacggcctgggacagcattggcaggaacaggatggtgacgttcacccgggctagccgcaggaagagctgcaaggccgccaggactaccacgaatgccaggtattgctcattcctcgccatggccctccagattgcgctcgtgtcatggccacttcgcatccactgcctgatgaagctgagcttcttctggggggtgtcagcaaccttcagacatgcagagtaacagatgcatcgaagcactagaccgacgtaatctcgcttgcgcccaagaaagctcgataatatctgatcattgcccagctcattattgtccacgaccagaactggttctccacggaggttagcactttgtctaaggatagattgccaaccagaaaaacggtctggaatcatagtgcagccacagagcttggtcattagagcaccaacgctggcaaagaatggcaggaagccacagcaaggaagcgagttcatagcagcacgggatatcatcgtgttcgtgtgctgtgcaacagaagttccgcccagtaaccacctacgaataagagctccatagctgatggcaatgctctgaatagcagtaccggtgctgaagaatgtacgatcgaccagcaggacaggaaggtgcgacatcttgtggatggtgtgagagccaacggtagagttgtttgatgatacaccgaacatgtccacgtacttcctgtacagagagttcagctccagcttcgccgtggcaacgctagggaagaacgccatcgcagatgactgcatattctgagcacacctgctctgtgcctggtagagagtgttccggagaataccgcaacagctagcacagatccacttgcttccctccccctctctcccttggctgcgtccttgctttacgctccgcgggccccgcggactgtcggaaacggacggcgaccacgtacccctcactctgactccggcggcgagctcctggtctcggaggaagggccgccgccgcgccggagagcgtgctgatgagatcctcggaatggagtggaggtgaaggatccgcgggagagcggcggactgggcgagtagtagtgcgtgcgacggaaacgaggcgtcagcacttctttctcgcctgccgactgccgttcgcctctctcgatcgatctgtgcttcaattcagtttccttttctcacgccagagtgccagaccagaataccagatggtccgccggagttcggctccggtatccctatttcttctttttttttctatgtacggatgtgagaggaaggaagacaagcctcgggtgctctggtgatgtgggcgggggtggtggatagagcagacagcggaggcgagcaagcgggtttcgatgggcgtgccgagcgaggtccggccggcctcgagggtcccaatg

SEQ ID NO: 157582 - DNA, 432 bp, Zea mays
  unsure (1)..(432): unsure at all n locations
  Clone ID: MRT4577_75291C.1
ccggggcttgctcgcctccgctgtctgctctatccaccacccccgcccacatcaccagagcacccgaggcttgtcttccttcctctcacatccgtacatagaaaaaaaagaagaaatagggataccggagccgaactccggcggaccatctggtattctggtctggcactctggcgtgagaaaaggaaactgaattgaagcacaggtgtgctcagaatatgcaggcatctgcgatggcgttcttccctagcgttgccacggcgaagctggagctgaactctctgtacaggaagtacgtggacatgttcggtgtatcatcaaacaactctaccgttgggtctcacaccatccacaagatgttgnaccttcctgtgctggtgggggatcgtacattgttcagttttttttactggtatgcagaggattgacatg

SEQ ID NO: 157583 - DNA, 710 bp, Zea mays
  Clone ID: MRT4577_75292C.1
aaaagcgaccatgccaaccataacagctttattgagcgccacacagttagtagaacagccattagcataggaagtgcaaccaagccctacagttgctatctacggagccatcagaaatagcgccagaactctgtacaagccaagccaagagaagtatttacatccaccaaactagcctcctactcaagtaaccagagttaacacgcactcatctagctacgcattctccctcagctgaatcccaatcacgaccagatccacagcgcatagtacgcaagggtggcgttcttcagcctgcacagcatcagcaggaagtaccgcatctgggcgaagcagacgcccaggttcagagccacggccagaacgtgtccggccgagtgaaccttcctgccaggtaaggtccagaagaacgagccccacgaccagctgaggccgcaggacacgacgcacgtcagggcgaacgtcgcggccgtgtaacccaccggcatgcgcgttcctccgccaaccccgatctggacttccatgatcagtggaatcgcgaccttgcagacaaaatttcgaccatgaacagtatcagttgcttgtttttcaagaacacgtttgagtgtcttagttttttttttacaaaaaaattgacttctttcggttacctggcaaattaccatcacgatggcaccgatagcgaacgtcacctcccggccgaactgttt

SEQ ID NO: 157584 - DNA, 524 bp, Zea mays
  Clone ID: MRT4577_75293C.1
aattcggcacgaggctaaaggtgatcctggaaatgacaagacaagcgttagggtggatgagctcgatggagggctcacactgcctcacggagtatatcccattatttgacgactcatctctaaggaaagtcttgcaacactgtatgctgtacgatcgtcacgtcctacaaatctatctaactaaatccgctgcatttcatgcagatacaatgccatcttgcacgacttcactattcttcacgaagaacagatgtgagcattttctcttgagtgacttacacacgataatagggtcatgggctgttgctccaacggaattgcaataaattgcgatgagatcaatgaaaaccatctatggtctgaaaaaaatatacaaggatgggtcacaacgagacactaccgctatagaccctgttgaaattttacaccctgaacacacagaactgtggatctgctattcttcaatagactccatgagatcctcgaagctttatgagaacgtgaaacgcaagcttgaaaggaag

SEQ ID NO: 157585 - DNA, 256 bp, Zea mays
  unsure (1)..(256): unsure at all n locations
  Clone ID: MRT4577_75294C.1
annnagnaggggacgccagngngcaggaagncggcacgagggaggaanncaaggacaaggaaancaagccccnaannggngacanccaagccagccagggngccnnccagcaccacggcccgaaagaggaccaaacaccccnnaaccncaaccagattagngaccgcgggaagcccnngaaggancacgnngaggcagaccagaccgccncnngggggaaggaggacgaggacggcaaacggacaccgagcaggaa

SEQ ID NO: 157586 - DNA, 1092 bp, Zea mays
  Clone ID: MRT4577_75295C.1
tttgtccagttagagatgtgttaattggtcacttaattaatatcacggataaaccgaaataaagcagcatatatgaagtccgttctctcgagcgcgcattcagcaactgacctgtgcaacagaagttccgcccagtaaccacctacgaataagagctccatagctgatggcaatgctctgaatagcagtaccggtgctgaagaatgtacgatcgaccagcaggacaggaaggtgcgacatcttgtggatggtgtgagagccaacggtagagttgtttgatgatacaccgaacatgtccacgtacttcctgtacagagagttcagctccagcttcgccgtggcaacgctagggaagaacgccatcgcagatgactgcatattctgagcacacctgctctgtgcctggtggagagtgttccggagaataccgcaacagctagcacagatccacttgcttccctccccctctctcccttggctgcgtccttgctttacgctccgcgggccccgcggactgtcggaaacggacggcgaccacgtacccctcactcactgactccggcggcgagctcctggtctcggaggaagggccgccgccgcgccggagagcgtgctaatgagatcctcggaatggagcccggccgaaggatccgcgggagagcggcggactgggcgagtagtagtggtgcgtgcctgtcagcaacagctgtgatccttatcaggacgtaggaactaggaagagacaagaagacgatggaggcgaaggttgaaggcccgaggagacgtacgacggaaacgaggcgtcagcacttctttctcgcctgccgactgccgttcgcctctctcgatcgatctgcagtggccgcgcgggtggcgatcacaaggagtgtcaagaacgagagaggagaaagcgagaggagagaaagtgggtaggtgggagggagtgcgagatagaccgcgaacctgtgcttcaattcagtttccttttctcacgccagagtgccagaccagaataccagatggtccgccggagttcggctccggtatccctatttcttcttttttttctatgtacggatgtcccggccgaga

SEQ ID NO: 157587 - DNA, 299 bp, Zea mays
  unsure (1)..(299): unsure at all n locations
  Clone ID: MRT4577_75296C.1
ggtaccctcgggttcggccgggaagccggccgggaaattgtgccacctggnaaatgattcattaatgtctctatagaagtcgtacgatcaacaccaatctaataggaccgaatcaaaaagttttacctgaagaccaacccatcttagatgattctaccaaaaccatatgtatcaacaagcagacctctaaaaaccacaaccagcaccatcgtcaaggaaactgatatgaaattcatgtgaagaaaacgacaatgggccagctgtgtacatgttgctccatgccccggggagggggggtt

SEQ ID NO: 157588 - DNA, 275 bp, Zea mays
  Clone ID: MRT4577_75297C.1
ttccaaaatgttttcaacaacaaactattctgattcatctaaacttcatagcaatagtgtttggtaatgaagtttgcatgacataattgcatgtactgctttccattccactattgttaatttttggatttaatctttttcagtcttgttcatgttcatagccaacaaaactgatgcaaaaatgttttgttatgtaccactaaaacttgaaacgtctctgtctcttctatccgtctgttctagaaagagtgtgtggagggcgaagaggttgggag

SEQ ID NO: 157589 - DNA, 995 bp, Zea mays
  unsure (1)..(995): unsure at all n locations
  Clone ID: MRT4577_75298C.1
ggacaatgctaaaactgcggatgcaactgaggacaatgctaaaactgcgcatgcaactgaggacggtgggagcacattccaactgatacaaggttatggctccgatgacagtgcaaatgaggctgatgctggtcctggcagtgctaatacccttgtgacattgcctgaagataacctgcatggtcatttaagtgatagtaatactgagtttgattatcagaaacatgttaatgcaaaaggaaatgtgaatacccctcatggcactgagcaaaatggtaaggctgaaaattatcatctcaaggttgagagcaacccagtgaagcatggcacagatgtacttgggcatctggccaaagaagatacaagtggcagtgaaattgagggaggtcaagtagtaaaaggcatgggaggatacaaaagaaacgaacccggagcatctcacctcagggtagaagtggtagtccagtgggggcaaacaagagcagtccatcccaaagttcttcacctggaaagcagagcaggccaccatttgctaagcgtctccattctgctgatgatggtaatgattcagaaggtagagttgttcagcaagagggcctgtcattgacatcaaaattggatagttcttctaatgatttaattggtaaagtgggagatgctgctgcggttggtgttgcccttgggcagcattgtcacagtgacaatttaatttctgagcattcacaactaatggctgctggtgctactcataagatgcaaatgccatgccccccatctgagtctctatcagacttaaatgtgtcttcatcagcaggtggcccaattcttacgaaccaacctgctgcaggtgtcccatatgtgtctgtagaaactaccaagagctccatgacatctaaacatctccagtctcatcctcagagtttgagtcctcctgacacatgccatcctcgtatatgattcagctaccagnacagccatcatttgcacatcagaat

SEQ ID NO: 157590 - DNA, 503 bp, Zea mays
  unsure (1)..(503): unsure at all n locations
  Clone ID: MRT4577_75299C.1
cccgngggcttcggcttcggccacgccgccgccgcggccagcggagcgccgctgccgtggtgggcagggccggccccgatgctgagcggcgagccgctggccctgtcgccggaggcccactgccgggacggccgcatccaggccccccagggacctcccgtgccgtcggtcaaggctcctgtactggcaccccagcagccgcctccgctgccggagagggggatccctgagctcctcaacctctccgtggatcctcaaggtaaagggaagaaaggatctgatcactctgccactattgctttgcaatcaccatttgcaatatacaatgctcattttgagctgggccttggtcaatcaatgatttccgctgataattcttatgctgatcaacactatggcctgctttctccttatccagtgggtgcaacgcctggaggtcgtctgcttataccactgaataggccaacagaagcaccaatttatggtgaacgctaagcaatatg

SEQ ID NO: 157591 - DNA, 498 bp, Zea mays
  Clone ID: MRT4577_7529C.1
taaaataaaaaaaaaacaaagtacaaaacttttttattttttttttaattttttttttataaattttttttgtatatatttttttttttttaattttttttaatgttttttctttggccgttccccccttttgggcgatttttgcagttttccttccccttgggggccgtttgacctttctttttgggggcccatttcgccctttggggggtcgttttccatttcattggccgtctttttccaccttcgtgcttggaaaacccttgggtttccccattttattccctttgcggcacttccctttttccccagttggggtttttccaaaggggcccgccccgttcgccttttccaacttttccccatcttgatttgcaattggcccccccttttagcggccttttttccccgccgttttttgttgtttccccccaggttgccctttttttttgccggccccttttcccccgtttttttggttttttttcctttcttttt

SEQ ID NO: 157592 - DNA, 500 bp, Zea mays
  Clone ID: MRT4577_752C.1
aggaaaatcgcgagagatatttcgtcccggacgcgtccgccccgacgtcagacgagcagcagagaaaagtgaggtgatcatgagcaccatggcgatgtcggcgctgaacccggacgcgcccatgttcatcccggcggcgttcaagaaggtggaggactactcgcccgagtggtgggagctggtcaaaaccaccgcctggttccgcgaccactggttccgccagcaccagctctacgaggacctcgccgacgacgtcgacgacgtcgccgccctcctccccgacgactccgtcgacctcctcgacgccgacgacctcttctactccccgccgtcgccccagccccagcccgacttctaccactacaaaccagcagggttcggcggcgacatggacgcggtgctgaagacgctgagcctgaactcgccgaggggcggtggcccggcaccagcctgggcgccgatgaggcacgccgagaagccggcgcagcacgtcagcccca

SEQ ID NO: 157593 - DNA, 384 bp, Zea mays
  Clone ID: MRT4577_75300C.1
ctgctgtacgcgcgcgcatatgtgatgatgtacaaactgaaggtacgcggtggcggtggcggtgatcgcgatggccgccggcgtgctgcagatccccgtctccgtctacctcctctgcatgagcaagcgggtgacgcccagcgccctcatcctcgacatcagcctgtgcgccgacgtggtggtcaccgttctgctggccagcggcgtcggcgcggggttcggcgccaccaacgacgccttgcggtacgtccaccacgtgaggtgggacgacgccggcgtcaaagacgatctcgtcgactactacaacaaggcgaccgtccccgtggtcttcctcctcctcgggacggtgctgtccatggccgcacctgtcgtctcggccaggct

SEQ ID NO: 157594 - DNA, 274 bp, Zea mays
  Clone ID: MRT4577_75301C.1
ctatctcgcagtgaatcggattcggtcgctcatggatagataaggcgttcagtacagcaagatctcaaagatctccaggtagagttctgctgcaatggtacagttgtccagtacgcagaacttcgacatgtcattcatcaccagggcgatcagaggatgaacgtctctcatcttctcgtccacgtcggcattgtgcaaaagcagcactcaagcttcatggtttctgagcaacgccgggtccatagcacatgacgctgcatgcaggccacttata

SEQ ID NO: 157595 - DNA, 147 bp, Zea mays
  Clone ID: MRT4577_75302C.1
gacacgcataacctggcatgcgaagggaggctgggcgcccacatcccgatcgaaaagctggctatgactggacatgacggggtctagctcaaggcctgctcgctggtagagcacctgactaagctgcaggagctcttgtccttccac

SEQ ID NO: 157596 - DNA, 165 bp, Zea mays
  Clone ID: MRT4577_75303C.1
acaagctcctgaggtaggatgatttctacctgcaagagtatttttattgggagcatggtgggatagttccatataatgcacattgaaagggaattaggcttacacctagttcctaaataattttggtataagttatacaggtgcaaaaggtacacacttacatca

SEQ ID NO: 157597 - DNA, 1327 bp, Zea mays
  Clone ID: MRT4577_75304C.1
ggagcactcatgcacggaaatggagatctggggtctgagttctacgaaacactagctaagatggcaccaaccaaagaagaagaactgaaattaaaaggttataatggcgatatatcaaaacttgatccagcagaacgctttctgaaagatgtacttgatgttccttttgccttcaaaagagtagacgtaatgttgtacagagcaaactttggcgctgaagtgaattatttaaagaaatcttttggaacgctagaggcagcttgtacagatttaaggagcagcaagctattcctgaagttgctagacgcagtgctcaagactgggaaccgcatgaacgacggaactaaccgaggcgaggcgagggccttcaaactcgacacccttctaaagcttgcagacatcaagtcgacggatggaaaaacgacagtgctccatttcgtggttcaagagatcatccgatccgaaggcttgggttccgatcaagcagcagcagcagcaggaatcctggaagcaccagcaaggaacagttcaagaaggacggccttcaagtgcttgcagggctcagcagcgagctctccaacgtgaagagcgcggccgccttggagatggacacgctggtcggcagcgtctcgaggctcgaaaccgacctcgagaaggtgaagctcgtctcccggctcaggcagacgtgtcccggtcacgatcaggtctcaagcgagaagttcttcgaggcgaacgacgcgttcctcggacgtgtcacgcggagatcgaggcagtgaaggcggccggggagcggcgctgcagcgcgtcaaggagaccacggagtacttccacggggacgccgtcaaggaggagcctcacccgctgaggatcttcatggtggtgcgcgacttcctcgcgacgctggaccgcgtgtgccgggccgtcggcaggacgccggagagggtgatgatggggtccggcaagtcgttccgcgtctcggccggcacaacctccctgccgcagcgccggaacgagcagcggagggagctggcccctctgacgaggacagctcctcgtcatagggtaacactactaggaaaccttttttttttcttctttttctttctctggcgcgtagagtagttcgggatcgaggcctgtgattcttgcagatttgttgagcatgtgtagccaacgtcagaactcaataggtgaaagttactgtgtagtttctacaaagggtaaaggttaaaagatatgtatagctgtacaaaaacgggggcttcttattatggtatgttttctctgttaaaaaaaaaaaaaaaaaaaaaaaaaaaaaaaaaaaaaa

SEQ ID NO: 157598 - DNA, 829 bp, Zea mays
  Clone ID: MRT4577_75305C.1
aaaggacaagagcgcaaaaccccaccacggaccctcgccgtcgctgtctccgtctcccatctcgccggcgctagctagggcaccggtcgccctccccctccgacgatgtcgacgccctctgatccagcggcgtccgcccagcccccctccaccgcggccacctccagcagcggcctcaccttcaagctccaccccctcgtcatcgtgaacgtctccgaccactacacccgcgtcaaggcccaggcctccttctccgccgaggccccgtcgccgggcaaggcgcaggcctcctgctccgccgaaggctcctcggcgcccgcggagccgccgagggtcttcgggtgcgtgatcggggtgcagcgcggccggacggtcgagatcttcaacagcttcgagctcgtcctcgaccccgtcaccggcacgctcgagcgcgccttcctggagaagaagctcgagctctataagaaggtgttccctgagttctatgtgctgggctggtactctactgggagcgatgtgcaggatactgacatcctaatccacaaggctctgatggacattaatgaaagccctgtttatcttctcttgaatcctgcaatcaatcactcccagaaggatctacctgtgacaatttatgagagtgagttgcatgttatcgatgggggcccccagctcatctttgtcaaatcaaattacacaattgagactgtagaagcagagaggatatctgtagatcatgttgcccatctgaaaccatctgatggtggctctgcagcaactcaattggctgctcatcttacaggaatacacagtgccatcaagatgctca

SEQ ID NO: 157599 - DNA, 184 bp, Zea mays
  Clone ID: MRT4577_75306C.1
ctattctttcttcaccacacctttgacaccggggggaaatctattattttttgcgggcaacaaacacaaactccattaccaacaacacttcctaccgttccccatatgagatagtatatacatatatatacatccacatacatatctaagagccggttaaaacttggacaacacctcttattcc

SEQ ID NO: 157600 - DNA, 1131 bp, Zea mays
  unsure (1)..(1131): unsure at all n locations
  Clone ID: MRT4577_75307C.1
ctcgagccggcgggacccaccatcccagtctctcacgaggacacagagagaagagaactcgtcgccctccctgtcaattcactcgccggacagtagcgcccccaccctccgatcgatcggtcagtccgccgatcaaccgtcccgagcttgcttggatactgtgcttcccgcgaccgatggagaccgtcaccgtcgttgtcgcgccggctccggtggccgtcaaccagcagccaccgcagcacaagctcgccgagttgaagccttcctccttcgccggcgtggccaaatcgtcgccggcgaccaaggccaagccggccaagacgaagaagctcgccggcggctgtggcgggtacgtccttgaggacgtcccgcacctcaccgactacctccccgagctcaagagctacccgaatcccctacaagaccaccctgcctactctgtcgtcaagcagtacttcgtgaacccggacgacacggtggcgaagaagatcgtggtgcacaagagcggcgcgcgggggacgcacttccggcgcgccggcccgcggcagcgcgtgtacttccagccggacgaggtgacggcggcgatcgtcacctgcggcgggctgtgcccgggcctcaacaccgtcatccgcgagctcgtctgcggcctgcacgacatgtacggcgtggccaccgtctacggcatcgagggcgggtacaagggcttctacgcgcgcaacacggtggagctcacgccgcgctccgtcaacgacatccacaagcgcggcggcacggtgctgggcacctcccgcggcggccaggacacggccaagatcgtggacagcatccaggaccgcggggtcaaccaggtgtacatcatcggcggcgacggcacgcagaagggcgccgcgtccatccacgaggaggtgcagcggcgcggcctcaagtgcgccgtcgtcggcgtgcccaagaccatcgataacngacatcgccgtcatcgacaagtccttcggcttcacaccgccgtggnaggagggcgcagcgcgccatcaacgccgcgcacgtcgaggccgagagcgccgagaacgggtcnggggttcgtcaagctcatgggccggaacagcggcttcatcgncatgtacgccacgctcg

SEQ ID NO: 157601 - DNA, 185 bp, Zea mays
  Clone ID: MRT4577_75308C.1
gctgttcacgtcgctagcggtggtggtggtccagataacgcaggtcacgggcgagaccaaggcggcgggcgggtggtggagatcatcaacaagctcatgtagctagcgtcggtgcacacgacggtcgcgatcatctcgtcgtcctacatcgtggtagggcgccacttcaagtaggcggcgctcct

SEQ ID NO: 157602 - DNA, 608 bp, Zea mays
  Clone ID: MRT4577_75309C.1
cccagcgtccgcccagcgtccgcccgacgcgtccgaaaaaaaaaaaaaaaaaaaaaaaaaaaaaaaaaaaaaaaaaaaaaaaaaaaaaaaaaaaaaaaaaaaaaaaaaaaaaaaaaaaaaaaaaaaaaaaaaaaaaaaaaaaaaaaaaaaaaaaaaaaaaaaaaaaaaaaaaaaaaaaagggggggcggttttaaagaatcaaattttatttccgggggttgggaagttaaaattttttttttgggggccctaaatttaatttattgggcggggttttaaaaagggggggatgggaaaaacctggggtttcccaattttattggttttgaaaaaaatccctttttgccaggttgggttaataaaaaaagggcccgaccaattggcttttcaaaaaattgggcccccttaatgggaaattggaaccccctttttaggggctatttaagggggggggggggggggtttcccccaaggggaacctttatttttgcaagggctttaggcccggtttttttggtttttttccttttttttttcccaattttgggggtttttcccggaaaagttttaaatggggggttctttttggggttccattttagggttt

SEQ ID NO: 157603 - DNA, 395 bp, Zea mays
  unsure (1)..(395): unsure at all n locations
  Clone ID: MRT4577_7530C.1
gaaaaaaanccnnananggcgagaagacaanggaagcaagcaaggccgnccngcncnnngaggnganccnaggaagnnngangannccngcanacccncggaacgnngnncgnnncngcaaangcgagaagcgggccngcaaaaagggagcaananccgaaggngnnngcnacngcgggccaggcggcagnngnaaaacgacggnccaagaaagnncaacagcnngccggngcaacaagcnnncacangcccnccannncgaanagcaagggganncaacccaaagnanccccncgngaaaccnnaancaccaaancaanccnaaangnaanagacagngaancaanccngngannaaaagcagagacaanaaaaagcggnggcggnngnngang

SEQ ID NO: 157604 - DNA, 431 bp, Zea mays
  Clone ID: MRT4577_75310C.1
gggccaaccacccgtccggcaggaaaacaaacgtataccaccacacaacagagcttttcattttcgcggagaaccgctctaccatgggactagcgagagaactataaacttaccgctgccctgtcccaggggttaagatgcatacgaaacatgaccgtgtaaccgcaaatgctacgccatggctctgccacgtccatgggcttggctgctgttgctactgaaacttcagatgggtttaactcgtctgctaggggatgataaactcaacaactttgctctacaatatcacatgataactgtaaagtttcttgatatttaaccccgactacgactactacaacaaaaacctcggcttcatcaagggctacaagctcacctttagggtcgcctgctttgaccatacaagcttacctgcgcatccatgcaagacc

SEQ ID NO: 157605 - DNA, 630 bp, Zea mays
  Clone ID: MRT4577_75311C.1
ggccgcgggttttttttttttttttttgcagccagatgttgatgccatttatttctaggggtatcacggaatgatccagtatataaaacccatgtgagaatagttcccaaattccatctgtccgaaaaaaacacattcatctcataaagtcatcgatgttgcatccaatatccgctgccaagcaaccttgttttgcgcaacgggactcgcgtgggctcgaggcccgacgctgtggacgcatagctcgatatggtaaattcgcttttgttcaattttttgttttttgtatcggagtttccgtttacttggacttggccttctcagcctgagcttgctcgtaaatccagtcattgagacccgcacggtttcgtgcaatctcgaaagcgtaaaactgcatgcggggaacaaagatggtggtgttctcttcgtactcgaccttggggctgtcgcgaaccatggtaccaaagttgtagtcgtcgaccttcttctcgtacttcatcatgaactcgcgccacctgttcttgccgtccttgctcttcatggcgtcctcgtcgaccttggcgggggggtcgaagtcaggaaaggcctccttgaggtgctccatgatctcgtcgtcgatctttgtgaggc

SEQ ID NO: 157606 - DNA, 278 bp, Zea mays
  Clone ID: MRT4577_75312C.1
agccgctggctatactacagcacatagtttcttacgtggaacacaacatcaatgggttgggtaatatcatctcttcttgcgcttcttgctctagctacgacctcaactaactgcttacttgttccgcaatactcacttgatccaagctacattctaacactgatcgttctaccagttccatgctctagtactcgatcactctactctgcaactctataatctacgtccctaaattcctttaacagtcttgcagcatccactatcgcaactgcatataa

SEQ ID NO: 157607 - DNA, 159 bp, Zea mays
  Clone ID: MRT4577_75313C.1
tggcgtttgtaatctgcttaaatggtccgaaaatgtttgcttacagcattcgcttgagctgtgcgcttccaaccaaaataaatgctgtaagcaaacattttggttggaaacacacaactccaacaaatagttgtactattatgagtacttggatatatg

SEQ ID NO: 157608 - DNA, 485 bp, Zea mays
  unsure (1)..(485): unsure at all n locations
  Clone ID: MRT4577_75314C.1
ggaagaaactgcaactttattacgtgataatagctctgtagcgagtacaaaacgaacgtaaaacagcagcaagagtgcagaaccctgctccttggaggaagtacatctgatctgaatctcactagagcgggggagagcatccagcccacacccaaacacacgggggcgaccacaggccgctctatctccttgtttgtaatggcaatctcccgtcggtcgtccgaccccagaggatccagcttcacaatcacaacacatcgcacagcgaccaaccgagagaaagaccaccctgctgctctccacgaccatgccgggcgtnacagagcgcgcgcggcgcgacgacgccgttcgccngacgacgaaccctgacacccccctgcaccttttcccaccctgggtctggtggggtttcatacggtncgtttttcgagacgaggcggcggtgcgggggggtctgggtggctggggccgtttcggcccgggcg

SEQ ID NO: 157609 - DNA, 432 bp, Zea mays
  Clone ID: MRT4577_75315C.1
gggaaaccaaacaacggggcccatttttaaatatccaacggggaaagggggaacatttggaaccattttattcaggcaaaccgacgaggccttttttttaacaaacaatttatgggaacaaaccccccccatccttttgggggggacggacatccccccaaaaaatggccaaattattcattttaaaaattggattcccacccgagggggggggcccccccaacggggtcaaaaaaaaagcaaacccggggggggggaaaaaccatgggcaccggggggcccacgggaaaaaaaaaaatttcgggggggggcttgtcaaaaaaaaacacccttttggttttttccagggggagccccaccacttccggccaaaattttttgggcccatcggccccccctggggagccaagggggcccccctcgggccaaatt

SEQ ID NO: 157610 - DNA, 492 bp, Zea mays
  Clone ID: MRT4577_75316C.1
cccacgcgtccgcttcgtcgcctccaacttcctcgaaattcaagggctcctcaacgccatcgctcagaaggccgccgacgtgatcaagggcaagaccaccgagcagatccgggacgccttcaacatcgtcaacgacctcaccccggaacaggaggcgacggccgcggagctgcgtcggaagtacacctgggactaccatccagaagcctgagcctaacagtttgttccatgctgctctaaccatctatctcaccacatctgccaccctagcggaaggttccccgtgttccacttcctcccattcccatcgtagtatagcagctgtctcgcctctcgcgtccatagggttctgatctgctcggtctaataagtactggcttggcattttcatttcgtcctgttgaatgtgcggtggaactaagtctgaacttgcttgcctgaagcgaatacatatcagatatcacattctgaattgcctgtcatttctgattg

SEQ ID NO: 157611 - DNA, 781 bp, Zea mays
  Clone ID: MRT4577_75317C.1
acatcgacatgcgacatcttggttggcctatctgatctttaatgtcgccgcgcacagagaggagatccggtctcatgaagtggctccgcagattcctcaaggggccgaagcccggcgaaccgagccgccggcggccccaggtggcggccggggaagaggaggacgcgctttggcaccaacgaccagctagaccaaaggtactactactaccactgtactagtgactgagttcctcccttcttcttctacagttcgtctctgtctctccaaatggctctttgatctatccaaacatgccgtttcacagcttcacatccgactcaactcgcatccattgcagtgccatcttaaactcttagctccgaaaaaggaagttgctaaagactagtacaatatctttcttcgctgtttccagatcgatccacctaggaacgagaatgaggaactagtggaccgtgccattgccgagcctcttgcagaggctgtcaaaccgcccagaggtagtaccgtagatggacgaatccagatacacattccatgtcagcatggtataaatttctctgaaaccgtttcatccctgcatcccgttgctgtaaattgctgcgccagagaaaacccatagggggagaagacagcaacgacgacgaagatctggcaagagccgtacaggacagtctgaatatgaacccttacacgccttacaacccctatccaccctcttaggcccaacctagagggcacaggtcaaccgctatcacaatcaccatttactggcacccta

SEQ ID NO: 157612 - DNA, 188 bp, Zea mays
  Clone ID: MRT4577_75318C.1
cagcttcaatgaggcatgtaatcaagtactcatacaagttacagttttgaccagggtattttaacattaacctttgactgaactgttcataggcagaaatgctcgtctgctttctgcatagaagcatgatggaacattctgatatcaaatcctgggaaaaggaaacatgttcacagatgcattcaagc

SEQ ID NO: 157613 - DNA, 329 bp, Zea mays
  Clone ID: MRT4577_75319C.1
ttttctctgtgaggaacaaaatatttatatatggggggctttttgaatgttgaagcgggaaccaaaccacccttttaaaaggggcaaaaaagcgctgggggggaccaaagtggatcccaagcgtagaaaaaagccattcttacccaaccaaaacctgaaaccggggccaaccggttatccagtgttaatcaaaaaccctggaaatttggaataggatttccagaaacggaaacctaagggggactattgaacgaaaataactggaaaggccccatgtccaggccatggaaggcacattgggtgaaatggggcggaaccaagggggccct

SEQ ID NO: 157614 - DNA, 175 bp, Zea mays
  Clone ID: MRT4577_7531C.1
ccgagggtacaaatccatggctgggtttcacttcaaaaaaatattatctgagattccttctgtggaacaaagttccatcaaagccaatttacaagcctatgtaaaaaaatacttattcttgctgtactgtatacaaataatcaggccaagtataataaagcaaatcagtcctacc

SEQ ID NO: 157615 - DNA, 243 bp, Zea mays
  unsure (1)..(243): unsure at all n locations
  Clone ID: MRT4577_75320C.1
gagctcttatttcggcgggcggcctttnctttttttattttttttttttttttcaaagtggccagggcacgtaacctgctaataaactggaatgggcatgacgaggattgagaacaggccgcaaaccgggtgttttacaaagcttgacgaaaataggtgtttaagtataagtggcccggctacttgaaacaccgcggggcaaacttttcgccaacagacccaacggttccacacacaaaaagg

SEQ ID NO: 157616 - DNA, 1652 bp, Zea mays
  Clone ID: MRT4577_75321C.1
gccgagacagccccggcccgctcaccctcgccgccgcgctcttccccgacgcgccctccccggccttccacggctccttcacccagctcctcgtcggcgccgtaggctccccggccgtaccctcgtcgccctccccgttcgctgtcccgccgaggctcagccctgccacgctcttgggctcccccggcttcttctctcccacggcaagttttgagatgtcccatcaacaagccttagcacaagtaacagcacaagcagtccattctcagtacaatatgatcaatcatgcagattacactatccctttttcgtcgacgacaacacctgctttggtcatagcacagcatgccaatttttctggcaatttgacatcagcacaggagaaaccagctctgccgtcacatacaggtaatagcaacattgaatcaaatgaggtttcacaaggactcaaaacttctgcacccacttttgataaacctgctgacgatggatacaactggcggaagtatggccagaaggcagttaagggtggcgagtatccaaggagttactacaaatgtacccacacgagttgtgcagttaagaaaaaagtggagcgctcagcagaaggacacatcacccaaataatttatagaggtcagcacaaccaccagcgcccaccaaaaaggaggtccaaagatggtggtggtccactaaatgaagcagatgatcttcatgagaatgaagacatttcaactagatcagaacctggctctcaagaacactctggaaaacatgaagggtcaaatgatggcatatcagggccttctgtgtcaagaaggggaggaggagatgagcaattgtcaggctcaagtgatagtgatgaggaacaagatgatgaacaaagggctggcgacgaagaccctggctatgcaaatgcaaacaaaagacatgtgccaactccagctcaaaggataattgtgcaaacaaacagcgaagttgatcttctggatgatggctatcggtggcgcaagtatggacagaaagtggtaaaagggaatccccacccgaggagctactatagatgcacgtaccaaggatgtgatgtgaagaagcatatcgaaagatcatcccaagacccaaaggccgtcataacgacatacgaagggaagcacagccatgatgttccagcagccaggaacagtagccatgctgctgccaatgcaaattgttcatcttccaccagtgtaccacacagggtccagagttcagcgtccagtagtcgcagagtggcagacttacaaagcaccttttcagcttcttctatgctcaggataaataaagccgaaattacagatggctgatttgccgttggccagtgtggctgagctctcacctccagttttccaggtctactactaccatgggttagttgaagccattgagcagcatgtaatgttaaagaattgttcctttttatgatgtaccacctatgttctcgaatatttgttgtccattagttcatttttaaactaaaccgcgacaaataaaaaagaacggagtgagtataattctcagctaggaattaaacctagctaggcgggtggaaggtgtggcgtgggtctgctattgtaccgtacaagtttgataatttttatttttgaactcctccc

SEQ ID NO: 157617 - DNA, 157 bp, Zea mays
  Clone ID: MRT4577_75322C.1
cgtagctgcggcgcgcgagactggccagcaagaggacgacgatgaaacagtaagtttacaaggtgcagccgaagaacagaggtcaggcggcaaggacggagccagacggccagagagaaaaaaacagggggggggggggggggggatagaacaaaag

SEQ ID NO: 157618 - DNA, 903 bp, Zea mays
  Clone ID: MRT4577_75323C.1
gtccggaattcccgggtcgacccacgcgtccgcgcaagtatggacagaaagtggtaaaagggaatccctacccgaggagctactatagatgcacgtaccaaggatgcgatgtgaagaagcatatcgaaagatcatcccaagacccaaaggccgtcataacgacttacgaagggaagcacagccatgatgttccagcagtcaggaacggtagccatgctgctgccaacgccaatgggtcatcttccaccagcttaccagtaccacacagggtccacagttcagcatccagtagtcgcagagcggcagaattacaaagcgcatcctcagcttcttctatgctactaaaagaggaaaacgaaataacataggagttttggagtgtgtagccagggtaaattatatctgttctctgatccatttcctcctaggtgtgctgcttcacgctctgcgccgcagcaaaaattgggcactgcaagcccccaccattggttttagtcaagagcgagctctttcgtttgtgcccttccaaaagctgcacaccctgtttggctgcgcggtgtatgttatgttgtcattaccatttacgcccattggttgtaaatgccatcagtcgttcccccggagaactatatggatgacagcattcatcggcccaagtgtatatactcgatttaaaaaccttttttttaactgagatatggtttgttgtaaataaacggcttccttcctggtctttgtaaagtgttatttcgacaggatatataaagctatagtagctgatggctgatttgccgttggcctctgaggctgtgagctcacctccagttttccaggtctactactaccatgggttagttgaagccattgagcagcatgtaatgttagaattgttcctttttatcc

SEQ ID NO: 157619 - DNA, 363 bp, Zea mays
  Clone ID: MRT4577_75324C.1
cggacgcgtgggcggacgcgtgggcaaggactcaaaacttctgcacccacttttgataaacctgctgacgatggatacaactggcggaagtatggccagaaggcagttaagggtggcgagtatccaaggagttactacaaatgtacccacacgagttgtccagttaagaaaaaagtggagcgctcagcagaaggacacatcactcaaataatttatagaggtcagcacaaccaccagcgtccaccaaaaaggaggtccaaagatggtggtggtccactaaatgaagcagatgttcttcatgagaatgaagacatttcaactagatcagaacctggctctcaagacactctgaaaacatgaaag

SEQ ID NO: 157620 - DNA, 307 bp, Zea mays
  Clone ID: MRT4577_75325C.1
attcggctctggagattggggcacgcggtttctggtcattatggcatcgtgggggttccacatgcagcagcaaaaatgccaggttatggcctagagcgtacggtgagtgacggtgatgtcccacaatacggagacccgacgatgcgcacaccattgatcatgctcaatgcgatctacaatacctggacagggatgaacgttctagcacccagatcaggtgttccctgaaacactatggcccaacgcgatcttgacattgagagctgctgtcacggccacatgactagcttgccatatttcacgacct

SEQ ID NO: 157621 - DNA, 446 bp, Zea mays
  Clone ID: MRT4577_75326C.1
aagggcaaaagggggggttgtaatctggtagcccccccatagggtttacaagggccagatgggggcccaaaaccctttaaggaggggccccgcattggtttggcgttctaagaaataaaacatcgcaggggggtgggggcttaccagaaaacaggggccgggaacaaaaatatttttagcccaaacctgtttcatgtaaaggtactggagcctttcctaaaaaaaaaaggcagccttttggatttccttggggccaggacggaaaaattttaaaaacaggggtccaaaaaaacaaacaaaacgggatttttggggaacatgccccttaaacaacctttgggaaaaaaaccagcattggggttttcttatccccctaaaaaggattatcactaccctttccctggttaactgcgggggaaggattgccttttgggggaaccgacggg

SEQ ID NO: 157622 - DNA, 873 bp, Zea mays
  Clone ID: MRT4577_75327C.1
ggagcgaatgtcacatctttactatataatcggagttcttgtacaaaataaataaataattacattataaggagacaacggtccagcaaaccaaagttgactgggagacgacgacctagacctctcatgaactcgccacagcatcctccttgcgcatcatcctgcggtacctgttcttgacctgggacttgagattccaggtaccaacttgctcttcagatgacacgtgtcctcaccgccaaacgtagcaatacacacatacatgtataggcaaaattaacatcacaccaaacataagaacaaaatatataataataatctacacattaaaataagattctaggaacaggaatcattaattttggagttatagattttaagttatgaatttctgaagattttatgtgttttgtacaagattaaatatgatataaattttattgtgattttcatgtcaaaacagtggtactaaatgataaacaataatattacaaaattatagaaactgaaatgggtcaatttggacctaatatgatttttctaggaattatacaagttcaaatgattattttcacattaacaatccatttccataatcttttatccaatttatgagctctctgggctggcgcatgaaaacagggaagtgcagggttcactgcgcaaaaagttctaagactcagaattccactgctaggactgcgggtttattttacggaaacagagggtctcgttagaaaaataaccgtggcgaaggggtattctttattacgagccgcccagattagatccaacggcccgaatcagaccactaaccggtaccggatcactgccattggatcatggatcagcggtcaccgagacatccacgcc

SEQ ID NO: 157623 - DNA, 266 bp, Zea mays
  Clone ID: MRT4577_75328C.1
gggggaccaaaaaggggataaatatttggccttttccgggtcaagaatgcacatgcaattaaaaaaatgggttgggcctctggtggaaatgtattgtgatgctttggtttggggaagcacaaacttttttgccccactcaaaattttttttttaaaaaaatatatggggattatgcattttgccaaccctggggggctttcataaaattttacagcaaaacaaccggggtgtggttttaaagagttccagtttttccggggttttt

SEQ ID NO: 157624 - DNA, 279 bp, Zea mays
  Clone ID: MRT4577_75329C.1
ggacaaaaaagatggttttttaaacttttaagaccctggttggttaggggcattcttggccacagataaagggggggggaaaaaatttatttggccaaaacctttggtccactttttacccttccctggaaagaaacttaacaaccattttgtttttggtttggggggtggtccaaaaataggggcccttggggtggcacagggggttgacatggccctgggggttaaggaaccctgttttattttaaaaaagggttcttttctgggaaaacaaagggg

SEQ ID NO: 157625 - DNA, 415 bp, Zea mays
  Clone ID: MRT4577_7532C.1
acttggtgagctccgctctcctcttaagaagtcgttagtggattcttgtggcaaggactggggtcagtctttatatgcttcatggcgccactctccgatggctacgataagtttatgtttacttgctcaggcatacaatcacgcaagctgtgttattcagtcactgggagaagaagacataaatgtgaattttttggttcaattagataaattgatccgtctcttagagactccagtatttgcttacttgcgtttacaggtaacttggtctgataatccgttcctgcaaatttatctttctgtttctcaggcacatttgaattccgaaacttggagagttctacctggcttttttaatttgatttctagtgctacattaatggcatgataagcctggaccaatctttgtctcatg

SEQ ID NO: 157626 - DNA, 279 bp, Zea mays
  unsure (1)..(279): unsure at all n locations
  Clone ID: MRT4577_75330C.1
acnacttatatactatataagaaacaatccatttcccaacataaaaaaaaaaaaataaccggcccggctataaaaaaaacaggtccacaataatatctatcttacaaatcaacacacctaatattcaaatataattaacggcccccctttctaaaaaatccaacttaaccacctcctcctttcaccttaatatctttttctttatcccaaccaaaattaaatcaactcccccctttttaacaacctctaacctgtaaaaaccctttctttccccaactt

SEQ ID NO: 157627 - DNA, 886 bp, Zea mays
  Clone ID: MRT4577_75331C.1
agttcctcaagagacagaccagcttcttctccaagtccagttccttctacccattgggccggccgccattgagagtttgcttcctccgctccgtctcatctctgcaggaaatccgccatcgctcgcccgggtgtactgaccatgtctgcgatgcaatcatcgtatcttcctgctaccactgagtcaattgcaatggctcaggaagctaaggatgcttcagagtccattttaatcctctaccgtgtgcttgaagacccgtcttcttcttcagatgcagttagaacaaaagaagttgccattacaaatctgacaaactatctcacaaaagagaacagagcccaggagcttaggaatctgttgacccagctcaggccatttttcgcactgattcccaaggcaaagaccgcaaagattgtacgtggcatcattgatgccgtttccaagatacctggaacatctgatcttcagatctcactctgcaaggagatggtggaatggacacgtgcagagaaacgtaccttcctcaggcagcgtgtggaagcaagactagcagcccttcttttggaaagtcaggagtacactgaagctcttacccttctttctggtcttatcaaggaagtgaggaggctggatgacaaattgcttcttgttgacattgaccttctggagagcaaactccatttctctctaaggaaccttccaaaggccaaggcttctctgactgccgcaagaactgcagcgaatgccatttatgttccgccagcgcagcagggcactattgacctgcagagtggaatccttcatgccgaagagaaggattacagactgcctacagttacttctttgaagcgttgaaagggtatgcactgggatgaccctacgacca

SEQ ID NO: 157628 - DNA, 550 bp, Zea mays
  unsure (1)..(550): unsure at all n locations
  Clone ID: MRT4577_75332C.1
ccggcgcaaattttttttttttttttttggtcgcctaaggaatgtttttaattgattcaataaagtccagatcaccttgattacacatggtgataaaatagtaatagtagagataactaatatacaatggtaataccttctcgaagaattacacttgaatacgtctggtatgctcatctatttttgcatcgagaggtgattcattatcaactgttgaatgcttgtccaattggctatcatcaactggtacttcatttgtctcctctgaagaatccataaaggaaaaacagccctgaaatcatccagaaacttgcagagcttgagaaaatagtcataaattatcggatctcgtgacgacgtggctagatcgacagcccacgctcggccgctggcgccgaaagctaagttgatcagttggtggcgtctacggccatgcccacctacncctccttgcggtcccccttgcccactggcttaggctagaaggcgngtntttggggaaggcgcgtccgagccatgcggggggtgtggaaaccccgggcggncccaa

SEQ ID NO: 157629 - DNA, 567 bp, Zea mays
  unsure (1)..(567): unsure at all n locations
  Clone ID: MRT4577_75333C.1
tttttttttttttttnnnnnnnnnnnnnnnnnnnnnnnnnnnnnnnnnnnnnnnnnnnnnnnnnnnnnnnnnnnnnnnnnnnnnnnnnnnnnnnnnnnnnnnnnnnnctaagaaggaacacgacagacaaccctagtataagccaaggcggctggacgcacttttatagagcaagacacactctcttactctctctgcgatctggagcggtgacagcgagcaatgctcaaagattcttcggttgcgctccttccaaaggttccacatagtgtagatgacgaggccattgaactctcttttgcgatcttgcggaaagagagtctccgtcttctcccaccactcgctaatgctggagatgttgctccaaaccacatgttgcggcaggaaaaagctttcccaagcaagaactgtgttccagacctcataagcgaaggggcaggttaggcatagatggagtcctgattctataggtccattgcatatggcgcaagatgggtggtgtggccatccacgacgtgcgaggttgtctgctgtgaggagtttattctggatgagcacccaagcgaa

SEQ ID NO: 157630 - DNA, 285 bp, Zea mays
  Clone ID: MRT4577_75334C.1
gccaagatatggcatattttttcaactcctctttctcagcgtctgttaactcttctccatgcatatcttgaaagttaaaatcttcttccgaaatttcatcaatttgctctttccccttttcagttgccgtgctcactgcagctgcagtagtttcttcttcggccattttcaagagtatattgtcaataacctcaagtgtggtttccaggttcgactcttcagtggtcccggcttcggccccggtagctttggcttccgccgatcttagcttcattagtttccacc

SEQ ID NO: 157631 - DNA, 505 bp, Zea mays
  Clone ID: MRT4577_75335C.1
aattgcaaatcgatttattattattatatattacaaatataaattactagtagagaggcgaaacgaaaagtccaagggggtattccggaaagacagctgacggatctcttgaaagatttgttgatttgcttacctggagtggaggcagattctgcacaagggtacggtactggcctgcagcggatgtttcctgctgcctgcccgggctggaatcgcgaggggatccgcgtgattgatgaacccgatcggtgtttgtctcacgaaaatcatgtgaattctttatacgagatataacagtggtggcctcgctgctaccgtggagatgaaccaaagattcatccatagtcttctatttcctctatccatatcggccatgtatgaataataactttagtcgccacaaaatcttgaccgagtaggatggccttgaggcatgtgcttctgctccactccatacagcaacggtggttgtcaaactcaaacagagaaatcacatgtcgtcttg

SEQ ID NO: 157632 - DNA, 564 bp, Zea mays
  Clone ID: MRT4577_75336C.1
ttttattttttattttggttttttaattttttttttttattacaaagtcacatatatttattaggatggtaaaccttacatatactccggtgatggaacgcccaaaacgtatgctacaggctacgtctacatgcatatatagcagtatatacctcatcttccaccagaaacaacagatgttgtaccaatgcttgctgtggatcccgtgacgacgtagtcatcgaatccttcattctgcattatcgccatcatgtgaaggctcatatccgttggcgccatctccggtagcggcacctcaccgtcaaggtactgcatgacctgccgtgcggtaggcctcgacttggagaaggggtgagagcatagcagccctagttttagtgccaaacaagcctccgcagcgttgtagtcccctccaagcctggcatccacagtttccagcagtgctccactgcttgcccaacgctcaaggacccaatccaccagcatgcactggctttcctcctgtgagctttcgtcgtcaccgacgacgacgacgacgacaggcctcctgccacatgtaatctc

SEQ ID NO: 157633 - DNA, 406 bp, Zea mays
  Clone ID: MRT4577_75337C.1
ttataatttcacctccccaccaacccttctgtaggcatttgatgaaaataattgactaattgtaataatgatggttgacctattctttagtaaggtggacttgggttgactgacactttcttttgcatggttggacttgagttgaatggctggtgtattttatcccttcggttttttccgccacttattttaaaaaaaaatacgaggcacttaaattgtgtgtgcacactgtgcctgtgatgccaatcacactgacttctaaacccttttgcagtctgtcacaagggtgaagccatatatctgcacgatgccgttgaaactcgacgatggctggaacaacatccagttgaaccttgctgatctgacaaaaagggcgtacggcacaaattacgtcgagacgctgcgg

SEQ ID NO: 157634 - DNA, 142 bp, Zea mays
  Clone ID: MRT4577_75339C.1
ttcaaacatatctcatacaatccataaaatttataataaaaaacatttctaactattaagagtactttctacatattcaagggaccaaatttacatacacttctcttccactcctattatctacaatcttcatatcaaaatt

SEQ ID NO: 157635 - DNA, 619 bp, Zea mays
  Clone ID: MRT4577_7533C.1
agtgcaatcaatttcccattccttctccagcaatttgagcacatgcagctgcagcaccgtaaccatttgaaggatcaactgcaatcccgcaaatctgcttcgactttaacattatctcaggagatacaaagatacgaagaagcgcattcctcttcgctgtcagagattaacaggcccccttcaagaacatccaaaggcattttatgatgcatttgttcttgcgatgtatgatatatttgccggaagcatcaccacatatatgttggggctttggttagtctcctcgttttttttcaaaggaggttgcatagggtacatagtgtaatcttttctatttcgttcctagatttgtcaagagatggcaattatttgttggagaaagctcgttgccacattctagtcattcttttcttagtggtttcactgctcatctggtttctgtaatttttcaattgaaggccaaatgagcaaagtagtaattggagatagaaatatgttactactgtcctatctatcgatctccaataaattagcgttgcaatgtaaattcctgttggctcgtatgatatatttattatattatatatatgccttatctgtaccccaatttattttaccc

SEQ ID NO: 157636 - DNA, 204 bp, Zea mays
  Clone ID: MRT4577_75340C.1
cggttcccggggacccgcgtcgcactcaacgcttgcatgctagagccaatgagggccctgactcctgcttgcaaatagcttgtcctattcacttgagtatgactttgtgataaacctaaccactatgggaattaaggccgtttaggcttaaatgggatcgcaaaggtaagaaattcgggcaggcctactatgagaggccttatg

SEQ ID NO: 157637 - DNA, 384 bp, Zea mays
  Clone ID: MRT4577_75341C.1
tcgagccggccgggccgggtttttcctcagaactttccgctatgtctcttgcgcttccttctcacgataatgggactatggagtgagaacaagcctcaagaaatggagagacagagagcaaagatagacctgagatggattggccgcggtcaatctgggaagagctgcacccgaacaccgctgaggaacaagtgtgatgcgactgctaccggctgagaagaccagcccccgtgaacgagaggcgcgtgactcgtcggattgcagcactacctccgcatgctcggtaccaccgctctcagctgcaccgcgagacatgcaccagatgggagatggctatgaggaaaagggacaccagcatgctactcactgcacggtcatggatgc

SEQ ID NO: 157638 - DNA, 299 bp, Zea mays
  Clone ID: MRT4577_75342C.1
attcggctcgagatcgtgttctccgtctttttgccgatgggaggcacttccaacatggggggctttatgactccgactgctccattaagaacgcagagcactaacttcttggctctggttttctggtcctcgtatacttgtttcaagtgctattctaacaccggtgctttctctaatatgcttacttattatttctcttatcttcacttttctttatttttctttactttcttttctccttttttcttttcctttctttcttctttcttctctctttcttctttttcttctttgtttct

SEQ ID NO: 157639 - DNA, 817 bp, Zea mays
  Clone ID: MRT4577_75343C.1
gccggccgggtcgggagtttgccgctctcggcagacctcgttcggcttcctctctcctctttcctgcctatcagcagtcagtttctctcgtctgtgctgatggcgtccaactacgtggacaccggggcggaggaaggcaggttccacggccaccaccacagcacgacgccgaccagcgcggcggcgtcgcccaagacgctgcggaggagctcgtcgtccgcccacagccacggccacggcgccccgcccaagtgcgtgtgcgcgccggccacgcacgcaggctccttcaagtgccgcctccaccgcagcagctcccacggccacggccacggcagcaacccggcgtcccctccctccccggccaccttcgccgccgggccgccgccggccgcggccgcgtcctcctcccgcaccgtcgcggcgcagtgacggcgccccaagaaacgccggcccagcagcagtgaagagaggagaagagaagagagaaacggcaaaaggggggaaaaaaaaaaaggaaaacacactctctctgttattatgcgacacgagaaagggagcttatttgttcctcccttcatcttcacgtacgccaacggcagaatttcccatttcctttcacttccctccttcggtcagaagaaaccctccctggttgtacgtactgtactaggcaatgcgcatcctgctcgcctcctctgctgaaatggaaagcgtatgtgtgatggtgacagtgattattaccatttcagtaaatccatgcttcttgcaggagttgtgatctttcaccattccgtcgcggagatcttgaatttgcgct

SEQ ID NO: 157640 - DNA, 793 bp, Zea mays
  unsure (1)..(793): unsure at all n locations
  Clone ID: MRT4577_75344C.1
gggaccctcgaggccggccgggccgggagtttgccgctctcggcagtcggcactcgttcggcttcctctcttctctttcctgcctatcagcagtcagtttctctcgtctgtgctgatggcgtccaactacgtggacaccggggcggaggaaggcaggttccacggccaccaccacagcacgacgccgaccagcgcggcggcgtcgcccaagacgctgcggaggagctcgtcgtccgcccacagccacggccacggcgccgcgcccaagtgcgtgtgcgcgccggccacgcacgcaggctccttcaagtgccgcctccaccgcagcagctcccacggccacggccacggcagcaacccggcgtcccctcccgcggccgcgtcctcctcccgcaccgtcgcggcgcagtgacggcgccccaagaaacgccggcccagcagcagtgaagggaggagaagagaagagagaaacggcaaaagggaaaaaaaaggaaagcacactctctctgttattatgcgacacgagaaagggagcttatttgttcctcccttcatcttcacgtacgccaacggcagaatttcccatttcctttcacttccctccttcggtcagaagaaaccctcccctggttgtacgtactgtactaggcaatgcgcatcctgctcgcctcctctgctgaaatggaaagcgtatgtgtgatggtgacagtgattattaccatttcagtaaatccatgcttcttgcangagttgtgatctttaaaaaaaaaaccaaaaaaaaaaaaaaaaaggcccc

SEQ ID NO: 157641 - DNA, 931 bp, Zea mays
  Clone ID: MRT4577_75345C.1
ccgggagtttgccgctctcggcagacctcgttcggcttcctctctcctctttcctgcctatcagcagtcagtttctctcgtctggtaagctcctagggacgccttcctcctatccctttactactacagttcttaactcctacctaggagaagagaagcacaccgctgttctcgttctagatccactcagctttttataagaactttttgttcattggagcctgtgctgcttgtggagaggtacagtgctgatggcgtccaactacgtggacaccggggcggaggaaggcaggttccacggccacggccacggccacggccaccaccaccaccacagcacgacgccgaccagcgcggcggcgtcgcccaagacgctgcggaggagctcgtcgtccgcccacagccacggccacggcgccccgcccaagtgcgtgtgcgcgccggccacgcacgcaggctccttcaagtgccgcctccaccgcagcagctcccacggccacggccacggcagcaacccggcgtcccctcccgcggccgcgtcctcctcccgcaccgtcgcggcgcagtgacggcgccccaagaaacgccggcccagcagcagtgaagagaggagaagagaagagagaaacggcaaaaggggggaaaaaaaaaaaggaaaacacactctctctgttattatgcgacacgagaaagggagcttatttgttcctcccttcatcttcacgtacgccaacggcagaatttcccatttcctttcacttccctccttcggtcagaagaaaccctccctggttgtacgtactgtactaggcaatgcgcatcctgctcgcctcctctgctgaaatggaaagcgtatgtgtgatggtgacagtgattattaccatttcagtaaatccatgcttcttgcaaaaaaaaaataaaaaggccccta

SEQ ID NO: 157642 - DNA, 895 bp, Zea mays
  Clone ID: MRT4577_75346C.1
ggtcggccggtccggggccgggccgccggagtttgccgctctcggcactcgttcggcttcctctcttctctttccggcctatcagcagtcagtttctctcgtctgtgctgatggcgtccaactacgtcgacaccggggcggaggagggcaggttccacggccaccacagcacgacgccgaccagcgcggcggcgtcgccgaagacgctgcggaggagctcgtcgtccgcccacagccacggccacgggcccaagtgcgtgtgcgcgccggccacgcacgcaggctccttcaagtgccgcctccaccgcagcagctcccacggccacggccacggccacggcagcaacccggcgtcccctccctccccggccaccttcgccgctgcgccgccgccggccgcggccgcgtcctcctcccgcaccgtcgcggcgcagtgacggcgccccaagaaacgccgacccagcagcagtgaagagaggagaagagaagagagaaacggcaaaagggaaaaaggaaaacacactctctctgttattatgcgacacgagaaagggagcttatttgttcctcccttcatcttcacgtacgccaacggcagaatttcccatttcgtttcacttcctcctccccccctcgtcttttaaccttttttggctgagatatccatcgattctcgctggaatggtcttcccctccttcggtcagaagaaaccctccctggttgtactgtactaggcaatgcgcatcctgctagatcgcctccgctgaaatggaaagcgtatgtgtgatggtgacatgaagttcacttgtgtaattattaccatttcagtaaatccatgcttcttgcaaaaaaaaaaaaaaaaagcataaaaaaaaaaaaaaaaaaccccctagg

SEQ ID NO: 157643 - DNA, 278 bp, Zea mays
  Clone ID: MRT4577_75347C.1
cccgggtcgacccacgcgttcgatcaatcatcattcatcttagtagtctaggcaccaaatgaaatctgcaacctcaattgtgtaactgcaaaaaccatgaagctggtgcttgtggatcttgctttcattggtttaatatcaagtggtttttggacacagacaggcggctgcagctgtgggcaacaaccaaggcatgagccataacttcatccacaacagcatgattcacggaaacaacgacatttaacaccatcacaacattatctgcagtagctaca

SEQ ID NO: 157644 - DNA, 158 bp, Zea mays
  Clone ID: MRT4577_75348C.1
attcggctcgagattcaagcccaacacttgttggatgtgcttcgagctgatccatccggcgcctctcgcctgtgcgtgtaggtgatagaaggacgaaccgcgaccgcacgttctaggcagtacaaagaatggccctggtcaaagcactgcgcgtgggc

SEQ ID NO: 157645 - DNA, 339 bp, Zea mays
  Clone ID: MRT4577_75349C.1
agctctcggcagggccgacaaaaccaggctacatgtgttatccagatacatagtttttgccatgttacagaactatatattagaacaaggagcgcctaagactagatactggggtacaaggaacccgctttaaaaatataacattctgcttaatgcatgaacagtatccaaagggagcacacttctatgtacactgttatgagaatccccccatttacccaagctccagaacacccaccctcccttcaactagaacacatctatctgattatgagccctaaaagaaaatagggactgctgatgagctgaccatggtggttccttatgccggacgcgggg

SEQ ID NO: 157646 - DNA, 1531 bp, Zea mays
  unsure (1)..(1531): unsure at all n locations
  Clone ID: MRT4577_7534C.1
cctgattttctcgatggtttgttcaatatgctgagtgattccagtcatgagataaggcagcaagctgatgcagcactttctgagtttcttcaggagataaagaactcaccaaatgtagattatggtcgtatggctgaaatactcgttcggagggcaggctctactgatgaattcactcggttgacatctatcacatggatcaacgagtttgtgaagcttggtggggaacaacttgttccctactatgcagatatattgggcgctgtcttaccatgcatatctgacgaggaggagaaaatccgagtggttgcacgcgaaacaaatgaggaactacgtgctataaaagctgatccaactgagggatttgatatcggagcaattctttcaatcgcaaaaagagaattaaacagtgagcatgaggccacacgaactgaagcattgcattggttcttcactttgctggatcaatatcgtgctgagttcttggcgtacctgaacgatatttttgatccactccttaatgcactttctgatccttcagacgcggttgtcctattagtattggaagttcatgcacgtatagctgaagagtctcaccacttccatcatcttgtatcctacctaatctgcaccttccacaacaaccattttctactggagaagcgtggtgctttgatagtccgtcgcctctgcgttcttctgggtgctgaaaaagtatatcgtgagttctccactattcttgagagtgaagttgaccttgattttgcatccgtcatggttcaggctttgaatttgattttgctcacatcaactgaacttggtgagctccgctctcttcttaagaagtcgttagtggattcctgtggcaaggacttgtttcagtcattatatgcttcgtggcgccactctccgatggctacaataagtttgtgtttacttgctcaggcatacagtcatgcgagctgtgttattcagtcgctgggagaagaagacataaatgtgaaatttttggttcagttagataaattgatccgtctcttagagactccagtatttgcttacttgcgtttgcagcttcttgagcctggaaagcacacctggcttctgaaaactctntatggtctcctgatgctgttgcctcagcaaagtgcggccttcaagatcttgaggactcgactgaaaactgtgccattcagtgaaaatattaagcgcacatcttcagcaaatccatactcccagattctgcaagtgacagaagatggcaatagaaaccaagatacacagaactatagtgcaatcaatttcccgtcccttctccagcaatttgagcacatgcagctgcagcaccgtaaccatttgaaggatcaactgcaatcccgcaaatctgcttcagctctaacgttatctcaggagatacaaagatacgaagcagcacattcctcttcgctatcagagattaacaggcccccttcaagaccatccaaaaaaaaaaaaaaaaaaaaaaaaaaaaaagtactctgctttgttacca

SEQ ID NO: 157647 - DNA, 269 bp, Zea mays
  Clone ID: MRT4577_75350C.1
gcagtcggggagcattcttcttatttaagaatatttttttaggcatgcctcgacgactatgtctagtctagtatctcatcgcaggcgggggtgccagatgatgtctgcttacaagatcacagtcactcaccccaacagtggatttattcatgccaataagcaatagatcatgggaaagcagaatggtgggctttcatgcacgcttgactggtgacaaaacataacaacaaaaaatggtacttccacatcgccgaagactgcccatgaga

SEQ ID NO: 157648 - DNA, 666 bp, Zea mays
  Clone ID: MRT4577_75351C.1
tttaaacccaactaacccttctaatccaaggctgtgaagggagctgctagccgccaccagccgccatgtctggagggatcgcgcgcggccgcctcgccgaggagcgcaaggcctggcgcaagaatcacccccacggtttcgtggcgaggccggagtcgctgaccgacgggtccgtgaacctcatggtctggaactgtaccatccccggcaagcacggggtaagccgcggtaacgcctattggattcgatttgacctggttacttggttaggtagtatggttgtaatcatgatagataggatttttagggaaatacctctgccctgtgctgaataactacgtaagcttgaccgctttactgatgttgcgatgtgtgcatcagcgcctttatgcagctttgctccattgtgaatttaaattattttattttgccaacacatggtctatagttttgttatttctggactgtactgtttattgaatctagtatttctataatagaaactgtgttccctctttctttcttttttatttactaggaggtagaaaaataaaaaaaactcggacggggagggaaagaccaccctcccggtattatattgaagaagagaccgaaaaaatggtcccggaacgaaaaaatctctgaaaccttggtctccatcactaa

SEQ ID NO: 157649 - DNA, 519 bp, Zea mays
  Clone ID: MRT4577_75352C.1
cggccggttccggaactgcagggccggcccacgcgacccgtttccttttgccctacccgaggatccactaagagtgctatttgttctacgctccagtcatttctgctgagaaggcctaccacaagcagctgtccgagggaggaagtagcaagatggggctcatagccagcctccatgatggccgagcgcgacctccgccatgggaagagcatggcatgctgcctcatgaaccgtggtgaggagggtcccaaggacgtgaacgctggtgtggacacactaaagaccaagcgcaccatccacttcgaggactggtgcccgactggctttaagtgcggcatcaactaccagccttccagcgtgagcacgatgcggagatctgaacaaggtgcagcgtgccttgtgtatgatctccaactacaccagtgtggtggaggtcttgttccgcattgaccacacgttcgaccttatggactcaaagagcgtcttgtatcactgatacaacgggaagggtatggagga

SEQ ID NO: 157650 - DNA, 1263 bp, Zea mays
  Clone ID: MRT4577_75353C.1
ccatttcagccaaagcggtgggccgcgcttccttcctcagtcctcactactcactcgtccccttccagttccgcttccgatctgcgcttcgatctccctcttcgcagaggtgcttgtgagcatgtatctgctaggcaacaaaagtggaaagaagaaagtgtatgtcgattatatgaatgtccctctaccgtatgccatcgaagagaattacggtgggcgcttctttgacgacgacgacgatcttgcccaagttcttcaagatcaggaaatattgtatcatttaattcaaggaagtaatggtggtggttcatctagaactcattcgattccaagttctagctatggccatgatcggacatcaaatgcacaaaaattgtcaggagatgtaaactgtgagtgtgagttgcaactagcagttgatgaagctttagctagagagttgcatgaaatggagagcaaactagccaacacttcacttaatgacaataatggaagaaagacaacatcatcttcagcatttgatagaggcaataattctgcaagtagacctcctcaggtattggaggaggatgtgattgatccagataatatgacgtacgaggaactgcaacagctaggggaagccattggtacccaaagcaaagggctgcctgaaagtgtcatagcactcttgccaacttcaacttacaaaactgggatattctccagaaaggaaaaacatgatgaatgtgtgatctgttgtatggcatacaagaaccgagataggctgactaaattgccatgtggacatcactaccatcaagcttgtgttgctaaatggttacagatcaataaggtatgccctgtttgcaataaggaggttttcagctagcagtatcaaacagtgcagattcgtctgatggccaactccagcaaccgtctgtagtactgcatagatgtgcattatttgtataagcatgctgccctgttgctggcaggtaatgcgccgcattgctcaaggaccatatcacggccaaattagtgatatctccagcgaaagcaataagatctctgcttttgaactttttgacattcagagtttcagacttggtgccacactacagtcctttttatcatcgcctgtatactattcatttcagtatcttgtctccagtccattcagcatactttctggaatgttgcaacttggattgaaacagcgagaaatgttgaaatttaggcactggtatttttttaaagtaaaaaaaaaaaaaaaaaaaaaaa

SEQ ID NO: 157651 - DNA, 339 bp, Zea mays
  unsure (1)..(339): unsure at all n locations
  Clone ID: MRT4577_75354C.1
cgcggacgcgtggngatacggtcgtctggcaactgtgttgcctcagggcggacccgggggcgtggctgtcgtacttcnntaactcgccgagagtcgcgccggcnnaaagcggttggggtccagcgtcccggctttctctcacggnncggtgaccaaaannntcggcagggcggaaccatcanncccaaggggcttgccgctcnngtggcgacntnntcgcgtnncttccaacccnntgagcaaggggcctatcaangggaagcagcncgctagtncagcatgccgcccagaggcttgttgctntgtcggcggtcngnngcgtcggaccccctcggcagt

SEQ ID NO: 157652 - DNA, 1490 bp, Zea mays
  Clone ID: MRT4577_75355C.1
tcagaatcggatcaaagagcaagcgacggggatgagagagaagagaggaccgtcgtctccccttcctccctcacaagtcacaactcacacgccagacggagacgcggccgcagccgagcttacccccgccggcgagttcacccccacatggtcggccggatggagcggcagaccgcgtcgtcgccagcttcgtgctcctcctcctcctcctcctcctcttcctcctcggtctgcggcggcaagaagcgccctgatatcctcaacatgatccggaatgcagcctgtcttaattcgtcatctactgataccggcaagggaaggagtaaattgtcgaccaacaaagttacacatggattccacctggtggaaggcaagtccggccatgacatggaagactaccatgtggcagagtacaagtatgtgaagaatcatgagcttggtctctttgccatttttgatggccatttaggagataaggtgccaagttacttgaaagctaacctttttagcaacataatgaaagagcctctcttctggtctagccctcaagaagcaataaagaatgcatactgctctacaaacaagtatattctagaaaataccaaacaacttggaccaggtggttcgacagcagttactgctattgtagttgatggtaaggacatgtggatagcaaatgtaggcgactctagagctgttgtgtgtgaaagaggctctgctaagcagctcactgttgaccatgagccccatgaaactaatgaaagacagaggattgaaaagcacggtggctttgtgacgacatttcctggtgatgttcctcgggtgaatggtcagcttgctgttgctagggcatttggtgaccaaagcctcaaggcccacttgagctctgaacctgatattagtcatgtaccaataaactcaagtatagagtttgtcatacttgccagtgatggattgtggaaggtaatgaagaaccaggaagccgtcgatctcgtgaagtcaatcaaggatcccaaggcagcagcgaagcgattgaccactgaagcgttggcaaggaagagcaaagatgacatctcttgcattgtcatccgtttccgctgctgacttaccccctcaacagcacttttttatttccgatccacgcctcatgatatggattgagacaatctgtctgtaatcatctgccttgccgattttttttctggtagaatctgctctacctaccgtagttgtggacagacctggaactaattaggacagtgaagacttgagagctggtaggtgagtgtgtgcagggtgtccattccattcgcctgtgcatatatacacccagcgtggactgtgcatccgttgaccgggacttgggggtctgtcaggacctaagtgcttgtgtgcttgtgatgctaatttacttaatggtgcgaaggaacttgtcgatatctgatttggttaatttagttttttctttaataaaaataacaagatcacag

SEQ ID NO: 157653 - DNA, 133 bp, Zea mays
  Clone ID: MRT4577_75356C.1
attcggctcgagccgaggcactacgttttctttttggcgatcgcggcagtactgggcgggtgggattttgcaagataccagatctgggcgcgattatgggtcgactcaatgagatggcacatagccctcctgg

SEQ ID NO: 157654 - DNA, 810 bp, Zea mays
  Clone ID: MRT4577_75357C.1
ttgggaccctcgaggccggccggggcataaaatcacaaaagatctctcgctctcggctctcctcctctccccctcacccccggtgcgctgtctgtgtcccgtctccgcgagaccgcgagcaagttctgtcttcgtccgtccatccgtgcccggtcttactgttggcgctccttgattagcttacccccgccggcgagttcaccctgacatggtcggccggatggagcggcagaccgcgtcgtcgtcagcttcgtgctcctcctcctcctcttcctcctcggtctgcggcggcaagaagcgccctgatatcctcaacatgatccggaatgcagcctgtcttaattcgtcatctactgataccggcaagggaaggagtaaattgtcaaccaacaaagttacacatggattccacctggtggaaggcaagtccggccatggcatggaagactaccatgtggcagagtacaaatatgtgaagaaccatgagcttggtctcttcgccatctttgatggccatttaggagataaggtgccaagttacctgaaagctaaccttttcagcaacataatgaaagagcccctcttctggtctagtcctgaagaagcaataaagaatgcatactgctctacaaacaaatatatcctagaaaatggcaaacaacttggaccaggtggttcaacagcagttacagctattgtagtcgatggtaaggacatgttgatcgcaaatgtaggcgactctcgagctgttgtgtgtgaaatgggctctgctaatcagctcactgtcgaccatgaggccgatacaactga

SEQ ID NO: 157655 - DNA, 818 bp, Zea mays
  Clone ID: MRT4577_75358C.1
cggccgggccgggatatccatagcttagtcccctacgggctacagtagtaaggatgactgacaatctggtatcaagcatggagactgcagctctggccgacgaggatgcatcgccgaagaagacgaagcagggcggcttcaggactatgccattcatactggcaaacgagatctgcgaccggttcgcgacggccggcttcaacgccaacatgatcacatacctgacgcagcagctgcacctgccgctcgtggaggcctccaacctgctcaccaacttcaacggcaccgcggcattcacgccggtcctgggcgccatcatcgccgactcccgtgccggccgcttctggaccatcgcggggggcggcgtgctgtaccagctcggcatgctgggcctcgtcgtgtccgcgctcgtccccgcgctccgccccgcgtcctgtggtgccactggcgctgcgcccccgctgacgtgccagcgcgcgaacggcgggcagctcgccatgctgtacggttccctgctcctcaccgcgctcggcggcggcggcatccggccctgcgtcgtggcgtttggcgccgaccagttcggccagcgcggcaagcgtcctggcggcgagcagcagtggagctacttcaacctctacttcttcagcatggggctcgccgttctgctggcgctcaccgtggtggtgtacatccaggagaacgttgggtggggctgggggttcgggatccccgccatcgccatgttcgtctccgtgctctcgttcgtcgtggggtacccactctacgtgaaggtaaagccccaaggaagcccccttcag

SEQ ID NO: 157656 - DNA, 711 bp, Zea mays
  Clone ID: MRT4577_75359C.1
gacccacgcgtccacccacgcgtccgcccacgcgtccgcccacgcgtccgcccacgcgtccgcggacgcgtgggcggacgcgtggggtttgtcatacttgccagtgatggattgtggaaggtaatgaacaagcattaagcagtggatctcgtgaactcaaccaaggatcccaaggcagcagcgaagcgattgaccactgaagcgttggcaaggaagagcaaagatgatatctcttgcattgtcatccgtttccgctgctgacttaccccctcaacagcactgttttattcccgatccacgcctcatgatatggattgagacaatctgtctgtaatcatctgccttgccgattttttttctggtagaatctgctctacctaccgtagttgtggacagacctggaactaattaggacagtgaagacttgagagctggtaggtgagtgtgtgcagggtgtccattccattcgcctgtgcatatatacacccaggccccagcgtagactgtgcatccgttgaccgggacttgggggtcctgtcaggacctagtgcttgtgatgctaaaggcactaaaggtgcgaaggaacttgtcgatatctgatttggtcaatttagtttattacatcgctctcagttcgtagggtagatgcatctgatttcaatgaaacattttagtagttcaggccacctttataatgatggattcctccct

SEQ ID NO: 157657 - DNA, 2876 bp, Zea mays
  Clone ID: MRT4577_7535C.1
gctttctgcagattccgatgctaatgttcaaagtgcagctcaccttcttgacaggcttgtcaaggatatcgtaaccgagagtgaccagttcagcatagaagaattcataccgcttttgagagagcgcatgaatgtgctgaatccttatgtaagacaatttttggtggggtggataacagtgttagacagtgttcctgatattgacatgcttggtttccttcctgattttcttgctggtttattcaatatgctgagtgattccagccatgagataaggcagcaagctgatgcagcactttctgagtttctgcaggagataaagaactcaccaaatgtagattatggtcgtatggctgaaatactcgttcggagggcaggctctactgatgaattcactcggttgacgtctatcacatggatcaacgagtttgtgaagcttggtggggaacaacttgttccttactatgcagatatattgggtgctatcttaccatgcatatctgacgaggaggagaaaatccgagtggttgcacgtgaaacaaatgaggaactacgtgctataaaagctgatccaactgagcccacggccgcccacgcgtccggcaaagtgcggccttcaagatcttgaggactcgactgaagactgtgccattcagtgaaaatcttaagcgcacatcttcagcgaatccatactctcagattctgcaagtgacggaagatggcaatagaaaccatgctgtgcagaactacagtacagtcaaattcccatttcttctccagcaatttgagaatatgcagcctcatcatcgtaaccatttgtaggatcaactgcaatcccgtaaatctgattcgactttaacattttctcaggtattttctgcgtttgcgcacatatttgattatgcaatatatatgatttgagctctcattgctgtcaaagaagttacaagtgctgcatttatggcatggtaaccctggaccaagttttttctaatgctgtttgtctttctaatattatctgtcagtacaaattggccttactattaagtagtttcagttctgctctaacctgggtctactcgaatttgacacctgaatcggaacttcgcacaattgtgtgttcttttaaaatatcgcctaagaaacactatgatactattggatttgatagactgaattggctttcaatcgcaaaaagagaattacacactgagcatgaggcgacacgaactgaagcattgcattggttcttcactttgctggatcaatatcacgtcgagctcgtgtacttactgtttgattttactgaacgactcgatgatggataatcattgctttctaaccttaaagtcgtgcgaatcctaagcataaaaagcagagttgttttacaaaaaaaaaaaaaaaaaaaaaaaaaaaaaaaaaaaaaaaaaaactacaacaacaaaaattttctactggagaagcgtggtgctttgatagtccgtcgcctctgcgttcttctgggtgctgaaaaagtatatcgtgagttctccactattcttgagagtgaagttgaccttgattttgcatccgtcatggttcaggctttgaatttgattttgctcacatcaactgaacttggtgagctccgctctcttcttaagaagtcgttagtggattcctgtggcaaggacttgtttcagtcattatatgcttcgtggcgccactctccgatggctacaataagtttgtgtttacttgctcaggcatacagtcatgcgagctgtgttattcagtcgctgggagaagaagacataaatgtgaaatttttggttcagttagataaattgatccgtctcttagagactccagtatttgcttacttgcgtttgcagcttcttgagcctggaaagcacacctggcttctgaaaactctttatggtctcctgatgctgttgcctcagcaaagtgcggccttcaagatcttgaggactcgactgaaaactgtgccattcagtgaaaatattaagcgcacatcttcagcaaatccatactcccagattctgcaagtgacagaagatggcaatagaaaccaagatacacagaactatagtgcaatcaatttcccgtcccttctccagcaatttgagcacatgcagctgcagcaccgtaaccatttgaaggatcaactgcaatcccgcaaatctgcttcagctctaacgttatctcaggagatacaaagatacgaagcagcgcattcctcttcgctatcagagattaacaggcccccttcaagaacatccaaaggcattttatgatgcatttgattcttgcgatgtatgatatatttcccagaagcatcaccacatatatgttggggctttggttagtctccttgtttttttcaaaggaggttgcatagggtacataggtgtaatcttttttgtttcgttcctagattttgtcaagagatggcaattatttgttggagaaagctcgtttctgccttctagtcattcttttcttagtcgtttcactgctcatctggtttctgtaatttttcaattgaaggccaaatgagcaaagtagtaattggagaatatgttactactgttctgcttatcgatctctaataaattagcgttgcaatgtaaaaaaaaaaaaaaaaaaaaaaaaaaaaaattctctcctcgtgctacccgggtctgataatccgttcctgcaaatttatctttctgtttctcaggcacatttgaattccgaaacttggagagttctacctggcttttttaatttgatttctagtgctacattaatggcatggataagcctggaccaatctttgactcatgctgtttatctggagttcctgacatttactggatgctcgccttttg

SEQ ID NO: 157658 - DNA, 1892 bp, Zea mays
  Clone ID: MRT4577_75360C.1
attgggtacctcgaggccggccgggaaattccttacctaccttatcctctcggctgccggccgccgcagacaagtccagtcctctccctccccttaatctagcgccgccactcacgcccaccacgccgccgcaccgccgctggtgaacggatccgtccatcccgtacaccgcccaaccgctgttccagtacccgcctcgtcgagttgagctgagtttagggcctgcgggagctgagccggtggtcgcgctgcccgcgtcgaatgggacgccacccggcgcttggagccgggcgtgaccgcgcgctgccagaggttccctgagctcggcggcggcgggagcgtggctggtccggagcgcgccgcgcgtgcaatgggaggttcgaggggggttcctgcgagccgccgcggcggtcttggttctgcaagcgcgtggcccatgcttcgcgaagggtagggttgtctgtctagctagctgctgcttggtctgatgagctcagttccggcgtcccgcctcggcttccccgcacgcttgctccgtcggctgcccagaacccagcttgcccgctccggcgcttctcttcgcttcttcgggaaagggtggagctttgaggtggtgcgggtgctcagccgaggactccgggcgatgacgcccgcagtggcgcgcgtttgtcgcgacagtcctgggttcggatagcgagttcctcgagcggatttggctgctgctgcatcctgcgtgggaaggggaggcggcggcagcaacagaggaaaggggaggggttgctctgacggagcgggctgacattgctgctagcatggcgagcttctaggacgctcagctcccgtcatctcatcgcgagttcctctgggagatgaacactgatggcctttccgatgtacccaactgcctttccattaaggctaaagcgtccgtgggcttcagggctacctatgttcaatggtgggaggagtgatgagttcgctcgttattcttctctcatgtggctccgagatggaaacagaggggctcaatcactgaacttccagggacttggagcatcaccatggcttcaaccaagaatagattatccattattaggtctgaagctagatacttaccagcagatggctgctgctgcactggaagaaattagagctggggatcatttgaagcagatatcttctctcctgccagtgcaacagccacaaaatttgagtggtggattagatcctttatatggaaatcctgttctgcagcagatgcagttccaatctcagcagtcatccttgcaagttgtgcagcaaggttatggtccaaatgcaagcgactctgggttccttcaaaatcagctgcagctgcaaaagcagcaggagccactaccacagcagcagcagcaagctctgcaacaacaatcgcatcaggaaatgcaacatcacctctcagctagctgtcatgatattgctaatgtagcttctggtgtgtctgagtctggatctgcttctcaaacagaatcttctttgctttctgggtcatcgtaccaacagatctatgatggaaacagtggtccaggtctgcatctgcacaacggtttccacaactgttcaagccaagagtcctccaaccttcttaatctctcaagaagtggacaattcatggcatcagagggatggcctttgaagaggttggctgtggaatctctttctggtcatgagctccaacctgtgcagcacaagtttgagaaagtgaatcaccaaagtaatgtgtctcacatttctagcaccttgcccccactgtcagcaagagacagttatagtgcccaggctagtggtacaaatgatcagagtcacctgctttcatcatcatttgcaatccatgatggcttgacagccgtcag

SEQ ID NO: 157659 - DNA, 361 bp, Zea mays
  unsure (1)..(361): unsure at all n locations
  Clone ID: MRT4577_75361C.1
tccctagctgcactcaccattctgttcacaatcacttccacnncccacggtatgtccgatttatgatgtttttggtcttccnccccaactccacatatctctctatcacacaccccattttctatatcaatactaccactattactactacacttttttcttaccagacccactattactatatgtctaatgtacaacttacttcatctaccaacacttctaccactacaaatatatctgagaaatcattaaatttacttcatgtgaatccatctaactatgagactcacatcctcaatctcaactaatctcttatctgtatccaaatgaaaaaatctctctttacactcatacaaacatt

SEQ ID NO: 157660 - DNA, 602 bp, Zea mays
  Clone ID: MRT4577_75362C.1
ggttgcattgtcatccgtttccgctgctgacttaccccctcaacagcaatttttatctccgatccacgcctcctgatatcgattgagacaatttgtctgtaatcatctgccttgccgatttttttcccctggtagaatctgctgtacctaccgtagttgtggacagacctggaactaattaggacagtgaagacttgagagctggtaggtgagtgtgtgcagggtgtccattccattcgcctgtgcatatatacacccaggccccagcgtagactgtcgaagacgagctggtaggacagtgaagactaatggacctaatggtgcgaaggaacttgtcgatatctgatttggccaatctagtttattacatcgctctcagttcgtagggtagatgcatctgatttcaatgaaacattttagtagttcaggccacctttataatgatggattcctccctatatccttcgttttgttctctgtgtcctgcgtttttctacgaatatgaactgttcctgtaaaatcactatatggttcttgtgaaatgcatgtttttcctacgaagacgaactggttattatgaaattcactacacgattcttatg

SEQ ID NO: 157661 - DNA, 4051 bp, Zea mays
  Clone ID: MRT4577_75363C.1
actagttctagatcgcgggcggccgctcgcgatctagaactagcccacgcgtccgcgcacgcgtccgaattcggcgcgaggcgaaagcaagcaaggagcaccgcaccacgccactccagtactccactccactctcgtcccctcctcgatccagccatggcggcctagcccccccccctcccctagggttctctgccagcccccacccacccaggcgcctcttgccgctcccacccggtggtcgcgctgcccgcgtcgaatgggaggccacccggcgctcggagtcgggcgtgaccgcgcgctgccggaggttccctgagctcggcggcggcgggagcgtggctggtccggagcgcgccgcgcgtgcaatgggaggttcgagtggggttcctgcgagccgccgcggcggtctcggttctgcgagcgcgtggcccatgcttcgcgaagggtagggttgtctgtctgtctagctagctgctagctgcttggtctgatgagctcagctccggcgccccgcctcggcttccccgcgcgcttgctccgtcggctgcccagaacccagcttgcccgctccggcgcttctcttcgcttcttcggggaaaggttggagctttgaggtggtgcgggtgctcagccgaggactccgggcgatgacgcccgcagtggcgcgcgtttgccgcgacagtcctgggttcgggtagcgagttcctcgagcggatttggctgctgctgcgtcctgcgtgggaaggggaggcggcggcggcggcagcagctgaggaaggggaacggttgctctgaacaggagggggggcaggctgacattgcttctgggaggatggcgacctgcaaagcacccgcagccatcgcagcccagtcattctcatcgccgcaccttggtgttcttgcccccaggtcgtactggttggtgggagggaacatgaacctctccccgcccaagatgtcggagccatctcctgaaagtgacggggaacaaaggtgtctgaactcagagctatggcatgcatgcgcagggccccttgtgtccctgcctgtggttgggagccgggtcgtctactttcctcagggccatagtgagcaggttgctgcatcaactaataaagaagttgatgctcaaatcccaaactatccaaacctacctccacagttaatatgccagcttcataatgtcacaatgcatgctgatgcagagactgaagaggtgtatgcccaaatgacactgcaaccattgagcccggaagagcaaaaggatccttttcttccaattgaattgggtgctggtagcaagcagccaaccaattacttctgcaagacgttgactgcaagtgatacgagtacccatggtggattctctgttccgcgccgagcagctgagaaagtcttccctccattggatttttcacaacagcctccagtgcaagagctggttgcaagagatctgcatgataatgaatggaaatttcgtcatatttttcgtggtcagccaaaaaggcatctactgacgactggttggagtgtttttgtaagcgcgaaaagactagtagcaggggattctatcatatttatctggaatgataataaccagcttctcttgggaattcgccgtgcaagtcgtccacagactgtaatgccctcttctgtgctatcaagcgatagcatgcacattggtcttcttgctgcagcagctcatgctgcagccacaaacagtcgtttcactattttctacaaccctcgggctagcccttctgagtttgtcattccactggctaagtatgtgaaagctgtttaccacacgcgcgtatctgttggaatgcggtttcggatgctttttgagacagaggaatcaagtgtcagaagatacatgggtacaatcacaggcataagtgatctggactcagagcgctggccaaactcgcactggcgttctgtgaaggttggttgggatgagtctacagctggtgataaacagccaagagtttcactctgggagattgagccactgacaacctttccgatgtacccaactgcttttccattaaggctaaagcgtccgtgggcttcaggactacctatgttcaatggtgggaggagcgacgagttcgctcgttattcttctctcatgtggcttcgagatggaaaccgaggggctcagtcactgaacttccagggacttggagcatcaccatggcttcagccaagaatagattatccattgttgagtctgaagccagatacttaccagcagatggctgctgccgcactagaagaaattagagctggggatcatttgaagcaggcatcttctctcctgccagttcagcagactcaaactttgaatggtggattagatcatttgtatggaaatcctgttctacagcagatgcagttccaatctcagcagtcaacactgcaagctgtgcagcaaggttatggtcagaatgcaaacgactctgggtatgttcaaaatcaactgcagcagctgcagctgcaaaagcagcaggagccaccaccaccacagcagcagcagcagacacaagtccttcagcgacaagcacatcaggaaatgcaacagcacctctcagctagttgtcatgatattgctaatgtagcttctggtgtgtccatgtctggatctgcttgtcaatcacaatcttctctgctttctgggtcatcgttctaccaacagaacatctttgatggaaatggtggtccagatctgcatctgcacaacagtttccacaacttttcaagccaagagtcctccaaccttcttaacctcccaagaagtggccaattaatggcatcagagggatggccttcaaagaggttggctgtggaatctcttgctggtcatgagatccaacctctgcagcacaagcttgagaaagttagtcaccagagtactgtgtctcactgttctggcaccttgccgccactatcagcaagagacggttctagtgcccaggcttgtggtacaaatgttcagagtcacctgcttccatcatcatttgcaatccatgatggattgtcaaccatcaggagtggtggtgttggcagtggaactgatgcgataaccatagcttcgttgagatatagtgatgcgaatttgctacctgaaaactccatagcaacttccagttgtttgggtgaatcaggaaccttcaattctcttgacgatgtttgtggtgtaaacccatcacaaggtggaacctttgtgaaggtttacaaatcagggtccctcgggagatcgctcgacatcaccagattcggcagctactacgagttgcgtgtcgagctcgagcggttatttggtctcgaaggccaactggaggaccctgcaagatcaggctggcagcttgtattcgtcgaccgggaaaacgatgttcttctcctcggcgacgacccgtggcaggagtttgtgaatagcgtagggtgcataaagatcctctcgccgcaagacctgcagcagatggcccgcggcggcggaggtgaccttctgtctgcgcctggagcgaggatgctgcagggcagtgtctgtgacgactattctgcaggccacgacgtgcagaacctcaccggcagcattgcgcctgtggtgcctctggactactgaagaggactgaggcgaaggccgggatctgaagctctgaaccaaaaccggcaatccagcatttgcaggatttgccatccgcaagtcgtttcgttcctgtgttatgatcctctcagtctcaggccctgttgatcgggaataacctagtcgtttaatatagctagatgatgatccatgtatcattatggtaatggacatgctgtacgatagctactgtagctctaaatgcaggcaaggcaagaattgatctatcaaagaacgaatgaatgcaggcactcactgtagaggtgatctagccctgtactcctaagtcctaagatatattctcatagctaaaactgatggttccatgtggcattggcacccaagctattgaaaccagtcacctttgccgattcctccttcaaaaaaaaaaaaaaaaaa

SEQ ID NO: 157662 - DNA, 596 bp, Zea mays
  Clone ID: MRT4577_75364C.1
gtcttctagtatttctttatccaaccctgtgccgctctcattttaatcgactcctctcccatcgccccactccaaccctcgtcataacgctaacgttccatcttgtcgatgctcccccaccacaaccgacccagccactgcgacggccaccccatatgcaagcgcctccggctgaccaagcataatcaaggatatccatcatacggtggcgcgtcgccacgaggatagacaccaacctctatgcggcacctcgagccgctccagctccttgtacaaggaccaactgatgcacgaggagtactgtatcagcaacacaataaccttcatatgcaacttgttctggcgcagcaggaccgccagcggatccagtctggatccgattatcaatggccatctcaagtggaagtatctattgaaactacacctactggctgatagtacacgaagcaactaatatgtgccaagcctcagcttcatcaagagggagtttgttcaagccttcagcctttgcctgcttgcatggactctacaatactttaggctacctgctgagaactacgttgactccaatatctccttgctgtgatccacagaga

SEQ ID NO: 157663 - DNA, 319 bp, Zea mays
  Clone ID: MRT4577_75365C.1
aacaaaaaggttcaggacacaaaccttgtggtgttacattggtccaggaactgcaaattcaaaagttctgattgatattttcagtccccagctttctttgtgagtatatatatacagtgggggagctcttgaccacattttttacatatgacattttcctgattacagagggttcataagcccttttttctgatccctatgacaggtgaccacacttcatctgtgttctggagagggatcaatcaaatgcacaatcgggtctcttacccgaatagatcatttatccccacaccccttgatggggggggcactttaatcc

SEQ ID NO: 157664 - DNA, 1772 bp, Zea mays
  unsure (1)..(1772): unsure at all n locations
  Clone ID: MRT4577_75366C.1
ggtctgccgctcctatccggccgaccatggtcagggagaacancgccggcgtgggtaagctgatcgacaaccgctacccacaggccacaccacgccacaggtgtccggatcaacgagcaagcaaccggggccgagagagacgagatgaggcctgcctcttctccctccgtcacacgcgagacggagacgcgtctgaagctgaggcctgtataaaagcgccaaagatccctcgctctcttcccccccgtgcgctgtgtcccgtctctgcgagcaagttctgtcttcgtccatccatccgtccccgtctcactgcctgtggcccgtgggtagcggttgtcgatcagcttacccacgccggcgtgttctccctgacatggtcggccggatggagcggcagaccgcgtcgtcgtcagcgtcatgctcccccgccgccgccgccaccacctcctcctcgtcctgcggcggcaagaagcggcctgatatcctcaacatgatccggaatgcatcctgtcttaattcgtcgtctgctgataccggcaagggaaggagtaaattgtcgaccaacaaagttacacatggattccacctggtggaaggcaagtccggccatgacatggaagactaccatgtggcagagtacaagtatgtgaagaatcatgagcttggtctctttgccatttttgatggccatttaggagataaggtgccaagttacttgaaagctaacctttttagcaacataatgaaagagcctctcttctggtctagccctcaagaagcaataaagaatgcatactgctctacaaacaagtatattctagaaaataccaaacaacttggaccaggtggttcgacagcagttactgctattgtagttgatggtaaggacatgtggatagcaaatgtaggcgactctagagctgttgtgtgtgaaagaggctctgctaagcagctcactgttgaccatgagccccatgaaactaatgaaagacagaggattgaaaagcacggtggctttgtgacgacatttcctggtgatgttcctcgggtgaatggtcagctcgctgttgctagggcatttggtgaccaaagcctcaaggcccacttgagctctgaacctgatattagtcatgtaccaataaactcaagtatagagtttgtcatacttgccagtgatggattgtggaaggtaatgaagaaccaggaagccgtcgatctcgtgaagtcaatcaaggatccacaggcagcagcgaaacgattgaccactgaagcgttggcaaggaagagcaaggatgatatctcttgcattgtcatccgtttccgctgctgagttaccctctctccacggcactgatatccagtcttcacctcatgatttagattgagacaatttgtctttgccgaattttctgatagaatatgctgtacctatcatagctgtcgacaggcctggaactaattagggtagtgaagacttgagagctggttggtgagtgtgtgcagggtgcctattcgcctgtgcatatgttgactctgcatccgttgatccggacttgggcgactgtcaggaccttagtgcttgtgtgcttgtgatggtaatggacctaatggctaatggtggtaagggaacttgttgataccaaatttggttaatttagtttttttcatggttcgcatttcgtagggtagatgcatctgatttcaaggaaacatattattagttcaaagtgttcttgatgttaaaaaaaaaaaaaaaaaacaccccccccccc

SEQ ID NO: 157665 - DNA, 230 bp, Zea mays
  unsure (1)..(230): unsure at all n locations
  Clone ID: MRT4577_75367C.1
aaagagcaacggaaatgactcaaagcagctcgatgtcattatctcggagacgctagccgctggaggggggtgtggcatggcaatgcgatgcgcggacacgtacggacagagacacgtactgctgctacgagcaggaagaaagcgagaagaagaaaaaggcgagctaggaaaggaatgatggggggcgcaccactggncggncagnnnnnagnctttggattaaaactaca

SEQ ID NO: 157666 - DNA, 268 bp, Zea mays
  Clone ID: MRT4577_75368C.1
tttgttgtttttggtttttttttttttttgtttttagtgtactttcacaggcctttaatttgtgttaactggcatgcggttactaatctaaaaaacaaaaatcccccttgttgcgcggcccaccaaccagggagggacaccacttggacaaaagaaaagagtattgggggaccaattagtcataaaaaaaacttgcgacaagggctcacgccttacgccgccagccccaatagaatagttgtcgatactgcggcggctaccgatttaa

SEQ ID NO: 157667 - DNA, 202 bp, Zea mays
  Clone ID: MRT4577_75369C.1
tcgttgccaacgccctctttcgcaccgttccagggaacggaatcatccaccaccgggcaccggcagtcacagcgcacctcactgaaattggaacagagaacatggcggccgccgcgcccgcgtgccacgtccatatcgaggccctgcagacggcgctgccgactcgcgcgtaggatcctcggtcgtttatttatattttttt

SEQ ID NO: 157668 - DNA, 324 bp, Zea mays
  Clone ID: MRT4577_7536C.1
gggcgccacagaagaactattagtttatttgtattgaaaaattgcatcttatgctgtattttgaattattcatctatatatgtttaaaaacgtagaatggctttaaacaactacacttttcctagatagatccgcccccagtgaagatgttaattgttcagtgagttagggcagtagtggtattgctgcctagcaaagcagccttcttcttgaactccttccactcgtctaagacttgagtgagcttctcctgcttggacttgagcccgacgaggcagttcgcatgcaccgtgcataccttgttaaaatccttgcgtagctgac

SEQ ID NO: 157669 - DNA, 638 bp, Zea mays
  Clone ID: MRT4577_75370C.1
ttttttttttttttttttctttggtatcaaattcggtttccaataaacaatgtttttgttgaggtgttctaaaggatcgggtttatttcaaccctttcaagtgattccaaagatcaaacgcgagtcctttctcttttctcaactcaatggaaagactgaagtctctataaagcgctccacaagcttggggttgggtgttcttgctagcctttaaaacccacagtgggtggcttgcaccaaagtcaaagatcacaagagaacacttcaactcagatcactcaagtgcactatagctcaatatctcacaaagcaatggctaagaataactctctactcgattttggggtacttggcatgctttgatcacttggggatatccgcatatccaggaaacatccatcaaactaaactataacgggtaaaacccattttgattttggattatccaaatccactttcaggtctagggtctggggcctgggggccccccccggcccagaaagaaacaaagcagagaaaggggcaaggttttatcctctccaactactggtacttttaaaccgcgggcatttagacttgagagcttaataaaccccaaaagacacccttatcaccatgagccccagcagcagggggac

SEQ ID NO: 157670 - DNA, 990 bp, Zea mays
  Clone ID: MRT4577_75371C.1
gccggccgggtcgggactgtgtggggctagctagtcttgcagactcggagatacgactagcttgttataacaagccaagcagagcggtggggaaaacaatggcgggcaatgagggtcttaaggtccttggcctgcaggtgagcccgttcgtgctccgcgtgtgcatggcgttgaacacaaaaggagtgagctacgagtacgttgaggaggacctatccaacaagagtgagctcctgcttaagtccaacccggtgcacaagaaggtacccgtgctcatccacaacggtaagcccatctgtgagtcactcgtcatcatgcagtacgtcgacgagctgttcgccggccggtcgatcctaccaaccgacccctacgagcgcgccactgctcgcttctgggctgcctacgccgacgacaagttgttgccagcgtggtacggcatggtgaaggcccagtcggcggaggagagagcggagaaggtggaggagacgctttccgcgatccagcacatggaagtggccttcgccaagtgctccggcggcaacgccgccttcttcggcggcgactccattggctacgtcgacatcgtgctcggctccttcttgttctggttcgaggcggtgcgcagggtttacgacttggagatcattaacgctagcaatactccgctcttggctgcgtgggcggagcggtttgtagggactgtagaagcaaaggaggtggtgccggtgcccgacgtggacatggccgtacagtgcatcaataagcttcatgcccctgccgccgccataagttcacaatgagtcgtgtaagtgtaataaccaggaaaaggtaaatggtgcggtgctatggtccaaattccaaccgaataatgttcaaagcttacattgataggcttgggttgttgtcatcaaataatgtggttcagtcgtctcctctgcaataaatataaatatgattgttttagtgtgtaaaaaaaaaaaaaaaaaaaaa

SEQ ID NO: 157671 - DNA, 292 bp, Zea mays
  Clone ID: MRT4577_75372C.1
gccacctcgccacgcgtttccattctcgcataaatggcctatatgctagcgctatttgcaccttgcagtaagtcatggtttcaagacctgcatatttgcgagatggaccttgctttgcttgcttagagatggtgcaagatttcctatcaagtgagctgggcagcgagcattatcaactgacaaaggtttcggatcccttttgtaataaagaaactgatgatccgcatactgagcgcggattaatgtcctttgatgttatatatgacagaatatagaaatagcagatgttagc

SEQ ID NO: 157672 - DNA, 893 bp, Zea mays
  Clone ID: MRT4577_75373C.1
ccggccgggaaaactttgtgaggctggtatcttgcacagactcggagcaagataggcctagctggttacaagccaagaacaagtagagcggtagagggaaatatctggagagggaaacaatggcgggcgaggagggtgagggtcttaaggtcctcggcctgcaggtgagcccgttcgtgctccgcgtgtgcttggcgctgaacatgaaaggagtgagttacgagtacgtcgaggaggacgtatccaacaagagtgagctcctgctcaagtccaacccggtgcacaagaaggtgcccgtgctcatccacaacgtggtacaggtactgatcgaatgggcggcgccttgctcgcagctgttcccagcgtggtacggcatggtgaaggcccaggcggaggaggagagggcggagaaggcgaaggagacgctcgccgccatcgagcacatggaagtggccttcgccaagtgctccggcggcaacgccttcttcggtggcgactccatcggctacgtcgacatcgtgctcggctccttcttgttctggttcggggcggtgcgcagggttttcgacctggagatcattaacgctagcaagactccgctgttggctgcgtgggcggagcggtttgtagggactgtagaagcgaaggaggtgctgccgttgcccacggcggacatggcggtgcagtacatcaataagcttcatgcccccctgccgccgccatgagttcacaatgagtcgtgtaagtgtaaccaagcagggaaaaaggtaaatggtgcggtgctatggtccaaatttcaaccgaataatgttcaaagcttacatcgataggcttgggttgttgtcatcaaataatgtggttcagtcgccaaaaaaaaaaaaaaaaaagcggcc

SEQ ID NO: 157673 - DNA, 1096 bp, Zea mays
  Clone ID: MRT4577_75374C.1
ccggaattcccgggtcgacccacgcgtccgctggtctcttgcacagactcggagcaagataggcctagctggttacaagccaagaacaagtagagcggtagagggaaaatatatctggagagggaaacaatggcgggcgaggacggtcttaaggtcctcggcctgcaggtgagcccgttcgtgctccgcgtgtgcttggcgctgaacatgaaaggagtgagttacgagtacgtcaaggaggacatatccaacaagagtgagctcctgctcaagtccaacccggtgcacaagaaggtgcccgtgctcatccacaacggtaagcccatctgcgagtcactcgtcatcatgcagtacgtcgacgagctgttcgccggccggccgatcctcccaaccgacccctacgagcgcgccactgctcgcttctgggctgcctacgccgacgacaaggtattatgaacttgcacgcacgcgcgtttacgtgcctgatagtctggtaccgatcgaatgggcggcgccttgctcgcagttgtttccagcgtggtacggcatggtgaaggcccaggcggaggaggagagggcggagaaggcgaaggagacgctcgccgccatcgagcacatggaagtggcctttggcaagtgctccggcggcaacgccttcttcggtggcgactccatcggctacgtcgacatcgtgctcggctccttcttgttctggttcgaggcggtgcgcagggttttcgacctggagatcattaacgctagcaagactccgctgttggctgcgtgggcggagcggtttgtagggactgtagaagcgaaggaggtggtgccgttgcccacggcggacatggcggtacagtacatcaataagcttcatgcccccctgccgccgccatgagttcacaatgagtcgtgtaagtgtaaccaagcagggaaaaaggtaaatggtgcggtgctttggtccaaattccaaccgaataatgttcaaagcttatattgataggcttgggttgttgtcatcaaatattgtggttcagtcgtctcctctgcaataaatataaatatgattattactttctttgccgtaaaaaaaaaa

SEQ ID NO: 157674 - DNA, 473 bp, Zea mays
  Clone ID: MRT4577_75375C.1
ccgatgcggatgttgacaacgtggggcgcgtcaacctactagaccttgcccatggtggtcaccttgtgcgctttgtgatctgggcccaagacgcgttcaataagctagatgtggagtctgggagcctatgacgccccgtcagcagaacaagatggctttgagctaccacacgcctaagatgtgcaacgctgacctgggcatgatcatcaactttgacgaggtgcatactgcggagaagccactcaacaggggaagtgaagccgtaggtgagaagaggtaacaacccactctaaaacatggctgctgcgctaaaactcaaaccgtacctggcgactgcctgatagatggccacctttgctgaggctgctcgcttgatggccacaatggctaaactcgactccaagacgaccaaacttaccccggacactgccaaggttaaagctgctgtgaatgcatgggacaagaccataggc

SEQ ID NO: 157675 - DNA, 405 bp, Zea mays
  Clone ID: MRT4577_75376C.1
gaacctttgggctgatttatgtgcttgtttatgtgcttggaccgagtccgctttatctctcctacgccgaagaaactaaaggttcgcgcgtcttcttattacggggcgaggagtcgtttccgctagtacctcgtaggataagcgccagcgatcgggaggttcctaggagtactgatacggacgtcgaggtaagaccgacgtaatatacgaaatgactacttgaaaaataaaggatctacgctgatgaagacgaaccgaccgtctcgaacgtccggtgctgcacaggctgttaaataagagaagtcaccaagaaaaaaccctcattcgactcatcctaaacacacgaagaataggccagggttcctaccgaaggcatcggcgatagtgatacgtccgcgtcgaacg

SEQ ID NO: 157676 - DNA, 368 bp, Zea mays
  Clone ID: MRT4577_75377C.1
tttacctataaaactatatatcatgttcatttcctgggcccacacccttacacatatgcgcgaatatgcaaaaaaaaaagagagacccatcatcactcagggaaattttttagctatgctgaaaagtttttgtttcctcgtgggaaaatgcgcttaaattaacataaggagggaacatctatcatttggcaggaaacaaacttaacatttatgaaaaaaaattgtaaacccaagtaatctccctaaagatttctaacctttttattgacaaaaaaggtttgaaaaatatatagaaggaaaccccctatccaaactagcgcggttatgattttgacttcgataatcctgtgttgaagggcctttacacc

SEQ ID NO: 157677 - DNA, 362 bp, Zea mays
  unsure (1)..(362): unsure at all n locations
  Clone ID: MRT4577_75378C.1
aggagtaaagcctccgtcgcgccgttccatttngagagcgccaaggagccacctttcaacacgtacaagcctatttagcccttcactgncacnattctttnggtggccaccctcctttgncccaaacctcctggggagacccgccacatttttctcgaccatggtggtaatgtgccccactttgagggccaccttttttttgttcccccccctccagacaatcctaaaaagcctggagncccacaaaccgtccgtctttattttatcgcattgactttgtttccgagaccaccccgaaggtttaaccggaagccccccccccnnnngtgcagtttattatgatcctcccacttggtaggagg

SEQ ID NO: 157678 - DNA, 280 bp, Zea mays
  Clone ID: MRT4577_75379C.1
gctcattgttggtttgctgaagtgaagttatctttccaggttgggaacgacgaattcttcgagtgctgaactgactcgcaaagtctgggaggcggtccgatccagggagcgagccttttggcccattacaacaaactcgtgcccagcagcccagatggcataactggggcacagcacagctgacgaagatgttgctgctggctgctgctatccctgcctctgacacgtccacgctttccctccgtgatttgctctctcgactcggtcagtgttgtttgat

SEQ ID NO: 157679 - DNA, 301 bp, Zea mays
  Clone ID: MRT4577_7537C.1
tttttgttttttgtaaacaacctttcgtcatcattaactccccatagcagatgacctagcagcccgggttcaacataaccaagacagtgctggcataagtaaccgctactctgtcaacggcatcccaggattcaaagaacaagaaaacagaatgcaattggaatcaaaacaaggaacttgcaagactcggcggctagatccagcggactacagagcttgtgatggagcaggtcagcgccagaacacgtatgatgtcatcgccttggagaagcggaggctcctgtaccagacaccactgaca

SEQ ID NO: 157680 - DNA, 241 bp, Zea mays
  unsure (1)..(241): unsure at all n locations
  Clone ID: MRT4577_75380C.1
gtccgcacgacatacagccgacaacctctagagcatggcgacggctgctgctgctgcaacagcgatgtgctccganctaggcccgagcggaagaatatggcgtcgaggatgccctaagtggaggagggcttatagtacacgcttgtgtgtgtgctcgaagtgtcagttgtcaagatgccggggggcattaccagtggtggtttcaagtgctgtaagtgtttgcagttgaacaagatattgg

SEQ ID NO: 157681 - DNA, 244 bp, Zea mays
  unsure (1)..(244): unsure at all n locations
  Clone ID: MRT4577_75381C.1
gggtaccctcgagtctcgccgggcatccagcacgtctcgtctcccgcgctccacaaaaaaaaactgctcggtatgtnctcctgctccgccgcgccggcatcatgtgtggcagtcttagccgtgctcgggtgctccgactgggctcaggcaaagagggctcgcattctccgctggtccagaaggtggagcctcaggggccccgggctgggccgtcgggccatggcgacggggggggggggggggg

SEQ ID NO: 157682 - DNA, 1109 bp, Zea mays
  Clone ID: MRT4577_75382C.1
ctccctcgtcttcttccccacgaccgcgcgcgcccctggtccaagctccctgcttccttgctgcgctcccccggcagcgctccatctctccctcacggtgctccggctcggcctccatctccagctcgcttctcccccgttcctccatggccgcgcgcctggcatccgctcgccatggagctcccgcgcgcgccccattttccatggcgctcggccgcgcagagtcttcatcggacatggcgcctcatcgtcgctgctcccagccctatgtacgacgcctcccctccagcttcagcacggcgcacctcctcatggccgcacctctccctgctcggcatcaacgtcgaccgtgccttgccaacggggctcacccatgttggccatgcctcccaactccgttcttggatcggctgagctcctaggcaccacctcgctgccgctctagatgttgtgcttggccctccgtgatgttcacccagtgagcagcaacagctccgcgaactagtcctccacatgtcgttagggtctgctacaccttccctgtcgccgtggagaccgtgtctccctgctccacagtgcccttcaccatctgtcatcgcaacaacagcccccttgctcctcgtcgtcatgtcgtcattgctcaccttgtcgggacacctcccctcacactcagacgctcgtcagggaccccatcgtcgaccacttttgttctacgtcgccaggtgcactagttatgcacgtgatgcggaagacgagccaagttgaccccaagatgacgtaatgggtggactactccgcatggtgatgctgatggacgaatttaaggacggatgacctgatcaagtgccaggacaaggatgatcatcaagagatcgtcgtcttacccacactaacgcagtgttattccaagcaagccccggtgtatttacccttttccttgctatttcaaactctttatcacttggaatgatgcattaggtgataggagttgggtgataaacaattgttgcatttccttccttggaactgtttaccattccttgatacctgttttacttaaaagttttctgatgcttagtcttgccttagaaaacaaaatggtttgtttt

SEQ ID NO: 157683 - DNA, 271 bp, Zea mays
  Clone ID: MRT4577_75383C.1
gagctcactagttggctggcgcccttccttttgctctcactagttgtttattttgtaatacattttttttaaaacatacacataggggctgtaatgaagaacttttatggggtaatttacaaaaataagtccagggaattgctagccaagaccgcctttttgtggccaaaccaaccccaaacggggcagcttcttaaggggggaattgcccatgtccgcactgaaccccaatcttgaacggcatgaacgcgccactgggtatccgggcgcg

SEQ ID NO: 157684 - DNA, 1996 bp, Zea mays
  Clone ID: MRT4577_75384C.1
gagctttaaatcgagcgccgcttcctctccgccgctttctctccccttcactcgagcgccgcttcctctccccttccatcgagcgcagcgcctgcgccgccgccaccactccgcaccgccgccagttccccacttcctccccacacccgaatcggattgaagccagaaggcaaggtgaagagtgggcttgggtaacggttgcaaagagatatccccaacagttgcagtcactcgcatccagtcggctcagctatggaggaggactcatcagcgatggagccgaataggctgcgcgaggccgaggcggcggctggggagctgaagaggctgcgcgaggccgggcagtctcagtacatgtaccggtctatcgccgacgccagggttgtcggcggccgggtctgcctcttcgccgtcgtctccgagatcggcgctaccgtccacagccgtggcacggatttcactgttacgttgagggtaatagatgaatcatacaagtctggaatatctgtaactttttttgctgacagcactgcactattgccttgtgtgaagtcgtgtggagatgtgatcagtctccataacgtcgtggcaaaacgtatactgaatgcagtccatatcagacttctataagatatcatgacagcgaacacgacaaagattttttaaatcagatgagaacgtggctccctcaaggtctgaaggatttcacttcaaataattccgaattgtatttaatgaatttgaagtccgattctacttttgatctagtatgcaaggtttttcatgtacatgtggagaacaacaattcaatattttatgtttgggatggaactgatacccctgcagctgagtttccagcaattttggatgctgaggcagccaaatcactctctctacatgaaggcccccctctatccagggagattttatgtacaatgccagatttcggaactgtcctaaggattttttcagatagatttgtcaataaagtatcatatatgcaaaagaacatatattgggccaggttctggaacattacttgcaaacaaaactttggcatttggaaaggtactttctcggactccggtggagttcgcctattatcaaacaaagatgatagcgttgttgatcgtctaaagatgtatgacagccgcatcgccaaccgagttcgtcgtcggccgatggcaagcatcccctccagtgttactgatgtagaatacgaggatgcaggttacgcttcattaatgaagtctttaactcatcatgatgtgacgcacaaattgagaaccttggtccgtgttgtggcagcacatccatgtgaagctagtttgctttcaactggtaactgtcatcttcggttgactcttgaggatcctacagcgagaattcatgcgtatgtccacaagaatgatttggtcggattctttggtggtggttttttgacaacagatgtgatagtaaaaaagatgaacatggtactgggcatcccggaaccacaagacagcgtggaagttgccccctcgaccaggaatccaccttggatatggtgttgcttgatgtcatactatatggacaaaaacgatccctgggtcagcagaaagtaccggatctatagcacagccatcagggattgagcagagggatgctgctggaatgtgcaggaacaaacttgtaaatgaatggaacagatgctgtgtagtattggcatcttgcttgtagaagaggccatatgcttttgcaggtgcaatcagtgaatcattccatactgaacactgagaatagcacctcgggtgcattctgtaagtctgtatgtgcctacactctagattgtcttttgggtgctcatcacgaaacgtgagcatatcttttggaaacagagacctgcgtttgattcctgtgcttgttcagtaaaactctatttaatatgcaattcgcccttgattattcctcgaagttataaaagtgtttttctaaaaaaaaaaaaaaaaaagcggcc

SEQ ID NO: 157685 - DNA, 1319 bp, Zea mays
  unsure (1)..(1319): unsure at all n locations
  Clone ID: MRT4577_75385C.1
ccacgcgtccgattttttgtaataactaagaaaaacatctatgaaatataagatggtgttttagtgttttccaaatactactgcagcttttaatttttgtttggttgtttttacttggtgcactgaacataagcatagtttggatgctgaggcagccaaatcactctctctacatgaaggcccccctctatccagggagattttatgtacaatgccagatttcggaactgtcctaaggattttttcagatagatttgtcaataaagtatcatatatgcaaaagaacatatattgggccaggttctggaacattacttgcaaacaaaactttggcatttggaaaggtactttctcggactccggtggagttcgcctattatcaaacaaagatgatagcgttgttgatcgtctaaagatgtatgacagccgcatcgccaaccgagttcgtcgtcggccgatggcaagcatcccctccagtgttactgatgtagaatacgaggatgcaggttacgcttcattaatgaagtctttaactcatcatgatgtgacgcacaaattgagaaccttggtccgtgttgtggcagcacatccatgtgaagctagtttgctttcaactggtaactgtcatcttcggttgactcttgaggatcctacagcgagaattcatgcgtatgtccacaagaatgatttggtaatgttactaaacaacccttatgcttgatttttttcccccttgcctacagaccagcctaggtattcatcactggtgaaaaaaagaatatcagtgttgatggtaaaaaaaaagttatggatgcttaaaagtcttgctcatttcttggcaggtcggattctttggtggtggttttttgacagcagaagtgatagtaaaaaagatgaacatggtactgggcatcccggaaccacaaggcagcgtggaagttgccccctcgaccaggaatccaccttggatatggtgttgcttgatgtcatactatatggacaaaaacgatccctgggtcagcagaaagtaccggatctatagcacagccatcagggattgagcagagggatgctgctggaatgtgcaggaacaaacttgtaaatgaatgggacagatgctgtgtagtattggcatcttgcttgtagaagaggccatatgcttttgcaggtgcaatcagtgaatcattccatactgaacactgagaatagcacctcgggttcattctgtatgtgcctacactctagattgtcttttgngtgctcatcacgaaacgtgagcatatcttttggaaaagagacctgcgtttgattctgtgctt

SEQ ID NO: 157686 - DNA, 846 bp, Zea mays
  Clone ID: MRT4577_75386C.1
cattggaggccgcccgggccggggggctctccccttcactcgagcgccgcttcctctccccttccatcgagcgcagcgcctgcgccgccgccaccactccgcaccgccgccagttccccacttcctccccacacccgaatcggattgaagccagaaggcaaggtgaagagtgggcttgggtaacggttgcaaagagatatccccaacagttgcagtcagtcgcatccagtcggctcagctatggaggaggactcatcagcgatggagcggaataggctgcgcgaggccgaggcggcggctggggagctgaagaggctgcgcgaggccgggcagtctcagtacatgtaccggtctatcgccgacgccagggttgtcggcggccgggtctgcctcttcgccgtcgtctccgagatcggcgctaccgtccacagccgtggcacggatttcactgttacgttgagggtaatagatgaatcatacaagtctggaatatctgtaactttttttgctgacagcactgcactattgccttgtgtgaagtcgtgtggagatgtgatcagtctccataacgtcgtgataaagaaatatagagatttctttgtgcaatttgacaaaaagtactcctcattcgcgctgtttgaaggcaaaacgtatactgaatgcagtccatatcagacttctataagatatcatgacagcgaacacgacaaagattttttaaatcagatgagaacgtggctccctcaaggtctgaaggatttcacttcaaataattccgaattgtatttaatgaatttgaagtccgattctacttttgatctagtatgcaaggtttttcatgtacat

SEQ ID NO: 157687 - DNA, 247 bp, Zea mays
  Clone ID: MRT4577_75387C.1
acattggcgccttttagatgacggttggcgtcagagccatgaacgcgccgatactggagatcgtcatgagcttcgacctcgtgtacacggaaaacgcgacagaacgtgaccccaagaagggcgactctggcatcataaagcccatcgccatcggcttcatcgtcaacgccaacatgctgtctcagagcgccttcaaacgggcctccatgaaccccggcgtctccttcggcccggacagagtcaccgg

SEQ ID NO: 157688 - DNA, 1427 bp, Zea mays
  Clone ID: MRT4577_75388C.1
ctgatacccctgcagctgagtttccagcaatgtaagattttagatttgttttgcaattttttgtaataactaagaaaaacatctatgaaatataagatggtgttttagtgttttccaaatactactgcagcttttaatttttgtttggttgtttttacttggtgcactgaacataagcataggtaatgaaaacataataagttttatcttagaaaaaaaatatttggtgatgtcagtcatgtcactattttcacttaatttacctgtttttgattggtgaacatatagtttggatgctgaggcagccaaatcactctctctacatgaaggcccccctctatccagggagattttatgtacaatgccagatttcggaactgtcctaaggattttttcagatagatttgtcaataaagtatcatatatgcaaaagaacatatattgggccaggttctggaacattacttgcaaacaaaactttggcatttggaaaggtactttctcggactccggtggagttcgcctattatcaaacaaagatgatagcgttgttgatcgtctaaagtaatcttcttttctgatgagttttaatgttctttgaatattatataagtaaactttactaattacataaacacctccaggatgtatgacagccgcatcgccaaccgagttcgtcgtcggccgatggcaagcatcccctccagtgttactggtgacgcacaaattgagaaccttggtccgtgttgtggcagcacatccatgtgaagctagtttgcttttaactggtaactgtcatcttcggttgactcttgaggatcctacagcgagaattcatgcgtatgtccacaagaatgatttggtcggattctttggtggtggttttttgacaacagaagtgatagtaaaaaagatgaacatggtactgggcatcccggaaccacaagacagcgtggaagttgccccctcgaccaggaatccaccttggatatggtgttgcttgatgtcatactatatggacaaaaacgatccctgggtcagcagaaagtaccggatctatagcacagccatcagggattgagcagagggatgctgctggaatgtgcaggaacaaacttgtaaatgaatggaacagatgctgtgtagtattggcatcttgcttgtagaagaggccatatgcttttgcaggtggaatcagtgaatcattccatactgaacactgagaatagcacctcgggtgcattctgtacagtctgtatgtgcctacactctagattgtcttttgggtgctcatcacgaaacgtgagcatatcttttggaaacagagacctgcgtttgattcctgtgtttgttatgttgtgattgatcattggggggaggttgagcttttgagccagtataaaaatcctggccggcccatcaatatt

SEQ ID NO: 157689 - DNA, 268 bp, Zea mays
  Clone ID: MRT4577_75389C.1
gagagttgtaatggcccgactgttgagtgagggggagcaggggatcccaacggcttgcgctgcctttgcgcagagccggcgggcggccacgtcgcggcctggctggggtaggagagggcggtccccagtgcagttggtgaactaccgttgcacactggagtttctggtgtctttgcttggaactgacctagctcgtggcagggggaactcggctagcggccccacagcccctgctgactcaaaacaactgagttgtaagacgttcatc

SEQ ID NO: 157690 - DNA, 438 bp, Zea mays
  Clone ID: MRT4577_7538C.1
cctccagcctcttgagcctcctcaaacactcacatttcaaccggtcatcttcttggaggtggttaacaagatggtgcgtcgtcgcaacccttcggtggtggagttcaacagtgactccgacgaaatccaagaggaatcgcgtgttccttctcctccgcctcggcgttctctctccaagtgaggacgaggctctggccgtttggaaaggggaggaccctcgatgcccttgcaacctgggcgccaagggcgtcaaaaggttggcgccactcgtccccgtcgaagcaccttcttcgctgtatacgctccttgccaggaggaggatggagcttttgacgacgaggtcgaaccttcgtcatccgacactcccctcgtcatcggactccacatgcatccggcgactgtgtcccatgggccgaatgaaccttcagtcgacttctc

SEQ ID NO: 157691 - DNA, 473 bp, Zea mays
  unsure (1)..(473): unsure at all n locations
  Clone ID: MRT4577_75390C.1
catggatagtttacatgggtattgttgtaagtcgtcgcaacgcacgggcaaccgactagtaataataataaaagggttttgtctgtgtgcgtgcgtggatgtaggagcgggtactttagattgggcatcccgcatccatacccttgcgcggaggtgaagagatcatccgggcgagaagacaagttaattttatttttgtctgtgcgcgcgcgcgtgggccgcttcggtcacacgcgtcgctcggcgtcgcgacgccgacgtccggcgaaggcgacgggtacggtccgacttgcgcgtcaggaacagcggacacctaccggctaccgccgcctcctttccacttccaccggcttgtgttctcgcccgggcagcgccagcgccgaggaggggaagctccgtcatcaatcggccggccggggtccggtgcccaaggaaagcttagcgatgcggaggcggacgctgggncgacccgg

SEQ ID NO: 157692 - DNA, 195 bp, Zea mays
  Clone ID: MRT4577_75391C.1
gaccctactctcattaggcactggtagctggtttaggtggacttcgtctgagatggctgaccctgcagccctatcagccgcagccgtaggcaggaccggtgtcaacttggatgtaatgagaggacaaggccgagatctcgagaagatgcccgacacccagcctgcgtctatggatactgatgacacagatgtgag

SEQ ID NO: 157693 - DNA, 468 bp, Zea mays
  Clone ID: MRT4577_75392C.1
aacgagcgtacttgtagtgaataatgtgaactggagtccgctgcactaagctacactatcagctagcttcactcctgtttagtcggcagatgagctaacggaattgtcacccatcaccatgggtggcagtgtgagcaatgacctgaatgaaccattgaaatggaaaggaataatatatagggaaaaaggatgtttggaaaaaaaaaaactaccattaaaacaaaaaaaatactagacaaatataaaaaaaaaaaaaaaaaaaaaaattaaacgcttgtgcccgcttttttttttaacaagctatttttttttttttttttttttttttttttgcgggaaaggtaactcctttttctgggggggccctgacacaacaccaaaaacttttttttttaccagcaaactgaggctaaccccaaaaatgtctccacctgcaacagttgctgccctaaaggccaacttgctttg

SEQ ID NO: 157694 - DNA, 402 bp, Zea mays
  Clone ID: MRT4577_75393C.1
gggtcgacgcaagcgtctacgcagttcctcagaatattgaaagagatgactaacaccatcaataattagtacagttccatcatgggctatatgttcttcttcttccacaaaattgggcatctgtatggttcaaattttaagaacctggttatcctagagatgagaatctcttgatacttcatccttgatatcatgagaaaggagacatcatgttgcaataactgatgcaattcttctgaatattggaagaaatgactagcaccatcaataactagtacagttttaccatgggttatatgttcttccacaaattggcatctatatcattcagatctgaagaacttggtcatccctagagatacgaattcactttcattttttttggtcggttataaaaaaata

SEQ ID NO: 157695 - DNA, 2368 bp, Zea mays
  Clone ID: MRT4577_75394C.1
gggtgacccatcgatttgcttgccatgccaccacctctctctgctccactgcagcagtgctcctcctcctcctcctcctcctcctcctcctccaccaccaccacgcggtccatctcactctcacagatcacaggctccaattggcatctcgtctcgcgctcgctttccccagtccactcgcgctctcgtttcccggagcttcgcgatgcagcgccttctcgcgctggtggcagccctgctggtgctgctggcgtcgcgtccagcgctggccaccgacccctacgccttcttcgactgggacgtctcctacgtcactgcggcgccgctcggcgtcaagcagcaggtgataggcatcaacggcaagttcccagggcccgtcgtgaacgtcagcaccaactggaacgtcgtcgtcaacgtgctcaacgacctcgacgagcccctcctcatcacctggaacgggatccagcaccggaagaactgctggcaggacggggtgctcggcaccaactgccccatcccgcccggctggaactggacgtacgagttccaggtgaaggaccagatcggcagcttcttctacttcccctccaccggcctgcagcgcgccgccggcggcttcggcggcatcgtcgtcaacaaccgcgacgtcatcgccgtgcccttcgcccgccccgacggcgacatcaccatcttcatcggcgactggtacaacaagaaccacacggatctgaggaagatgctggacaaggggaaggacctcgggattcccgacggcgtgctgataaacggcaagggcccgtaccggtacaacgacagcctcgtgccgcccggcatcgagtacgagaccttcaatgtgcatccgggcaggacgtaccgcatccgggtgcacaacgtggggacgtcgacgagcctcaacttccggatccaggggcacagcatggtgctggtggagacggagggctcctacacgtcgcagcagaactacacgaacctggacgtccacgtgggccagtcctactccttcctcgtcgccacggaccagaacgccagctccgactactacgtggtcgccagcgcgcggcaggtgaacgagtcccagcccctctggcgccgcgtcacgggcgtcgccgtgctccgctactccacctccgggggccccgcgtcgggcgccctacccgacccgccgcaggaccagaacgacagggccttctccatgaaccaggcgcggtcggtccgctggaacctgagcgccggcgcggcgcggccgaacccgcagggctcgttccgctactcggccatcagcgtgacgcaggcgtacctgctgcggggcgcggggcccgtgtggatcggcggcaggcggcgcgcggcgctgaacgggctgtcgtacgcgccgccggagacgccgctgcggctggcggacgcgtacggggtggagggcgtgtacacgctcgacttccccgagcgcccgccgctccgggccgccgcccccaggatcgcgcggtccgtcatcaacggcacctaccgcgggttcatggagctcatcttccagaacaacgacaccaggatgcagagctaccatatggacggctacgccttcttcgtcgtcgggatggactacggcgagtggacggaggacagcaggggcacgtacaacaagggggacggcgtggcgcgcagcacgatacaggtgtacccgggcgcgtgggcggcggtgctggtgtcccttgacaacgtcggcgtctggaacgtgcggtcccagaacctggactcgtggtacctggggcaggaggtctacgtcagggtcgtcaaccctgaggacaccggcaacaagaccgagatggccatccccgccaacgctctctactgcggccagctccacaagtaccagaaggagcagactccgcaccacaagatgggggcgtctgctgcagcgccacgctcgttggtgtccctagcgcgccggctgctcgcgacggcgctgctcctcgccggatccttcgtgttggcgccgtagagtgagtggcaaccgtacttctgcaccgaggcggcacccgtttatgtaggtttgattaggattagaggcgtaggccgcgtcattacctatgaaaattgttcatatgccagcagtgctggcctccgcctggtttcctatggtacagttctccctcgctttcgttgtgtgtgtgtgcgcgcgcgcgcgcgcgttagttagcctctgttaggaagggtcgatggtttctctctgattagttcattccttttgatggtgattccgatcttagcgtttttgtatcgcacctcatgtagtcctgttcttcacctggctaagaacgttttactggaaaaaaaaaaaaaaaaaagtatcaat

SEQ ID NO: 157696 - DNA, 112 bp, Zea mays
  Clone ID: MRT4577_75395C.1
tcttcttattaagacgtgattgatccgcattgtttggtaaaggaacatcttctctttatcataatggaaatgttcattagaaatgaaaacgtgattcaattggtcttaatta

SEQ ID NO: 157697 - DNA, 1700 bp, Zea mays
  Clone ID: MRT4577_75396C.1
aaattattagccccactgtgctagcaagctggcctctctgcccatgaatacagaatccaaacgaagaaaacatggaacaaaaataattggctccaacctccaactgggctcactcatgctggaactaactgctaagttgcaaccccactcccatttctatctctctcctcctgccatcaccctagaataggagcatttacctccgctttctctctctccctctcttccatcctcatgctccctctatatatacacatctccaccctgttcctgggtccgcctcgaggccggccgggaactgctaagttgcaaccccactcccatttctatctctctcctcctgccatcaccctagaataggagcatttacctccgctttctctctctccctctcttccatcctcatgctccctctatatatacacatctccaccctgttcctgggtcctctcttccacccactgcaaccccaaatctctccttcctcacacacgcgaaggtgagagaccaaagaagaagaagaaggagcgagcaagcagaaagttagctagctgctagcgtggaagtgcccaaggcgagagagagagacaagctagctaggacggccgcgacaggctagccagccagctgctagctagctcctgcggacgagccgatggctggcgccgacgtcgacgtcgggacggagctccggctcggcctgccgggaggaggcgccgcggcggccaagaaggacaccatcgacctcaagctgaagctgcccaccgccggcatggagggagggcggctgccgccgccaggccggagccggcagccgagaaggccaaagaggcccgccgaggcgccggccgccgatgccgagaagccacctgcacccaaggcacaggccgtgggctggccaccagtccgatcgtaccgcaggaacgccatgaccgtcgtccaggccgtgaggagcaagaaggaagaggaacctgagaagcagcaacagcccgctgctgccaacgccttcgtgaaggtcagcatggacggcgcgccctacctgcgcaaggtggacctgaagacgtacagcagctacaaggacctctccgctgcactcaagaagatgttcggcaccttcgtcaccgcaactgggaacagcatgaacgaggggagattggttgatccggccggcgatgctgatgatgtggtcactacttacgaagacaaggatggtgactggatgctggtcggcgacgtcccgtgggagatgtttgtcgactcatgcaagcgtctgaggatcatgaagagttctgaagccataggtcttgcaccaagaacgaaggataagtgcaagaacaagagctgaagaagatgcagtgttaaagatgttgcccattgtatcagaagaatggtccccttgcagtgcgctgccgtttttttttttcctactagaaatataacgcgttttaattactactagttggagggagacctgtcttgttcaactcgttcatggaccagaagcaataatctatccgtgtgtagctggattggtgttatgtcatgtcccctaccgtgtctcccagaatctacttggtgattttattccagtgttgttaatcaagtttatgtgattgttaagtaaagggcatcaatgagactattattatttattattaaaaaaaaaaaaaaaaaaaaaaaaaaaaaaaatgtatgtggtc

SEQ ID NO: 157698 - DNA, 196 bp, Zea mays
  Clone ID: MRT4577_75397C.1
ccaacgctttcttcaactcgtacactagcttaacttattcatgcactcacatctagggtgcggcactttaaacatctaacccacaacttcactattgataaccaacatcaatactccaacatttcactacatctatacgcatcatacctatctaactgcagacatagcatcaactttctacctgaaccatatcatc

SEQ ID NO: 157699 - DNA, 184 bp, Zea mays
  Clone ID: MRT4577_75398C.1
gagcctaacaaaacatttatgacaagacacattattagaaacaccattacagttgagaattacatgtatattaacgcaacgtatgcaagtacacgttggctacgacctcatgccacatcaggattcaacgcttataaatactaatgtatttgtgtattcttattatatatcatatatatatatt

SEQ ID NO: 157700 - DNA, 367 bp, Zea mays
  Clone ID: MRT4577_75399C.1
attcggctcgagaggctgacaccttttgtgtacaccagggggggaaccaatgaccacaggtaatgttgggatggatctgctgttcccaaggctaggcggtgagggggaaatgacatggatgtggacgaatgatagcatcaaggtgaccaggcacggagacaacagccctgggctggtgaggctactgcttatggatcgccacagatcatttggactacaggacatggtcaccgggcacatgggtactgccctggcgacataggattagagcataatgccggatacatccacaggatgcaagacacgaacagacaattttcgtcagtacacatgaaagcaaaatgcctagatcggattaccgaagaga

SEQ ID NO: 157701 - DNA, 208 bp, Zea mays
  Clone ID: MRT4577_7539C.1
cccacgcgtccggaaaaaacatgaaaatacacagaaactaaatcataaaataaactaaacaggaaggaaaaaaccaaagaaaaagacactcataaaaaataaaaaaaaaaataaaaaaaaaggggcctcctttctataggacccatgcttccttacccttgcttactaattgataactctcctattgggtcacctaatttcagttcct

SEQ ID NO: 157702 - DNA, 510 bp, Zea mays
  Clone ID: MRT4577_753C.1
ttggaattcggcacgaggaacgaatgagctactgtacaagccggcggccgtcctctaactataacgcgccggcccggctgaacaggctcgcaccctcgtgcctacgcgcgccatgaccgagccaccacagcggcatgctgtcgcccgccggccgtgctggtgatacaactcccgatatctgtttcaggactcaggccctgtgatgatgaacaatcagggcagtttacacacagggttcgtcgattggtacgtgatgtactaccgagaggctaatggtgcgcaaaaagcgtacctgctccccgatgcactgatggaagacaggtgcacttgcgtacagactggcggacaggcgaccatggcggaggcgtgaatacagtgcagtctgctgcttactccaaatgcccgaataagccatgctgatatgccacgtggactcctcagtctcaggagcaaggacaacatatcgtgacactcggcacactggccaatgtattgtgagcaggtgcttac

SEQ ID NO: 157703 - DNA, 623 bp, Zea mays
  Clone ID: MRT4577_75400C.1
aacccgacccgtgacggagaagtgaggataatgacgtcctcgtcggcggcgaggaaccagcacctggatgagctccgcgcgctcatggcgtcgcactcgccgccgatccacgcgctcctcatcccctccgaggatgcccaccagagcgagtacgtgtcggagcgggacaagcggcggcaattcatctccgggttcactgggagcgctgggttggcccttatcactacaaaggaggcattattatggacggatggacgatacttcttgcaggccacaaatcaacttagcgatcggtggagactcatgcgcatgggagaagacccaccagtcgaagtctggatagctgataatctctcggatgaagcggttattggaattgattcatggtgcatctctgtggattctgctcagagatatgagcaagcatttttaaagaagaatcagatgttgtttcagctttcctctgacctcgttgatgaagtttggaaagatcgtcctccgaatgatgctacacctgtaattgtgcaccctgtagaatttgctgggtgtagtgtagcacaaaagatgaagcagttaagagaaaagttacaacatgaaaaggctagtggcattataattactgc

SEQ ID NO: 157704 - DNA, 248 bp, Zea mays
  unsure (1)..(248): unsure at all n locations
  Clone ID: MRT4577_75401C.1
gcgtgcgctgtgcacgnnctcgtctcgcggtggcgtgccgtcgccggggtgcttgtcgtccttggctggtttgcgcntgggctcctggtgtggcccctcctgggtgttcgcgcgtcggggtggctgcgcctcgtgcgcgcctgctcgttttgggagggggggttgttgcggtctgctggtggtcgcctgctgttcgttcgctgccggcggcttggggtctgtctgcgcccctccccctgccctggttg

SEQ ID NO: 157705 - DNA, 535 bp, Zea mays
  Clone ID: MRT4577_75402C.1
attacatacacacgccggaactccgagaagtttcgagacgatcgtaggaggtgagccaccgcaagcggatactcgactaatcgaccaaccccgtctatccgtctgtggcgcgccgtgctagatcgctactgaccatgatggtggatcagatcagcgaggaggtgaagatcctcaccgttaccgaacatgtcatgagtatcgactacatagcctacgaggagaggcgccgcagtgaacacgaaccgtgtccaggtgcacaacaccaagaagaccctcttcttctaccttctcctcgccgagaagtatatgcgatgagactacgtggtagagctatgcgctcttgcgatggccataggatcaggtgtgatctggtcataaatctctgtggagctatgaatgtgctgtagaaaagagcattacgatctctactgttgaaataaacgactaatctctatgttgtccattccaatacgccaatattgagataatcttgcgaaaaagcgacaaatttgatgagctgatggtcgctgctgca

SEQ ID NO: 157706 - DNA, 855 bp, Zea mays
  unsure (1)..(855): unsure at all n locations
  Clone ID: MRT4577_75403C.1
cattgggtacctcgaggccggccggggtatggtatatataggtatgtatttgggtgaatggattttggaacatcttgtcctcatacctctcctttccaacacctaattaatggcgcgcccatacgtgcctgatgctggctccaaaccccgacccttttcatccctccctccctccctcgtcgtctcctgactttgctcgccggccgccccgcccacaccctcctcctgcgctaccactgtcagcaagtgcacacccttcgaggacagctgctgtcgccgccaaggccgcaaccggccgtcgctccatgctgcggtagaatttagaaacgagaagggagatggcggccgaggcgctggggttcatggcgcggggagccaacggtgggagggcggcggagctcgtcacaagggactttctcggcgggtgcgccgcccccgacgacgccagggacgcgtccgccaggaatggcaccgtgcccgggagggtggctcagcagaagcacgcgtgcccgggaacgccgatggacctcaacctgttcccgatcgcggccgcgacgaagccctgcgccgtgacaacggcgccgtcgccagagccagcgccagcctccgcgggcggcgccggcgccacgacgacgtaccgcagcgtgtgcaccatcgagaaggtgaagacggccctggagcggttcgagcgcggcaggcagcaccagccctcccatccgcaccacaaccacccccaacagcagcagcagcagcagcacagcggcgcgggcgcctccccgtcgtcgtcgaccgtgaccacgtcctccgtgaagcggcgcggcggcgnncgtggagcagggcgacgactgcgactcg

SEQ ID NO: 157707 - DNA, 365 bp, Zea mays
  Clone ID: MRT4577_75404C.1
gggattcgacccacgcgccacgcctacccgtccgtaatactctaccaatgaatctgatatagtctatggaaaccgaagtagctcctggaatgacggactattggtagagggcagactttgcattccagatgcttctcatgctcgctcatcttggaattgcaagcttcaataccaacgataatggatgcaacgctctcatcatcactacgatggctatcacaaatgcagagatcgctacacaccatccaagtttgtctacattcttatcgacgcattctgtaagcatcactcactattgcatcatgtgcgtcagaggcacagaaacagaagtgcatgccctttttaacgcagatgatgacgatagc

SEQ ID NO: 157708 - DNA, 399 bp, Zea mays
  Clone ID: MRT4577_75405C.1
ttttataatcagtgcaaaaggtgatgtctttagcaacattcttgctggattttactattgctggggtcttcctgcctaggcaatacggtgtgcccagcctgccttgggtgaccttctaaatcatggaggcaactattatctttatccaataaaataagtgacatattgtagtgtgtgtagtgaaactaataataatgtgtgccgccgaactatttgaagtctgagcagcaaaattcttatagttggtttaacttgtgatgagcaaggtcgcaaatgtttagtggctatattcaatttgatattgctttcgatatattataactctaatagggtttgcatgctattgctatagaaagcactggtttcaagttgtatggctaaccacaattagtcatctaa

SEQ ID NO: 157709 - DNA, 1089 bp, Zea mays
  unsure (1)..(1089): unsure at all n locations
  Clone ID: MRT4577_75406C.1
ccgcgacatacgtgcctgatgccgggaaacctcgacccttttcatcactccctccctccctcgtcgtctcctgactctgctcgccggccgccccctcctgcgctaccactgtcagcaagcgcacaccctccttcccctgtacccccttcgtctctgcctgcgcgcctgaagcggtgttcgaggacagctgctgtcgccgccaaggccgcaaccggccgtcgctccatgctgcggtagacgagaagggagatggcggccgaggcgctggggttcatggcgcggggagccaacggtgggagggcggcggagctcgtcacaagggactttctcggcgggtgcaccgccaccggcgacgccagggacgcgtccgccaggaatggcaccgtgcccgggagggtgcctcagcagaagcacgcgtgcccggcaacgccgatggacctcaacctgttcccgatcgcggcggcgacgaagccctgcgccgtgacgacggcgccgtcgccagagccagcgccagcctccgcgggcggcgccggcgccacgacgacgtaccgcagcgtgtgcaccatcgagaaggtgaagacggccctggagcggttcgagcgcggcaggcagcaccagccctaccatccgcaccacaaccacccccagcagcagcagcagcagcagcacagcggcgcgggcgcctccccgtcgtcgtcgaccgtgaccacgtcctccgtgaagcggcgcggcggcggcgtggagcagggcgacgactgcgactcgccctccggcggcgggatggtcgccgcggcgtgccccaggtgcttcctgtacgtgctcatctcccggagtgacccgcggtgcccacggtgcgagtcccacgtcccggccccgccggcgccggccgtgagcaagaagccgcggctcgacctcaacgtcggctacctcggcacctaatttcttctttgccatggcgtagcctagacggatcggccgctgtctcgtctcgtaccgtacgtacgtacgtacgtnctaaattataggctcgtgtaatgtgacgatccatccacgaaccgagttggagaggctccagcagagaaatgcatg

SEQ ID NO: 157710 - DNA, 1469 bp, Zea mays
  Clone ID: MRT4577_75407C.1
cggcgggcggtcgattattgacatcttgtcctctacctctcctttccaacacctaattaatggcgcgcccatacgtgcctgatgctggctccaaaccccgacccttttcatccctccctccctccctcgtcgtctcctgactttgctcgccggccgccccgcccacaccctcctcctgcgctaccactgtcagcaagtgcacacccttcgaggacagctgctgtcgccgccaaggccgcaaccggccgtcgctccatgctgcggtagaatttagaaacgagaagggagatggcggccgaggcgctggggttcatggcgcggggagccaacggtgggagggcggcggagctcgtcacaagggactttctcggcgggtgcgccgccaccggcgacgccagggacgcgtccgccaggaatggcaccgtgcccgggagggtggctcagcagaagcacgcgtgcccggcaacgccgatggacctcaacctgttaacaataaaactctttcatacctctcttcattaaattggtatatcatatcatcttggtttgcttacatgtcattgtatttaatgagaatgaaatttaggtgacatacccactaagaatggtcttattcatttccaaaaaaaaaaaaatgtacacttaatgcaaattaacgttgtcagcttactactttgaacccaagattaaaaaatgtttttaattgacaagctaagggtccctttgagctagctttcttgtacacttaatgcaaattaacgttgtcagcttactactttgaacccaagattaaaaaatgtttttaattgacaagctaagggtccctttggttagatggaataatctttagttcctggtttttagtccagtttaatttatattttgctaaacagaagggctaatatatagactaatgacacttcctgacattttttgatatttatgccctctttttccatttattgggtagcatttgtaatgttgtcaggaagatatctcttgtgttcttcagcttgagatacatatattgcagtcgtcaatcattgtactgtgctcaaaaaaaaaaaaaaaaggcccctaggtgcgagtcccacgtcccggcgccggccgtgagcaagaagccgcggatcgacctcaacgtcggctacctcggcacctaatttcttgtttgccatggcgtagcgccgtagcctagagccctagacggatcggccgccgtctcgtaccgtacggacgtacgtacgtacgtcctaaattataggctcgtgtaaaataacgatccatccacgaaccgagttgggggaccatatataggagttgtcaggaaatttataccgatcagactcccactcccctcccggttgtttgccatggcgtagcatagaacatgaatgatggttgatactgctgctgctcctgtagaaccaatcaatcctactaccacaatgggtcgaaaaaaaaaaaaaaaa

SEQ ID NO: 157711 - DNA, 813 bp, Zea mays
  Clone ID: MRT4577_75408C.1
atgacgaccgagttgacatgcgtgacaaatggcatgcgtgtcattattacaagtaatggtgcggaactcggtgtcgacgaggacgatgcgggtctcccggttgcccacgaactgctcctcgagggcgagtcaggttccgcgcacggtgggttcgacgatggtgacgatgtcgaaaagttcgggcgagatggatccgtagagccaggagagaacatgaagttccatctggacacagtgggcgacgtcagggaaggtggcgtcacacaggacgtgatcggcgagtgcatacttgctgaggacgaggaggatgaggcgatgccacttggagaaggacggcgtcgcgaggtcgaggacgaccggaacgaggctgcggatgtggaggatgccgagggcctgagtgtggagagcagccatagggtcgtcacgggttctgcctgctggtgtgtcaacgtcgacggtgtcctcaatctcgccgtgggtggtggtgtcggcggactggagacactggcgagcagcagcaagggcctgctcgtgacgcgtaacgtcgtcgcaaggcgacgtcattcggtagccacggcggtcgcgcgggcctggagggcggcagccgtctcagcggagcgacgatgggcggtgtcgacaacttcctgctggagatggcgctcctcagcggcgcggtggtcgtcagcggcacgacgagcatcggtagcacgtcaggcagcggcatcagcatcggaagcatcggtggccatggtgggaagatggggtgcagaagggtgggtcaagggaggaacgcgaccttctatgataccatga

SEQ ID NO: 157712 - DNA, 316 bp, Zea mays
  Clone ID: MRT4577_75409C.1
cccagcgtccgctcacgcttgcgtgcactgcctctctcacctcaggttgattggctgtcgtgtcgaccgcaaaaggagatcacattattgactttgttgatctatgagaatatgacttgttctctacgattgtggtgcaagagcactcttgcttgctgcgccgtagaagctgattaactctaaccaactggtgaatgatccgctactatggctcagacgcaaaaaccgtaggaggttccggattgttgacaatgaaccgctatcctgatatacatatgaaacaaatagaaactgactaatgtgacatattgacact

SEQ ID NO: 157713 - DNA, 515 bp, Zea mays
  unsure (1)..(515): unsure at all n locations
  Clone ID: MRT4577_7540C.1
gggccggaaacgcccgggntcgacccaacgcgtccgaaaaaaaaaaaaaaaaaaaaaaaaaaagggggaaagggaaaaaaaaaaaaaaaaaaaaaaaaaaaagggaaaaaaaaaaaaaaaaaaaaaaaaaaaaaaaaaaaaaaaagaaaactagaacaaaaaaaaaagaaagcaaaaatagaggcgaaccgaaaggaaaaacaactgaatttacccaacgggatagttggggaagaaaaaacccctttaaaccagcaacaaaaataaatagcaggccatccccaataggcctgcagaacaaatacgcaacaggaacggccaaagggacgtgcccaaaaaacgcccattaagaacggcaaatggaacgggcacgctcaatgggacctaaacacagggcagggtcctaaaaccataaaccctaacctgcccaccttaaatgccccaacaccccggacggttgtaactgtcaagttctaaattgggggctacatatagggttcccatttaaggctaaa

SEQ ID NO: 157714 - DNA, 568 bp, Zea mays
  unsure (1)..(568): unsure at all n locations
  Clone ID: MRT4577_75410C.1
acctcgaggccggcgaagtggccgacgacccgcaagcgcctgagcggatggcagagcaggcggtgcgcatcacccgggaactgctgccggtgttcgaacgggccaccctgtatgtgtggcggcgccatctggccgtggaggcgggccgggcattgttgccggctaccgacccggtcatcaagaaagatgagctggccgcggttggtttcatcgacatcgacgggttcacccggttgtcccgcgcgctgaacaccgacgaacttgccgctgttcttgagcagttcgagacggtggtgctcgacaccgcattggcccacggcggccgggtgatcaagagcctgggcgacgaagtcatgtttttcgccggtgacgcggcgtcggcggcgcagatcgcggtgaccgcggtggaccagatcgccacggacgaccgggcaccgtccgtgcacgcgggtctggcctggggcccggntctgaaccgcggcggagatatgttcggcgatgtggtgaacattgcctcccgagtcaccagnctggcggatagcgggaccatccgggtcgaacaggcgat

SEQ ID NO: 157715 - DNA, 2670 bp, Zea mays
  Clone ID: MRT4577_75411C.1
tgaattcggcacgagggcggcccagcaactgctgcagccgtttccccacagctgctgcttccttctcctacactgccccgctccgctctgagatggatcccgcgccggcgaccccgcgctggaatcttgagcgaccgtaccttactggacgcttccaccaggaggcgaaggcggctgcggcggcgcagggcctcggatccaagccgttctcgcttgactccttcagccgcggcgccggcgccgggagtgtcatcggatcgtacgcagtatcagtgcaggagcttttggttatcgatgatttgctatcagctctggtgggtattgagggacggtatgtttctattaagagagttcgtggaaaggagggctatgttgtctttcagattgattcttctatggaccttgccctccaggaattgactcgccggattttccctttgtgcgaggattatgtgttggtaagccagtttgtggagtccaggtcacatttcaagaatggtttggtcaaccatgctctggctgcagctctaagagcattcttactggattatcaggcaatggttgctcaactggagcaccagttccgtcttggaaggctttctgttcagggattatggttcttttgtcaaggatgatgagttcactgaatgcactggcagttctagtggagaaggctacctccaacaatactaatggttcagcgacacttaatctacttcaaagccaggcaaaggcgatgggtggtgatagtgctgttcggtctttactggagaagatgacagaatatgcaagtgcagcatacctcaggatgctagaaaggtgggtgtatgagggagttattgacgatccttatggtgaattcttcattgctgaaaacaaatctctgcagaaggagagcctcactcaagattatgatgccaaatattggcagcaacgttacagcctaaaagaaggaattcctagtttccttacgaatgttgccgcaacgattctaacaacagggaagtatcttaatgttatgagagaatgtgggcacaatgttcaggtttccttgtcagacaattctaagcttatgagctttggctcaaaccaccaatatcttgaatgtataaaatctgcatatgattttgcaagtggtgaattgttgactctgatgaaagataagtatgatctcatcgggaaactccgatccctgaagcgctatctactccttgaccaaggtgactttttggtccattttatggatattgctcgagaggagcttacaaagaaaccagaagaaatatccgctgaaaaacttcagtctctgcttgacattgctttacggagtactgcagctgcttcagatccaagccatgaggaattaatctgctgtgtggaaaggagttccctccttaagaaactggccactctgaaggacttggatcctgcagataagcttgctgcagcagatgttgatcgatcaatgcaattaagcatcacgggtttggaaacattctgccttagcaataaggtccagtggccgttatctcttgtaatttcaaggaaggctttgacaaaataccaattgatctttcgcctattgttccactgcaagcatgttagtcgccagctgtgtgcagcatggcaaatacaacaagcattccggtctgtcaagattctagggacaccaattctgcggtcatcaattctttgtcgtagcatgctcaagtttgtaaatagccttttgcattatctaacatttgaggttcttgaaccaaattggcatctgatgcatgaccgccttcaaacagcaaggagcatagatgaggttatccagatccatgatttcttcctccagaagtgtctaaaagaatgcttgctgttgtcgcctgaactccttgtgaaagtcgagaagctgaaaggtttatgccttcagtatgccacttccatccagatcttgatgccatctatcgatgtcgctaactctgagaacacatcgaagtctaggaagtcaagatcaagaatcgataaatcacaggacagagaccagcagctgaaactagcatcagagaatgttgtcatgtcagagtcgatcctgaaatttgaagcagcgttcaattcagagctgcagagtcttgctcctacgctgagtaacagttcacaagcggagccgtacgtgactcatctcgcacagtgcattcttggcgtgcgaatcggccaatgagttatttgatgggccgtacccatacctgcctgccttcattttggacttctggtacaatgccatactctatgtgcgccgctgcagtcaaggtaggtgcatatccgtttcttgtgaatgctaatgtggagctacgacgcgtttagtgaccctagggtggtgtcgggagccttgttatcttgagctcgaaccttgctgtgtgtttatcagctgcgactcagcatttcgtgctgttgatatctgacaatagcaatgtgtggttgtgttgtgttgtgttgtgagactcagatgtaagctttgtggagttcatttccacgtgtgtgggaaaagtgtttggtttgaatcgaactgggcattggtattccacgagagatggttagcggccagtaatgtaatagtaaatatcatgctattaagctaatttaagttgattatatccatgtgtgatgagtaataatataaaaaaa

SEQ ID NO: 157716 - DNA, 996 bp, Zea mays
  Clone ID: MRT4577_75412C.1
caggaggtggcctgacagtcatggaggagccctcgtcatgagcgggtaagtattggcatctttctctggcatcccagagctgggtcgaagtaagacaggagccaaatcagcccttgaggtgtccttatggggcgagcgtaacccagccatctccagcgacctatcaaacatatactgctggggcgaaggcggtctaggtgagcccaatggcccaatagaccgcgggtcttcaactaagttgtcctaatggggtgagctcagcctagccatctccagcggcccatcaaaagatatgagctgaggtgaaggtggtctggttgagcctagcggcccaaaatgtctcggatcttcgatcagggtgtcctgatggggcgagcttagcttagccatctccaacggcccagcaaaagaaacatgctggggcaaaggtggcctggttgagcccagcgtcccattctgcagtgcagaggttttcgagtcaggttggcctgatggcacgagctcgccatagtcccctccaggctccagcggcccagcaaataagctatgctggggcgaaggtaacttgggcaagtccagcggcccatcaagatcttcagaaatcgcccctcactctgtgcaagtatccataggcctaactgaatgctcctcgtgtatgcagcatgtctccttgtcttctaaagcttgtggtggcgtcaaccccacatccctagtcgcattcatgacacgctcgtggcctgaaggctgttgccgtcccagtcgatgctggataggctaccgagaatcctcggtcatgtccggacgtcgaggatggaagtcctagttaccgacttaccgcggtcctctccttcatcaggcctcttgctagtcgccaaggaggggagaggtggagcatctaagactgttgagtgtaaattcattggagttgctctaatggagatcttatatgtcaaacatctcttctcatgagtggctaaccccgattcaatggtatgc

SEQ ID NO: 157717 - DNA, 463 bp, Zea mays
  Clone ID: MRT4577_75413C.1
cttcctaaaccagacagactcacatcactcctacgtctcaaccatcaatcgctctccctagcgtatgaccttgcaagtcaattttcaagcaacctcaagtaaccatgaacgacaccacttgtcatccagttcctcttagctctggtagccgctgctcagcatcacgccccccatgtcggccaggctgcgctcgatctctctgacaatcgcccgatccatgtttacggtgaacgctctgacggacacctcgagtccacgaagtcacgtgacccacccagcgtcagaaggggaaagctcctcaagcgcgaatgccattgagccaagatctatggctgttctgataaggctaggtgctggaaacaatgcggcagtggtaactgcgagctggactgctcacaatgctggaagtcgcattcggatttccagtgcctcatccaacgtctggcaccggaacccggattgc

SEQ ID NO: 157718 - DNA, 260 bp, Zea mays
  Clone ID: MRT4577_75414C.1
actccctatagtatgtcgtattacagtgcgcatctggataaccggtcaaagcccaccctcttctccaaggtaagactccacagggtgaagaacataaccgggctggtcgaaacttttgcgaagtgcgctaagctgatggagctggtaaaccttgtcatcgttgccgggtagaatgatgtcaacatgtccaatgacagggaagagatctctgagatagagaagatcatgaactcatcaatacccacgacttgctccggcaa

SEQ ID NO: 157719 - DNA, 622 bp, Zea mays
  unsure (1)..(622): unsure at all n locations
  Clone ID: MRT4577_75415C.1
cgggaattcaaaataatctaattttaaagagaaatttcttttacaaagagatgttgggcagatttactcatacttttaagactctcgtcccagttttgagagcctcttaccatgaaaatgtcatcaatcgctttgaaaaccccaaaaatgtcggatcccttgatgccaagaagaaaaatgtcggcacaggcttggctggacaccccgcatgcggtgatatcatgaagctccaaatcgaagtcggagaagacggaaaaactattgaaaaagctgtctttaaaacttacggatgcggatccgctatcgccagtagtgattatgccactgaacttcttcaaggaatgactgttgaagacgctttgaacattaaaaacggagaaatcgctggctaccttaagctccctcccgttaatntacattggcagtttgcttggctgaagatgccatcaagaaggctatccacaacttcaaagaaaagaaccccgaacaaaaggaataaattacttgaaaatgagaatattcatctatccacttttaatgtatcttatattgacattaacattctggtggaanaagaatggttactctttttgcgcaccatatgcgagtcaaaattttatat

SEQ ID NO: 157720 - DNA, 279 bp, Zea mays
  Clone ID: MRT4577_75416C.1
ctggatagtggccgttcgcgattttgaagatttgacgaggcttaactgtgcatatctgattcaggaattatctaggtgtcttattaggcctatcctgaagccataggaaaagagatcggaatcccctggggaattctatttccacattaccaagatataaggaggtttttttgtggatatgttgaattggaatcatttggtctcttatctggcctatccagaaggctaaggaaatgatatcgggattcctcaggtaactccaatctcacattgtcaaga

SEQ ID NO: 157721 - DNA, 433 bp, Zea mays
  Clone ID: MRT4577_75417C.1
gtggagggctggggttgggcgtggccgctgtggaggaatgattggaatgggtggaagaggatcgacgtgaccgtgataccaggttgtcaagggcgttagttcctagggtagctgaccctcgactccgcaactcgtagtctcggttcgtcttcgccggcagggttataccccccgtgccgtcggcttggtagagaaaggaggaagaagaccggagggctaaattcttgcttgccttcatcaagtgtcgattacagagataagtagccttggcttgctaaccgaatggaaacaaactcctcctaaactttaggatctaattccttctctttctattctagccactaatctgttcctggtttccttcctggggcgcgctggacctggacgcggcgtgcttagcagctcgtcaaacctcccttgcgcgccgtcttcg

SEQ ID NO: 157722 - DNA, 416 bp, Zea mays
  unsure (1)..(416): unsure at all n locations
  Clone ID: MRT4577_75418C.1
tcgcgagcacggcgtccgctgttgcggccatagtcgaggtcggtgatgcacaggtggtgctttgcgaagcggctgcgcagtgaaccgtagatctagctggttcttgggagccacagtccagggccaactcagacgttgcaacttgcgagcgtcgctacctactgcgtacatgattctgagtgaacagtgctctacacattgcacctacgctgacgaatgcttcaacttgcatctgatcttcctaatgatagtcgaatactttataacgcttgggtcttgaccacaacatacgttacactcagaacgttgtacacataaagttactggctctgctaatgaacaacgtncgtatctgccctcgactagagctctcaagatccagcttatcgacatgtcagtgctcatccacttcacat

SEQ ID NO: 157723 - DNA, 681 bp, Zea mays
  Clone ID: MRT4577_75419C.1
agtttcctctgtcaccccctctccctctgttcgccactttataccgcccgcccaccactcccctccccgtttctctctgcttcatccttcgctttcccctgcgccaggcccgccccgcccttccagaaagggaagcaggtggtgctggaaggcatgggggacgagcggccggggtgcctgcccggcgacgccatcctcacggtgtccgagaagaggcacccggcgttcaagcgggtgggcgacgacctggtgctcaaggcggaggtgccgctggtgggcgcgctcaccggctggtccttctcgttccgcctcctcggcggcaggaaggtgagctgctcgttccaggacgaggtcgtccgccccggctacgagaaggtgatcgccggcgagggcatgccggtccccgggcagaagggcgcgcgcggcgacatgagggtcaagttcgacgtcgtcttccccaaggagctcaccgccgagcagcgcgccggcctcgccgagatcctcagaggctcctgctgatccatcggccccagttccaagcgtatcaggttttcttggccgtgtccgtgtgttaaattttaatatgtatactcatagcgcgtgtgatgagtatataagtacataaagagagaggggaggggcggttgttgtacatacaggtcgtttattatatataaggat

SEQ ID NO: 157724 - DNA, 333 bp, Zea mays
  Clone ID: MRT4577_7541C.1
aaaaatcactagtacaattaggcaactaactattatcgctagtgtattcaaacgctctcaggtagatattaaaacttcacctttttgaattgactggcactgctagcacactatgctatatctagacttcacacatcttgtcaggtgatttacttgcatcctttacctaaaagaataccacattgacctctaccgaaactggatccactgtaatctgcttaatttctctaaatccaaccactttaatgaactcaacattacatatcattcttaatacccaaacttcacttcataactcactttaacatgacatgcaatccaattatcaaacat

SEQ ID NO: 157725 - DNA, 531 bp, Zea mays
  unsure (1)..(531): unsure at all n locations
  Clone ID: MRT4577_75420C.1
ttccgctgtcactccctctccctctgttcgccactttataccgcccgcccaccactcccctccccgtttctctctgcttcatccttcgctttcccctgcgccaggcccgccccgccccgcccctccagaacgacatcctccttccccgccccctccgatggggaacccgccggagctgtaccacaagatcctcaacatccccaaggacacctcgccgcgacgtcgtcaccaagaacgggtcaaccgtgaagaaggaggtgacacagacggtggtggtgaagccagggtggaggaaagggaagcaggtggtgctggaaggcatgggggacgagcggacggggtgcctgcccggcgacgccatcctcacggagtccgagaagaggcacccggcgttcaagagggtgggcgacgacctggtgctcaaggcggaggtgccgctggtgggcgcgctcaccggatggtccttctcgttccgcctcatcggnggcaggaaggtgagctgctcgatccaagacaaggtcgtccgccccg

SEQ ID NO: 157726 - DNA, 769 bp, Zea mays
  Clone ID: MRT4577_75421C.1
ccggccgggctctagtctcttttcttctctgggctcgcgttctccctcctctgttcgccgctttataccgcccgcccgcccaccagaacgacatacatcctcctcccccgtcccctccaatggggaacccgccggagctgtaccacaagatcctcaacatccccaaggacacctctccgcaggaactccgcgccgcgtacaagagcctcgtcaagaaatggcaccccgacaagcacccgccgtcgtccaggccggaggccgaggcgcgcttcaaggccatcagcgaggcctacgaggcgctcctggaccagcaagagaacagggccgtgttcgggccgtgcaacggcgaccgggcgggtggaggcgccggggcgcgcgtggagaggacgcgcagtgacggtttctgcgcgaggagcgcgcccggcaccccggccggggagttgaagaaggtgtacagcgccggcaaccccggcgggcgccgcgccttcgccgagttctccagttccatcgtgcgcaaggcgccgccgctggagcgcaggctcgagtgcaccctcgaggagctctgccgcggatgcagcaaggaggtcacgttcacccgcgacgtcgtcaccaggaacgggtcgatcgtgaagaaagaggtgacgcagacggtgcaggtgaagccagggtggaggaaagggaagcaggtggtgctggaaggcatgggggacgagcgggcggggtgcctgccgggcgacgccgtcctgacggtgtccgagaggaggcaccc

SEQ ID NO: 157727 - DNA, 335 bp, Zea mays
  unsure (1)..(335): unsure at all n locations
  Clone ID: MRT4577_75422C.1
gggcgcggncaagccaaagggggggggttaatgaacgggaccaccgggatggccacggccaaggcctgggggaccgccgccgcactcggccgaggcgacctgggcgcgccacacggcgccggcgcgcgcgaccggacgcagagccggcagccgggcgtggctccgggccacgcggagaagggccccggaacggcgccggaggtgctggagggcaaggccaagggaaagaagaagaaggggcccagcaccgggaaccggcccgcagccctcgacggcgagatcagggaggcgcaggagagaccggacagcgaccagcaggaacctgtgacagaaaa

SEQ ID NO: 157728 - DNA, 2398 bp, Zea mays
  Clone ID: MRT4577_75423C.1
gggaccctcgaggccggccgggtgccgatgatgcataaaaaatgcacgtattatcggaattgttccatgacgatccacaaattgtcactaccactgaggcagaaaaaaaaaaaaaaaaaaagaaaaaaaaaaaaaaagaaaaaaaaaaaaaaaaaaagctcgctctctagtctcttttctcttctcttctctgctctcgcgttctccctcctctgttcgccgctttataccgcccgcccgcccgcccaccagaacgacatacatcctcctcccccgtcccctccaatggggaacccgccggagctgtaccacaagatcctcaacatccccaaggacacctctccgcaggaactccgcgccgcgtacaagagcctcgtcaagaaatggcaccccgacaagcacccgccgtcgtccaggccggaggccgaggcgcgcttcaaggccatcagcgaggcctacgaggcgctcctggaccagcaagagaacagggccgtgttcgggccgtgcaacggcggccgggcgggcgagaggcgccagggcggccggggcgcgcgtggagaggacgcgcagtgacggtttctgcgcgaggagcgcgcccggcaccccggccagggagttgaagaaggtgtacagcgccggcgaccccggcgggcgccgcgccttcgccgagttctccagctccatcgtgcgcaaggcgccgccgctggagcgcaagctcgagtgcaccctcgaggagctctgccgcggctgcaagaaggaggtcacgttcacccgcgacgtcgtcaccaagaacgggtatctgctcatctgcgctgttttgctctgcctaactgaacaaggttgacgcgaaaccttgctagaaatgaagaaatccggtgagctatcgcttgtcggtagattattattatttttgtttccaagacaacgaacggagcggagaattttaatcgaggaagggctttgtgtgccgacgtgggttcagattttaacagtgaatcaatcgatgcttggaaaactaaactcgaggttaggcaagaattcagaaccggctctgatggcgacagacattccactcggtgtagtggttgtggcacccccccccccccccccaattcgccgcactgttcggtagctcctgatgaacagtgcaccatcacaatcagtttctgttttttttcttcttcttttcaacaacaaggtcatggcgcgagcacttgtgttgtgtttttacagtggggggggagggggggggggggggtcgggtcactgcttttgtaccaccaccttgcatttgccagtggaatatttagctacctttgcaacgtcatagtaggccgtagacgtgaagcctttttacaccagtgggctttggtgcgagactccttttcccccccctgcaggtatctatgctattcttgcaagattatcctacctaacacaaggtcacgataacaatgtttcccaacgtggttagtatagtacagctagcttgggatcctatctccactacataatcctaacacaaggcccaagatgcttctttcgccacatatgcgttttagtacacgcgttttggatgtattcatatttgtttccttttttttacacgtgagggtgacagtgactcctgagcaagagcatccctcccttcctccttgttcctatggagggagactaatcgcaactagcctaatggctcgaagtacgtgctttttgtttgtgcaggtcaaccgtgaagaaggaggtgacacagacggtggtggtgaagccagggtggaggaaagggaagcaggtggtgctggaaggcatgggggacgagcggccggggtgcctgcccggcgacgccatcctcacggtgtccgagaagaggcacccggcgttcaagcgggtgggcgacgacctggtgctcaaggcggaggtgccgctggtgggcgcgctcaccggctggtccttctcgttccgcctcctcggcggcaggaaggtgagctgctcgttccaggacgaggtcgtccgccccggctacgagaaggtgatcgccggcgagggcatgccggtccccgggcagaagggcgcgcgcggcgacctgagggtcaagttggacgtcgtcttccccaaggagctcacccccgagcagcgcgccggcctcgccgagatcctcagagggtcctgctgatccatcggccccagttccaagcgtatcaagttttcttggccgtgtccgtgtgttaaattttaatatgtatactcatagcgcgtgtgatgagtatataagtacataaagagagaggggagggggcgtcgttgtacatacaggtcgtttatatattatatatgtaaggataaaaagaaatatgaaacgtgagccaaagccaagcctccggtatcacccattgggttg

SEQ ID NO: 157729 - DNA, 191 bp, Zea mays
  Clone ID: MRT4577_75424C.1
cattaagctgaaactgtgaaaattccctacagataaacttgggacaaacactgtacagatgatgttacaaatatctgactgctagattatgttacagcaaaagaaattgaacgctccaaaattagatcctagaaatagaacaacgccctcttcacttctgcggcttctttggtgcaactacagtcggagca

SEQ ID NO: 157730 - DNA, 378 bp, Zea mays
  Clone ID: MRT4577_75425C.1
gggtacctcgcagccggccgggacgatcttctctaccggcggtgcggccgttatctgctgctgcgaagagtacgaatggctgttactctcctccgcctgtggtacaggatttctgctggatcctcctcttctcttgcgccccccaggccggcgatgcatgctggaactattgcatggtgcagagccatctgccgaatcctgcgcctctgcggcagctgttcaggatatcgtcatcaccgtggcgaacatatatgacgccaaagcacacggtctggcgtctctgcccaatgctggcatcaaggctatggtgatgatgcccaaccagaatctggcctacgctgtcagggacccggcgtactcgccgcaaagagcgcaaga

SEQ ID NO: 157731 - DNA, 505 bp, Zea mays
  unsure (1)..(505): unsure at all n locations
  Clone ID: MRT4577_75426C.1
gaaacaggggggggcgagggcgcgcgncaaaaaaccaggcaggcgggagggcnaccaagcagaacggagacangacccgcancaaagccaacaccgancacgccagccgacccagcgcagccgccgagcccaaggacggcggccaggacgaacggcgcnccccaccgggaaagaaaggccgccaagggcgcnggaaccgacggcggnacgngcggaaaccagagngccgncaaccaaccgccgancgcgacaaagaacaccgncggcagccaaaccaacnnccaggacggcaagggcagcggcacccgcgaccaggngaagagcaccggacacgaggcgngcnccggcagcccggagacagnggnaaacaccgaccngagccccgacgccacgngccaggnggagcccggccacnnngaccggagcgggacggcgggcggngccaaggcgaagcccggacaggccgacaagcaccgaaacgccggacgacaacaagaacagaaca

SEQ ID NO: 157732 - DNA, 1032 bp, Zea mays
  Clone ID: MRT4577_75427C.1
ccggccgggatcccgacgcttcgacaccggccgggaacgactaatctccctccacccacccaaccaccaatcaataccgcaaaaatggccggcggagttaccgttcgcgatgtcgatgtaggtgctccctaaagaattacacaggaaacgaaggaatcgattattcctggacaaaaaaaaacacaccccccgatctctactcgacgacttggcaacacaatttccacgagaaccgcttgccccccgcgatggcgttggctcagcgccgaaatattacatattaatactgaaaacgctgtgtcgactgctatgagctgtagggctgggtacaaatgggattgaggagcaggcgcgagggagtcgaaagacttctgacgacggaatcatgctaatgggttttgtgactgcaggcgcagaagttcatcactgcctactctgctttcttgaagcgtcagggcaagcttcccatccctggttgggtcgacaccgtcaagactggtcctgccaaggagctccctccccaggacattgactggttctacgtccgcgctgcctccatcgcccgccacgtctacctccgcaagactgtcggtgttggccgtctccgcaaggtccacggtaccgccaagaaccgcggcagccgtccctccaagcacgtcgatgcttccggctccgtcgaccgaaaggtcatgcagtctcttgagaagatcggtgtccttgagcaggacgaggagaagggtggccgccgcatcacccaggccggtcagcgtgatttggaccgtatcgcccagaccaccgctgaggccgaggaggaggaggatgacgagtaaatttagtcctcaatcaaattaactccaaaaaaaaaaaaaagttctttacccggtcaatggtagcaatggcaatggatttgggcgttgggtcatagattttgtcatgtatgaatgagattcccctgactctgggtcattcggtttggtcaaattgcacccgtccaacttgtcgtccaaaaaaaaaaaaaaaaaacccgcggcc

SEQ ID NO: 157733 - DNA, 457 bp, Zea mays
  unsure (1)..(457): unsure at all n locations
  Clone ID: MRT4577_75428C.1
ttagctcttggtatttctgcaatgctgtacgggaccattttcccgcaagctcaaactcctatacttccttctccccttacctctcaccacttgtggtttgtntgggacccaatcttcaacctacanatccaacaaaaaaaaaaaatgcanttaccttacacccttgttctccacaataaaagncctatacagcagttacctttggtgcattattgggacaaaacaaagggnacaacaactacaacaacttgtgctagcaaaccttgctgtctactntaagnaacagcaggttataacattgaaccaactaagtagattgaactgtggttgttatttgcaacaacaacaactaccattaaagcaggtacctagtagaataccaggaacaataagttacattgaaccaactgaggaaaatagaaatatactggttaatgacaggaggaacaactactac

SEQ ID NO: 157734 - DNA, 787 bp, Zea mays
  Clone ID: MRT4577_75429C.1
atcgagcttcctcgtcgagatgggcaccgtcagcaaccgcggctcgcccgcggcggccggcggcggccgggacaggaacaggaacaggaacagccgcacctactcgctcggctctgccttcgactaccggatcgacgaggaggtggaagccgtggtgtcccgcgtcgcgcgcatcgccgccgcgagagaatccagcgccgtcaaggaggagaagccgtcagccgagcagggatcggcgccagcgccagcgccagcgccgtcgccttcttcgcaaccgccgcctcccggcgagacggtggccgaggcggcgggctcctcgcgcgggtggctgcgggagtacgtggaccggctggcgtcctcggcctacacgctctcggagcggtggagctcgcgctggagccaggggcagagccagcagcaacggcaggaagagccgtggctgtgggacgcggaggccgcggagatgtcggcggcgccggggtccgacgacgacgaggaggagacggcgttcatggcgatgtaccgctggatcgccggggtctaaacgtagtagagtaaggttacagcttacagggggcttctgtgtcaaaagtttctggttcaggagttgagttgaggtgatccacatgttttggaaccttgtgttgattgtgacgactgtgatgcatggcatgggaggcgtaagcagcagcagtcacacagttcatggatacatcctcggagttcgcattttggaacacgaggagataagaagccaacaaagacggatacgagaatgcgattgcag

SEQ ID NO: 157735 - DNA, 236 bp, Zea mays
  Clone ID: MRT4577_7542C.1
atgtacgcggagtggatgccccgacaggcacggcctgaccaagtagaagggtcctcttccggagaattcggcttctatccgatggggctcccgaccgtaacggagaagttcaatcggttctaggactcacatgtgtaccaatggaagagggacatatttgctttcccgggatacctagtggctgaagctatgcgactgcggagatgggtgcatgcggaacatcacccccccctccc

SEQ ID NO: 157736 - DNA, 742 bp, Zea mays
  unsure (1)..(742): unsure at all n locations
  Clone ID: MRT4577_75430C.1
aattcggcacgaggcactactacgccagccacttctgccttccctcccccaccaccacaagaaccgcttcaccattgccgcgtccagctgagcctcctcttagccgcgtccagccaggagaaggcgggcgcgcacacctgctgcttggtgaccacgttcgatggagctgcacaagtactggggcgtggggggccggcggtgcggcagctgcgagggggccccggcggcggtgcactgccgcacgtgcgttggtggatccttcctctgcacgacgtgcgacgcccggcccgcgcacgcgcgcctgggccacgagcgcgtgtggatgtgcgaggtctgcgagctttgagctcgacttcacaaggcccaagcctcaggcctacatgccatacaccgggactccccagagccacagcgtgccatccgcggacgtggaggtggtgccggagcggggagacttggctgcggtgaggccggtgccgctgatgggggagagcagggaggcgcgcctgatgcggtaccgtgagaaaaggaagaacaggcgcttcgagaagaccatccggtacgcgtcccggaaggcctacgccgagacgcggccgcgaatcaagggccggtttgccaagcgtgctgaccacgacggngacgccgacgccgacgacgctgaggccgaggccgaggccgncgtgccgatgtcatatgtgctcgacttcggctacggcgtcgtaccgagcttttgatgtgcccg

SEQ ID NO: 157737 - DNA, 226 bp, Zea mays
  Clone ID: MRT4577_75431C.1
gataactacgcatacatgaaaaggaaggatcttgatttatagaagcacaaggtaccaattgtagaggatgtaacactgtgacatgctctagaattcttacaatacgcatatgatatgaagaccagactgacttatgtgatgagaagttatgcataaacaaataaagctcttcaaagcttgaaagactaggaaggactaaaagacattaatgatgttctcccattct

SEQ ID NO: 157738 - DNA, 524 bp, Zea mays
  Clone ID: MRT4577_75432C.1
tcccggggtggagctgcacaagtactggggcgtggggggccggcggtgcggcagctgcgagggggccccggcggcggtgcactgccgcacgtgcgttggtggatccttcctctgcacgacgtgcgacgcccggcccgcgcacgcgcgcctgggccacgagcgcgtgtggatgtgcgaggtctgcgagctggcccccgccgccgtcacgtgcaaggccgacgccgccgtggtgccagaggccttcggcggcagcggcagcggcggcgggagctttgagctcgacttcacaaggcccaagcctcaggcctacatgccatacaccgggactccccagagccacagcgtgccatccgcggacgtggaggtggtgccggagcggggagacttggctgcggtgaggccggtgccgctgatgggggagagcagggaggcgcgcctgatgcggtaccgtgagaaaaggaagaacaggcgcttcgagaagaccatccggtacgcgtcccggaaggcctacgccgagacccggc

SEQ ID NO: 157739 - DNA, 716 bp, Zea mays
  Clone ID: MRT4577_75433C.1
cctcgaggccggccggggctgccttcctacactactacgccactctgccttccctcccccaccaccacaagaaccgcttcaccattgccgcgccgcgtccagctgagcctcctcttagccgcgtccagccaggagaaggcgggcgcgcacacctgctgcttggtgaccacgttcgatggagctgcacaagtactggggcgtggggggccggcggtgcggcagctgcgagggggccccggcggcggtgcactgccgcacgtgcgttggtggatcgttcctctgcacgacgtgcgacgcccgccccgcgcacgcgcgcctgggccacgagcgcgtgtggatgtgcgaggtctgcgagctggcccccgccgccgtcacgtgcaaggccgacgccgccgtgctctgcgccgcttgcgactccgacatccacgacgccaacccgctggcccggcgccacgcgcgggtccccgtcgcccccatcggctccgaggccgccgccgcggccgtggaggccatgctgttcggaggttggcgtggtgccagaggccttcggcggcagcggcagcggcggcgggagctttgagctcgacttcacaaggcccaagcctcaggcctacatgccatacaccgggactccccagagccacagcgtgccatccgcggacgtggaggtggtgccggagcggggagacttggctgcggtgaggccggtgccgctg

SEQ ID NO: 157740 - DNA, 1633 bp, Zea mays
  Clone ID: MRT4577_75434C.1
cattgggtacctcgaagtcggcaggggcgctgcctccctccactactacgccagccactctgccttccctcccccaccaccacaagaaccgcttcaccattgccgcgtccagctgagcctcctcttagccgcgtccagccaggagaaggcgggcgcgcacacctgctgcttggtgaccacgttcgatggagctgcacaagtactggggcgtggggggccggcggtgcggcagctgcgagggggccccggcggcggtgcactgccgcacgtgcgttggtggatccttcctctgcacgacgtgcgacgcccggcccgcgcacgcgcgcctgggccacgagcgcgtgtggatgtgcgaggtctgcgagctggcccccgccgccgtcacgtgcaaggccgacgccgccgtgctctgcgccgcctgcgactccgacatccacgacgccaacccgctggcccggcgccacgcgcgggtccccgtcgcccccatcggctccgaggccgccgccgcggccgtggaggccatgctgttcgggaccggcgaggcggccgcttccgaggccgacgagcagcacgcggcggccgagcacgcgcacgcgcacgcgcacgcgctgaacctcaacgtggaggccaaggacatgaagctggactacctcttctctgaactggatccctacctcagcgtcgagatcccgcgcttccagcacgctgacagcgtcgtccccaacggcgccggcgctgccgtcgagctggacttcacgtgcggcatcggcgttaagcactcctcctacagctcctacacggccacctccctcgctcatagcggctcctcgtcggaggttggcgtggtgccagaggccttcggcggcagcggcagcggcggcgggagctttgagctcgacttcacaaggcccaagcctcaggcctacatgccatacaccgggactccccagagccacagcgtgccatccgcggacgtggaggtggtgccggagcggggagacttggctgcggtgaggccggtgccgctgatgggggagagcagggaggcgcgcctgatgcggtaccgtgagaaaaggaagaacaggcgcttcgagaagaccatccggtacgcgtcccggaaggcctacgccgagacgcggccgcgaatcaagggccggtttgccaagcgtgctgaccacgacggggacgccgacgccgacgacgctgaggccgaggccgaggccgccgtgccgatgtcatatgtgctcgacttcggctacggcgtcgtaccgagcttttgatgtgcccgggcccaacacgcgcgcacatggccggccgcgcgcttgaaccggcatggcacgccgctgcgcgcgcgccttgtacttgtatcgatcgatgtatagggaggagtagtaatcccatgtactctctttttgagcaagctcttgcgtaaactagtgatgtataatttgtactactagtaagaaactgcagtagccgctgctaatggatcaccaatctataccgcgcaaaaaaagtcttaatagggccattccgagtgcacgcgtggggggcccggttctcaaaaatacacatcagtttttttaaaaaaatttaaaatcgtgtatctgaagttatatgcagaaaaaaaaaa

SEQ ID NO: 157741 - DNA, 330 bp, Zea mays
  Clone ID: MRT4577_75435C.1
cccacgcgtccgtccacgcgtccgttttttgggtgatgagatgctaattgatgcctctgcggatggtttggatgtgcccgtgtaggtatcttgcgtgactcgtatgcacaagcttcggccacccgtggaaagcagaagacttggaggaagaagcgaaagtaatgatctttctcttccctatgtttttgtcatttggattcatttagctttgctcttgttctgtagtttatggtgcttctcgattagatcaccggtcctacgattgttaacttttcatgccgactcattgtggatcttgcagtggttcctacggtattaatttgtctgagt

SEQ ID NO: 157742 - DNA, 336 bp, Zea mays
  Clone ID: MRT4577_75436C.1
atggtactgacggaagctatctctgaattcttcccaggtgatggtgttggggttggcatgggtggcgaggcatctgaggatgaggtggtggttgctgctgctactgctaccgaatggcggctagagtttgaccgatggcttgaactacctgagtctgcattaggaacatctgctcgatggtcatcgggggcggttgtggaagttgctattgctggggtgcctcatcctgctgagctggccgctcctgctgagcacgccttcctcctctgcgcctgttttctgacatctgcagaatgcaatcacacatcagaactgatcttgcaacttgcagcataa

SEQ ID NO: 157743 - DNA, 538 bp, Zea mays
  Clone ID: MRT4577_75437C.1
gcacacatctcatcgctgcctgctcgtctgcttgcgctagtggcgcaggactagtaagtggtaggttacgtttgcgggtctgcgtgtgtgtcgagagcgcgaaatgaggttacaaatagtagcataaacgattacatttgtagttaatgcatcttctacacataataaactgcatgctacggtgtcagaaagttatatgagtgactgttattcgtgttcctcaagtcagatatcaagatatttttggaggtctacaaacaaacactaaaggccttctgtttatgataaaggattatatgggtaggtcttgatgatagatatatatcagcacgatacctgcaagtagcattatttgggcacggataaggcgggcactgtaactcaactactactgcctgtgctttatatatgacgtgttttaattcaaaaatgaactagacgacatatatttagaaaactaagttagtattacacatatattgtgtacgtcatacgttagactataagcattgtacacgaattcttttatacgctagta

SEQ ID NO: 157744 - DNA, 149 bp, Zea mays
  Clone ID: MRT4577_75438C.1
agcttcttgtgcaatctccatacaaccaaattaccaaaagtcatgattttttttttcaaaaaaattagagatgtacttcattatttattctaccaacatatcaagtattcaagttttaagttatgattcatcctactttaagagataca

SEQ ID NO: 157745 - DNA, 321 bp, Zea mays
  Clone ID: MRT4577_75439C.1
tttacggacgagactttatggctgatccactgccataactcaatcggctaaggaggtcgtcactcacttgcaagccggtgtatgaagcacactgccgcgctggcgctagggttacgcggcggacaaagcccgcattggacgcaagcttgtggaactcttcccaattagtgtggggaatggggagccttatggggccggcgtagccacaagcagtcaaggacccttctgtcgttgcctgaggaccggtgcggctgctcgacgtaaattccaagagaagaagttacaaggagccattgtgcgcatgaaaacgaagagtccctt

SEQ ID NO: 157746 - DNA, 337 bp, Zea mays
  Clone ID: MRT4577_7543C.1
ttttctttttggggggaaaaaaaacccttaatgtccacacattgcccatgggaatgaaaattttcaaagccccacaggtttttttttttcctttcattttgcaatcctacaaaagcacattaaattttgcctgtccttttccttgggcgacgaacaacgccggagaaaaggacggcaaacacaatcgcaggggggaaacttaatttttaacgacccggcatatcaatagcattagcagtccctaaaagtttttttctccaggaacctaggggctccattgaaaaaaagctttgcacatcgtaagcaatgcaaagtaatggatggttcccaacgtttc

SEQ ID NO: 157747 - DNA, 541 bp, Zea mays
  Clone ID: MRT4577_75440C.1
aattccgcaaaggaaaagaaatcccgtattaatcaatttacaggtcggtttctatctgctcccatctcttcctcctcctccgcttacgatcgccgcgcacaattccttccgaacctatttgattactttgatttttctctatggaattctgacaccgtaggcgagtttgtgttagagcttgcctggattgtttcgagatggcggcgtgccggggattcttcgagtgcctgctcaggctgctcaactttttcctcaccgtcgccggccttgccgtggtcggctacgggatctacctgctcgtggagtggatgaggatctccggcggtggcggaggggcaccgccgtctccggccccgccggctgagttgcttacgttcggccgcccgatgctcacggtcgtggcccttggggaaggaggcagtttcttcgacaagctacccaaagcatggttcatctatttgttcattggtgttggtgctgttatcttcatcgtatctctatatggctgcattggagcagggacaaagaatacgagctgcat

SEQ ID NO: 157748 - DNA, 254 bp, Zea mays
  Clone ID: MRT4577_75441C.1
aaagggagcatgactgggggcccaattataaaaaaggggggggaccctttacagcccttattaaaaatttaattttttccccaagaattgacccccaggggccccgttgcaaccaaacatgcggggccaaatcaggtaaaaagacccaaacattgcctttaggggggataaacaaggccccccttaatgggggggggccggatcttgggggggcttttatttaaacaaaaaaaaaaccccgttgggggaccccg

SEQ ID NO: 157749 - DNA, 951 bp, Zea mays
  Clone ID: MRT4577_75442C.1
ggagttgtatctgcgtacgtaattgcatggcagaagttttcaggcgtttccattgtatctccgacatctttaagcaaaagctctaccgacactgaagtccaaacacctaataacgaaactagattgcataaaggacagcaaaaaaaaactgcatcaagaaaaaactaatatatctcctaagctgaactgaagattagaatttttatatcggcaacgttcgttcctttcatattccatcctcccttgaaacgatttcacagcggcaaatgcttcccgggagcaatgccatattgatatgccatgctgccgcgtcaaaaatatgcagcaggaattccagccgccagcccaagcaagaagaaagagaggcctacatgcccttaacgccacggtcttacggccaccagctcagtccagcgcctacggcttctgcggcgcctgcttgaacgcaacggtgggtgcgatccgggaggctctgctgcggtgctcggcgacgagctctgccgcgaaccagtccagcttctccgcgttcgtctgctccccgactcgcctcccctcgaacagcaccgactccacgttccgctgcttgagcatctcgtccgccgccgcgagcagcgcgcgcacgttgcctggggtcgggtcgtactccccgtccggaccgcacggcggcatgctctcccgcttcgcctggatgcgcaggtagttggatgcgcggcattggccgaaggcgcgcgccacggcgtggtcgacaaggtcggcggcgccgtcggccgcaatacgggcgatggggcgtgcccactccttgggaccccaccgacgcatgcgccggagttccgcctcgccagcggcgccagagcctccgccagagcagccgccgatggagagcacgaggaggtcctcgaccccgcgcacgaacgggaactcgtgcttgttgtggagcacgtgcgtgatgac

SEQ ID NO: 157750 - DNA, 391 bp, Zea mays
  Clone ID: MRT4577_75443C.1
gttgtggagtaatgtccacaattacatctgcatatacatatagaaaaaaaaaacacctataaaaaaaataactagataaactagaggatctagccaaacaatatccatctcatcttaaaagatattcatcttatcttgaaaagattttatccttatcctaatagatctaactggcctcaaaagattctatctttatggatccatcttgtcctaataagcatacttatccaccctagtttaacaatcatgatctaacctagatctgatccaatctaaagtgatttatcaaacatgttagataatactgatgaaatagtttagactctacccctataaaacaggtcttaacttagttcaccctgcacttaattaagaatgacagatcgacttg

SEQ ID NO: 157751 - DNA, 743 bp, Zea mays
  Clone ID: MRT4577_75444C.1
gcggccgggcgaccctagcatcagctcctagagcgataaagccccagcagtaaactgctctcaagcacagcagcctgcagaatagctccaatacatggtctttctctatcaataattcaatattctagagtgataactatgttttctggtcgacctaggggtccgaccaggtgactaatctcgattaattgacgactaggtcgactaatcgacctcgtgtactagtcgtcttgttcatccaggatatatgtgtagagtatatatggtatataagaccatacagtggcggacttaccgcccaggcaccacaggcggtggcctggtctgcctcggctgcgacaatggacagaagcaagcaaacatcatacccacaagcaagcaagcagagcagcaaagggtctaggcacaggcgtagagtatagcagtgtaatttcgcctaggctgtcttcaaatcctgggtccgccactgagaccatatatgtatagagtatataacaatagtatatagtatataacatattatatgcgaaagggcctctagcgtaatggttaaggctttcgagtaccaggaggtcacgggttcgatccctctcgggggcgaatttcggccttggttaaaagaatcccctcgttgtgccccgcccgctctcgggttacatcctgtgcgccaccctccggttgggtcgttgcagagtggacggtgacggcccgctagtgatgggggaccaggggttgtttcgggt

SEQ ID NO: 157752 - DNA, 636 bp, Zea mays
  Clone ID: MRT4577_75445C.1
acgactcgtgagaagactgagcatactgaagaggagagtgaccatgagcgtgacgtttacaataatgtatacgagaatgtgatgtgctgcttggcgcactgtatgttgcattgaatattacgttgaacacagggagaactaccagcataacaaacataatgtgaactttatcaaggaatatggtgctaagatgaacgctaaactgaacaatatctgggatcgtatcgacaaccagctagagtcccatctaacggcttcttatactgatgctgaatcacaggtcatgaacgtcaacattaacggtgattatgacaaatataatactgaatctaagactgatgcttataggaagaacactgttgagagctcaatggcggcctataacgttgctcaggatattgttgtgcctaaccatgcaactacgcatgcaataaggctgaaacttgctctgaattattaagagatttataatgagacagacaactccccacacaaggctaaccacctgtcaaatgaagctatctatgaatctaactgtcatttagacagcctatgcgaggatgtctatatggatatgcctctgctgatgcatctcctgacggataactacaacccttctgacatacgatctcactg

SEQ ID NO: 157753 - DNA, 445 bp, Zea mays
  Clone ID: MRT4577_75446C.1
tggacctttggtctgatttatgtgcttgtaaaactcggacgtccacgtgaagtctccttaagtatttccgctctgcgtttaggcggaggtctctgtcgtctctcccggtcgggcgacgctcgacgacgaaggcgaggccgcctttttcgggatagttatctcggctcgtcgaccatagtttatggctgttcaacaccttaatcgccgcttcacggacttcctttcaacttcacctcggaacgcttgtggctctaatctcgttgtcagataggacgccgtcaggagcccggccgacctgtcaagagcagacgccgctcgcccgtaagaaataaagccggctaaccgtgactgttgtatagccccgctaacgccaggtgtcgacctcgataacaatcctacccgctcgtttctggccggggtaagcggcggggcgtcgaccctccgg

SEQ ID NO: 157754 - DNA, 490 bp, Zea mays
  Clone ID: MRT4577_75447C.1
gtactacgctggtagtcacgggatggacatagtgacatctgcagcagcacatgctactgaaaaggtttccaagtgcctcatggaggtcacgagttcaattgaaggtgcaagggtggagaacaacaagttctgtgtatctgtacattaccgcaacgtagcagagaaggactggaaagtagtcgcaggactcgtgaaacaagtcttggaggccttccctcgtctcaaagtaaccaacgggcgaatggttttagaggttcgcccggtgatcgactgggacaagggaaaggctgtcgagttcctgcttcggtcgctcggcctaagcgactccgaagatgtggttcctatctacatcggagacgatcgaacagacgaagacgccttcaaggtactgcgagagcgaagctgtggatacggaatcctagtctcgcaggtgcccaaggacactgaagccttctactcgctgagagacccgtctgaagtgatggggttc

SEQ ID NO: 157755 - DNA, 421 bp, Zea mays
  unsure (1)..(421): unsure at all n locations
  Clone ID: MRT4577_75448C.1
ggcccgacccacgcgtctcgtaacattgcaacattanaaagtgggaattttagttttctcacaatcgagcaacacatggcgacggcgagaggtgtttccctcccttatgcgtccttgcgtctttctgcactgtgttgcgtaacagccacacattttctccttaatgcgtcacaagactcctatacgcttcccttcttcccccataccttccatcaatgatagcttcagtatgtgaaaacccagctcttcaaccctataggctacaacaaggcaatcgcagaaggcaccatacctttatcacccttgtttaaacatcgccagccctatctttggtgcacacattggtacaaaccatcagggcacagaagctgtagcaacttcgtgctacctgtgatcaaccaagaagctcttggaaaacctt

SEQ ID NO: 157756 - DNA, 1882 bp, Zea mays
  unsure (1)..(1882): unsure at all n locations
  Clone ID: MRT4577_75449C.1
ccggcgccgcctgtctctctctctcgacggcttgtcccaggttctccgctagcgctctctctcttctctctctctctctacggattgcctcacgggcatctcgcgtgcaattcaagcgaaactttctgaatatcaaagtggcatagagctccacttttatggccatccctatgaaggcctctccgggttcctgatatagatgtttccttgttctgaacatgaaaagttctcaggtactccgccgttgatgaactgcctccacacctgcagcgacaagaagacgctgaagaagtggtttttcatcgacaagacagtaggctaaatccagtcccagagaacaaattgaagcaccactccccaccgcacagcagcacagctcttctcttcaccgatcccgatggatatgggcagcggctcgtcacctgtcatcaccgatccgatatcgataagcccaccgctgctgggaggcttgacgtcgaacctgatgccgttctcggtcatgtccggaggctgctcctccagtcctagcatgagcgccagcagcaggcgtaaaatcgaggaggtccttgtcaatggcctgctagacgcgatgaaatcgtcgtcgcctcgcaagaagcacaacctcgccttcggacaggataattcgcccgacgaagatcctgcttacactgcatggctgtcaaaatgcccttctgcgctggcctccttcaagcagatagtagccaacgcacagggcaggaggatcgctgtgttcttggattacgacggcaccctgtcgccgatcgtcgacgatcccgacaaagcgttcatgtcccctgtgatgagagctgctgttagaaatgtcgcgaagtacttccctaccgcgattgtcagcggaaggtcccgtaagaaggtgtttgaatttgtaaaactgacggaactgtactacgctggtagtcacgggatggacatagtgacatctgcagcagcacatgctactgaaaagtgcaaagaagccaatctcttccaacctgcttgcgagtttctccctatgattaatgaggtttccaagtgcctcgtggaggtcacgagttcaattgaaggtgcaagggttgagaacaacaagttctgtgtatctgtacattaccgcaacgtagcagagaaggactggaaagtggtcgcagggctcgtgaaacaagtcttggaggccttccctcgtctcaaagtaaccaacgggcgaatggttttagaggttcgcccggtgatcgactgggacaagggaaaggctgtcgagttcctgcttcggtcgctcggcctaagcgactccgaagatgtggttcctatctacatcggagacgatcgaacagacgaagacgccttcaaggtactgcgagagcgaagctgtggatacggaatcctagtctcgcaggtgcccaaggacactgaagccttctactcgctgagagacccgtctgaagtgatggggttcctcaattccttggtgagatggaagaagcacccgctgtgacggaactgaaaacacgacgactgattcagaagccgtaaagcgactgtacttcgtgcggcggcaattttgtagagtttttggctcaccgggtggctcattctttcatgcgtttttattttttatttttttaactgtcccagtccttcgtcactgagaaataacaagtggttgtcccacaccctcttgcaactgtaatctgtaagcaagaggccctccctgttaggtctatatatattgaataaaaccgggacgcttttgccttgccctgnaaaaaaaaaaaaaaaaaaaaaaaaaaaaaaaaaaaaaaaaaaaaaaaaaaaaaaaaaaaaaaaaataaaaaaaaattatgggaaaaaattctatagcaaaaagggt

SEQ ID NO: 157757 - DNA, 435 bp, Zea mays
  Clone ID: MRT4577_7544C.1
cggctccgccgccctacgccaggtgctgaatggctacaacgttcttttcaccgaagactgagacccaccagaaaagactctctggggatatctttgatcccataaataatagtgactactacctctgacggctttcacatcgattacgtgcagagcatgtcccttaagtgctactcctactatatcgcctacatactctgctccctctgcctcttctgcgtacatctgatctgctcctgtgtggaccatggtcttcgagaaaaacagactcatctgaactgaaccctaaatcgttggcgactccgcccccctcagttattaatgcgacaccgttcgagacgactttcctttccagcttgatagaaatgaaattcctgattacgacatcaattcaggaatgtgacatcgagagtgccctgaggggcccccagctcc

SEQ ID NO: 157758 - DNA, 372 bp, Zea mays
  Clone ID: MRT4577_75450C.1
gggggggaacattgatcccgttttggctgattaatagcgggtcccccttcttaatttgctttgcggggaaaccttaaaatttaaaagtccccttttaaataccccaactttttccccacaaagccaaaaaatttttttcatgggttttttataaaaataaaagtcccggcttttttttagggccccaaccatgcttccatttttgcccttctttggggccccccaaattttaagggttctttttaaaaccaatttcctttgggttttttgggaagccctttttttaaaaaaagaacccctatttttttattaaacccggggggttttcccccaccccggaaacccttatttcagggcgcgtttttttggggg

SEQ ID NO: 157759 - DNA, 314 bp, Zea mays
  unsure (1)..(314): unsure at all n locations
  Clone ID: MRT4577_75451C.1
agaaaaaaaaaaaagggccccaaccaggggaaaaaaagggggcccccttgtttaaaaaaaaaattttttttggggggggggaggggggttnaagttaaaaaaaggcctcaaaaaattttttggcccatgtccggggctcaaaaacatttggggggtttgggaccccccaaattcgaattggttgggggtttccatttagcttttggaaacgggttttcctttggggggggggtgcnaaagggcagggtgggtgggtaaaccctctccccgggaaggcctgggggacctttttaagactttaggggggggggccc

SEQ ID NO: 157760 - DNA, 491 bp, Zea mays
  Clone ID: MRT4577_75452C.1
gcatgccttcccgacacaaaagccctaaacaagcaagccaaggacaaagggtggtacaggggcaaactttctcaaaccccgacatttgaaatggcagggggccccaagcaaacatgggcacaaaccaccaacaaacgggacggcaaacccccgggcaaaagggggcctggaccacgggcttaaaaaacggccccggccaaatttgatgccaaagccaaactcacaaagcccaacccatggcttgggaggggaaaaccggaaaaaaaaggcccaacttggccattgacaacttttgcagcttggtgaacaaaaaaggcgtctcaacaacaaccaaaaaaaggctgagtttgctattaaaaagccccacccaaacatgtaaaagggggagccaaaaaccttgagggggggagggggttttcaaaaaccggattaaaaaaacccaatttgggaagcagcccaaccacaccttttgtctaaaacttgttgcaaaa

SEQ ID NO: 157761 - DNA, 426 bp, Zea mays
  Clone ID: MRT4577_75453C.1
gaaaaaccgggcccagatttaaaaaacgggtttaacccaaaccaaccactaacgccaataaaaactggcaagggccaaccggggaaccccgaagggggggcaaaaaaaagggaggggggggcaaaaatacccccgcgggtttcttttttggctaacggaaaaggggggcccaagagctccaaattggtcccgaataaggaaagtttaatcgaaaccaaaattattcctggggggaaccggaaaatgattttaaaggcggaagggggcaatccgggcgttgtcgggaaaaaactgggcccgggttttttcccttaaaaaagtgcaacccttgagcgccatggggagctccaacttgtccctaaaaatttggagaaactttcgaaagccgggcttggcgttcaccggcagggaaaacaaaacgggccg

SEQ ID NO: 157762 - DNA, 261 bp, Zea mays
  Clone ID: MRT4577_75454C.1
ctcaggccaactctttagcgaatttccgatctgctatccacacccagattcataagcatcgtggtgatcaaggatctcgtgaacgtggacgatgaaaccctagagatcaccatggagatcaggactgtatacagtactgtctgtcctgtggccatctctgagaatgtctagggcccagtgtaccacccaattgtccacatactacttgaatatcgcatcactcatcgcactcatgtccttgaacatgatctagaaaaagct

SEQ ID NO: 157763 - DNA, 799 bp, Zea mays
  Clone ID: MRT4577_75456C.1
gaccacagcacagtgtacttctctatttcatcccaaatacgcacagcgcgatctcccgtccggcgcgcacacacgtacatacacccacagagagaagaaaaagaagaagaagaacatcttattagcatctatccgtcgcgtcgctgcaagcagctagctagcggattgcatcgtcatgggttcttgggtgcgcaccatcacgtcgcccttcaggaagatgctcaacccacagcgcgacggcaagacgaagacgccgcgccaccaccaccaccaccaatctccttctccttcttcgtcagccatggagcagagcggcgagatggacaggtcgcagctctacggcgaggtgatggcgtgcacgtacgaggacgtgcaggtcatgtggaccatgctcgacaaggccaggacctgcgccgccgccgccgcctcgtgaccgcgcgccatagatgaccttcacatgaaacctttatttttttttacagtagttggttttgtatagcatgtttccagccgtctgatgaatccccgctgctgccacagacgcgcgcgcgacacacggagtgcgtgtgtgagctatcttggagagatttagtgactgtgccaacattaatttagcatgtatttacttaatcttgaggccatcatcttctgtttcctctttggtgtcagagatgcatgcatgtgtactcatcatccgatacatgccagggtttatatatgttattctgggagatctgaactgcctctgcatatatatatagttctgcactagcttttatggttaaaaaaaaaaaaaaaa

SEQ ID NO: 157764 - DNA, 606 bp, Zea mays
  Clone ID: MRT4577_75457C.1
gatgaagaacatcttattagcatctatccgtcgcgtcgctgcaagcagctagctagcggattgcatcgtcatgggttcttcgggtgcgcaccatcacgtcgcccttcaggaagatgctcaacccacagcgcgacggcaagacgaagacgccgcgccaccaccaccaccaccaatctccttctccttcttcgtcaggtaacaactagctagctacttaaatatatggtcgttgctgttgggtttcatatatggcagtgcacctccgtcgacaataatcagtaatctcctccccttacgatcgatgaactttgctgctactacagccatggagcagagcggcgagatggacaggtcgcagctctacggcgaggtgatggcgtgcacgtacgaggacgtgcaggtcatgtggaccatgctcgacaaggccaggacctgcgccgccgccgccgcctcgtgaccgcgcgccatagatgaccttcacatgaaacctttatttttttttacagtagttggttttgtatagcatgtttccagccgtctgatgaatccccgctgctgccacagacgcgcgcgcgacacacggagtgcgtgtgtgagctatcttgg

SEQ ID NO: 157765 - DNA, 175 bp, Zea mays
  Clone ID: MRT4577_75458C.1
atgaaaagggcatcttgtagagactttttttactatgatagagaaaagattggcccttccccggtataaaatattataatgacacctcttttcttgtccaagaacatcgtcgccttaataaataaattagaaacttcaacttccaactacgggaactttttcaaggggagaaaaa

SEQ ID NO: 157766 - DNA, 223 bp, Zea mays
  Clone ID: MRT4577_75459C.1
acacccttccgcctgggtctgggggggacctatccatccaatttggggggggggggtggcattttagtggggctttgttcgggggaggctctctttcaaccacatgaaacctggggccttttgccattgatggaaagggtttaaggccctcttcaaatgcttatgttggccagtcctgaccgcgttcctgaaatgaccttaaggcccggattagggttgacct

SEQ ID NO: 157767 - DNA, 434 bp, Zea mays
  Clone ID: MRT4577_7545C.1
gcgcaagaatcgcaaaccagatccctcctatccgagctggataaacgtctccaggcgatcgattccaaatgggaatcccgtgttggcttgctggaacagcgcgccgccgagtcggccagatccatgtccgatttctccaccgcgctgcgcgccgatgtggaggctcacctgacggctgccgacagcgagaccgactcgaagttgctccagatcgacgcagctgccaactctcggatggcggcgctggagtcatccatgcgctccgtcgagacttggcgcccgcgcgtggactcgacgctcgacgccttacgctcgtctctggactccgtcgctaccgaggtgtcgaaaatggagattcagtggtccccgggacggacgcgccgatggcttacacaagccggggcgtgctcggggcacctggatcggtgccggga

SEQ ID NO: 157768 - DNA, 277 bp, Zea mays
  unsure (1)..(277): unsure at all n locations
  Clone ID: MRT4577_75460C.1
ccttgtccttcctgttcctcttcagagctcccttaccggccacgtgccttcattaagaggaaggaaacaancctacgggtattctgccggcgaccaacccatgggtccttgtaggtatgcgtgtggtgtcttgcataccagtgcacgnctgcttgnacaagtcggatatgccgtgtctggtgtcagcggagcataacacactatacttgctagcggcatctggtcccttgtgtcgcagttcttggtaatcatctcctccacctggggggtagctgtc

SEQ ID NO: 157769 - DNA, 286 bp, Zea mays
  Clone ID: MRT4577_75461C.1
agaaaaatgaattccagcattgctcagtcatctattccatatttatttgtaaaacttaacagctatgcaatgcaaagattattttttgtgtcttgctataggacacttgttccagaccatttagagaacttcaaattttctacacaggaaagttccgattgtctaattggctactattaaatcctaccatctcaaaaggatataacagacaacaggtaatttttaacaccatattgtaatctttgagacaatctaaccgattagatcaagtgtgttagaaaagata

SEQ ID NO: 157770 - DNA, 356 bp, Zea mays
  Clone ID: MRT4577_75462C.1
gggcactttcaaagagctccacaactggactgtgataggcggtggtggtcatttccttcggctttcttctagactgatgctaggctaggtcaaagtcgaataccctcgcactcacattgatggcgattacctcaccactatcgacacaggccaattgggccaccttcctgtgctctaaggcgtatggggcccgaaacaaatccatgtgagcgcttccgaaaatctatcatctggcaccaaggcgcactcctttccgagaccaacgctcccttaatgcacttggaggagtctactatttaaggctgcctgggcctgctttcgagacatctcctgggaatactactacctttgccttg

SEQ ID NO: 157771 - DNA, 2802 bp, Zea mays
  Clone ID: MRT4577_75463C.1
ccggccggatcgtattcgtacgagatcggcctcctagggcaaaaaaaacgccaccgctccagtcatatccccgccgcccgcgccgccgaaggccgaaccctcgtcgcctcccctgcccacgcccgccgcctccagcaggaccacaccgccggattcgacttttttgtcctcgccctctccccctcctctcgtctcctttgatggcgtcgaggggaggctcctccggctttatcgagtattttcataacagcacaaagcgtcatggcagcaatagagagaacacaagtcagcaaggcatgaatgctatcagggtgcaaaaagaaatgaaaaaagaatgggcaagacctggaagagttttcaatagaaatattactagaggaggctactctcgaagttcattgcctggagtcacacaggaatttcgtgttgtcaaagataacagaattaaactgaaagaagttagtgagactttgccagaagcatctcagaacggcgattctagcaatgaatgtgctttttcaaatgttagagataaatgctcaaccaaaaagcttgctgcccaacaccacttggttacttgcaatgttaatgggcatggagcggcccatgctgacaatggtatcaaaattgcggctcaagcccatgacaaggaagtcaagccttctattgtccgaaaaatggaacaatatgaagggacacaagcatcattggttggatctcatgcagttcttggaaaggcaaccagaacacggtggacactgcagcatcagggaaaaataattttggtggcgaactttgctgttcttcatcagatccaatccatgtgccctctcctggttctaaatcagctggaacttttggagccataaagcgtgaagttggagtagttggtgctaggcaaaggccagctgatagtgcagcaatatacacatctacttctaatggcttagtcaaagtggtatcagcaccaaaggttagcccacatttggaatggaagcccaaatcagtaagccccagcactgctgcacctcctggtgctccatcacctgttgatgatggaagtaaaacagaagtgtctgctttgtctaagaagctttcacatgctaatgtatcacatgaacatgtcattataccggagcacatcaggataccagattctgaaagaactcatttcatcttcggttcttttgaatctgaaatttatccaaaggcttctttagcagcctattatgatgctgtggctaaagaagacttgaatgatcactctccatcaaggatggataatgttggttcctgcagtccacttccacagtcagagcctgctgtttcagtttctgaacatgagcagtcattgacggagtgtgtggatgttcggagccctggtgttgtcggtggaacaaatgagacgatttcaagcaaggtaacacattctcaacctcgactccagcatcaggaagctgcacagaattttaaggcatatgagccagattctggttatgggatgtcatttattactaaagttgatggtgaagcagcccaaggtatagcttattcatctgaggctatggttttacattctgtaaatggctatcagttacctgcatctacagcaactcaacaaccagtgccccagatgttttctcaacaattccaagcacctcagtatccaaactttttgccatatcggcatgttttctcaccacagtttgggtctctaatggttgttccaaactattcaagcaaccatgcatttcctcaagttgccacatgccagcagctatctggtaatgccaaatggagcctcacaactagctgccaatggcatgaaatatggatcaaaccatcagtataagcaagtatttcaaggagcccctgctggatatggctacggaaatcataatggttaccctaacggtgttattggcggcacaggtgctattgaggatatgaatatgagtaaatataaggacaactgcctctatgcacccaatccacaggtggaaacagcagatgtatggattcaaagtcagaaagagagtcccaatatgccatctgcaccgttctacaatatggtgggacaaccagtgtctccacatgcagcatacttaccaccacaaagtggccacactgccttcagtcccgccccttcccatcctggtcacttgcagtacccgggctttgtgcatgcactgcagccaacatccatgaccatggtgcagaacccgcagaccatgatacatcagccggctgcaccgccattggcaggaaatctaggcctggacatgtcggccatggttcctggaaatcaagtaggagcgtttcaacataaccagcttgcccatcttggctggaccacacaatccttttgagattttggtgtgcttctatggctggataagtgaaatttcggttccgtgtggatagaacctaattgaagtgatatgctgtaatatgcaggataggcctgatgaataccaggtttttctttgttttaattataaaaggggaaccgttttttcgtgccgttgtgatttgcaagaacgtgtttaatgttcacttccagtttttgttccaaaaaaaaaaaaaaaaaaagaaaaaaaaaaaaaaaaaaaaaaaaaaaaaaaaaaaaaaaaaaaaaaaaaaaaaaaaaaaaaaaaaaaaaaaaaaaaaaaaaaaaaaaaaaaaaaaaaaaaaaaaaaaggaaaaaaaaaaaaaaaaaaggggccttttaaaagaatcaaatttttcctcccgggggtggggaagaataattttttttttgggggccccaaaaataaattc

SEQ ID NO: 157772 - DNA, 1248 bp, Zea mays
  Clone ID: MRT4577_75464C.1
gggtaccctgggccgccgggaggaacgccccgctccagtctatccccgccgcccgcgccgccgaaggccgaaccctcgtcgcctcccctgcccacgcccgccgcctccagcaggaccacaccgccggattcgacttttttgtcctcgccctctccccctcctctcgtctcctttgatggcgtcgaggggaggctcctccggctttatcgagtattttcataacagcacaaagcgtcatggcagcaatagagagaacacaagtcagcaaggcatgaatgctatcagggtgcaaaaagaaatgaaaaaagaatgggcaagacctggaagagttttcaatagaaatattactagaggaggctactctcgaagttcattgcctgctcaaccaaaaagcttgctgcccaacaccacttggttacttgcaatgttaatgggcatggagcggcccatgctgacaatggtatcaaaattgcggctcaagcccatgacaaggaagtcaagccttctattgtccgaaaaatggaacaatatgaagggacacaagcatcattggttggatctcatgcagttcttggaaagggcaaccagaacacggtggacactgcagcatcagggaaaaataattttggtggcgaaccttgctgttcttcatcagatccaatccatgtgccctctcctggttctaaatcagctggaacttttggagccataaagcgtgaagttggagtagttggtgctaggcaaaggccagctgatagtgcagcaatatacacatctacttctaatggcttagtcaaagtggtatcagcaccaaaggttagcccacatttggaatggaagcccaaatcagtaagccccagcactgctgcacctcctggtgctccatcacctgttgatgatggaagtaaaacagaagtgtctgctttgtctaagaagctttcacatgctaatgtatcacatgaacatgtcattataccggagcacatcaggataccagattctgaaagaactcatttcatcttcggttcttttgaatctgaaatttatccaaaggcttctttagcagcctattatgatgctgtggctaaagaagacttgaatgatcactctccatcaagcgtggcagcattgggtttcacatcaactgatgggactcttaatgataggatggataatggtggttcctgcagtccacttccacagtcagagcctgctgtttcagtttctgaacatgagcagtcattgacg

SEQ ID NO: 157773 - DNA, 258 bp, Zea mays
  Clone ID: MRT4577_75465C.1
ggggagagggcatctcaaggaacatgcattaaactgcccccatttacttgctgacaggccacagactgctagttcacaagtcagtaaacacatagttacatagtactagtaccacatgggggggggggggggggccgcttccatctgtgtggatcagcttgcaagccgatcacacatttacggcgcccaccggtcactggtttaattcaaggcggctggtccgggcacccttgcttaatgcttagcttcttgttcggg

SEQ ID NO: 157774 - DNA, 825 bp, Zea mays
  Clone ID: MRT4577_75466C.1
gttgtgagagactgcgtaacgagcggttctctctcctccgtccctttccactttccgagatctatccatctccaagccatggccggcggctccccgccgaatctctccctgatcgatccaggttcatgcccatgcctaattccgttcgccgcttcggaaagcttccacctttcgccgtgatccggtgagcacggtcttcggaaacaggatgggcgtacatgcgatcgatctggatgctgttccctgattgtcaccgatctgggcgctgtgttcccccatatgccctggctctctggccgttgtttctcatccgatctgaatcttggacgacgccatcttttgctgatagatgaacgcaagggggaaaggttcgatctttatgcagctcaactgtcttttatgtagtttatggctcagtcggtcccagatcaggagaaccaagttgaaaggttggataatcttagggtcttgaagtttaggacacttcactaaaaagctcagtacctgcagttccaagaaagtaaactgcaacaggccgccgagcaacagtagtgtttcccagttcaagatatatgtaaaactagctctcaaagatccagtaatggttgcaatgaccgcagcatgtgcaccagcactatcaggtgagaacatcggtctaagaaagtacatttatgtacctaacattctcttaatctcttgtgtgatgttgtttgcaagaaaatcgtttgtagctgtggaatcggtcgacagcattaaaaatcagattacagcgatgctacctcatttgccgagattatttcccgctgcttctaattgatgacttca

SEQ ID NO: 157775 - DNA, 1105 bp, Zea mays
  Clone ID: MRT4577_75467C.1
ctcgactccagcatcaggaagctgcacagaattttaaggcatatgagccagattctggttatgggatgtcatttattactaaagttgatggtgaagcagcccaaggtatagcttattcatctgaggctatggttttacattctgtaaatggctatcagttacctgcatctacagcaactcaacaaccagtgccccagatgttttctcaacaattccaagcacctcagtatccaaactttttgccatatcggcatgttttctcaccacagtttgggtctctaatggttgttccaaactattcaagcaaccatgcatttcctcagttgccacatgccagcagctatctggtaatgccaaatggagcctcacaactagctgccaatggcatgaaatatggatcaaaccatcagtataagcaagtatttcaaggagcccctgctggatatggctacggaaatcataatggttaccctaacggtgttattggcggcacaggtgctattgaggatatgaatatgagtaaatataaggacaactgcctctatgcacccaatccacagccttttattttccgtgattgtcaggtggaaacagcagatgtatggattcaaagtcagaaagagagtcccaatatgccatctgcaccgttctacaatatggtgggacaaccagtgtctccacatgcagcatacttaccaccacaaagtggccacactgccttcagtcccgccccttcccatcctggtcacttgcagtacccgggctttgtgcatgcactgcagccaacatccatgaccatggtgcagaacccgcagaccatgatacatcagccggctgcaccgccattggcaggaaatctaggcctggacatgtcggccatggttcctggaaatcaagtaggagcgtttcaacataaccagcttgcccatcttggctggaccacacaatccttttgagattttggtgtgcttctatggctggataagtgaaatttcggttccgtgtggatagaacctaattgaagtgatatgctgtaatatgcaggataggcctgatgaataccaggtttttctttgttttaattataaaaggggaaccgtttttt

SEQ ID NO: 157776 - DNA, 577 bp, Zea mays
  Clone ID: MRT4577_75468C.1
agaggacgcatcttggtacgtttattattggaggaggattacacatagaaggaagcggacggaccgtatggaatggaagtggtggcaagcgatcaaacaagcaacaatacttttgtttggctgtagtggtgttctagctaaaatgctatgctagactaggcggttattaaaatggcaagcaaacaaaacggagaatggaaaatagttagtgcaaccgatgtgccctgcagatgcaacagtcacacagccttacgcgtgagcaaacctgaacaacacggacattgggtgcctcagggcttccagacgatggtggtcttacacaatcatggaagagaccatcgtttgggtccatgttggacaccgagcgatgatcctttaactacacattgccgaactgattcttatcgatttccacgcgcacagacacgccacgataggatattacgcagattaaggtaatgaaggcgacgggctccatcctgtcagggagctggttctcattgccctagccggagaacgccatacccttctttggccgcatattaagtttctctatggccagcttgatcacatctta

SEQ ID NO: 157777 - DNA, 1150 bp, Zea mays
  Clone ID: MRT4577_75469C.1
cattgggtacctcgaggccggccgggagcgtctctcgctgctgtgcttcttccttgagagctttaaccgtgttgtttgtgttggcagctcttgtttcagatgtaggcggccgacatcatcatcatgtttgtcgtccttatttctcctgcggtggttttagcaatatatcgtatccattccgtcggcaaggtgatccatctgggtgtggtgtccaatcgtatgagctggtttgcacggatacagacgccacaattcgcatcggcagtggaacatacaccgtgcttagcatcaactccacgtattcttacttctgggttgtcgatgccaacctggacatccagagcagttgcccccttccctggtgggattaccatgattctggagccctcatgcggttacctagccatgatttatttgggtggtccaggcataccggtgcccaagaatacaagctatccagatgttgttaagttaatgaggaatggatttggccttagatttccttcttcgattggtgaccgcggcatcagagaatgtttcgcagagtctgtgcgtaacgtccgtaaagagccagaacgtatcagattgtggacattcttatgggcgagagatatgggtttgtgttatcaatcaacttggatcaactattcatgatatctcttgtggtatcatctacattatatggcttctgaaatctagatatgttttttgcaggcttgtattgatgccgctagcagtatttgtcttcctagcccataaatactggaaagcaaggattacaatagatgcagtcgagaagttcctgcggatgcagcagatgctcgttccgatgagatatgcatacacaaacatcattgctatcaccagtcatttcagagaaaagctcggacaaggaggctacggttcagtatacaagggggtgctacagccaggtgaagtacatgttgctgtcaagatgttaggcaactccaactgtgatggagaagagttcatcagtgaggtcgccaccattggcaagatccaccatttcaatgtggtgcgcctcattgggttttgctccgaggaaaatagcagggcacttatctacgagttcatgccccatggatctctcgacaatacatcttctcgtcggaaagagtttctcatggga

SEQ ID NO: 157778 - DNA, 366 bp, Zea mays
  Clone ID: MRT4577_7546C.1
tttttttttttttttttttttttttttttttttttttttttttttttttttttattttttttcatatcatatgggatttccattttcatcatttctctaggttcacagggccaaggccccaagtagagaggtttttcggcttcaaacaaccaaccaaatcccctaaaagacaatataggctcccccggagggcccccccacccggggatcatagccaacttatcccccaaaaccaaagtccccaaaaaaatgaaaaacgaccacgccaaaggcacccaacgcctggattccattttttaatctactaaagaagaagcattacccaaaaaacagcactccccccgaaaaaactttgcaacaaggttc

SEQ ID NO: 157779 - DNA, 1435 bp, Zea mays
  unsure (1)..(1435): unsure at all n locations
  Clone ID: MRT4577_75470C.1
ttgggacggccggggtggcccgtggttgtactcacttatctttccacgtcgccacgccactgattggctcacgattatgtgattcgtgaaccttcttgctgccatgccgatgtctgattcttccttgagagctttaaccgtgttgtttgtgttggcagctcttgtttcagatgtagaggggcgacatgatcgccctgttaattgtcctcatttctcctgcggtggttttagcaatatatcgtatccatttcgtcggcaaggtgatccatctgggtgcggtgtccaatcgtatgagctgctttgcacggatacagatgctacaattcgcatcggcagtggaacatacaaggtgcttagcatcaactccacatattctcacttctgggttgttgatgccaacctggacatccagagcagttgcccccttccccggtgggattaccatgctcgttggatcaatctcaactcacatcgttggaggattgagttcagccatgattatttctatcctcctcctttttatatttattcggggtgggctatctttgtgaattgttctcagccaatagagaacaatgatactgatatatttcagatatatgagccggtgtcttgcttgagcaattcttctttcatctacttggtaactgactactggtatgatggccatgttcctgctgggactctggagccttcatgcggttacctagccatgactcctttgggtggtccaggcatgccggtgcccaggaatacaagctacccacgcgtccgcccacgcgtccgaagttcatgaggagtggatttgcccttcgatttcccttttcgtatggtgacaacatcagagaatgtctcgcaaacaatatgcattatttgcaggttcgtattgatgccgctggcggtatttgtcttcctagcctataaatactggaaaacacggataacaatagatgcagttgagaagttcctgcgaatgcaccatatgctcgttccgatgagatatgcatacacaaacatcattgctatcaccgcccatttcagagacaagctcggacaaggaggctacggtactgtatacaaaggggtgctacaaccaggtgaagttcatgttgctgtcaagatgctgggcaactcaaactgtaacggagaagagttcatcagtgaggtggccaccattggaaagatccaccatgtcaatgttgtgcgcctcattggattttgctccgaggaaaatatcagggcacttatctatgagttcatgccccgtggatctctcgataagtacatcttctcgtcggagaagacattctcatgggacaaactcaatgagatcgctctgggcattgctagaggtcttaactacctgcatcacgggtgtgatatgcaaatagtacactttgacatcaagccacacaacatncttcttgatagcaac

SEQ ID NO: 157780 - DNA, 807 bp, Zea mays
  unsure (1)..(807): unsure at all n locations
  Clone ID: MRT4577_75471C.1
ggtaccctcgggttcggccgggaagatgctcagactgtatgtgactctgggtgactcttgtcttcccacatcgccacgccactgattggctcgcgattatgtgattcttgaaccttcttgccatagggatgtctgcagcgtctcatctctgtgcttcttcgtccctgcgagctttaaccgtgttgtttgtgttggcagctcttgtttcagatgtagaggggcgacatcatcgtcatgtctgtcctcatttctcctgtggtggtttaagcaatatatcgtatccatttcgtcggcaaggtgatccatctgggtgcggtgtccaatcgtatgagctggtttgcacggatacagatgctacaattcgcatcggcagtggaacatacaaggtgcttagcatcaactccacatattcttacttctgggttgttgatgccgacctggacatccagagcagttgcccccttccccagtgggattattaccctgctcgttggatcaatcgcaactcatatcgttggaggattgagttcagccatgattatttctatcctcctcctttttatatttattcggggtgggctatctttgtgaattgttctcagccaatagagaacaatgatgctgatatatatgagccggtgtcttgcttgagcaattcttctttcatctacttggtaactgactactggtatgtttttgctgggaatctggagccttcatgcggttacctagccatgactcctttgngtggtccaggcatgccggtgcccatgaataccagctatccagattgtgntaagttcatga

SEQ ID NO: 157781 - DNA, 721 bp, Zea mays
  unsure (1)..(721): unsure at all n locations
  Clone ID: MRT4577_75472C.1
aattcggcacgaggttgtcttcccacatcgccacgccactgattggctcgcgattatgtgattcttgaaccttcttgccatggggatgtctgcagcgtctcatctctgtgcttcttcgtccctgcgagctttaaccgtgttgtttgtgttggcagctcttgtttcagatgtagaggggcgacatcatcgtcatgtctgtcctcatttctcctgtggtggtttaagcaatatatcgtatccatttcgtcggcaaggtgatccatctgggtgcggtgtccaatcgtatgagctggtttgcacggatacagatgctacaattcgcatcggcagtggaacatacaagccttcatgcggttacctagccatgactcctttgggtggtccaggcatgccggtgcccatgaatacaagctatccagatgttgttaagttcatgaggagtggatttgcccttcgatttcccttttcgtatggtgacaacatcagagaatgtctcgcaaacaatatgcatactttccataaagaaccaagaaatagtacaggcatcaggcaacagatcttggacattcttacgttcgagacattatggttntgtgttattgaacaacttggatcaactaataatggtgtcaagtctgttctcatcgacatcatccaacaaataccatatgttctttccagtctgaaatctgcacatgttatttgcaggttcgtattgatg

SEQ ID NO: 157782 - DNA, 336 bp, Zea mays
  Clone ID: MRT4577_75473C.1
gcggttgctttcttttttttggttttttttttttttttttttaaaaaaagaagcccgggtttaggagttttttggtttcaaaacattttctggggggcccattttattttgggtcccgcaaatgccatgggatcaaccaacatggggggagacccccgtccgttcctgggccccaagactggccccaaacttggggggggggatagcaaaccggagaactttgttttttttttttttacacgccccacacaattcctttgtttgggcgcccgctcgggctcgtttttttttggtcaaccccccccccccgcttggtagacaataatcctttccctg

SEQ ID NO: 157783 - DNA, 314 bp, Zea mays
  Clone ID: MRT4577_75474C.1
cttggtctggaacgaccaaagggtcaattaacattttgtttgaccacaaaacacctacatggagcctcaattcgcacgaccaagaaccacatcacattcccttaagacaaagcaactcaaactccgccagcaccctgacgacagcaacaaaatcaacaacctcatacactatgaccaatcctgctaactagcaaaaacacaaaaaccatccaaagatccatctgctacatgtgcacacaagatcatccatctgccctaaacctctgctcactccggccccgggcactctactttacatgcttctgccctcgagc

SEQ ID NO: 157784 - DNA, 578 bp, Zea mays
  Clone ID: MRT4577_75475C.1
ccggccggggtgattcttggaccttcttgccatggcgacgatgtctgcagcgtctcatcgctgctgtgcttcttccttgagagctttaacggtgttatttgtgttggcagctcttgtttcagatgttggcgggcgacatcatcatcatgtttgtcctcattatttctcctgtggtggtttaagcaatatatcgtatccatttcgtcggcaaggtgatccatctgggtgtggtgtccaatcgtacgagctggtttgcacggatacagatgctacaattcgcatcggcagtggaacatacaaggtgcttagcatcaactccacatattctcacttctgggttgttgatgccgacctggacatccagagcagttgcccccttccccggtgggattaccatgctcgttggatcaatctcaacttacatcgttggtggattgtgtcgagccaatattatttctattcttcttctttttatatggattcgtggcggtgggctatctttgtgaattgttctcagccaatagagaacaatgatactgataaatatcatatataaaaaaaaaaaaaaaaaagcggcc

SEQ ID NO: 157785 - DNA, 2485 bp, Zea mays
  Clone ID: MRT4577_75476C.1
ccggccgggatccagtggaacagtcatgtgcgattttctttctcaaaaacagtgaagatgctcaggctgtctgtgactctgggtgactccacgccggaccaacttccacgccaccacacgactgtgctcaggctgtctgtgactctgggtgaactcttgtcttccacacatcgccacgccactgattggctcgcgattatgtgattcgtgaaccttcttgccatggggatgtctgcagcgtctcatctctgtgcttcttcgtccctgcgagctttaaccgtgttgtttgtgttggcagcttttgtttcagatgtagaggggcgacatcatcgtcatgtctgtcctccttatttctcctgcggtggtttaagcaatatatcgtatccatttcgtcggcaaggtgatccatctgggtgcggtgtccaatcgtatgagctggtttgcacggatacagatgctacaattcgcatcggcagtggaacatacaaggtgcttagcatcaactccacatattcttacttctgggttgttgatgccgacctggacatccagagcagttgcccccttccccagtgggattaccctgctcggatcaatcgcaactcatatcgttggaggattgagttcagccattattatctctatccttcttcttatactgttttcgaggtgggctatctttgtgaattgttctcagccaatagagaacaatgatatatgtattaatatatatgatgacgatgtgtatgggccggtgtcttgcttgagcaattcttctttcatctacttgctggtaactgactactgggatgtatatttctgctggggctctggagccttcatgcggttacctagccaagactcctttgggtggtccaggcatgacggtgccctcgaatacaagctatccagatgttgttaagttcatgaggaatggatttgcccttggatttcctttttcgattagatcttaccccaccatcagagaatgtctcgcagagaatatgcgtactttccataaagaaccaagaaatagtacaggcatcaggcaacagatcttggacattcttacgttcgagacattatggttttgtgttattgaacaacttggatcaactaataatggtgtcaaatctgttctcatcgacatcatccaacaaataccatatgttctttccagtctgaaatctgcacatgttatttgcaggttcgtattgatgccgctggcagtatttgtcttcctagcctataaatactggaaaacacagataacaatagatgcagttgagaagttcctgcgaatgcagaatatgctcgttccgatgagatatgcatacacaaacatcattgctatcaccggccatttcagagacaagctcggacaaggaggctacggtactgtatacaagggagtgctactgccaggtgaagttcatgttgctgtcaagatgctaggcaactccaaactgtaacggagaagagttcatcagtgaggtcgccaccattggcaagatccaccatgtcaatgttgtgcgcctcattgggttttgctccgaggaaaatattagggcacttatctatgagttcatgccccgtggatctctcgataagtacatcttctcgtcggagaagacattctcatgggacaaactcaacgagatcgctctgggcattgctagaggtcttaactacttgcatcacgggtgtgatatgcagattgtacactttgacatcaagccacacaacatccttcttgatagcaactttgttccaaaagttgctgattttgggctagccaaactgttcccaagagatgacagtttcgtgccactgagcgctatgcggggaacgataggctatatagctccagagatggtatctcgaagctttggtgtcatctctagcaaatccgatgtgtacagctttgggatgctactattggagatgacgggcgggcgaagaaacgcagatcctcatgcaggaagctccagtcaagcatactacccatccttggtgtacaggcagctgagccaaggtgatgcgaacaggatcagtgaaggtgttgatatgcacgagttagagaagaagctatgtatcattgggctttggtgcatccagatgaagccgcaagatcggccgacgatgagcgaggtcatagagatgcttgaagctggtgtcgatggcatccaaatgcctccaaggccatacttttgtgatgaagagggtgacagttcttactctacaatctctgaactggatacaatagaagagtagtagtagtagtaaaatgcacttgtgtctatgtgctcttaatgtatcagactattaagattgcaaggttgccataagctaaggtactggttgtatacttttattgagagtgtgataatgtgatttcatataaaatacctccatgaagttttttacaaaaaaaaaaaaataaaaaaaaaaaaaaaaaaaaagaaaaaaaaaactcgaggaaggg

SEQ ID NO: 157786 - DNA, 2411 bp, Zea mays
  Clone ID: MRT4577_75477C.1
aagagagacacaaaagaagaaagactcaagtcagtggcatcacaatcatgaagatactcaggctgtgactcttgtttctactcactccacgccactgactggcaggcgattatgtgattcatgaaccttcttgccatggcgacgatgtctgcagcgtgcttcttgccatggcgacgatctcatcgctgctgtgcttcttccctgcgagcttcaaccgtgttatttgtgttggcagttcttgtttcagatgtaggcgggcgacatcatcgtcatatttgccctccttatttctcctgtggtggtttgagcgatatatcatatccattccgtcggcaaggcgatccatctgggtgcggtgtcgaatcgtatgagctggtttgcacggatacagacgctaccattcgcatcggcagtggaacatacaccgtgcttagcatcaactccacgtattcttacttctgggtcgttgatgccgacctggacatccagagcagttgcccccttccacggtgggattaccatttgtttcctttcattttgaggattgacaactcacatcgtcggaggattgaattcagccatgatacccctttttcttcttatatggattcggtgtgggctatctttgtgaattgttctcagccattagagaacaatgatactgataaatatcatagatatgagccggtgtcttgcttgagcaattcttctttcatctacttggcaactggctaccggtatgatggctatgtttctgctggggatctgaaaccttcatgcggttacctagccatgactcctttgggtggtccaggcatgccggtgccctggaatacaagctatccagatgttgttaagttcatgaggagtggatttgcccttcgatttcccttttcgtatggtgataacatcagagaatgtctcgcaaaggatatgcgtactttccttaaggatccaagaagtagtacaggcatcaaggaactgattgtggacattcttacggtcgtcgacatattctgggcttgtgttatctatcaacttcaatcaactaataataatggtgtcacaactgttctcatcggcatcattgaaacgatacaatatgttagcggggtcctgaaatatacagctgttgtttgcaggttcgtattaatgccgctggcagtattcgtcttcctagtctataaatactggaaaacaaggataacagtagatgcagtcgagaagttcttgcgaatgcagcagatgctcgttccgatgagatatgcatacacaaacatcattgctatcaccggccatttcagagacaagctcggacaaggtggttacggttctgtatacaagggggtgctacagccaggtgaagttcatgttgctatcaagatgttgggcaactccaactgtaacggagacgagttcatcagtgaggtcgccaccattggcaagatccaccatgtcaatattgtgcgcctcatcgggttttgctccgaggaaaatagcagggcacttatctacgagttcatgccccatggatctctcgataagtacatcttctcatcggagaagagtttatcatgggacaaactcaatgagatcgctctgggcattgctagaggtctcaactacttgcatcatgggtgtgatatgcagattgtacacttcgacatcaagccacacaacatccttctcgacaacaactttgttccaaaagttgctgattttgggcttgccaagctgttcccaaaagatgacaatttcgtgccactgagcgctatgcggggaacgattggctatatagctccagagatggtatctcgaagctttggtgttatctctagcaaatccgatgtgtacagctttgggatgctactattggagatgacgggcgggcgaaggaacgcagatcctcatgcaggaagctccagtcaagcatactacccatccttggtgtacagccagctaagccaaggagatgcgggcgagatcagtgacggtgttgatatgcacgagttagagaagaagctatgtatcattggactttggtgcatccagatgaagccgcaagatcggccgacgatgagcgacgtcatagagatgcttgaagttggtgtcgatggcatccaaatgcctccaaggccattcttttgtgatgacgagggtgatagttcttactctgcaatctctgaaccggatacaatagaagagtagtagtagtaaaatacacttgtgtatatttgatcttaatgtattttagactactaagaatgcaaggttgtcataagctaaggtactggttgtatacttttattgagagtgtggtaatgtgttttgatataaatacaaaaaaaaaaaaaaaaaaaaaaaaaaaaaaaaaaaaaaaaaaaaagaaaaaaaaaaaaaaaaaagcggcc

SEQ ID NO: 157787 - DNA, 2378 bp, Zea mays
  Clone ID: MRT4577_75478C.1
cattgggtacctcgaggccggccgggggctcttgtcttccacacatcgccacgccactgattggctcgcgattatgtgattcgtgaaccttcttgccatggggatgtctgcagcgtctcatctctgtgcttcttcgtccctgcgagctttaaccgtgttgtttgtgttggcagctcttgtttcagatgtagaggggcgacatcatcgtcatgtctgtcctccttatttctcctgcggtggtttaagcaatatatcgtatccatttcgtcggcaaggtgatccatctgggtgcggtgtccaatcgtatgagctggtttgcacggatacagatgctacaattcgcatcggcagtggaacatacaaggtgcttagcatcaactccacatattcttacttctgggttgttgatgccgacctggacatccagagcagttgcccccttccccggtgggattaccatgctaggaggaccagtcgtaatcgtaacttacattggaggattgagttcagccatgatttttccaattctaatccgacgatgtgggtttacgcttacgcttaccctgattggaccagtagaaactcatatcgtcagagggttgagttcagccatgatacccctttttcttcttcttatatggattattcggggtgggctatctttgtgaattgttctcagccaatagagaacggtgtgtatagaccggtgtcttgcttgagcaattcttctttcatctacttggtaactggttactggtatgagtatgatggctatgtttttgctttgggtctggagccttcatgcggttacctagccatgactcctttgggtggtccaggcatgccggtgcccatgaatacaagctatccagatgttgttaagttcatgaggagtggatttgcccttcggtttcctctttcgtatggtgacaacatcagagaatgtctcgcagagaatacgcgtgctttccatgaagaaccaagaaatagtacaggcatcagggaacagatcttggacattcttacgttcgagacattatggttttgttttctcgatcaacttggatcaactaataatgatgtcacttctgttctcatcgacatcatcgtcgaaacaataccatttggtctgtggcttctgaaatctacacatgttttttgcaggcttgtattgatgccgctagcagtatttgtcttcctagcccataaatactggaaagcaaggataacaatagatgcagtcgagaagttcctgcggatgcagcagatgctcgttccgatgagatatgcatacacaaacatcattgctatcaccggtcatttcagagaaaagctcggacaaggaggctacggttctgtatacaagggggtgctacagccaggtgaagtacatgttgctgtcaagatgttaggcaactccaactgtaatggagaagagttcatcagtgaggttgccaccattggaaagatccaccatgtcaatgttgtgcgcctcattgggttttgctccgaggaaaatatcagggcacttatctatgagttcatgccccgtggatctctcgataagtacatcttctcgtcggagaagacattctcatgggacaaactcaacgagatcgctctgggcattgctagaggtcttaactacctgcatcacgggtgtgatatgcagatagtacactttgacatcaagccacacaacatccttcttgatagcaactttgttccaaaagttgctgattttgggctagccaaactgttcccaaaagatgacaatttcgtgccactgagcgctatgcggggaacgattggctatatagctccagagatggtatctcgaagctttggtgtcatctctagcaaatccgatgtgtacagctttgggatgctactattggagatgacgggcgggcgaagaaacgcagatcctcatgcaggaagctccagtcaagcatactacccatccttggtgtacaagtagctgagccagggtgatgcaaacatgatcaatgaaggtgttgatatgcacgagttagagaagaagttatgtatcattgggctttgctgcatccagatgaagccgcaagatcgaccgacgatgagcgaggtcatagagatgcttgaagctggtgtcgatggcatccaaatgcctccaaggccatacttttgtgatgaagagggtgacagttcttactctataatctctgaactggatacaatagaagagtagtagtagtaaaatgcacttgtgtctatgtgctcttaatgtatcagactattaagattgcaaggttgccataagctaaggtactggttgtatacttttattgagagtgtgataatgtgatatcatataaaatacctccatgaagtttttt

SEQ ID NO: 157788 - DNA, 219 bp, Zea mays
  Clone ID: MRT4577_75479C.1
gactgtactgctgggcaatcgagtaagtggaaaaccgagcgcactgtgactgtgtgaagctgatgacaatgctggcacgtacccatatgcaggacctgaaggatgtgacgcgggtgacacattatgagaactaccgagggcagctcttacagaacttgatccgcctgtcgttgaagctaccaaatcgcaacatactgactcgggaaatctgaccgactt

SEQ ID NO: 157789 - DNA, 481 bp, Zea mays
  Clone ID: MRT4577_7547C.1
aggagttttggggatgttgtttgctttgatacaacatatgcattgaacatttatggacggccatttgcactctttgttggtgttgacaaccataagcagttacttgtgtttggcgcagcactgctctatgatgagagcattcagtcgctgaaatgggtatttgaggtgtttgctgatgccatgcatgctaggcacccacaaactattttgattgatgaacgtcctgagtgtgccattgcagcagcagaggtgtggcctggcaccaatcactgcacaggggtgtggcatatctaccataattcaaagaggcacttgaagcaggtgtttgaaagctcaaaaagtttcagcaatgctttgaaccattgtctctttgaatgtgaggatgagattgagttcttgtcagcatgggaaaagctagttgagaaacatgacattggtgagagtgagtggctcagcagactttacctggacgacagcaacg

SEQ ID NO: 157790 - DNA, 221 bp, Zea mays
  Clone ID: MRT4577_75480C.1
atttttgttggcatgcggaacctctcgaggttcaatgcttaggtaccagtctatcagaggtggtggctaatatataatgccacctagatctaattgactgtctcgcgagcgacaaaaatgcgactaggaaaaaacatggctcactcgatcttaattgcattgtatcacatgcccttttagcaagttgtcgaatgacctaagagcacccaactgatcgagct

SEQ ID NO: 157791 - DNA, 778 bp, Zea mays
  Clone ID: MRT4577_75481C.1
cctcgaggccggccgggacaatacagtgaagatgctgaggctgtgaccccgggtgactcttgttcctgcccacttatctttgcagtcgccactgcacgccactgattggctcgcgtgattcgtggaccttcttgccatggcgacgatgtctgcagcgtctcatcgctgctgtgcttcttccttgagagctttaacggtgttatttgtgttggcagctcttgtttcagatgtaggcgggcgacatcatcatcatgtttgtcctccttatttctcctgcggtggttttagcaatatatcatatccattccgtcggcaaggtgatccatcggggtgcggtgtcgaatcgtatgagctggtttgcacggatacagacgctaccattcgcatcggcagtggaacatacaccgtgcttagcatcaactccacgtattcttacttctgggtcgttgatgccgacctggacatccagagcagttgcccccttccacggtgggattaccatgctgggaccagtcatgggaggattgagtggaaggagtaccattttttatatcctagttcgatgtggactatctttgtgaattgttctcagccaatagagaacaatgatacatatgagccggtggtgtcttgcttcagcaattcttctttcatctacttggtaactggctccaactactggaattatggctatgctcctgctgagtttctggagccctcatgcggttacctagccatgatttatttttgggtggtccaggcatgccggtgcccaaga

SEQ ID NO: 157792 - DNA, 430 bp, Zea mays
  Clone ID: MRT4577_75482C.1
cggacgcgtggggcgtaccataacggattcgtagatatatgtatctacatcaacgagaggcaaccattactatttctggaggcatactcactggcctcagacgacattcacatactacaattcatagtgctcaggacctgcttgatcacgattgacgaatgagatatcgaatgctgcatatcgtacattatttttgactgatgcatgtactcataatgctacaacctttgattgtactgctgaacattctacagatagatcgcatgatactaacgctaacgctccttgtcaattctttgacatgctatcccgaggatctgccagactctatctatatagagatgccactgcattgcgaatcctacttgatcatggacacctgatatcatgatcactgtcatactccgtgaacatgtgactttatggacaa

SEQ ID NO: 157793 - DNA, 301 bp, Zea mays
  Clone ID: MRT4577_75483C.1
gtcgctccgggcagtgcctgtgccacaccagcgacgtccccggcaagctgatatacgggcagtactgcgagtgtgacaccatcaactctgagcgctacaacagccaggtctgcggcggcccggggccggggctctgcttctgcgggaagtgccgctgccaccgcggctttgagggctcagcgtgccagtgcgacaggaccactgagggctgcctgaacccgcggcgtgttgagtgtagtggtcgtggccggtgccgctgcaacgtatgcgagtgccattcaggctaccagctgcctctgtg

SEQ ID NO: 157794 - DNA, 305 bp, Zea mays
  Clone ID: MRT4577_75484C.1
gactatacgataatattaaataacatatttatggcattttcttgaaacgtgtggttgaagaaataattctctcgtgtgtttcctggcttgggcactcaccaccactgctaaagggcagggcagcctgtgctcttccttcccaagggtgtacaggatttccaatctgccagttctgtgctcagaaaaagagagagggtcagacccttttccatcagcattcttctctgaacctttcctagagccttccgcatccagaagatgttggaacatttcttgcctgtaggccatgaagtgttctccacaga

SEQ ID NO: 157795 - DNA, 235 bp, Zea mays
  Clone ID: MRT4577_75485C.1
cgctcgccccggcatgataatttccacggcggccgacgcgctccgggcgctgccgcggagcaggacgaacaaaccaggggcgcgggatccggcctgctcagaaggggcctcgacggagccgcatgcggagccggcgccggacccgagacgggcggcagcccccccgcccgcggaggaccagaagccgagggagacccgcccgccgtacgccacgaaggaggacggccccgccacg

SEQ ID NO: 157796 - DNA, 644 bp, Zea mays
  Clone ID: MRT4577_75486C.1
taccctcgggcttgccgggaaaaagcgggttccttgattaagtgccagaaactcattcagcttgcgatcgagaattccggctggaatgtggtgccctctaaaagcagtcttgaattcctcccaagacacttcatgatcagcggggagcatagcatggaagtggtcccaccaagtccgagcaggaccgcgaagctactgcgtggcgaagcgagccttggtttcatcagggtagtctcccgtgaggaggggaaacttggactcaacgacgcagagccacacgtcggcgtccaacggatcctctgccttggtgaacaagggtggctgcgtgctcaggaactcctggtagttgccgctaccgaaggtcgctgatgctggcctcctccatgttgctgggggtggggttggcgctgcaagagctgtcgtagaatctcattcttttgggccatttgctcctgcactgtgggagctagaggaggtggcgggggaacttgctcgttatgcccgtgacgctgcctagctaccatctgaaaacagagattgtcgccattgttatcccaactcacaatttcgaacgacaagctattacctcatatggaaagaaaatgccataatcataatattaggttcgaaatgaagataacatg

SEQ ID NO: 157797 - DNA, 842 bp, Zea mays
  unsure (1)..(842): unsure at all n locations
  Clone ID: MRT4577_75487C.1
gttaggactacctccacaaattgagcatcggttaccccattccatcgtcctcttcggcggcgctggcgcccacaccaccgaaccctcttccagcttccttccacccgagcacgccggtcacccatcatcgccgaagccctccccctcctgcttcagctgtgctgattgcggtcgcagattcctctcctgcgaggcacgagctgagtcgtacccctatccgcccttattgcagcggtgcggaaggcaatggtggggttgggatggagagtcggctcaaaggtgcagagatggggccggagctgcctccggggtttctcatctgctgcagttccgtctcagctggagaatgtcggattcatcggacttgggaacatgggttcccatatggcaaggaacttgatcacggctggatataaagtgactgttcatgatataaatgaaaattctatgaagaaattctcagaggatggaatccctacaaaacagtctccacttgaagtatcagaatcgagtgatgtcataattaccatgcttccttcatctactcatgttttagaagtatacaatggacccaatggcttgctttgtcggggcgaacgcttgggcccatggttatacatagattcatcaacagttgatccacaaacatcaagaaagatatcgacagccatctcaagatgccttttaaaagaaaagaanagttacgctgaaagccctaagattctggatgctccggtgtctggaggtgttctgctgcagagctggcagctactttcatggtgggtgtcttgaggagcgtattagcagccagccctactttcagcatgggaaaaacatctact

SEQ ID NO: 157798 - DNA, 356 bp, Zea mays
  Clone ID: MRT4577_75488C.1
cgacccacccggcgaagaacattgatgtcttaaaaacatggggctcgggccacaaatctctcggggttccatttgttcaacaaacaacatccttggcctaacaaatctcatgttgatccaaccataaaaaaggtccgtagtttgtcgaaacaacagatcccatgaggaccccccgactaggttgtgacaccatatacttgcgtgttgcactgaactgctggtagcccttgatgaccttggtgcccgcatactgaaaaaccttttatgtcaccctttttctgagggcccaaatggacaacatcccggattatgggcaaacgcttcttatattagttccagccatgttggggcgggac

SEQ ID NO: 157799 - DNA, 1855 bp, Zea mays
  Clone ID: MRT4577_75489C.1
cctcgattagatcacggaaaaacgcgtcgggttaaaaccaaaaaaaaaaaaaaaaagcttcctgattgcgtgtgttagtgcgccacggatgctgaaagcctgaaactgctcaagtagcgcgcaacgacaagagcaacgaggaacatcagttaggactacctccacaaattgagcatcggttaccccattccatcgtcctcttcggcggcgctggcgcccacaccaccgaaccctcttccagcttccttccacccgagcacgccggtcacccatcatcgccgaagccctccccctcctgcttcagctgtgctggtattagattagatcaaagtggaccgcgtcgggttgggtccagtcctttcgctgattgcggttgcagattcctctcctgcgaggcacgagctgagtcctatccctatccgcccttgttgcagcggtgcggaaggcaatggtggggttgggatggagagtcggctcaaaggtgcagagatgggtccggagctgcctccggggtttctcttctgctgcagttccgtctcagctggagaatgtcggattcatcggacttgggaacatgggttcccatatggcaaggaacttgatcacggctggatataaagtgactgttcatgatataaatgaaaattctatgaagaaattctcagaggatggaatccctacaaaacagtctccacttgaagtatcagaatcgagtgatgttataattaccatgcttccttcatctactcatgttttagaagtatacaatggacccaatggcttgctttgtcggggcgaacgcttgggcccatggttatacatagattcatcaacagttgatccacaaacatcaagaaagatatcgacagccatctcaagatgccttttaaaagaaaagaaaggttacgctgaaagccctaagattctggatgctccggtgtctggaggtgttcctgctgcagaagctggcaagctaactttcatggtgggtggtcttgaggaagcgtatttagcagccaagcccttacttcaagcaatgggggaaaaaacaatctactgtggtggtgctggaaatggctcggctgcaaagatatgtaacaacatggcaatggcaatcagcatgcttggggtctccgaggcctttgttcttggccagaaccttgggatcaaagcaaccactctcacagacattttcaactgttcaagcgctcgctgctggagtagcgatacatataatccagttcctggagttatggaaggtgtaccatcatcaaggaactatagtggtggtttcacttccaaattaatggccaaagatttggatttggccatggcttctgcatctggagttggcttcaaatgccccatgggttccaatgcacttgaaatttaccgaaaactatgcgaggatggttgtgaactcaaagacttctcgtgtgcattccgacattactattctggcaagaatgaagagtgatcttggagttacgctgcaaaatttcctcctttcgaaatcaataaaacagcaaataaagttaggacctgtttatgtcccatgaattgaaaaccaatatctagaaagtgtgtttccttgtttcattattagattactttctaattggtctaaattcctggaatcgaacaggaccttattggaaagtttacagtgtaagctgtgtagcattgtaccagagacatggtggttgtttgttgaccagtggtgatgatctgatcatctggttaaaactgttattggttttgcttctaggcaatcaagtgatactgttttgggacaaaaaaaaaaaaaaaaaaaaaaaaaaaaaaaaaaaaaaaaaaaaaaaggaattaaaaactc

SEQ ID NO: 157800 - DNA, 573 bp, Zea mays
  Clone ID: MRT4577_7548C.1
tcgacaatggtgccctcataccggcatgcgcttcctagaaataatcaatatattgattgagatttatctcgaaaaaaaaaaaaaaaaaaaaaaaaaaaaaaaaaaaaaaaaaaaaaaaaaaaaaaaaaaaaaaaaaaaaaaaaaaaaaaaaaaaaaaaaaccaaaaaaaaaaaaaaaaaaggccccgcccggggggcccgtaaagggggaattccaaaaaacggggggcccgtaatagggggccccaacctgggacccaacttgggggaaaaaagggcaaaagtggttcccgggggaaaatggtaaccggtaaaaattcccccaaaaaaaacaaccggaaacaaaaaggggaaagcccggggggcccaaagggggggccaacccaaaataattggggggggctaaagggccggttttcaagggggaaacccggggggccaactggattaaaaaaacggccaaaccccggggaaaaggggtttgggaaaggggggctttttccgttccctggttaatgaacccgtggccctgggcctttgggtggggggaagggttttaggttccttaaagggg

SEQ ID NO: 157801 - DNA, 1547 bp, Zea mays
  Clone ID: MRT4577_75490C.1
atacgttaggactacctcccaaattgagcatcggttaccccattccggggtcctcttcggcggcgctggcgcccacaccaccgaaccctcttccagcttccttccacccgagcacgccggtcacccatcatcgccgaagccctccccctcctgcttcagctgtgctggtattagattagatcaaagtggaccgcgtcgggttggatccagtcctttcgctggtgaaccagttggattgttctaacttgctgccaacaatcaaattcattttgccactcttcctccgcgtcagtagattgcggtcgcagattcctctcctgcgaggcacgagctgagtcgtacccctatccgcccttattgcagcggtgcggaaggcaatggtggggttgggatggagagtcggctcaaaggtgcagagatggggccggagctgcctccggggtttctcatctgctgcagttccgtctcagctggagaatgtcggattcatcggacttgggaacatgggttcccatatggcaaggaacttgatcacggctggatataaagtgactgttcatgatataaatgaaaattctatgaagaaattctcagaggatggaatccctacaaaacagtctccacttgaagtatcagaatcgagtgatgtcataattaccatgcttccttcatctactcatgttttagaagtatacaatggacccaatggcttgctttgtcggggcgaacgcttgggcccatggttatacatagattcatcaacagttgatccacaaacatcaagaaagatatcgacagccatctcaagatgccttttaaaagaaaagaaaggtaagttccaccatataacagtaaagacatagggcctgtttgtttcagcttatagattatataatctagattataatctagattatataatctggattataatctatggagattataatctgtatgtagctgtctggtagttcagattatacgtatgcagattaatgttctgtgagacacaatgacaacaatgctcttgtttgtttagttgtcttctttttttacggtttggcattccatcgattcatacaactatttgcaaaataggaaattaaaattatgccaaatacaccattggaaagctacaaatttcgtttgtaaacatcagtcatagagactggtatacaatggcagtctttataagcatttcatcgattatgtggcgcacacataaaccatatagtgagcagcatcaatggagctagctcctatggtaaatagtccctgctgcgacatcaatggatcatcaaaagggagttgtgtttgctcgtcggggttgcgtttggtcgccggagcaacgcttgctcgcggcgaggacaccggagctgcgttcaggctgcggcgtgaaagcacgcccagaggcgacgccgccattcccaaggctgcacccgctccaccgttgccgaagcattccgcagagccattgtagatgccgcgctcgccgacgccacaatgttccccacgtgaagaggatcaacccaggagagggactcctg

SEQ ID NO: 157802 - DNA, 459 bp, Zea mays
  unsure (1)..(459): unsure at all n locations
  Clone ID: MRT4577_75491C.1
cttgggttccaagcacttgaaattaccgaaactatgcgaggatggttgtgaactcaaanacttctcgtgcgcattccgacattactattctggcaagaatgaagagtgatcttggagttacgctgcaaaatttcctcctttcgaaatcaataaaacaacaaataaagttaggacctgtttatatcccatgaattgaaaccaatatctagaaagtgtgtttccttgtttcattattagattactttctaattggtctaaattcctggaatcgaacaggaccttggaaagtttacagtgtaagctgtgtagcattgtaccagagacatggtggttgtttgttgaccagtggtgctgatctgatcaaaaaaaaaaaaaaaaaaaaaaaaaaaaaaaaaaaaaaaaaaaaaaaaaaaaaaaaaaaaaaaaaaaaaaaaaaaaaaaggggcgggccgttttaaa

SEQ ID NO: 157803 - DNA, 380 bp, Zea mays
  unsure (1)..(380): unsure at all n locations
  Clone ID: MRT4577_75492C.1
cgggncgaccacgcgnccgagccgctgcaccggnaccaggcgacatacggngnggnccngcagnccnncctgcagcagcagccgcagggcgagcncgcggcgctganggcggcccaggnagcgcagcagcngacggcgangngcggcctgcagctgcagcagccaggncccggcccnngcaacgcagcngccggcgggggcgacnacngaggaaaccangnacngnagnaanaangnaanggagccgcngactagcnaccnagcncgcnagnnnacncaaaaagcggcgangagnaacgnagngncacccaacaccangggnggcagngngagcaangaccngaangaaccanngaaanggaaaggaanaacananaagg

SEQ ID NO: 157804 - DNA, 171 bp, Zea mays
  Clone ID: MRT4577_75493C.1
gcctctgtttccaattcctcatggcgcacggccaggtttctctgcgcgccgtgctctctgtcgcgctgctatggtgcccaagtcctggcgcgctcgtcgtcggctcggcatctcctcgagctcgcccctgccttcctgctcggtttctagtgctcgcgtcgacctcaatca

SEQ ID NO: 157805 - DNA, 185 bp, Zea mays
  Clone ID: MRT4577_75494C.1
ttgacttgcctaagtacaccacctgttttttctctatcacatccttccttcaaggaaagatattcatactactaatgactatcatcttgatttaaagcctaaaaacatatttgcatatgctaactgtacactcatgatattttatttcgtgcttccaaacttatatttaataacttttacaccac

SEQ ID NO: 157806 - DNA, 639 bp, Zea mays
  Clone ID: MRT4577_75496C.1
gattctattgtcgatctccaccggtgagagtcatgtgtgttcgaagccatgtgtgtactatgatgctaacacttagctacttcggacgtcgcatggtagccatctgtttttatgagattacgatcacttcttcttgcaccgctggagggtggaggatgtatccgccggcgagtacggatactccgagaccgaagtgatcttcgtcaccggtctgggagagttggagtgggacatgaaggatgagaaggagaagatagacaagcaggagctcggtgaggtcgtgggcatctgcgacggagccttcgtactctacgagtatgaccaggagaagaaggaccccgagcacgcgcactggcacaagattgcggagtaggtcgctgccgtgcaggtctgtctggtcatttgctacgtgttccacgagtcctctcagaacaggaaggaacacaaggactccgcggaggctaatgtatagaagaagcaccacctcctcttcagatgaccgtattaccggtcgaagctggagacgaatagctatttccggcgtgcacaaacacacagctgtttaattgtgtactggatgcgtgtgtattttgatggatcacaataatgagtccctctccggaccttgggaactgcttg

SEQ ID NO: 157807 - DNA, 330 bp, Zea mays
  Clone ID: MRT4577_75497C.1
aatggatttaacgttcggtcaggacctggcttctaaatagtagtttcttttgcccaagccctggcgccatctaatttttgccattggttgctgtcattgattgttgtcttgcgaatccttggttgttgtcttgctgtcttgagaatcctgtagacagtggggctagaattaaacaacttgaacatctgattgtacaagtaacctcttgtaattttcttttaacacaaaaggaatgatactctagagaaagatattgttgtccattcatgtcttgtatgtttccctttcttaacttataaaattaccgtattcttaattttctgcaaaagc

SEQ ID NO: 157808 - DNA, 243 bp, Zea mays
  Clone ID: MRT4577_75498C.1
catgtgtaggcttcgtgattaaaatgctcctaatcaagattgtttgcacacatgtatttataaaacagtgccagagaaaaatacagatgaacatgtatatacatatgggaatttgaattaaatactgtatcatactttcaaaggaaaacctaaaaatacgactagaaggtaacaacgtccaatttccagcctcaacaagaggaagaacgagcaacgtctggactggagaatgaccatcaggag

SEQ ID NO: 157809 - DNA, 299 bp, Zea mays
  Clone ID: MRT4577_75499C.1
ggggggtttttttaaaattatgttgcctttttcacgaaaagcgacaaaatacctaacgcccaggcaacagcgaaagaagacgccctatgcacggggaggactggaccccccagtcttagaaaccaaagacataccgatcattctttttaaaaaagactacccatattacactacaaacacccgccggctccatacgagacggaaagcgaaaaaacattacgccaaacaccgagccccggaaggccccctctagctcataacccaccctgcggcagctggggcgactaccaacccctgaa

SEQ ID NO: 157810 - DNA, 1804 bp, Zea mays
  Clone ID: MRT4577_7549C.1
attgggtccctcgaggccggccgggaccttctgcccgcgagcctcttcttccctccctccactcgcgtccaaattctctcctcaccacaccacccctccctccgacgcacgggtgcgtcgcagtgctaggtagagtgaccatgcaggcggcggcggtgacggtgaatggcgcgggcgacgtgcagaagccccagcagcagccgatggtggtgggggcgccgccgccgccggccatggtgccgccccattgggttgccataccgatgccgccgcacccgatggcgccgccccagttcgcggcggctcacttcgtgccgttccacgccgtcgtgcagtcgccgccgcgggcggcacctgtgccagcggtcgtcctgggatcgccggcgccgcatcaggccgggcaggaggagaacaagaccatctgggtcggtgacctccatttctggatggaagagaattatcttcacaactgcttcggctacaccggcgaggttgtggcaattaaagttatccggaataagcagaccggacagtctgaaggatacggatttgttgagttctacagccatgctgcagctgaaagggttcttgaagggttttctggtcatattatgccaaacactgaccagccctttaggttaaactgggcatcgtttagcatgggagataggcgctcggatgttgcttcgtcggatcattccatattcgtaggcgaccttgcttccgatgtcaatgacgccacactgctggaggccttctccagcaggtactcctctgtcaaaggtgccaaggtcgttatcgatgctaacactggtagatccaagggctatggcttcgtgagatttggagatgacagcgagaagacacatgccatgactgagatgaatggtgtgtattgctcctctaggcccatgaggattggcccggcaactccaagaaaatcatcaggtacctctggatcaaatggctcatctgctcgaccagatggaggagatttgacaaacacaacagtatttgtgggcgggctcgacccagatgtcagtgaagaggaccttaggcaggccttctcccagtacggagaaatttctaccgtaaagattccagttgggaaacagtgcggcttcgtgcagtttgctcagaggaagaacgcggaagacgcgttgcaagggttgaacggcagcactattggcaaacaggccgtgcgtctctcatggggtcgcaacccagcaaacaagcagtttaggggcgacaatggcaacatgcagtggaagaacgggggcgtgtactacgcggcgcccccgttctacaacggcggctacggctaccctgcggcggccccgttccctgatccaggcatgtacgctgctccagcctacggcgcctacccgttctatggcaaccagcagcaagtgagctgacctggactactgcgccggcctcgcttggaaagctggggcctggcctggcctggcctggagcggctgttaggtgtagctcttggtagaagaagatgaagtagacgacgacggtttcttaggtgagctagatatatataccttgactagtctcgtatagtgcgttttgttacacgtgctagctagggtctagcgccacccaccgagtgtccgacacacctattgactggccacgtacggtatgtcgaaatcaacgacaaaaggaattttcgatgacctggagctgcatgctgccttgaagcagcagaacaataaagctaatggaatcctttgcccctgcaatatattcggtccggcttgagtttaaaaaaaaaaaaaaaaaagcggcc

SEQ ID NO: 157811 - DNA, 440 bp, Zea mays
  Clone ID: MRT4577_754C.1
cccacgcgtccgcggacgcgtgggcggacgcgtgggtggcatcgatcttacttgatcgaccattgacgagcccactaactaccttgaccgtgactctcttggagctttatccaaggccatcatgcactaaaagggtggcgatatcattatcactcactctgccgagttcaccaaggatttgactgatgaagactgggctggtcttgacggtcgcatgactccttccggccacaactgggtccagggccagggagccggtccccgtcttaccgataaaggataggaggaggagaagtttctacgccctgggttacatgatctaatctaccaacaaggcttataagtcttttaactctgagctgcccaaaaagaaaaggaaaggatggccctcccaaggctggccaggaggtccttaccctccagggatattttcgccattt

SEQ ID NO: 157812 - DNA, 326 bp, Zea mays
  unsure (1)..(326): unsure at all n locations
  Clone ID: MRT4577_75500C.1
aacagcaagttctgcttttatgaacaccagcgggagcaagggcgggngggggcgacaaggngacgancaaggcccccggcaacagccccaacacggacgggaggcacaccggcgacacgagcaacgggaccagcagcggcaccaccaacgccgacggcgacgaccgcgaccccaacggccccgggagcaagaccacccgcgngaagggcgccaagcgcggaccgggccacggcaccaccgacagcagcccggggcggcacaaggacgagaaggacgcggaggacgagaaggggacggggagcacgcncgccggcaccaccaacggc

SEQ ID NO: 157813 - DNA, 387 bp, Zea mays
  Clone ID: MRT4577_75501C.1
agcaaaaagcataaatgattatgccgaacatgtgcggtcggccaacaaaggaaaggtgttacaggtcaggtggcatataagaaggcaaatgcacccaactgacacattctaaaagcgctacagataagcttgcgaagggaaaactaccgccgattgcagccacatgcaaccagagatcattgagccaagccattggtttcttcaatggctgccttgggttctcgccctgctcgcctcctatggggttgacggggacaggttcacataccttgtgccggaaggcattttatccttgcacatcggcgtcttggcaacttcagatgttgggaactcaacaaagggttcaccgggagcttttccatctgagcggatcgcaaatgaacattc

SEQ ID NO: 157814 - DNA, 356 bp, Zea mays
  Clone ID: MRT4577_75502C.1
aaaagggaaaaaactatatccttttataactaactatatattagctaaaaagcctattgtgatccttgaaacaaaatactctctccacatgtaaatatattttaggacagattaatggggtggaaaaagtttaatgcttctagttaaagcaaccaggctatctagctcttgattggatactaaaaagttcttatatttgtggacaaaatttagacacacgaagtccttatatttatagatagcgggggtagcaaaggttgcaaaccaaaaagaatcatagggctgcctttattatgtccggggaaacgagaagtattgcatgcgaggaaaataaatcaaattgtttttactactat

SEQ ID NO: 157815 - DNA, 727 bp, Zea mays
  unsure (1)..(727): unsure at all n locations
  Clone ID: MRT4577_75503C.1
aattcggcacgagggagaggtggggggtatccatagccgtgaacaaatcgaatagagagagagaggtggggggttgagcttgaagccgctgccgtcgttgttcacctccgccgctgatgtgcgtccggtggggatgaccgggagaattccccaaggagcgcggaacgcgggcgcgcctcgcttacaagagcaggagccagtcccattccgggtgcacctcatcggagcttggggggggagagagagaaaggtactctcacctccattattgtgtcttgattgcatcagttacaccaattgattcggttgaatctgataatttccctacatctgaccttcatccatctcgctcgttttgtcgctataagaaactctataatgctcatgcgttgcgatgacatataaattattcgaggaggtctaagttgctgctggtttaggtcgacagtgggctttcgttgttgctagctatcaacaaacatgaattgcatcaaacaataactcatgtcaaccatcaagcacgctatggattccttgaacatctttgcccatgcaaaattgggatgcgcttacagctacaaatgcccagccaaagtaatcagcaaaccttatgagttgaatgtcttcccaaatccgattagtgaaccgcgacgaatagatgtagcccagactctagggccccattgcaanagacacanagtcataaaagagtggggactacacagct

SEQ ID NO: 157816 - DNA, 438 bp, Zea mays
  Clone ID: MRT4577_75504C.1
gctaagagcaaaccggggaccataaaaaacaagcccaaggaagatggggaaaaagggcacacgctacaccgaccaaagaaaaaaagcgagatgcctcataccggggggcgggcgagccgaacacggaacagggcagaacacagaaaacaaaaaaacatgaggacacggggcatggaggccagtcacccgggtaccagacagaggaaggaccgcgggccgccactccccgtggtcccggaaccacagacaaaagatccccccgcacaggtaaaatgaaggagaaagcaggcacggaacatgggcctagaacacaggctggaagaaacaaccccaataccccaggttccgtggaaggggggagccccgggcgcgatccatccctacaaccaacaggcgattggagaggggaaaaccctagatacgggaacttaggccgta

SEQ ID NO: 157817 - DNA, 1865 bp, Zea mays
  Clone ID: MRT4577_75505C.1
gatcaaacaaagtgaagatacagatgttcataaagagcctccacactttacaaatatatctcaatcagagatgtataattgcacaagttcaggcagaatgtcatctgatgaagatcatggttcaggcacagtaaatggtgatttattcatactgaagcgcataatggtggagaggggaaatgcagcttacttgagtggattgcgggagaaatactttggggaattattttcaaatgcttccaggactcttgaaggtttgtcgaggatagaatcatcgactatctcagtggacatgctatatgatcctgatatccatctagaaaagaacttgtcagctactgaagaaccacttaagcatgtggctaggtttatagaatcttttgaatcagaatcaagggaaatttggctggtgtatcacaatgaaggccactcattatcaaaattgatatatacagctgaagaaacgaagttagtcactggcaacaataatgagagggtcagacatatccaagttttgcacccatcgaagtggtggcattggctaaggacaacaaaagctgggctaaagcagatgcaaaacctcttatggcagctgttgatgggactgaaggcttgtcatgatcgtaatatcacccaccgggatatcaaacctgagaacatgatcatttgctttgaggacatggagactggaaagtgtctaagagaggttccatctgaagcaaatcaaaataagctgaacatgcgtctgattgacttcggcagtgccattgatgatgacacgttgaagaatctttatggtccaggacctactcgatctgaacagacatttgagtacactcctccagaggcactccttaattcaaactggtttcaaggatcaagaagtgcaaggcttaagtatgacatctggagcgttggagttgtcatgctagagttgatgatgggttctccccatgtttttcagataagtgaccgtacacgcattttaatggatcagcatctcggagggtggagtgaacaaacaaaggagcttgcatacaagttgaggtcatacatggagttgtgcattttagtcccagggatttcctcgcaacatcatggcagtggtagcccagaacagggtcaatttgggttagcttcctggaaatgctctgaagaatcatttgcacatcaagtgaagatcagagatcctctcaagattggttttcctaatttatgggcgttgcggcttgcacgccagctacttgtgtggcatcctgaggatcggctaagtgtcgatgaagcactaaatcatccttacttccaggagccaatgtaatgtaaggagaggagattagtgataactaaccgacgaatcttcagctcggtcctttcaagttcaagccgcgtgcatttggttagaggaattcatgaatcgtttgtaatttaccatcctagctgtgtcataagatgttgtgaatataacatgaagtaaaagatagtagcatatgtgaaattacatgtgtaacgactttgcccttacaagccacagcattaggccagactgcctttggttgcaatcactaatgaggaagaacgttatctatttgttaatgtaaaaaaaaaaaaaaaataaaatataaaaaaaaaaaaagaattaaaaaaaacttgggtttaattaaaatcccttttatatcatgttaataatatgaaatttatatatatattatattaatgtcatttaataatatatgggggtctgcttatatattatatcattattcatccactatatgtgtatttctattaattattattatttatttactaaatataatatctaatgtgtaattttaacaaaatatgacataatagataaccattta

SEQ ID NO: 157818 - DNA, 281 bp, Zea mays
  Clone ID: MRT4577_75506C.1
gaagatgttagctctgcctgtgcctatgcagcagcatcctctcagcagcagaacgggtcgagcattgccaggaggaggagaacatctgaacagggtgtcaagcgaatgcgtcctttcaaacccaggcttccgaatttccttccgtcagagaaggtcgatctcaagcatcagtcggtgggcgatcccagagccgctgaggagtggatgctcgactacgctcttcggaaggaagtgaagagctggcccgtgctcagaagaggaaagttgagatgcttgtccag

SEQ ID NO: 157819 - DNA, 721 bp, Zea mays
  Clone ID: MRT4577_75507C.1
gacaaaccgaacgaaccaccaagagacaaacctcctcttccccttcctcttcgtcttgggccaccaccaccaccacaaccatcaccgagatccaagcagcgcaggcaagagcagagacgcgctcgctctccaccgtcagcaaccaaccaaaccaggcaggcaaggcggcgatgacgttcgacaaggtggaggagctccggcccggcacctacggccacaacctgcagctccgggtgctcagcgccaagcccgtcgtcctccacaggccgcagggcggcagggccggcggcaacatgcgcatcgccgagtgcatcgtcggcgacgacaccggcgtcgtcgtcttcaccgcacgcaacgagcaagtggacatcatgaagcccggcgcagtcgtggaggcgaggaaggcgagggtggacatgtacaaggggtcgatgcgcctggcggtggacaagtgggggacgctcaaggccgccgagagcccggccgacttcaaggtgaaggaggacaacaacgtgtccttggtcgagtttgagctcatcaccgtgatgcagtagtgattgaagaaggctcctcctcctcctccttgcctaggaggaggaggcagaggatgctcagcagctgttaggctgagcaaagcaataagccggccaatcatggctcatgttcttcacccccctctctccgtttactgtttaattagctcgaagttttgctagtcctg

SEQ ID NO: 157820 - DNA, 1449 bp, Zea mays
  Clone ID: MRT4577_75508C.1
cattgggtacctcgaggccggccgggttggccttctcctccccttcgcccttcctccctcctctctcagtctctctccggcctccctcgcccacagagtcagagcggaagccgccgagctcggagcccagcacgctgcacgccgccgccggccatgtcggtggatacggagcggagctccaccgagtcgtccgcggcctccgggctcggctacgaggacaccgcgctcgccctcaccctccgcctcccgggctccgaccccggccgttcctccccgctcgccgcgccctccgacgctgcgccgtctcccaaggcgcgggtggtggggtggccgccggtgaggtcgtaccgcaagaacgcgctcgccgactccagcaaggccagccgggcagccaatttcgtgaaggtggccgtcgacggcgcggcctacctgcggaaggtggacctccaggcgtacggcggctacgaccagctcctccgcgcgctccaggacaagttcttctcccacttcaccatcaggaagttcgccgacgacgagaggaagctggtggacgcggtgaacgggacggagtacgtgcccacgtacgaggacaaggatggcgactggatgctcgtcggcgacgtcccctggaagatgttcgtggagacctgccggcgccttcgcctgatgaaagattcagaggccgttaacttggcaccaagagccgcccgatgaggcgcaagcgcaactccaccgtcaccagtatgcactggcttttagtggcttggcttgttggaggaacgagggaacgtacttcgtcgctgttttgaggatcttcacttgacatatatatagcaatgtgtacagctgtcacctgctgcttttgcctgaggaaagtttgtagttccattactttacttatctgtagtgtctatctatctatctatagatccgaagctttgatatacacatggcggctacaatgtatttttgatgaataagaccaggccagagtaccaggcacaccgaaccgaacccgttcttccgcagctccacgcgcggttggcattttgagggttatgtggtggtgttgtgcttgcagtaggcgtgaaggctgatggcgtagctgccaattatttatacatctttattcgcgttgtgttgagctttattatatggttttgtttgagagttcatggctttgcatcctgttcctacgggatgctggtcagcttttcccttatcaagtacattctggtttaaaaaaataataatataattatttaataacaacaatttcttttaaatattattttttaaataataatatttttaaaaaattttcaataatttttaaaataaataaatatattttatttatttagggggggtcgccctttttatataccaatttttatttttcctctttcgccaaaattatttttttttttttttctctcaaattaaata

SEQ ID NO: 157821 - DNA, 417 bp, Zea mays
  Clone ID: MRT4577_75509C.1
cctcctcctccttcttcctcctcctcatcctcttgggtggatctcatcttcagatcacatccaagcagcgcaagcaagagaggagacgcgctccaccgtcggcaaccaaaccaggcaaagggcggcgatgacgttcgacaaggtggaggagctccggccgggcacctacggccacaacctccagctccgggtgctcagcgccaagcccgtcgtcctccacaggccgcagggcggcagggccggcggcaacatgcgcatcgccgagtgcatcgtcggcgacgacaccggcgtagtcgtcttcaccgcacgcaacgagcaagtggacatcatgaagcccggggcagtcgtggaggcgaggaaggcgagggtggacatgtacaaggggtcgatgcgcctggcggtggacaagtgggggac

SEQ ID NO: 157822 - DNA, 1549 bp, Zea mays
  Clone ID: MRT4577_7550C.1
tgccaatcgccaaagatagccacgccacctccgtcactcccgccacccgtgtatcagtaactgacccgcggccaccgcccgggcgctacggcgtcatggtcgcacgcccgcagcttcccttttcccttcccagtcgatagaagccgcgttccaccatggcccccgcccccgtacttgccggcattctgctcgccctcgtcgcaatggctgtcgccgtccacgcacacgcgccagcccactccccggaggcgtccgagtcaacgtcgccgtcggaggcacccgccggggcacctgatgatgccagggagatggagaccccgtggatgtcccccgccgaggctccggtgctctacggcgaaaacgccgcgcccgctgcttccccggaggaagaaggcgcgcccgccatggcaccgggcttcgacgctaacggacctgccgcagcctcgccggaggaagaagacgccaccgccatggcaccggactacgacgctaacggacctaccgcagcctcgccggaggaagaatacgcgcccgccatggcaccggactacgatgctaacggacctgccgcggcctcgccggaggtagaagcgccgacgatggcgccggacctgtctccctccgcgagcgagtcaccggaggaagcgccgacgatggcgccggacctctctccctccgccagcgaggcgccggaggaagaagcgcccacgatggcgccggacctctctccctccgcgagcgaggcgccggaggaagaattgcccacgatggcgccggacctctctcccgtcgcgagcgagtcgccggaggaaaccccagcgggagccccagaattcgagggcgcctctatcgccgctcccccactagatgacgcgcccaccatggcgccggcatttgctcccttcgggatcagcgagtcgccggaggagtctgaggccccagccggcgccccggaggaggaagccgaggccgaggccgaggccgagagcccatcctccgaaacagccgccgccccgctctccgaggactacggcgtgttagaagaggaggtcgtagtactctcgcccgacgggtcggccgcggtcagcagcgaaccggaaaccgaggagagcccggccaaggcgactcccgcggccgcggaggctccaggcccctcatccgacggcgaggacagcggcgcgagcacgggcgccccgtgtcgcagcctcgtgtctgccgtcatcgtcgcggccatgtgcgccgttgctgctttttgaggtgccgcctgcgcgatcgatgaggcaccagaccccgcggtggagataggggacggatcgcagggcagacatgcatgcgcgcggcgagcgatgtaaacgatgcatgtcgtggaggggggatagcaatcagtggtattctttcaatacttcctcccaatcggaccatgtaaacgatgcattcaggtactgatttgccccaaaaggatgcatgtaaatgatccggtcattcgaacctcgagcatggatggatgaatatatgggggaaaaaagctatgccacattcggttcagttc

SEQ ID NO: 157823 - DNA, 236 bp, Zea mays
  Clone ID: MRT4577_75510C.1
gagactctggaaaagcatggaaccaaagcctcaaggcagtgctgtgcagccggctacgcatcgacctctcccggcggtgcccagggtgcgcgtacgacgaccaaacaacagcagaggagaacccatgcatcggggcaatgtcctcagttttggaatgatggggttcatagcagtacagcatgcaaccatggggacagctcgaacagaaagcgcgccagcgcatgaatgctccacga

SEQ ID NO: 157824 - DNA, 515 bp, Zea mays
  Clone ID: MRT4577_75512C.1
tttattatctctgcgaagctccaaacatggtacataaaactgtactatggagccatatcgtataagaaaattaagagaggacaccacctatgatgggttgctagctagaacactgctgtatatgtgaaacaatggcggttgtatggccacattagttggacatgcaaaagggtgccatagcaacgcgcaacgtgctgggagaacggtctctactgtggcttgtgacaagaaggtaccataggttcacaccatctagctggctgaatggcagtagttgttgctgctgtaataagcaggagagttcaatgctgctagttggttgaatggaagaaattgctgggggtaggcagcaggtagctggctgaatggaagttgttgttgttgcaaataagatgcagaggtcaatgaacctagctgggtgaatggaagaaactgttgctgttgagagaaggcattaaggcttgctagcacaagttgttgtaactgttgtgccctgaagttttggcctatacatg

SEQ ID NO: 157825 - DNA, 522 bp, Zea mays
  unsure (1)..(522): unsure at all n locations
  Clone ID: MRT4577_75513C.1
gctgccgtctcctctcctctcctctcccccgcatccacggctcgcaggccggcaggcagccacttcgacgatcatagtcgtctctctcctccccgctcgtgccgcctacgctgccgncggcttcccgtgcggctaggaggatgcaaggtcacgggacgcgtcgccggagcggacgacgaggtcagtcaaggtgcggaatgcgacctcaatgactcgaggcaaggtcagcgtgacctgcacgaggtcatccatggcaggactaagaagtattatccttctatgcagcggctcaccctcccccttcaagcctggaaaaggaggtaaagcagttgtcctcagtcccagagggcttctgctaaaataatgggagaagggttctgggtcactgacagtggtctttaaataattaaggacactgggccactacaggacactgttcttcttccaagaactgggttctctcatcctctaccccatggtctaatatctggctggctaccaatacttccggctaacaagggg

SEQ ID NO: 157826 - DNA, 282 bp, Zea mays
  Clone ID: MRT4577_75514C.1
cttggaggtctggactctggagacggcgccagacgcaagtggccaggccagtcgacccacaatcccactccccatttgattagaagctcctgtgcagctggatcaccctgcataatctattttgttcttggcctagccgccacctagcgctcgcacgctatggcgtggccgtggtcaccggcgccgcggcaaaccgcgcgcttcgtcgtcgtcgtcgtcgtcgccgtcgttcttctcttcgatgctgcccgtggcccgtgcggcggcgactagtgagtcgtc

SEQ ID NO: 157827 - DNA, 151 bp, Zea mays
  Clone ID: MRT4577_75515C.1
atggatcacaaaagcgaatgaatatttccatacccatcacgttcaacatttattggcagtcagggcaaaaaataatatttcgccaaccttggtactagagttacctactaacgacttcgacttcccaagggatttcgggggttgattgagg

SEQ ID NO: 157828 - DNA, 699 bp, Zea mays
  Clone ID: MRT4577_75516C.1
atcacagcaccgccggcggagcataacgccaacaatagcagcagcacgcgtcgccgagtagcagggtccccacctcagaggttcgccgccatgcctagaggattgaagaaccatttgacgaggctcaatgcgcccaactattggacgctggacaagcttggcgcagcttttgctcccgagccatcttctggacctcaccagactaaagagcgcctgccactgatcctcttcatcaggaacatgctcaactatgctctcacataccgagaggtcatttccatcgctgatgcaacgccatggacttgtcgatgtgaagctcaagacagacaacacctaccctgctgggttcatggatgtcctttccatccccacgacctgtgcctactacatgctgctgaacaatagccagggacgcttccgccttcacccaatcagggatgaagatgctaagatcaacctttgcaaggataattctgatcagtctgggcagaacggtatcccgtacctggacacggatgacgggcgtcccatgcgctaccctgacccgctcatcaaggtcaacgacaccgtcaagatcgatctggagacaacaaaattgtggacttcatcaaggttgatgttggcaacgatgtcatggtgactggcggaaggaacactggccgctgtgggtgttatcaagaacagggagaagcacaaggg

SEQ ID NO: 157829 - DNA, 360 bp, Zea mays
  Clone ID: MRT4577_75517C.1
gttttgagcattcagaaacacacttttcgcagctacctaacaacgactgaacaggaatggctaccaagatattatccctccttgcgcttcttgccctttttgcgagcacaacatatgtcaacattattacacaatgctcacttgcttctagtgccattataccacatttactgcgaccagatacttcaatggccttcgaacacatagctgtgcaagcctacaggctacaacaagcgcttgcagagagtgttttacaacaaccaaataatcaattgcaccaacaatggcttggcacattgaaccatacaaaccatgcgcacacaacagcaacaacagttcctaccagcactgagccaacta

SEQ ID NO: 157830 - DNA, 320 bp, Zea mays
  Clone ID: MRT4577_75518C.1
acctatcttgcggtggcggtttttttttttattttttttatggtcttttttacataaaaacaatggccccgatgaaaaagcttataccagttgtgctgacactagctacttacaaatagcctgtagcatccctggcgctgactgaattttgctttactcacgcgctgcattggcggttgtcacccagttttttggcttacgggcataagcggtaaagactgtttgctgggcgggcttatacttgtacggtttatggctgtccacttttcaccattatcgacattgttgttttctgtggggaagtcttatgccctcacaat

SEQ ID NO: 157831 - DNA, 774 bp, Zea mays
  unsure (1)..(774): unsure at all n locations
  Clone ID: MRT4577_75519C.1
gacgcctgcaggttccggtccggaattcccgggtcgacccacgcgtccggtggtggtgtgtactgacgccgcggcacagctctggagctgcgtggtgtgggagcttcattcgggcgccaacctgctcacctaccgaggcggccaagcggggccgcgaggcctggcgctactcaatggcgagtacctgctggcggcgcagcagggcaagaactacatctgcgcctgggagctgcagcgtaaggatcagctccaacagaaaatcatgtgtcctgggcctgtcacctgtctgaccacagcacctaatggcttgtatgtcctggcaggaattgcagagagcatctacctgtgggaggtctgcaccgggaacctcctggtcatcctcagccggcactaccaggacgtgtcctgcctgaagtttacaggggatggcagtcattttgtctcagcgggcaaggactgcttggcgctggcctggagcctctgcagtgtgctacaggcagacccatccaggatccttgccccaagacatgtctggtcccagcacacgctcccaatcacagacctgcactgcggcttcggaggccccatggcccgggtggccaccgcttcattggaccagactgtgaagctctgggccatctcctcggaggacctgctgctgtctgtcttggttgacatgggcatcacatctgtgaccatggacctggccgagcccacatattctgtggaggcagcgatggctccatcttccnagtggacctgtgcagctggccc

SEQ ID NO: 157832 - DNA, 542 bp, Zea mays
  unsure (1)..(542): unsure at all n locations
  Clone ID: MRT4577_7551C.1
aataatcattctgggatcatggaatcatgatattcatatggtaaccagcccatcngctactaaccacccaactaggaatctctcacaataacccttctgcttctctcaggtattctaagaaaaggaatcaccnnncacgacccacaacacaccacaccannnacacacacacnannaaagtaaaaacaaacgatagtattaaacatgcnnaccgcccacctcacgacgccnncccggggaaggcnngtctagaaaccaatgaccggcggcttgcgaaccccgcgccggcgaacggcgaacgaaagcccgagggccggaggctgcgccgagggcggcnggcgcctgccccggagggcgcgaacggtggggngtcgccggccggggtgggtggagaacgagacgaggtcggaagccttcgcggacggcgcagaggcggcggggccctcggtgggcggggccggaggagaggccagcggtgacggcgccgcggcggtcggcggcttggcggccggcggcttggcggccggcgccggggctgtggc

SEQ ID NO: 157833 - DNA, 431 bp, Zea mays
  Clone ID: MRT4577_75520C.1
gcagaatcgatctcctcccaaattcggcacgaggcgacgacagactaggcttcatccccatctcaaccggcggcagcctagggcttcatcccccacccccaagtccatgtcatgtggatctgaatcagcccactcccaaatctccaatccactcgccggcttttcctcgtgcccagttcacgacatttgctcgaggatctgaccaatgtcgtcttctgctcgtgttcctcgcagccgctcagattggagatcaagtggaatttttctcaatggtcggagagggtcaagttggtggacttgcaccccacataggtatggatgtcgagcctgtactcgaggatctgaccaatgtggacttctgctcgcgttcctcgcaggcgctcagattggagatcaagtggaatttttctgaatgggcggagagggtgaag

SEQ ID NO: 157834 - DNA, 122 bp, Zea mays
  Clone ID: MRT4577_75521C.1
cggaccgtggcggccacaacgtaaggaggtttcgtatgcaaaggcatatgtccttgaggatccttaatgcgattcaacaagttgacgactacttcacgcaacatgttgacgccactaggttg

SEQ ID NO: 157835 - DNA, 627 bp, Zea mays
  Clone ID: MRT4577_75522C.1
acgccgctgttacgtgggtctacctttactgggtctactcctggatcctgctctatttaattatccttttttgcgccaaagcagccaaaccgccaatcaccacaaattgtagattaatgtttccagcattagcttgctgctcctggttccatacctgcaatcagttgcaaatacaccatgttttgtactaccccctcccccaattaaactttataattaaatgaaaaagtgtaggagtttgcctagtgaccacaaagcattttttggtgcattggaatcttgtgtatgcttgaatttaaaattatgaattcaaatgttgttgaattacatgcaggacccataaactttgaattattatgatgtgaaaaatgatttataatacagtatgtgcacaagtgtagatagatataagaaaatgaaatataggggaagggatcattggtagtgtcaccctaaagtgctggaaaagttttaaggtgcttcccatagaacaacttcttgggggagcactattggtatggaattgctcttattcagtttttttggggtttctgaggatcctccatgtcccctagattattgacctcactttgttctttgtatcgatttattgtgaggcagttataa

SEQ ID NO: 157836 - DNA, 600 bp, Zea mays
  unsure (1)..(600): unsure at all n locations
  Clone ID: MRT4577_75523C.1
cccagcgtccgattctccgcgtgacttcaggtgtcgtcgccgagttgtctccggccgagggcggcggcgcgaccggtaaccagcgtcagcgtgagtgtgacaggcgacatgactcgcggcaaccagcgtgaccgcgatcgtgagcgcgcggcggcgcggaagcccaacggcaaggggccccaggacgggctcaccccgcagcaggcagcggccggcggcaccgggacctccacggacaacaagaataaggcaggtggcaagaagtaggccgcagcggcgagcggcgccacctctgtacgattatcgatccatgcctttagcttgtaacctgttcgcatcctcgtagatgcgatgcttgttgggtcataaactcgttttctgttactctgatatcaaaatttggtgatgagaataatacgtggtgttctggttttgngggttattattttcttctctttctatcgntttctgttctgttccttgagtggccagccagtcgatggatgggaatcctctagtttagagagtttagaggatgaactagggtgtgaaggagcttttgcttgctattgtgaacaactggatatgatagcttttgaa

SEQ ID NO: 157837 - DNA, 687 bp, Zea mays
  Clone ID: MRT4577_75524C.1
cattgggaccctcgaggctgtcccggaggtggacatattctccgcgtgacttcaggtgtcgtcgccgagttgtctccggccgagggcggcggcgcgaccggtaaccagcgtcagcgtgagtgtgacaggcgacatgactcatatccttcccaaaccctgtttagatctgcgcgttgggggctcttcctctaatccatcctttgcttgtatacgatctcgatctgtttcgttgtttcgattctgttattgccctgttcctctttccttaactcgcgcgcacgcggcaaccagcgtgaccgcgatcgtgagcgcgcggcggcgcggaagcccaacggcaaggggccccaggacgggctcaccccggagcagcgccgtgagagggacaagaaagcgctggaggagaaggcggccaagaaggcgcagcaggcagcggccggcggcaccgggacctccacggacaacaagaataaggcaggtggcaagaagtaggccgcagcggcgagcggcgccacctctgtacgattatcgatccatgcctttagcttgtaacctgttcgcatcctcgtagatgcgatgcttgttgggtcataaactcgttttctgttactctgatatcaaaatttggtgatgagaataatacgtggtgttctggtataaaaaaaaaaaaaaaaaaaaaaaaaagcggcc

SEQ ID NO: 157838 - DNA, 409 bp, Zea mays
  Clone ID: MRT4577_75525C.1
attattactatggtgtcatcatttgccttttgttgctctaattatatatgatgtggctgtttgcaaaaccaatccgattcatccatcaggtcagttattactgcaataacattatcaggacccaaaacaatgaacagagagaatggcagacattggcaggaagtattttgcttgtcagggacaaggatgcctgctctcaccatacacctaatatctggtatatcacttcaattagatcagtggaagatattgaaggacaacatcaaagccataaatgaggcaatcgaggaaaatacatgatgggagccgccaagcagtcacgtgatgggcgaacttttgcttcttctctgtttgaggcctgatgtacggaagtagtttttgttgcccatatgctgccgtgttgcttttg

SEQ ID NO: 157839 - DNA, 2349 bp, Zea mays
  Clone ID: MRT4577_75527C.1
ggccggccgggtccggaaaaacacagaagacaggcagggcggcagcgcccacctccatctcccagtcccaggctcccagccccgctccccaaatctcagccccgctccttcccagtcccagtcccagatccaggatgtcctcctccgacccggacgacgcccccgacgggggcgaggactcgcccctcttccgccgcagcggggggccgtcctccggcggcaccgttggcgacgtccccgtctcgcagtcgctcatcaaggcggcaagcaacgtgtgcttctccctcttcgtgctcgccgtccttgtcgtcaccgtcgtcgccgtcacataccagccgccggacccctggctccagtcctccgccgccatcaccacctcgctctcccgcgtcctccccaactccaccttcctcgtccccgacgactcgctcctccccaccggcgaggatttcaactcctccaccgccgtcccagccccggtgcgggatgacgatgacgcggctgcggccgtcagcgccgcctccgccgcggccgcgggcaacaggacctgcgacccggacgcgccgctgaactgctccgacccgcgcgtcctcgccgccgtcaaggcgttcaacgccagggccttcttccggaagtccatcgtgtttctcagctacgagcgccggtgtccggccccaagcctggccagtgcgacgtcgcctggaggttccggaaccgccggtggaatgtcgtggcgccgctacagggactaccgtcgcttcagcctcgcctcgggcgatggcgcgctcttgacatcgtcagcgtcggcaagttccgctcggggacgaatgcagctcgccggccgtatcctaagggctcgaagtcgaagaggccccgcgtgtcgccgccgcctgtcgatgcggagatcaatgacacaatccctgtcgtcggatcagaggcagagttcaagaagggaaagtacttgtactacatgagaggaggtgaccattgcaagagcatgaaccagttcgtctggagcttcttgtgtggactcggcgaagccaagttcctcaaccggacgttcgtgatggatctgaacatctgtttgtccggggcacacacggtcgacggcaaggatgtggatgggaaagatttccggtactatttcgatttcgagcacttgaaggagagtgtgccggtggtggaggaaggggacttcctgaaggattggaagcgttgggataagaagaagggcccaggacggatcacagtgcggaaggttccatcgtacaaggtaacaccaatgcagctgaagagggacaagagcaacatcatctggaggcaatttaatggccatgagcccgagaattactggtaccgagtttgcgaaggacgagctgccaaagtcatccaaaggccttggtatgctatctggaagtccaagagactgatgaacattgtgactgagattgcaggtaggatggattgggattacgacggtttacatgttgtccgagggtggaaggcgcagaacaagcaaatgtatccaaacctggattccgacacgtcgcctgatgcgctcgttgataaggtgaccaagcttgttaagccgatgagagatctctacatcgcaactaatgagccattctataactacttcgacaagctcaggtcacacttccatgtccatttgcttgatgattacaaggagctttggtcaaacactagtgaatggtacaacgagacaacaacacttagtcggggcaaaccagttccattcgacgcctacatgagggtgattgtggacactgaggtattttacagatcgaagacacaggttgagacgttcaacaacttgacaagggattgcaaagatggaatcaatacgtgcaacttgtgacacatgagttcacgcttcggatcatttgttggtgttcaatatacccttctagtggctggcacatcagaactcagtggaactcatccagggtttgtcttttggcattaccatcgttatgtatttcttgtcatggaatgtttagctggtttcatgtttatctgagttgtgtgctctccatttttttttcttttgtagtttatgtactactcttccagagtccagacgtccgaaaaatttgtatttagtgggcaatctgcaacatctatgctctctgtacccgcactaaattaagtgagaactatagcttcacctttacagtgtatctgttttcacgagtcacacgcctcttgcccgaatatttggaggaaatgaatttgtcagtgagcttatatgacactagagcattgtaaagatatattgtgcccatcaaagtatgaaattactatctatgctcagcctgtgtaacctag

SEQ ID NO: 157840 - DNA, 586 bp, Zea mays
  unsure (1)..(586): unsure at all n locations
  Clone ID: MRT4577_75528C.1
cagcgggagtatgctgatatagtaagtgcaatcaggtcggctatgcctggggcagttgtgtttggtgattatgctatcgaaggtggtgaaatgttttcacatgaccgggaaaccagtggcccaagtgaaccgagtgggtctcttctgacaacattctttctatttcatatgctcagcagtagtccgattagatcaggtgacgagccaggaggcacatcaaggggcctgagaaggcatagaagacgttatctgtggggagagaatttgttaagtctccaatacaatgatgatgatgatgatgatgatgagggggaggagggcgaaggagatgctgtagatgaagaagttcagagaccaaggagccgccgtaggttcataagatcaagatcagaggagcgagtataatacattggtggcttgtggtaattacattcttcgctgctgtgaagttcttttgccgtgaacccatgatgactncttgcatgacagtggatgatgtgcttncttgcattcttaaaatgctgcgcacattcttgcaatcaaagacctaaaggcttgtggacctcaagttcaagtttagatgact

SEQ ID NO: 157841 - DNA, 216 bp, Zea mays
  Clone ID: MRT4577_75529C.1
cccggaaggtccggtcccggatttccggggccacccaagccttccggggaaagcataaggagcccggcaaggccagcctctctgggccaggaccggctggcacccccgcaaatttacaaccacctgaaggttgcggcctcccacccaatcttgaaccattaggccgggccaaggtgccggttgggcccttctttagcggaggccttcaccttttaa

SEQ ID NO: 157842 - DNA, 440 bp, Zea mays
  Clone ID: MRT4577_7552C.1
ttttttttttttttttttatataataatagagtttatagagataaatgtcacaataacatcagattacttattacatagtgtaagtcttacaaagtaagagataaatatagaacgaactaaggtccatccttggcgccataaagtcaactaggagatgccacttagatcaaatagaactcctcattgtgcggctcctcttgaaccacctgttcttctccgaggatccctgggtggaggcgaactcgaccacgtgcggatggagctttgctacaatgccagcgaggaattgacccccgatgtgcccgacttcgcgcccaacaccgttaaaaacttgttctgcgcgctgcagcgaactccgttgactgggcacgaggtcgcaatcacgacagcgatgacgtcaccagcgctctgattctctcagttccccgcgcggtgctaa

SEQ ID NO: 157843 - DNA, 279 bp, Zea mays
  Clone ID: MRT4577_75530C.1
ctttgtccatcaaagaatataaagctacaggcaggaccaccttcaatcttcggacttcagatgccataaacattgctgttgccagcgaggttgctgaacaggtgcctggcatggtattacaggaggctggatcataccagtctaggcagcatgaatagcatgagcatcttgcctatcatatggattattatctacaagagcttgacagaacaacgatagacaggcatgctggtgatgctcaaaactaaagatttattgaaaacatgctcaatccaaccg

SEQ ID NO: 157844 - DNA, 267 bp, Zea mays
  Clone ID: MRT4577_75531C.1
cttccttttttttttttttttttttttttttgcaggggggttaatgtcaaccaaaggttttctttgcatcatatcttaccagggttccatgggcaaagagttgatttaatcttccagtcgcaacgaccaacgagcttccagaaacgcctgtggtcttaggatggtcaaagttcaatgccttgggccttggtacgccccctatttgtaaagggggagcgggacttttagtcggctctggaaaacgcgcagccgctcatgtatggatcc

SEQ ID NO: 157845 - DNA, 349 bp, Zea mays
  Clone ID: MRT4577_75532C.1
ccggaaaaatcaatcgcaaaaccccaaagtgcccttgggacaaacggcccaggcgacgacaaaccaaaacaccagtccagtccagtccagcaccttttccggttaaagcaaaatgtttgtttaatccccacagcaaaaagcaggggacagttagcaggggattttggaggtaaaccaggtcttgacttggagcggccctttgacaagttccacggccacttccagcagcaccgtcacccaaaggcagcaggggcttaaacaaaatgggcagcccgatgatccaaatgacggccccaacaaaggaaacaaggacggcaaccaccccaaagggcaggcccagaacccaccc

SEQ ID NO: 157846 - DNA, 255 bp, Zea mays
  Clone ID: MRT4577_75533C.1
ctgatctgacacgcggccgtctgttcctctgcgcaagctgtggaactgtacatgggattgttcttgtatttatacatgctacatgagaattcttgtgcataccaaaggattattcgtatgctaggctgacaaaagattctaacgtgttagtaggtcccgaaggtattgggatctgatgtgtcaacagggcataaccactgtctacgaaacttggtcttgctacggtttaacatctgacctactactctatcatgc

SEQ ID NO: 157847 - DNA, 345 bp, Zea mays
  Clone ID: MRT4577_75534C.1
ttagagtgaaaaggtacaaatatctagggctaagcatgtgcctgacactgtgccacctagagtgaaaatgctaaattaattgctaggagatctatgttgcactgtccagaaagatatgtgattacttgctggattgagagtaaatgttaattgtagcctagaatgaaataaaactatgctaggctaggatttgagtcgcagctctattgcgacctaaactaaatgttgtgctgctaagtgtgactaaatttgcaacccttacattaagtggcatattaatgctactagatgtgagatttatgttgtgtatcatgatcacctaccttattaaaaacaaatgatcac

SEQ ID NO: 157848 - DNA, 359 bp, Zea mays
  Clone ID: MRT4577_75535C.1
cgcgtccaaccttcggtcattttttattattcgatccaaggtaggcacccaagacctttactcactggggatcgatatggctcagggacaaaaagaaatttatggtgaatacgaccgtgaacgaggagctcgccgacaagattgcgctcgtcaataagaagccgaaggcggaaaagcgggtctatgctggtaagtacgctaccaacgaatgcggctagggcaagaggggctagattaagggcaagaagagcgtcgagacttattagatctacatcttcaaggtgctgaagcaagtataccctgacattggcatctccttcaaggtcatgttcatcatgaactccttcattaacgatatc

SEQ ID NO: 157849 - DNA, 125 bp, Zea mays
  Clone ID: MRT4577_75537C.1
gcgcaggcggcctagcagaggtgcaaatggtcttgcacaaacgtgactgcatcctgtagctatagatttaaccggatcatttaggctctataagcgagacgctctggaagatctatattcctcat

SEQ ID NO: 157850 - DNA, 329 bp, Zea mays
  Clone ID: MRT4577_75538C.1
ttgccgtggatgagcacaaagcctaccaagggttcacatgctgtgtaaattgaagaatctacatgggcccattaaacaatatggccttgtgtggtgcgccaggatagaatcatggctgaacaaaaataatacgggggttcacatacctacgattacaagtgaaactgttatcttcacaaaggctgggggggtgcacacaggcggcatgggagattacctacatatcgtgggttgtttacgaatggtggtggtagaatttcaccatccttcttggcaaagctccaccaaaggtacgacagggggatagctcacagctaggcaaatagcac

SEQ ID NO: 157851 - DNA, 510 bp, Zea mays
  Clone ID: MRT4577_75539C.1
ctgagacgaacgctgacgccgactgttactcgagcacaacacttaacaaatcgagtgttaaactttaggtcgaacgtgccagagcgcgcctgagagcgggccgcgttgcaccccgctggcctcgccccgccccctcctccccgggttgctcgggttaggtttgacgctcccccggagttcgagtaaaatttgacgccgcctcacacgagaggtgccgggctgtacgtaagcggacatccacgaagataggtctttctggtctgctaggtcaccctcgtttacacttatacactacaacagagaccatcaacaaggctgtggagagtcgtgtaagtcgtaccgtggttgtctgtaaacgtactaagacccagttctggttttcgttgaagacatgtgcctcccagaccgtccgatatcacaacagaagtgtagtcgacaagaggatcggtttttcaggagtagttctatattgttctgttaaacgattattacacaattattattcttatt

SEQ ID NO: 157852 - DNA, 670 bp, Zea mays
  Clone ID: MRT4577_7553C.1
ttttttttttttttttcgcttttttttttttttttatctttaagccaggctcatcgaacttcattacgaaatggtctcaccggtgggtagaggtcctcaacttccaaaacggtttccaatgtcaacgaaactttgaggatgggggtgattgcaaaatgggccgagttaaattacatcgaactgatctttggtctgatctgggttcacagatcccgtgtggtaggttatgaggcatctctggggggtcaagatagatttaatcatttcatcggttggcaggcttggctcctttggcctgctgtttggaaactttgggggcagtagatttgcccataggaggcttgacggcagatttcttggcagcctcggctttcttcttcttctcttccttggcttttcggatggcttcttccctttgggcagttcgaacctcaggcttttggtttcgtcgtgcaaggatggtagcgagatcagcaccaacgatgcccctctgagctttaatcgacttcttcgacctcttcttggcaacctcttcggttatacccttgcgtcggacccgtcggaaaacgacggtccatgagagctttcgaggattttttcggtgaaggtgaagactttcttccttggaacgaatgaaacggtaaaccttcgagtccttttggacgtaaag

SEQ ID NO: 157853 - DNA, 532 bp, Zea mays
  Clone ID: MRT4577_75540C.1
gccggccgggtccgggtctccagcgagggcgacgacgacgccggagaccaacggccgtgcgtcctcgctccttgtgcgctgcgttcgcctccatagcttctgcagtgtgtaccggtatctatggttttccaaagtctcgaatatttgccgccgtgaatgtcgccttcgccctcgctcttctccttaacccggacgagaggaagtcagtccatgtcggatctgaatgatggagctgcgacaaggcgaagggcggagagctcacatgtctcctactgctattggaagcgagctgttgctggtgtgcaccatgcgcgcaagatgttcgatcaaatgcctaaatagatatttggaatacagattttagtataatatactccgatttccagtaatgtgctggaatgcagatttttttaatataagctccattttcaataacgtgctacacatgtacacatgactgctccttcacactgacaccattattatatattttccttgatgcacgaaaaaaaaaaaaaaaaaaaggccccta

SEQ ID NO: 157854 - DNA, 481 bp, Zea mays
  Clone ID: MRT4577_75541C.1
ggggaaagaaaacatgttcagttcgaagtaactgaaattgataacaaaatatccgggggccaaattgcaaactttttttgggcagaggcccatacccccaccctaacctgaaaacacccccattctgctacatgattggggccccaagaaggcaacctaaacaaaactttttaagttacaacggggtaagccctacagggccttacaaaaaaattcagctttagccaagttaagggtccccagctcctaatcaaaaaccaaagaaaccaagctcagtccccctttccttttaaaagggttcaaagtattggtttatgattggcacagggggcaatataccagttcctgaaccaatcccccccataaaataagccaggacgggcaatgccccaatgcttacccccccaaatgccccaccgggggggatgtatcggttaagttccttttgcaagttcgactcacgagggcctggcatcaccat

SEQ ID NO: 157855 - DNA, 2363 bp, Zea mays
  Clone ID: MRT4577_75542C.1
attgggtacctcgagccggccgccattcggttcggttgcttgaccgcggcgagggggcagcgtcgtcggccgggacgggatggacgacctcaagcagatcctggcgcggccgatccagcttgccgagcaggtaataaagtggtctgacgaggcctacacgttccggcaggagtgcatggagctcaaggccaaggtcgagcgcctggccgtgctgctccgccaggccgcgcgcgccgacctctacgagcgccccgcgcgccgcatcttcgacgacaccgagaaggcgctcgacaaggcgctggccctcgtcgacaagtgccgcgcgcacggcctcgtccgccgcgtcttcaccatcatccccgcgggctccttcaagaagatgaccaaccagctcgacaactccgtcggcgacctctcctggctcctccgcgtctcctcgtcggccggcgacgacgacgacgacctcgacgcccacatcgggctcccgcccatcgcgcagaacgagcccatcctcttcctcatctgggagcagatcgccgtgctctacaccggcaacctcgaagcccgcgccgacgccgccgccagcctcgtctcgctcgcgcgcgacaatgacaggtactgcaagctcatcatagaggaggacggcgtgccgccgctgctcaagctcgtcaaggagccgcacctcgaggggcaggagaactgcgcgctcgccatcggcctgctgggccgcgacccggagtgcgtcgagcagatggtccaggccggggtgtgcctcgccttcgccaaggtgctcaaggagggacccatgaaggtgcaggccatgctggcctgggccgtctcggagctcgccgccaaccaccccaagtgccaggacgccttcgcgcagcacaacgtcatccggctgctcgtcggccacctcgctttcgagacggtgcaggagcactccaagtacgccgtcacgtccaagatgtcgatacactccgtgctgatggacagaaagaacaacgccgcctctgcggttcagccggacttgctggatgcaggggagcacgccggcatgaggtatccgactggacacgttccccagggcaagaacgagatccacagtctggtgcagtccaccatggctgcgaagcctaacggaggcagtggtaagcacagcaacatatcatccactagtaacgctggtgtcgcggcaacgaagcagcacaacgcgtcactgtcaggaacgagtacaaggggcagggagttcgaggaccctgagacgaaggcatacatgaaagctaacgcagccaaggcgctgtggcagcttgccaagggaaacgccgctatctgtaagaacatcacggagtcaagggctctgctctgcttcgccgttctcctcgagaaaggtgaaggtgacgtgcagtataattccgcaatggctctcatggagatctgctgcgtggccgagcagaattccgacctccgacgatcggcgttcaaaccaacttctccggctgcccgggctgttgttgaccagttcctacgtgtcgttgagaaggccgagtacgacgatctcctgattccctgcattatctcgctgggttgcttgtccagaaccttccgtgctacagagacccggatcatcgggccactggtgaagcttcttgatgagagggaagcagatgtctctcgggaggcagcgattgcactgaccaagtttgcgtgcacggataattacctgcacgttgaccacactaaagcgatcatcagtgcaggcggagcgaagcacctggttcagctcgtgtatttcagcgagcaggtggttcagatcgcatcactcacccttgcatgctacatcgcacacaatgtcccggacagcgaggagttggcacaggcggaaatcctcacggtgctcgaatgggcttccaagcaagcttacatggtgcaagacccagtaatagacaacttgttgccagaagcaaagatcagattggagctgtatcaatccagaggcgcaaaaggctattattagattacctgctgtgggaagggaattttaaggcgttcttcttggatcggccaagtactgtatatacatccaacggcttctatgtatactctggctaaacctttttttattcccggcatggcaaaagttgttgaagttacacacctctggttgggttcttgatatagggaagtaagttttatttgtaggcttggatgttcagaactccaatttctcttgttggtggtatagtttttggaagattagcatcttgtgctctctttggcctaaatgatgtatcgtgtatattacatttcactcatcaacatgaaaaagttcatttaaaaaaaaaaaaaaaaaagcggccctc

SEQ ID NO: 157856 - DNA, 315 bp, Zea mays
  Clone ID: MRT4577_75543C.1
ggcccagtgcaatggggggggggggggggttttttatctcggtttcccggggggtggactttattgttgggggtttaaaggggggggggccatcgtatatgcaagtttttttttttacttgggggccggggggtactttttttattggggactacctaggttgggtttttttgaccttgctttgtttaaaatccaactggggggggtgttttttttactaacgagaggggtaattatttttttttgccttggcccacttttgaagacgtcaggcgggaaacctccattcattaaaagggccggcggggccttttt

SEQ ID NO: 157857 - DNA, 244 bp, Zea mays
  Clone ID: MRT4577_75544C.1
aattaagtgcatgtacccaaaatacacagaattcaagctaccacaaatgaaagcacacccatatcacaaggcattgcacaaaatgataacgacagaaaacattgatctggtaaaactattactacacgccatgaccaatataatgaggactgccatagtaaggacttaaatcacccattatataaaagaacattgaaaatctaataatcaaatttcaaaaactagatttttaacaccactattc

SEQ ID NO: 157858 - DNA, 790 bp, Zea mays
  unsure (1)..(790): unsure at all n locations
  Clone ID: MRT4577_75545C.1
cgccgcagcaagagctccgccgctcccctcccctcccctctcctcgccccctcctccccccactccctcctcgacctccgagggaaggaatcggagaggcgcacgcggcggccatggcgtccagcgcttcccggttcatcaagtgcgtcacggtgggcgacggcgccgtgggcaagacctgcatgctcatctgctacaccagcaacaagttccccaccgactacatacccacggtgttcgacaatttcagcgcaaacgtggtagcggacggcaccacggtgaatttgggcctttgggataccgccgggcaggaggattacaaccggctgaggcctctgagctaccgcggcgctgacgtttttgtgcttgccttctctcttgtgagccgagctagctatgagaacatcatgaagaagtggataccggagcttcagcattacgcgcccggcgtgccggttgtgctggtaggcacaaaactggatcttcgtgaagacaagcactatttgctggaccaccctggcatgatacccgttaccacagcacagggggaggaacttcgtaagcaagttggtgctttatattacatagagtgcagctcaaagacacaacagaatgtcaaagctgtgtttgatgctgctatcaaggtagtaatccagcccccaactaaacaaagagaaaagaagaaaaagaaacagcgccggggatgttctatgatgaacttcggtgggagggaaatgctatgcttcnaatcctggatgataaaggagaaggtgtctcttggctgaagcga

SEQ ID NO: 157859 - DNA, 655 bp, Zea mays
  Clone ID: MRT4577_75546C.1
attcgcgcaatctatgattccacctcttgtgcctacgacatgaccttcatgcgccgtaactcgatgcgccacaacgatgacagcgggacgaacagcactccggtgatgcaaactgcgacaagtgctgccactaaggcaaggcgatcgacaggccccgcgagaggaacatctaggaacacgcacccatcacgccaccgccaccaaccatgtccctatgatgcctacgtactccaaaagctcgaaagccgatgagcaccactgtgtctctcgagcgacccacgctcacatcctccgaggactatcccaccaaaataccatggaccacatcccgtcgcaccgctttacgcgaagggagtataggcctgctggtggacatcgacgaccacaccctgctcctggtgatgctgctccagctccagcacctgatgctgatcgaccataggcttgaccttctcaaccgtgttaagacttccgaccactcagatactctattgtcacctatcgatgagaagatgctgcatatattacagttacctgtagtctaaagccctgacatatcctcagaatttgaatatctgaatagttgaaatttgagcttagtgcttctgagaaggcgaatatctaaactatcgaatctctcacttgaacgttatat

SEQ ID NO: 157860 - DNA, 639 bp, Zea mays
  unsure (1)..(639): unsure at all n locations
  Clone ID: MRT4577_75547C.1
gccccctctcgagttttttttttttttttttttttttttttttttttttaggaataataaaaaataaaagcacttggacttagttctcatcgtcatcatataaaatataaaaacttagatatctctctgatatcacaacattgcatacaaaacaaaacctaaaagcatatgcaatgctttgaggccgtctagctcatcgatctgcagggcgttgttccctcttggagggaattgcggaaaggagctgctccatgggcagcaacggcgcggggatctcggccaccgcttccaccgtcttgcagtaggccgcgctcctgttgggggccatgcatccgatgagctccgccacctgcaggttggatacctggccacccacgtaggtgtcctccggggccaacaccaggttgggcgtctccttgtaagcatccgtcggcctctccatgcctccgggccttatgatcgtgtagggaatgccgcttgcgatgagtgcttcttcagctcgtcttttccagaacagaactccccaaaacaagctgcttggcagcagtcgcagcttgtacaagtttgctgggggccatgtagtcgatgcggtatgggccggngacatccaagatctccttttcgcttgccccggggggc

SEQ ID NO: 157861 - DNA, 1218 bp, Zea mays
  Clone ID: MRT4577_75548C.1
ggggacccccgaggctggccggggtaccctgtgcgctgaacgggggcatggacaccatcgtctctctctcgcctcagatgcttcgccagcgccagggccaccagtctactgcatcatcatcatcatcagcttgggctattaccacagctaggatcggtcgccacctgtctactgcatcatcctgttccagcccgcggctgctcatcaagcagagggcgacggcggcatcggcaccggcacagaaagagaaagaggtcgtcttcgtggctggcgccaccggcagagttgggtcccgggccgtaagggagctcatgaagcttggcttccgtgtgcgcgctgccgtcaggaacgcacagagggccacgtcgctggtgcagaaagagaaagagcagcagctgcttgagcttgtggagtgtgacctggagaaggagccgcaggaaggcatcgtttcagccatcggcaatgcttccttggtggtgtgctccatcggtgcaagcgagaaggagatcctggatgtcaccggcccataccgcatcgactacatggccaccagcaaacttgtacaagctgcgactgctgccaagcaggtggagcacttcatcctggttacatccctggggaccaacaagatcggcttccctgcattcctcttgaagtaatttaaatgcttattgtgctccgatccgatcctgctctctaaatatatatagattttatttatttatttatttattggtaattaataatacgatgaaatgcaaagcttgttctggggagttctgttctggaaaagacgagctgaagaagcactcatcgcaagcggcattccctacacgatcataaggcccggaggcatggagaggccgacggatgcttacaaggagacgcacaacctggtgttggcaccggaggacacctacgtgggtggccaggtatccaacctgcaggtggcggagctcatcggatgcatggccaccaacaggagcgcggcctactgcaagacggtggaagcggtggccgagatcaccgcgccgttgctgcccatggagcagctcctctccgcaattccctccaagagggaacaacgccctgcagcagatcgatgagctagacggcctcaaagcattgcatatgcttctaggttttgttttgtatgcaatgttgtgatatcagagagatatctaagtttttatattttatatgatgacgatgagaact

SEQ ID NO: 157862 - DNA, 1351 bp, Zea mays
  Clone ID: MRT4577_75549C.1
gccggccggtccggagagtgcgctgaacaccggcatggacaccatcgtctctctctcgcctcagatgcttcgccagcgccagggccaccagtctactgcatcatcatcatcatcagcttgggctattaccacagctaggatcggtcgccacctgtctactgcatcatcctgttccagcccgcggctgctcatcaagcagagggcgacggcggcatcggcaccggcacagaaagagaaagaggtcgtcttcgtggctggcgccaccggcagagttgggtcccgggccgtaagggagctcatgaagcttggcttccgtgtgcgcgctgccgtcaggaacgcacagagggccacgtcgctggtgcagaaagagaaagagcagcaagatgtacccggacatggccgagcaggtgaccaccaccaccacccaggctctcatcatgggtgtcgcaccatccaaggggcacgccgagggcgggttcgaggcggccgccggagctgagaacggcgggtgcaagtgcggcggcaactgccagtgcgacccctgcaactgcggcaagtgagctaggtgctccaccctgcaggccggccggaggaagctagctaattataaagcttaataaagtatagcggcgtcgctgtgtgtgtttcgagtcagtcagtcagtcagttgcgtgccatggcatgctccgagtctgagacgatgatgatgcctgatggcggcatgctgcattccctaggccccatatatagcttctatgcaatgcaaatatgcaatgcaatgcaatgcaattcaatgcattaatttctttacatttttatttagatcataaggcccggaggcatggagaggccgacggatgcttacaaggagacgcacaacctggtgttggcaccggaggacacctacgtgggtggccaggtatccaacctgcaggtggcggagctcatcggatgcatggccaccaacaggagcgcggcctactgcaagacggtggaagcggtggccgagatcaccgcgccggttgctgcccatggagcagctcctctccgcaattccctccaagagggaacaacgccctgcagcagatcgatgagctagacggcctcaaagcattgcatatgcttctaggttttgttttgtatgcaatgttgtgatatcagagagatatctaagtttttatattttatatgatgacgatgagaactaagtacaagtgcttttattttttattattcctaaagacaacttttgtatatgtaacatcatgaatgtttgaggtgtctcatgtgtaactttaattaatatcaatttatgcatgaaatatgaaaaaaaaaaaaaaaaaaagcggcc

SEQ ID NO: 157863 - DNA, 1288 bp, Zea mays
  Clone ID: MRT4577_7554C.1
ataccatggtcttttcttcggttcctgtctaccttgatccacccaattggagccagcaccaccaccagccgcagcagcagcagcagcaacagcacgctcaacatggccagacttccaagtggcggcaacggcggcggcggcggcggcatggacacgcatgcgcatcatcatcatcatcagctgccgccagtgccacctcctcctagcggggctctcatggctcctcgccctgacatgtcggctatggtcgcctgctgcgagcggtggtggcgggccgactagcggcggcaccgctatccgtccgggctccatgaccgagcgggccaagctcgccaagatcccgcagccggagccggggctcaagtgcccgcgctgcgagtccaccaacaccaagttctgctacttcaacaactactcgctctcccagccgcgccacttctgcaagacgtgccgccggtactggacgcgcggcggcgcgctccggaacgtccccgtgggcggcgggtgccgccgtaacaagcgcaccaagtcgtccaagtccaactcgtcatcggccgccgcctctgcttcaggcggcgcgggcgggacgtcgtcgtccacctcgtccaccgctaccggcggcagcagcagcgcgggcgccatcatgccgtctcatcaggggcagctgcagccgttcctggcctcgttgcaccaccctcttgccggcggcggcggcggcggggatcactacagcaccggcgcgtcaaggttagggttcccaggactgagctcgctggaccccatggactaccaccagttcggcgcgggcgcgggcgccggcgccagcagcgctgccatcgggctagagcagtggcgtctgccgcatatacagcagttccccttcctaagcggccgccccgaccccgtgcaaccaacaatgtctagcatttacccgttcgacttggaagggcacggcggggacgctcccggcttccccggcgggcacatgctaggtgcctccaaggtgcccggctcagccggactaatcacgcagctggcatcggttaagatggaggacaacccagcgtctgcggcgatggcgagcagctcgccgagggagttccttagcctccctgggaacctccaattctggggcggcggcggcaacaacaacggcggtgcaagtggcaacaatggaggaggcgctggcaacggcggtggtggtggcggcggtggcgctgtcgctccgggcagcagctgggtggacctgtcaggattcaactcgtcttcgtctgggaacgtcctgtga

SEQ ID NO: 157864 - DNA, 1269 bp, Zea mays
  Clone ID: MRT4577_75550C.1
cttgaggcaggcagcagagtgcgctgaacaccggtgccggcatggacaccatcgtctctctctcgcctcagatgcttcgccagcgccagggccaccagtctactgcatcatcatcatcatcagcttgggctattaccacagctaggatcggtcgccacctgtctactgcatcatcctgttccagcccgcggctgctcatcaagcagagggcgacggcggcatcggcaccggcaccggcaccggcaccggcacagaaagagaaagaggtcgtcttcgtggctggcgccaccggcagagttgggtcccgggccgtaagggagctcatgaagcttggcttccgtgtgcgcgctgccgtcaggaacgcacagagggccacgtcgctggtgcagaaagagaaagagcagcagctgcttgagcttgtggagtgtgacctggagaaggagccgcaggaaggcatcgtttcagccatcggcaatgcttccttggtggtgtgctccatcggtgcaagcgagaaggagatcctggatgtcaccggcccataccgcatcgactacatggccaccagcaaacttgtacaagctgcgactgctgccaagcaggtggagcacttcatcctggttacatccctggggaccaacaagatcggcttccctgcattcctcttgaacttgttctggggagttctgttctggaaaagacgagctgaagaagcactcatcgcaagcggcattccctacacgatcataaggcccggaggcatggagaggccgacggatgcttacaaggagacgcacaacctggtgttggcaccggaggacacctacgtgggtggccaggtatccaacctgcaggtggcggagctcatcggatgcatggccaccaacaggagcgcggcctactgcaagacggtggaagcggtggccgagatcaccgcgccgttgctgcccatggagcagctcctctccgcaattccctccaagagggaacaacgccctgcagatcgatgagctagacggcctcaaagcattgcatatgcttctaggttttgttttgtatgcaatgttgtgatatcagagagatatctaagtttttatattttatatgatgacgatgagaactaagtacaagtgcttttattttttattattcctaaagacaacttttgtatatgtaacatcatgaatgtttgaggtgtctcatgtgtaactttaattaatatcaatttatgcatgaaatattatggatggttcaaaataaaaaaaaccacca

SEQ ID NO: 157865 - DNA, 467 bp, Zea mays
  Clone ID: MRT4577_75551C.1
aaaaaaaaaaaaaaaaaaaaaaaaaaaaaaaaaaaaaaaaaaaaaaaaaaactttgggccgatccccccctaggggctttttctggggatatccttcaccctggggcccgggcccccccttgggggaatgcccccaattccccctaccggggggggcgtttcaaccctccgtctggggggccccattcgcccttttgggggggacccctttgaattcccccggcctgctcttttaaaccggcttccctggtaaccccggggggttccccaatttagggcccctggcaggccccccccttttaccgtgggggggtttgtggggaaggggcccccccccctgcccttccctttatgccccgcccgtgtgggggtttggcccccccttgccgttgccctttaaacccccgggggccgcgcttttcccgctgtttgccctttcttttggccaggtccgggggctcccccct

SEQ ID NO: 157866 - DNA, 515 bp, Zea mays
  Clone ID: MRT4577_75552C.1
catactcctgttcagtttgtattgttttctccctcaaatggatgtatggattcacttgcataacagtgtgaacaaacattcgctgccaaagatctggtacgttgttagtgtttgacaattgtagtgtctgataggaaggtacattgtgcccttaaatattgctgtatataaagtttatttgattgtgatgaaaaaaaaaataataaaaaaaaaaaaaaaaaaaaaaaaaaaaaaaaaaaaaaaaaataaaaaaaaaaaaaaaaaaaatttataaaaaaaaaaaaaaaaaaaaaaaaaaggggggggcctttttgggggtccaaatttaacttcccgggcctggcaaggttaatttttttttttggggcccctaaaattaatttacggggcggcgttttaaaacggcggggcgggaaaaacccgggggttccccaatttaattgcttttgaaaaaaatccctttttccccggtggggtaaaaacgaaaaggccccccccgattccctttcccaaaa

SEQ ID NO: 157867 - DNA, 255 bp, Zea mays
  unsure (1)..(255): unsure at all n locations
  Clone ID: MRT4577_75553C.1
cactcctatgggcgattgggtactacgaatgccgccgggacacacttcttgtagcgagaggcaagggacgtaagaagctncctnnttgatcttcctgcanctcgtttcctcaccgagttttctccgttggtccggttttttatggtcgatggcgagggtatgcatctcctcgtatgcgacgacggaactggcatagtccacgctgcgttcgctcccgaccacgccccgacgcccgccttcccccgcctcccgggg

SEQ ID NO: 157868 - DNA, 230 bp, Zea mays
  Clone ID: MRT4577_75554C.1
ctgctggtacgggtactgaatatcggggtcccctgtggcgttgctcgtgttatttgggccgaagctcttggaaggctattgtcacttacctgtgtcgcggtgatgatactttgctgccttgccttgattgttttctccgattagtagggctccttgaccttatggaaaaactttgtcaattgaggacccacgggacttactttggcaagtaaggattccgagattacctt

SEQ ID NO: 157869 - DNA, 550 bp, Zea mays
  unsure (1)..(550): unsure at all n locations
  Clone ID: MRT4577_75555C.1
gccccctctcgagtttttttttttttttttttttttttttttttttttttttttttttttttttttttttttttttttttaaacggcgacccagggcactacgggacactaaagggttaaagctttgttacgggggattaacttccccaaacggggacgggaggcctttggaccttaacattttaaacaaggccatgctggggtttgttcccccctgtctttggaaaggcctacacaaaaactacgggatgaaggaaggttccccccccctataaaaaggaacaaaaaaggggggccggtgctgcaaaataatgagcttttaaagttttgaaggggggttttgggggcaacaaaaattacagcttccgaagctttaggggggtaataatttttccccggggcaacccttgaaatttccttggaaaaccccggggatacaaacttgttttaaggggcaaaaacaaaaagggacattcctgccttgttttttttgccacccacccaaagtatctcgcccttcantttttaaaaaaaaggttttggggcattt

SEQ ID NO: 157870 - DNA, 425 bp, Zea mays
  Clone ID: MRT4577_75556C.1
caaaatagtttatgggtttggaaacttgcatgaaaatatattagccccctcagatgttcctgcagtgctgaaattcatcctacagaagtaaccgcaaaactctagagcaggagttgagctggcgccagggctgtcatcaacatggatatgacatttcgcaacagtgactagttgaatcccttgtaacgtagtagttgtctgctcatatgtccatgtgttaatgaggactgcaaagtcccttctgttgtgattcctaggacttttcctcaagaggagatctggatttccacctaccgcttacctgaaatgcaggatcacctacttactggagtctacattattatatgccatagtataatgagacgatatcaaaagtatacatgtaatcgactatacatactaacattcttgtaagggtggttaaa

SEQ ID NO: 157871 - DNA, 1584 bp, Zea mays
  Clone ID: MRT4577_75557C.1
gcccccccctctctctaggcttggaggacgcccctctcactcctccacccatttgcaggcgccaccccacctcccccatcaaaccctagccgccccctcctcaagcccttctctccgaggtgccattcgtttcccgctcggatctacgtcgcgtttgtgcatgtctccaattggattttggtggagggaagaagaagggaggaaagggggaggattcaaggtggtagacttccggatcgtacttagggatttgcccgaacttccggtaaaggtacttgatacatgttgggaatgaggggagtagcagcacgtccactttcactctcacatcgacggccgcccgggcaggttgatttaattagaaacttattgtcaaaggaagtttgtttattttttttatatggtcgtgcgcactggctaattcagttcaggtcgtatgtttatctttccttgctagccgagtaataatacttagtatcttttaaaaaaaaaaaaaaaaaaaaaaaaaaaaaaaaaaaaaaaaaaaaaaaaaaaaaaaaaaaaaaaaaaaaaaaaaaaaaaaaaaaaaccaaaaaaaaaaaaaaaaaaaaaaaaaaagctgatgagaacataacccgcacagatatgaccatgttaatgtctcctgctacaaagacattgaggaacaaagaagttgattggggaccaagtaatgatatttccaacatttccaacaaagcaagcacatcatcaaatttaaagatatacttgggtgaggagcatacactagagtcgaggacgactctattacaagaaggggaggatgatgaggacatcactgccatcaatacaccacaccagcgacccccttcaccatttaatcatggaacagtgaaacgagtccgtgcacgtaaatttaattatcaggtgaactcgttccttgttgttgaagctaatcattccttaaatgaggtgcatcaagaatcaatgacagaaaccaaacgaggcatccagaaactgccgagagagtttcgttctccattagaactcctttctattcctctatttaagcaactagcagccaccaaagaacttgggtttttgtttgatgttcaaggctgttcttggcacggcaagagcgacaacaataggagccgatgctgggtgtatcaggcgcgtccacagcggagggcttgggcggttcgtggggggacggttctgaccggcgggacccatgggtcagcggggacaaatgagcgaatgggcttctgcgctgatgagcagggcccacgccagttaactaacggccttgacctgaagtactaccctcgtcgttcgaccgacagtgccggaggcgtgattgtcttgcccgttggtgagggcaattccagattgagtagcatggtcaacctggttgtcgtgctcaacaccgagctaaaccacgcccttgacgagttgggcaaggcttgggcggagatcatggaactatgtgctgagcacgcggcacgccaccatcaggaggatggttcccccgctcctgtcgggattcagcacccttaccgctcgccgcctcgtggggcacccctgactgcaggacccagataa

SEQ ID NO: 157872 - DNA, 611 bp, Zea mays
  Clone ID: MRT4577_75558C.1
actcctatgggcgattgggtccctcgaggccggccgggattgttgggggagggccttcgtcgccgaagggctccgagatatcaactttgtcaagaaaagaaagtttcaggtaaaaacgttcatcttcgtcatcgaaccaaagttgataaatggatgaagtcaagaagagccgaagccgaaggaggaagcttcgggtgatacgtggcgacctacgaagcagagaagaaggcagagactgtggaaggcttgatcaacaagatatatggatggaaaagtacaatactaccctcataatatttgtagttcatatgtataaggtttgatgacatgtttgtaatttcagacgaagttgtacatcgtggctataaatagaagaacggtgccatgcataagcatgcattttgatcagagcgatcagagttgctccgactacaaagttgtatacttcctttgctttcacatgtttgagtgtacagccaaaggtatacttgtaatcatttgatatattgtaaagaacgaaataatgtgcttacacattcagatgagtaattcgttctacctatcagaagttacatgcttcttttaaaaaaaaaaaaaaaaaaggggcggcc

SEQ ID NO: 157873 - DNA, 399 bp, Zea mays
  Clone ID: MRT4577_75559C.1
aagctcggaattcggctcgagaaaaccgcaaactcaagcctttaaatttccttgtccgggaggactagcacaggagggtgtcatacttacacccacctacttgctctgctgccagaccaacaatgataacgacctcaaaccctgaagaagaaccgcataagcgctcaggaaaaggatgcaaagctacagccttgacccagaacacgctgagccgtcctgcatcaatcaaccggtgggtgcagcccaaaccaactggtacggcccacgcacggtttactacaagtccaagagcaaaagagacccgtaaccaaaaccagaaggtgccaccaccatcagccctcggactgagatcatagcctagcccattgaagcacgggcgagaacagaagagagccatat

SEQ ID NO: 157874 - DNA, 649 bp, Zea mays
  Clone ID: MRT4577_7555C.1
cccgggtttttttttttttttatttaatatgtatactttttatatttatatttgtatatgcaaatatccaaaatacagaaaataacaaagttataaatcggatattgctagtttgttacttgataagtgatgcactgtccatatccattgtccatgtccattctccattctcaaaaaaaaaaaaatgaacaaagtgcttcttgtgggtaagttggtcaagccctggtatcattgctgttgagaccaggataggtccagtgagccgattatcaaccaggtccagccagaagagatttgagagtaaaccaagtgaagaggatattgtgcctgtaaacctgtttgaattcagcgccgaagagaatgtgctacaaaaccagttaactctgtatgccaaatcattgagaccgaggttgaaggaaacatcattgcaagtatatattgtgaggaatcagccacgcggtccatgtcgcccccgcgttgggcgactcggacgcccccagcaaccctagccgccgtcgccacctcgccgggggcctcctcctgtcgcgccgctgcctgagtgggccgcccgaagtccgcgcggctcgcggggaaggcggcggcggggcctctccgactcccaccggtggatctgggcgggcgcggccgc

SEQ ID NO: 157875 - DNA, 156 bp, Zea mays
  Clone ID: MRT4577_75560C.1
aactgctactgtatttacccttacgtggaaacctccttcaccagcatcgtcaagaccactgtcctcacctcgcctaccaccaatgccagctcctactgcttcgatgccgccaccgatgtcggcagcttcgactgcaacacctgcaagtactgcacc

SEQ ID NO: 157876 - DNA, 378 bp, Zea mays
  Clone ID: MRT4577_75561C.1
gcgaggggggagagcggtctggcagctcgagcaggttgagcattcgggaccagccagacgaattcggagaccggaccagtgagccaaacctttagagtactttcttgagccgaacttgcagatgtagtttcatagagttaagtgtccggacggggctatggggccgaggctattcatatgaaagacgttaggcggttatgagaacatatcgctagtaaacggcctattcgagcacaggttttgcactgtcatcgctaccaagcctgagagccctcgaattcgatacgatattgcacattgggagctagaatctctaatattattaacacgtttttacttattgagagggggaaacagtggataaagaggcagggagca

SEQ ID NO: 157877 - DNA, 307 bp, Zea mays
  Clone ID: MRT4577_75562C.1
accgtcgacctcgagaacaacttgcacgattttgcatggaacactggaggggagacccgtgaagttcgactaaagtttgtatactgcggtaagatgctgttcagctgaggtgtgaatgtaagtgcatacacagactattgatgaaaactgatgttgcgtgagagactatttgtgtgtgtctttcttgttctttccaccaagcaatggctagaattcggctgagctgttgaaattgtctcctgtataaatcagtgacatgtcatactatttttcaactggatttaacagagcctttatccttctaaaa

SEQ ID NO: 157878 - DNA, 531 bp, Zea mays
  unsure (1)..(531): unsure at all n locations
  Clone ID: MRT4577_75563C.1
gctgtcgcctgctcacagctgccgccatgagctctccacggcgcccacacgcgatgaccccgcgcgccaggagctctccacggtcgcgcccaggcgccctgctcgccctgttccgaccggccgagcccctgtgctcgagccgcccgcgcaggccgcgcgcacccgagcgcccgctcgctggccgagtgccaagccaccccgcgtgcccctgacgccgacccgccgcaccgcgcagcctcgacgccgaccgagcccatgctcgacgctcctgcaacccgacgtgcagccgcaccaggacgccagccgacctcgactccgttggccaggacctcgcccctgcccaagccgaagaccgaccgacgagccgccaaccgaagcctgcgccgnccgtttgtctgcgtgaatgtgaatggagtttattgcatccgtttcagctcccaccattaacaacgncgacagnttctattccacgccattgatgccgcctcttactcttccccctggccaccctctcctctggctctccctcta

SEQ ID NO: 157879 - DNA, 433 bp, Zea mays
  Clone ID: MRT4577_75565C.1
attcctccccattggggcggcggggtctttttttccccggcggggttcagggccccggccaaaatgaccgtcatgcccccgtggcggtgcgtttttgttggacctgggcacccgggccccaccaacaaccttcccatcggcccaaccccggtgggggggccccactttgggggcctttttctgtacacctccccccgttccttctcgggggttcccagagaatggcccccgcccggtgtggaaccagggggtcttcagggcccttcgccagggggaggaaactctttaaccgggggggcccctttttaacccgcggggggcaggaccccccttcagaacgggggggtgttccacaaaaaggggcccttttgacctttgtcagcctcgtggggggtccttttgtggtagccccccggggggaacattacaatgc

SEQ ID NO: 157880 - DNA, 336 bp, Zea mays
  unsure (1)..(336): unsure at all n locations
  Clone ID: MRT4577_75566C.1
gggggggggggggtgcaaaaaaccttcggggtggcctcacgacctactttagattttcttccccgtttcttccccttctttttttcagggggaacaacatcccgggtnacacatggtttcttcttaaattccaagagcttttttttttggtcgtngggggttcatngttgctgggccaataacgtcccgtttttcacaaaaatctacccccttctccttgttaaatttctcaagcttttctttttttctgttcctctgttttttgcttttctgtcctttccttccccgggttttgagatttgtttctcttccgcgcctggttcttcgcttttctcc

SEQ ID NO: 157881 - DNA, 866 bp, Zea mays
  Clone ID: MRT4577_75567C.1
atgaatcctgactggtcagaagaagtctgtgccaatggagtgaactcaacgacgaggaagcagcacgagaaggaggagttctgcggccggccgctcggcctgaggttccacggtgagaccggcgagctctacgtcgccgacgcgtactacggtctcatggtcgttggccagagcggcggcgtggcgtcctccgtcgcgagggaagccgacggggaccccatccggttcgcgaacgacctcgatgtgcacaggaatggaatccgtattcttcactgacacgagcatgagatacagcagaaaggaccatctgaacatcctgttagaaggagaaggcacaggaggcgggccaggtaggtgttcgcgaacctgccgggcttccccgacaacgtgcgctccaacggcaggggccagttttgggtggcgatcgactgctgccggacgccggcgcaggaggtgttcgccaaaagaccgtggctccggaccctgtacttcaagttcccgctgtcgctcaaggtgctcacttggaaggccgtcaggaggatgcacacggtgctcgcgctcctcgacggcgaagggcgcgtcgtggaggtgctcaaggaccggggccacgaggtgatgaagctggtgagcgaggtgcgggaggtgggcagcaagctgtggatcggaaccgtggcgcacaaccacatcgccaccatcccctaccctttagaggactaaccatgatctatgctgtttcaatgcctcctaatctgtgtacgtctataaatgtctaatgcagtcactggttgtaatcttgtttgtgtttggcaaattggcataataatggacagattcaatgggcattggtgctgtagtcgcctccccct

SEQ ID NO: 157882 - DNA, 347 bp, Zea mays
  Clone ID: MRT4577_75568C.1
ccgatatagattcccctaaagacgtatatatatagtacgtccctatcaatatagttagttcttcaaacactaaccctaacaagacaacaaacctcactccgatcgtactctttacatccgaagatcatcactcaaaacatttatcaaattaaaataaaattatctcctaatgtactgccaaaaactacccaaaatttcaaacaattctacaccctcaatcacaaaaataacaacaaaccctcaagctacaaaaagaatcagttccaccacgtcatcaactacttcattatccacatcaaatatttcatcaaaatctaatgcacactaacatttaccatataattcaa

SEQ ID NO: 157883 - DNA, 316 bp, Zea mays
  Clone ID: MRT4577_75569C.1
atacaaatacttgaatggggtctttttacacattttgttgcggtctccccgggggggagggcacaaccctagctaaaacttcctggggacaaagcgttttggggtttaaatctagccaacacctaccgttcgttggggggccaacctgtctggagaaggaaccccctacacaggtttcatctggggcacacgggccccagataaaagggggaccacagtttaaaaaaaacccccgggtggggaccccggggaaccaaactaaggaaggggcacacgacttgggaggcttttatttcgcgatgaaatataccggggg

SEQ ID NO: 157884 - DNA, 491 bp, Zea mays
  Clone ID: MRT4577_7556C.1
cgggttggggcgataaccgtaatggtcgcgtcctttttcacgcccgcgcgatttgaaaggccagagggtgtcagcttgggaaccatcgttcccggtataccccacgccaatatacacctattcgatctagatttgctcacgggaattggaggcaaggttgccgccaggttcaccatccgtgtatgaaccactcgctctcagctcaccgttgccagtgaagaacagcacaggccctaatggcgagctcgacaaatcccgaaggtgaagaagatgatcgtctatgccgttgagcatgctttggcgattctgaaagagccttgcacaccccgcgagtccgcctgaacaagctggcatcatatctgggtttctgctagtcaacgagggaaactagagaacatgatgcgatgttgtgcgacagtagacgtggggtagcgctagttgctttgtttgtcggcacaaataataatcttggaaatattactaataagggc

SEQ ID NO: 157885 - DNA, 358 bp, Zea mays
  unsure (1)..(358): unsure at all n locations
  Clone ID: MRT4577_75570C.1
accagaaaccggannacnnaaaacgcgggccacganaanangggncaccaacaaaaggggcnaacgcgngaacaccgcgacgacgacganaaancgagcagcgacggggccagccagccacggcagcagacacacgagacggacacaaaccgcnnagnccaccnccncgancngggggccagggccaccgcnnccagccggagcggccncgnccaggccgccggagccncccagggcggcacccgcgcccgggnacancngggcganganggggnngcaaaggcncnccagcnccnncagcngggcancgaacncgnccgccncggcgagcgggngggcgnccagccagcggagggcc

SEQ ID NO: 157886 - DNA, 118 bp, Zea mays
  Clone ID: MRT4577_75571C.1
gctataaagtgggaggcatgactcgggagccctgcagctagcggatggtgctacctcggctgggtcgaccgagaccccatgtggaacgcagccgtgagactctcattcagtacattgg

SEQ ID NO: 157887 - DNA, 455 bp, Zea mays
  Clone ID: MRT4577_75572C.1
cggacgcgtggggccccgtccccccggcccgcctcccctcgttttgtttctcctcctgttcttcaggacgtggggcatggtccccatcccgggtcgccgctcttctctccaccaagcacagcgctatgggacaatgccagggcggcaacgccgtcggaagagatggcagcgccggacgagccaaaggaggagggcatcgaactcgagccggccagaaagtcgacctcctcctcgtcatcggcgtcctcctcctcgtccgcgtcgtcggctgatatcccgtgccacatcgatgtcgtcgagctcgtcaacccgttggcagcggcgctgcccgaggacgaacacggcgcggtggtcaaaacggcccactcggcgacgctggaggacgaacgagccgctcccgccgtacacagcgccgaggccaaaccggcggacggcgcgatgactaaggatgtaca

SEQ ID NO: 157888 - DNA, 871 bp, Zea mays
  Clone ID: MRT4577_75573C.1
aaatttccagctcgacaagttggacttgttagagaccagtcagtagctgccattcatccactcccctttcccatcggaggaggacgagagatccgtcctgcggtgtgcgatggactcccccagctgccggctgttcggtgcccagagatcgccgcacgatctcctcggcggcggcgccgttgcggatgtggtgctgtggaggaagaaggaggtggccaccgggacgctggcggccgtggtggcctcatgggcgctcttctactgcgtgcccggctacactctgctctccttcctggcccaggtgctcatgatcctgctcaccgtcctcttcgtctgggccaaggctgcgcagctgctcaacagggcacctccgcctatcccattgatgaaaatttctgacgagtcaatgagtgaagcagcagaaatggttggtagcttcatcaacaaggtgctcaaggatttcgaaaacattgcacttgggaaggataacagcctcttctacaaggtggcttttgtgctgttgctggcctccatagttggacgactgaccgatcttatcactttagtatatacaagtgctattattgctctcacggtccctgcattgctggagaaatccgaagaacacattgccagattcttcaagaaaacttcgatatatgttcaggcatttggcagagcatgcaaagagtataaatgtaagatgacgaatatgatatcggaaacgaagaaactgcgttgatgtcaatgtgtattcactagcaaattttgacttgtgagattgcttcttcggaagcgaaatagttgtgacttttggcatcaatcccaatagagatcttacatcatcacaatcgtctttgtttcgagctgg

SEQ ID NO: 157889 - DNA, 195 bp, Zea mays
  Clone ID: MRT4577_75574C.1
ccattaatgacacatttaatctattaaccaccaatgcacaaacaagcaaaactcagcatgatgcaagatttgtttgagtgtcttttgttatttatttataggttcccatgtgatgttctcatgaaatgataaatggggataacacatatagctatagagtaacataatttctctttttagacctttctttacaaa

SEQ ID NO: 157890 - DNA, 211 bp, Zea mays
  Clone ID: MRT4577_75575C.1
gtccattctagatttgcagcccggtattgcgttgagaggatcggcttacagaccaggacggcgatggtctttgcgtgtttcgtgtggcctacctctagcagatgatattgtctctgcaatggaaatgctttatctgtgctcgttgctgaccacatcttccgctgcttgcacctatctagctaggttgttcgaggcctgcgggctggttgcc

SEQ ID NO: 157891 - DNA, 693 bp, Zea mays
  unsure (1)..(693): unsure at all n locations
  Clone ID: MRT4577_75576C.1
attccaccgacccatcctctcgtctccacctcggcgaaaccctagcctagccccgccgaatcgcgagtccccccgaagccggagcaagccgagatgtcccgcaccggaccgatcgcccaggactgggagccggtggtcgtgcgcaagaagctgcccaacgccgccgccaagaaggacgagaaggccgtcaacgccgcccgccgcgccggcgtcgacatcgacatcgccaagaagcataatgctgggacaaacaaagctgctcatagcaccacatcgctcaatacaaagaggcttgatgatgatacagagaatcttgctcatgagcgtgtgccgtcagacctgaagaagagcattatgcaggctagaacggacaagaagctcacacaggcacagcttgcacagctgatcaatgagaagccacaagtcatccaggagtacgagtcaggcaaggctatcccaaaccaacagatcatcggcaagctggaaagggctcttggcacaaagctgcgaggcaagaagtgaagctgcgtgtgcatctgacaggagtcgaggctttcaagagagcttggctgggcaagtttaccgctaaataaagcttgtctactanatcatgcgacttaagaaaaccccggagtttggtatttcgctcaggtttgggtgaatgtaattattagcttctgtgaacactctgta

SEQ ID NO: 157892 - DNA, 1053 bp, Zea mays
  Clone ID: MRT4577_75577C.1
tgtcgccgcgtgcaccatcggcggggcgccggagcgctaccgcggagtgaggctccgcaagtggggcaagtgggcggcggagatccgcaacccgttcaccggcaagaggcagtggcttggcaccttcgacaccgctggtgcggcctccgcggcctacctgtccgcctcccgtagcttcgccgacgagaagcgccgccgccgcgggctgcccgtggccgcgtccacaccagacactccggcaagcggcagcaccccgacggcttcctcctcgtcgtccgcctcgaccgctccgttcgcgcacccgtcgccgtcgtccgtgcttgaaccgagcaaggaagcgcggaacacgcagtccccagaggcgacgcccgccccgccgtcggccgaatcagcgcagctgccggaggacccagagttctaccaggaccttctgcgcggcctgcagctgcccgacatcgaccctctggacttccgcgccgggctggacgccctggatctctccgatgcggacttcggcctggacgacgaacatgacctcctgctcggggacttcggggacgaggagatggagatcgacctcgacctcgacgacatcaacgacgtcttcccggagatgcccggctgtgacctcggccgcggcatggacgacttcctgcaaaccgttgatttctgcgtgtgaattgaaagggagtgtgcccttgatatgttagggttgtttggtttcataaacgagcccctgagagtgtgcttggaaaggggagatgagatatcttgggttttttccccgggcaagttggatctgctcgtgcccaggagatttcctctttgccgaacacaccaccattagcggccggagagaagaggtaattttggtaggttatattatgtttaaggtttatggtatagttcctaagtgtttgctttgttatttggtaatgcttgtcaaagacattgtagtggacaagttcattgagctgttactattaagcaatgaaaggggaaaaaataagttttcgtggtaaaaaaaaaaaaaaaaactcgaagagggggggc

SEQ ID NO: 157893 - DNA, 1420 bp, Zea mays
  Clone ID: MRT4577_75578C.1
tgtcgccgcgtgcaccagcggcggggcgccggagcgctaccgcggagtgaggctccgcaagtggggcaagtgggcggcggagatccgcaacccgttcaccggcaagaggcagtggcttggcaccttcgacaccgctggcgcggcctccgcggcctacctgtccgcctcccggagcttcgccgacgagaagcggcgccgccgcgggctgcccgtggccgcgtcctcagcagacactccggcaagcggcagcaccccgacggcttcctcctcgtcgtccgcctcgaccgctccattcgcgcacccgtcgccgtcgtccgtgcttgaaccgagcaaggaagcgcggaacacgcagtccccagaggcgacgcccgcccggccgtcgaccgactcagcgcagctgccggaggacccagagttctaccaggaccttctgcgcggcctgcagctgcccgacatcgacccgctggacttccgcgccgggctggacgctctggatctctccgatgcggacttcggcctggacgacgaacatgacctcctgctcggggacttcggggacgaggagatggagatcgacctcgacctcgacgacatcaacgacgtcttcccggagatgcccggctgcgacctcggccgcggcatggacgacttcctgcaaaccgttgatttctgcgtgtgaattaaaagggagtgtgcccttgatatgttagggttgtttggtttcataaacgagcccctgagagtgtgcttggaaaggggagatgagatatcttgggttttttccccgggcaagttggatctgctcgtgcccaggagatttcctctttgccctcatttaccccatcaggtaacacagagaaatcagtgatcactctagtgtatttacccatggccttagtgacaaagacgaaggggcagacggtcttgcagatgcaacacttgttgtcgcccatcacgaaacggaggcggacgatgcatgtggagcacacgtcgcggtgcccgcacgacccataggccacccactccagcgtatctgcgcacaccgcacaaaagtcttccatggctatctgcgcagctctaatctccgaagtccgaatatatcttcaaatctggtaagatagggatcgattcttttgggatcggattccactgttaattcgaactcgagtaggggaaggcgccgccgcggcgccggcagccgcgcctgcgcgggtttcggccggtacatcggcggagggggcacgcggccgcccggcagcatggacggcggcgcgtacgggaaccggcttcgcggccgccgcgtacgcccggtcccccattacgcgctttctattctctctctctcgttcggttcttggctggctgctcggggaagggaagggttcggttcttggctggtcgacagcaacggaattcgagc

SEQ ID NO: 157894 - DNA, 684 bp, Zea mays
  Clone ID: MRT4577_75579C.1
acatcccagatgttccggttgcgctcgcagagatgatcgggtcggggaggaggaggatgacgggcgggcgcgcggtgcttctgctggtggtctcggcgctgttcgcgcagatctacgcgtcggatccgctgtttcacgagtccttcgacgagggcttccaggggagctggatcgtctccggcaaggaagagtactcaggtgtatggaagcacgagaagagtgatggccatgaagactatggtctccttgttagcgagccagccaggaaatatgccatagtcaaagagcttgatagccctgttactttgaaggatggaacagttgtcctgcagttcgaagtgaggcttcagaatggccttgagtgtggaggtgcttatcttaagtacattcgccctcaggaggctggatgggatgccaaggaatttgacaatgacactccttacacaattatgtttggtcctgacaagtgtggttcaacgaacaaggttcacttcatcctgaagcacaagaaccccaagactggcaaatatgttgaacatcaccttaagtccccaccctctgtcccatatgacaagctctctcatgtctatacggctatcttgaagccagataacgaggtcagaattctggttgacggggcaggagaagagccaaataaacttccttgtccgctgatgattttga

SEQ ID NO: 157895 - DNA, 242 bp, Zea mays
  Clone ID: MRT4577_7557C.1
tttatttatgctagtacccctacacgtttggctcgatgcacttaagccgggtgcatttagtgtgagacccatacaaaacattttttttagaccgtctgtagaagctcgaaacctatgtctttatgctgcctagcagagacacatacatacataagatcttggtaatgaaacctgagcttatagatctttgcaaggagactcgcacatggctactacatgacacaccgaagttctcatgcttg

SEQ ID NO: 157896 - DNA, 287 bp, Zea mays
  Clone ID: MRT4577_75580C.1
ccggactcctcaggtccttcgctcgtctgtaacccggggcggccgacgaggccgtgaccaccgacggcgacgatgggcgtccgcgagcgcaagtccaagaaacgccgctgttctacctcctcagcgtaggaagaagggggggaacggaagaggcgggacaagaaggagagctagaggaggagccgagacgacagggaggatgacgatgacagacacaagaagaaggggaaacacatcgacaggaacaaaggaaaagagagagattcgaaggataggcattccaagga

SEQ ID NO: 157897 - DNA, 851 bp, Zea mays
  Clone ID: MRT4577_75581C.1
aaaaaaaaaaaaaaaaaccactccagttgttccggttgcgcttgcagagagatcgggtctgggaggatgacgacgggagggcgcgcggtgctcctactgccgcttctggtggcctcggcgctgttcgcgcagatccgcgcgtcggatccgctgttccacgagtccttcgacgagggcttcgaggggagctgggtcgtctccggcaaggaagagtactcaggtgtatggaagcacgagaagagtgatggccatgaagactatggtctccttgtcagtgagccagccaggaaatatgccatagtcaaagagcttgatagccctgttactttgaaggatgggacagttgtcctgcagttcgaagtgaggcttcagaatggcctcgagtgtggaggtgcttatcttaagtacattcgccctcaggaggctggatgggatgccaaggaatttgacaatgacactccttacacaattatgtttggtcctgacaagtgtggttcaacgaacaaggttcacttcatcctgaagcacaagaaccccaagactggcaaatatgttgaacatcacctcaagtccccaccctctgtcccatatgacaagctctctcatgtctactcggctatcttgaagccggataacgaggtcagaattttggttgatggggaggagaagagcaaagcaaacttcctgtccgctgacgattttgagccagcacttattccatcaaagaccattcctgaccctgatgacaagaagccagaggactgggacgagagagctaaaatccctgacccagctgcagtgaagcccgatgactgggatgaggatgcccccacagaaattctggatgagga

SEQ ID NO: 157898 - DNA, 622 bp, Zea mays
  Clone ID: MRT4577_75582C.1
cccagcgtccgcggccgcgtgggttgatttctctgcaccgtatatgaattaagacatcagagataacatgaaatatgacagtaagaaatttctacatatgattttttttcaaataagttttctttttccattttatcggccttcatatgttctcaatgatccatttctgcaacgagggaatagaagttattagtgacaccatatatactaatagaaacttctgtaaataatgaaggcatttattgtggttatatatactgtggttattgagtcgtttgaagtggaatacagagtatatatatagacagttgagtggaatacagatagtagtcagaccaatgtacaatatcatagtatatttcataggttacatcttacatgttgatgcaaattcatgatggagaggtcaaatgataagtggcgtcgtgcgcactgagatggtcaagtcatgcacgacaaacaatcttaatttttggtgcagtatgctgatgttattgcaatggaacagtaggtggttgagatgagctcaccatattattattggaaggattattataaaaaggttgatgtgttgcaatgaaattgtaaggcggtggtgttgcatcaataaagggtttattaa

SEQ ID NO: 157899 - DNA, 773 bp, Zea mays
  unsure (1)..(773): unsure at all n locations
  Clone ID: MRT4577_75583C.1
caatatnggcccagaacaattattactctcactcactcaggagcagctccccctgaaggccctaatggtttggaagtgaactatgatatggttgtgtctcgtcgaactcatgccattcagcaaagcatccggcagataactaatgatcctcaaattcagaatcctgtggctcttgtggagaaccatcatctgtgtcggaggaacgcagaaggtgaaaagatgcttcctgatggccttatctggaggcggctcctcctcctcctatgcttctcactaaagatgattgctgagattgacagtctctcaacccgccgtgcttcttctgcaagtttcttaggccgccttctccaagtgcctccaattccttacttcttatcatctttgttgaaatctagagagcaccctaagcgttccaatgaccataatgttgtgagtgtggactcagatttttacctagatgaattgttgaatggggaccaagaggatgaagatgactatgatcaacttcctcccttcaagccactaagtaaatcccaggttgcaaaactctccaaggagcaacagaatttgtattttgatgaatctgattaccgaactaagctgcttcagaagaagcagctgaaggaacagctcaaaggatttaaggaaatgaagaagaaagagggtgatgataatgatatactttctgatgatgatcatcccaatgatggatatgatacagatagatatcctatgccagaatggaccttgccatcttcatttgattctgatga

SEQ ID NO: 157900 - DNA, 273 bp, Zea mays
  Clone ID: MRT4577_75584C.1
gtcactcgatcaacatcgactgtggacttcaatagcaccattgcgatcccactgtcggcgattatatgttgcgtctccatgcgcagcgcgctctctgcgtgcgtgctgatcccgacacgattctctcactgttcacacgctcctatatcgctcctgacttttcccatacacaccataccagctgtgttcaaggtgtgcgaacacacatttgttacactgtaggcgatacaacgcggtcgcagagctctgctcacatctataacactcgtgtta

SEQ ID NO: 157901 - DNA, 410 bp, Zea mays
  unsure (1)..(410): unsure at all n locations
  Clone ID: MRT4577_75585C.1
gccgccgccgccaccacaattcggcacgaggtttcatttgtcatgctggttgcccccgccttatcgtgtaatgccatgttgcccccgcatcatcatctaagatttcgtttgtcgtccgcgctgcagtctgcttcccgtttcactcttatatttttttgttggacggagttgttttgcatcgtttcgatctgtaccgtactgtttcccctcttgttcataacggcggcgacacaaattcttgcgtgctgcgccgctcacgcaaggagggataaatcgactcgtcaagaaatcgtttcagttgccatgactccagtaggcaatatgattgttgcttgactacagttttgtcttccactacttancttatttgtttgttttattcttacctcgcccgtattttctttggttta

SEQ ID NO: 157902 - DNA, 242 bp, Zea mays
  Clone ID: MRT4577_75586C.1
gcctgtactaactaacctagttgaccacgcttgtacattacacatggctcaaggacgcagcgtgattcaagcgtatcaacctgacattatccatcaacgatactgttcgtacgtttgacgaagctctacatcctgaatcccacttcatgccatgatgcatagggacgcaacttgatcgctatctaccactgcatgttcagcagcttgatgtcccttgccaaacagacaccaaagatgatgac

SEQ ID NO: 157903 - DNA, 464 bp, Zea mays
  Clone ID: MRT4577_75587C.1
ccggccgggacctgcagaggacccgcgctcgccgctatcattcgtttctggagacccttctagccccgccgccaccacaccaccaatggcaggactcggatcaaaggccctcgccgtggtcgccgtcctggcggccgtcgtcctctcggtggcctccgcggccgaggcgcccgcgcccagccccgtctccgccgccgccggcgcgtcggcgccgttcgccgcggccctcgtcgcctcctccgccgccttcctcttcgccgccgtccgccactgagccgatggggcccttccaccgccgcctagatctatttattggagtggtattcagtagtactggtactagggagatttcttcgttggtgtcgtgtcgtcatgggtggggagggtttgtaccgcgtcgtggtgtcggttgtgtgatctgattctgatccccttgaggcaaaaaaaaaaaaaaaaaagcggcc

SEQ ID NO: 157904 - DNA, 593 bp, Zea mays
  Clone ID: MRT4577_75588C.1
ttttaagaacaacgcatatttcaaatggaaccgataaggaacaatagtgtatcagtagcaaccagacggaatcatcactcacgatcacggcgagatagcagagtatctacaaggggatcagaatcagatcacacaaccgacaccacgacgcggtacaaaccctccccacccaccaaggacaccagatccgaccaaaatgcgacgacgacacgacaccaacaaagaaatctccctagtaccagtactactgaataccactccaataaatagacctaggcggcggcggcggcggtggaagggccccatcggctcagtggcggacggcggcgaagaggaaggcggcggaggaggcgacgagggccgcggcgaacggcgccgacgcgccggcggcggcggaaacggggctgggcgcgggcgcctcggccgcggaggccaccgagaggacgacggccgccaggacggcgaccacggcgagggcctttgatccgattcctgccattggtggtggtggtgtggtggcggcggggctagaagggtgtccagaaacgaatgatagcggcgagcgcaggtcctctgcaggtggtcccggccgg

SEQ ID NO: 157905 - DNA, 478 bp, Zea mays
  unsure (1)..(478): unsure at all n locations
  Clone ID: MRT4577_75589C.1
caacgcgccccgggcgggcnggcgactctgccggcgaacagacaggggggcggagaacccagcaaaccaccaaaacgagcgaaaccccccacccggagcagaagccgaccaaagacagccccgcacaggcgcctccccccgngnctccagggccatgcagggagaagagacagcgcagcaccgngaaccgngcccgcgggcggggggggagagcaannaacatataggagttacacccacagcggccacaccgacccaaagggcaccgaacgccactgcaggatccccaagagccccccgaccaacgctgcaaaaggcggaaggggaagagcctcagggggaccgacaccccgtgccgccgngagcagaccggggcccaaactggcgaaggcgaccagaccacccggggcgctaaacaattgggcccccggggacatgggacagaggacaccgccaaggacccccagaagcccacggc

SEQ ID NO: 157906 - DNA, 437 bp, Zea mays
  Clone ID: MRT4577_7558C.1
ttttaggtaccaaacaacctttctttgtgtttagcacaggggatgtcattcttgtaaacaccagagacacaaaacacctatattgtaaacactgaacactctgcaccgattttgattaacaactaccttacatacacgaaacctcctctgctatccaaagttgtacatggttcgtacaccttcccaagatccataatgacggtcggcctcctatcacgaccacactccaatcactcgagctgagcgaaccacacccgctggatcttgacatacttggacgccttgacccccaggtcaccgacagacgggttctcgctgtctgagacgtctatgacctatcacggatcagggttggtcttgatgacgctcaacgtaatgttgccggtagaggaggcggcattcttgatgtacttactatagagatactgctccggacc

SEQ ID NO: 157907 - DNA, 266 bp, Zea mays
  unsure (1)..(266): unsure at all n locations
  Clone ID: MRT4577_75590C.1
cccacgcgttcgcccacgcgtacagcgtgcgtgagagagaaacagaagaggaaaaggaatccatggcggcgacgctggcgaggagggcggggcgccccgcggcaacgacgcnacggggcgcggcgaggggcaacgcaccggcgggagacgcacaccgccccagcggtttttttagggagggggggaacgcccagcgcccggacgaagacgtgaacaccaagaagggcgaaggggacgcaccgtgaagcggcncataaagcgcgggg

SEQ ID NO: 157908 - DNA, 805 bp, Zea mays
  Clone ID: MRT4577_75591C.1
ccggccgggcgcagcccgccccactaactattgactgtcggattccctacccgtcggcgacaatccgctgcccccaatctgcctggtaggtctcgcacctccggtcatggctgccgaagctggcccaatctccaaggtcctcatcgtcatagcaatgcagaaggaggcgacgccgctcgtccacaagttcaatctcgtcgaggcgcccgcccaccaatccacttttcctaaaggtgccccatgggtttggtaccatggcagctacaaaggcctccacattgaccttgtattgcctggaatggatgctgttcttggagtcgacagtgttggtacagtaccagtagctgttgtgactagtttctccattcaaacattgaagccagaccttatcattaatgcgggcactgctggtggcttcaaggccaaaggagcaagcattactgatgtattccttgcatcagatgttgcattccatgacaggaggataccaatacctgtgagtattgtctcacatttctcctatatgtgttgtcctggggttatatccattttatccttagagatgagcaagtcatgtatgtgccagacaatacataactaatttgatataactgataatcctgaactaatctgattagctccatctaattggggttccttgccctgctgcaccatcatgattaataacctagggggtcggcagggaagcaataacttcaatatatcttgtatatcacttgttcatggttgtgcctataattatggattccttttttattttaaaaaaaaaaaaaaaaaagcggcc

SEQ ID NO: 157909 - DNA, 511 bp, Zea mays
  Clone ID: MRT4577_75592C.1
gtcgagaccctagtttccaccatgccccacggttttgggactgcgatggaggagcagctaatcctccgcgtgccgacatccgccgaagagcggatcgagcgcctaatgaatgaatccgacggcttctactacaaccccgacgaggcctatctggacctctgcttcttaaagatggaagaaatggcacatcttatgcatcgggaatgagagctgtcctgcttctctattggatctacctgatgcggtggaatcatacaaaacatatgaagatcctgtactaattaaaactggtgatgtcggtcaaatgattatggtaagagaagaaaatgatcctgctccagaaggagcttgagtacaagcatgcctcttactgcctccaatgtagggatgcacgcaggcgaaaattacgcagacaaccagacctgaacgcacagctgtctaaccaagcagagaagcatgttatcagtatcatgcatgcgagtatgtgaccaaccagaacgccactgcgaca

SEQ ID NO: 157910 - DNA, 412 bp, Zea mays
  Clone ID: MRT4577_75593C.1
ccgcgtgcacgcatgcatgcgttcgtattctcgctatagagctcaagggctaggagaaaagacgagcgccggagcggggtcaggagtcacgctaggcgcccggaccgctccaaacatgcaactgctgcatgaggcaggaggcaacggtggcactgtcccggccacgacgcgttattgtaccagacctgcagacgtctccagtgcactgctgctgaacccaactagcgcgctgccaccaccgaatgcgacacccctatgcgtactgctcctgcttaccatgatacccaggaaccctaacgattgataactgcctcaagcaatagacatacacactgccagtcaagtcaggggggagcatgagccactagaatgacgctactcccaattttatctgcgaagatgtgatgctgca

SEQ ID NO: 157911 - DNA, 355 bp, Zea mays
  Clone ID: MRT4577_75594C.1
tcgcactgatcagtcatcatagtggccaatgtgctattggagccttggaggggacggacagagtaatggccgttaagctcaacatgccgtcctaggcgaagagcctgtggatactcgtgcggtgcctactacgaggagtaagaacccgtctccgacgccggtctaagtcgtactggaggaccgggagggggagaagagcggcctactaagccgaagatctttggagcagctgtttgtgatgacagacgactgggcgctaggcgactatgacaaggactatggcagacgcgacatctgtcggtgcgccaagaagtcgcacggccagacggtgggcctacttctgccggagctagcc

SEQ ID NO: 157912 - DNA, 174 bp, Zea mays
  Clone ID: MRT4577_75595C.1
gaatgtgatagatacaaagctgatgccgcatagtggccgcgactaggattcgactaagcattcggaaagctagtccaccacaaggactggagaccgcactgattggcggcgcaacgcatttcttactcgacggcggccgaatgcgaccatacgctggacggaataatgggatcc

SEQ ID NO: 157913 - DNA, 530 bp, Zea mays
  Clone ID: MRT4577_75596C.1
ttttttttttttttttttttttttttttttttttttttttttttttttttttttttttttttttttttttttttttttttttttttttttttttttgggggggagaaagccaaaaaaagcccattaccccgagaagagcatatttgttttaaaaaagggaccgggggctaaaattgggagcaaaaaaattttacttgccaaaaaaaaacaaaacaggcgtaaaaaccacaaaaaaaggaggggggtccaaaaaacggggctctccattggtttggaaaggccccctctgacaaaaaacactgaaaagcatacccccccaaagccttgggaaatttaaaggaaaaaaaaagtgggcctggccgtaaaaaaaaaaactaaaaaacccccccccggccaagggctccttttaaaaaaaaaactgggcaaacttggggaggaagtcaaagggcggggggaaaaactcccttgctcaaaagaaagccctctccaaaagttccccaacctggggggccaaaaaaaccggtggggcc

SEQ ID NO: 157914 - DNA, 262 bp, Zea mays
  Clone ID: MRT4577_75597C.1
gcaagacatgggtcaaggcaaagaaaggccaccgcctcaatctagcgtatcaccggcggccaccaccaccaccgccacgagtcagcattctcccgcaggagcgcctgctccttgtcgccctacgctccacctctaagggaggattattgctccaccagcgccgcgccatctaccgatcaatcgctgaagccgatgggtcgtgctacttctaccagcctggtgaaactgccacccacataagttcaactaaactctgtcatgt

SEQ ID NO: 157915 - DNA, 776 bp, Zea mays
  Clone ID: MRT4577_75598C.1
ccggccggggattgcagccgatttcgtgtccctgcagccacggccaccgcccatctccacttctttatcttctccgaggtcgaggatgccccgcagcggcttctcggggtccttcaggtcgcccaagatcgacgtcgtcatcgacatgggaaaccccttcctcaaccgcaccgtcgacggcttcctcaagatcggcgccgtcggcgcctgcaaggtggctgccgaggagaccttcgagtgcctccacaggggggatgtttcgaagcacaaggttgagcatgccctgaggaagatgtgcaaggagggcgcatattggggcactgttgctggagtttatgtgggcatggtgtacggcgtggaaagggtccgtggccgcagtgactggaagaacgcgatgatcgggggcgccttgtccggcgccctgatctccggcgccagcaacagcgacagaggcaaggtcgtcaaggacgccatcacggccggcgcggtcgccacagccgtcgagttcatcaactgcattacctagccgagcaaggagcaactgcatttgcagtgccattgtcgtgcaaaatatgaataaagtacttcgccatgtccagtccagttcataaaccaccccacaccttcagtcttcgtttctgaccggcggttttgctttgtgtgaatgccctgtgagtgagagcaagaattctcgctcgcgcgtcaactgctgcgcgatgctctgtccattccatcccagcgaatgcaatagctggcgcgccaacgcgaatgcaagc

SEQ ID NO: 157916 - DNA, 512 bp, Zea mays
  Clone ID: MRT4577_75599C.1
tgttatgttccaacgcttagctacaccactctattggaggcatataatgtatagtgcagtgcctagcaatgtgttgagacttacaatatgctttaaactcatcagccactgccataatggtctaactctgaatttgttgatctaatggccacactcctttttacatatttgctttgtttttttgtaacctccgtgatcgctccacgtgtcacctttgattcccgtttaaaatgctctccgagttctaaggtcaaacccatgaaacatcgctggctggtttttcgggttcaacccccgaaccgccgcagatagcatatccatacacatcccccacttcctagatatgtgtcatggtcggtcctcgaccacatctagcatatccatacacatcccccacttcctagatatgtgtcatgttggtcttcgaccacatcggcaacacgtctaatctatcatgtcatgacacctatcagtcttccttaggtatcagccaccatagctagtcaaccgac

SEQ ID NO: 157917 - DNA, 334 bp, Zea mays
  Clone ID: MRT4577_7559C.1
cgtagctcggataattcccgggcgactgctactcttctctccccgggggggaccagtggtttgtgtgcacaaaaagccacccccccccccgcggcgaaagacaaactcttttttacgaggcaagccttccccgtacgtaggatgtatacaaaatcagagtgactaactaccaaccattcaagcatgtctggctggaccgcaaagaagaccgcacccggcttattcacccggaagaaaacctgcctgacaaacagtttgctgacagggatgtgcctgacaaccaaccaaggcagccaactgatttggaggatacaccattcacgctcgttataga

SEQ ID NO: 157918 - DNA, 3624 bp, Zea mays
  Clone ID: MRT4577_755C.1
cactttgcacaaaagagaactggcggaggtttcaggaaaatgtgccaatacctgtgaaaagtatcttggaggaacccagtgcaaagatcaatgttctgctgcaagcatataattttaggttgagattggaggaactttctcttagttccatcgaggtctacatcgatcaagctgctatggctgtcgatgagacgcgagttctctttgttttgaagaggggatgggctcaactagcggagaaagcactgaatctttgcaagatggttgataaacaaatgtggagtgtccaaactcccttgaggcagtttactggaattcctaaggagatcttgatgaaacttgagaagaaggagttggcttgggagaggtactatgatctgtcctcacaagaaattggtgagctgatccgctatcccaagatggggaggccgctgcacaagtgcatccaccagttaccaaagctgaatctttcagcccatgtccagcccattactcgtacagttttgggttttgagctgacaattacacctgatttccagtgggatgataaggtacatggatatgtggagcccttttgggttattgttgaggataatgatggcgagtacattcttcaccatgaatatttcatgcttaagaaacagtatgttgacgaagatcatacattgaacttcacagtgccgatatatgagccactgcctcctcagtatttcatacgtgttgtgtctgacaagtggcttggttctcatgctattctccctgtctgctttaggcatttaattctaccagaaaaatatgctccaccaactgaattgcttgatctgcagcctcttcctgttagtgcattgagaaatgcaagatatgagggcctctatagtgcttttaagcatttcaatcccatccagactcaagtattcactgtcttgtataacagcgatgacagcgtgttggtcgctgcaccaacaggcagtgggaagacgatatgtgcagagtttgctatactaaggaaccaccagaaggcattgtctggcgagagcaacatgcgggttgtttatatagctcccattgaagctctcgcaaaagaaagatacagggactgggagcggaaatttggagagtttgccaaggtagttgagctcactggtgaaacggcagctgatttgaagtttctggataaaggtgaaatcataatcagtactcctgaaaagtgggatgcattgtctcgccggtggaaacagcgaaagcacatccaacaggtcagcttattcatagttgatgaacttcatctacttggatctgataagggacatgttttggaagtcattgtatctaggatgaggcgtatttccagtcatattggcagtaacatacggatcgtagcactttcagcatcacttgctaatgctaaagatcttggtgaatggattggtgccacctctcatggccttttcaacttccctccagcagtgagacctgtgccactggaaattcacatccagggtgtggatatagcgaactttgaggcaaggatgcaagcaatgacaaagcctacctacactgccatcacacagcatgcaaagaacaataaacctgccctggtgtatgtaccgacaaggaagcatgcaaggttgactgcattggacttgtgtgcgtactctagtgttgagggtgctggaactccatttcttcttgggtcaggagatgagatggatactttcaccagaggtgttgaagaagagactcttaagaatacacttaaatgtggtgttggctatttgcatgagggtctaagtgagcttgatcaggaacttgtaacccagctgttccttggtgggaggatccaagtgtgtgttgcaagcagcacaatgtgttggggaagaccattgcctgctcatttggtcgttgtcatggggactcagtattatgatgggcgggagaatgctcacaccgactatccaattacagatctgcttcaaatgatgggtcatgccagtagaccacttcaagataactcagggaaatgtgttatattgtgtcatgcacctcgcaaagagtactacaagaagtttctttttgaggccttccctgtcgaaagcaatcttcaccatttcttgcatgatcacatgaatgctgaggtggtggttggtgttgtagagaataagcaagatgctgtggattatcttacttggacgttcatgtatcggcggctagctaagaatcctaacttctacaatcttcagggtgtaagtcacaggcatctttcagaccatctttctgagctagttgagactattctgaatgatcttgaatcgagcaagtgtgtggctatagaggaggacatgtacctgaagcccctcaaccttggccttattgcttcatactactatattagctacacaactattgagcgttttagttctatgctgacccagaagactaaggtgaaaggactcctagagattctagcatctgcctcagaatatgcagagcttccgggtcgtcctggtgaggaagaattcattgagaggcttgttcgtcaccagaggttctctatcgagaaacccaagtatggggatccacatgtgaaggccaatgctctgctgcaagcccatttttcaaggcacacagtggtcggaaatctggcagctgatcagcgcgagattctcctttctgctcataggttgctccaggcaatggttgatgttatatccagcaatggttggcttagtcttgctcttagtacaatggagctgagtcaaatggtgacacaaggcatgtgggatcgggattctgtgctgcttcaagttccacacttcacaaaagacttggctcggaggtgccaggaaaatgaagggaagcccatcgagagtatctttgatctagctgagatggctgtcgatgagatgcgggatctcttacaactatcgaactctcagctgcaagacatcattgaattcatcaagcggttccccaatgttgatatgacctatgaggtccgtgagggtgatgatataagcgctggtgacaatgtaacagtgcaggtaactctggagcgtgacatgactaacgtttcatctgaggttggtccagtccatgcgccaaggtttcccaagcctaaggaagaaggctggtggctggtgattggggacagctccacaaaccagttactggcaatcaaaagagtggcactccagaagagggcgagagtgaaacttgagttctctgctccggcagaggctgggagaaaggactacatgatttacttgatgtcagactcttacttgggctgcgatcaggagtatgaattcaccgttgatgtcaaggatgctggaggggattgatgatgaagactgtgacactatgtcgcatagaagtagaattgagtgtgtactgtaacgcgatattggaacattctgtgttgtaacctcgaacatgtggaagctgtaacttattttgcatgttgaccggtgcactttgggcgttgctgtgttatcctattctagtattgttgtaaggattgcgctcggttacacttgagccacagtattttggatcaacttgttgcttctataagcttgctgatgctataatgtttgatcgacctgttgatgcccttattttgcc

SEQ ID NO: 157919 - DNA, 844 bp, Zea mays
  Clone ID: MRT4577_75600C.1
gccggcccggccgggcagccgatttcgtgtccctgcagccacggtcgccgcccaatctccacttctttatcttctccgaggtgagagagcccaggcgatccaattccaccctcgttctcaggcactgtcacacagacacagctgacctgccactgccaggaaagtaggtcgaggatgccccgcagcggcttctcggggtccttcaggtcgcccaagatcgacgtcgtcatcgacatgggaaaccccttcctcaaccgcaccgtcgacggcttcctcaagatcggcgccgtcggcgcctgcaaggtggctgccgaggagaccttcgagtgcctccacaggggggatgtttcgaagcacaaggttgagcatgccctgaggaagatgtgcaaggagggcgcatattggggcactgttgctggagtttatgtgggcatggtgtacggcgtggaaagggtccgtggccgcagtgactggaagaacgcgatgatcgggggcgccttgtccggcgccctgatctccggcgccagcaacagcgacagaggcaaggtcgtcaaggacgccatcaccgccggcgcggtcgccacagccgtcgagttcatcaactgcattacctagccgagcaaggagcaactgcatttgcagtgccattgtcgtgcaaaatatgaataaagtacttcgccatgtccagttcataaaccaccccacaccttcagtcttcgtttccaaccttggcattttctttgtttggctctggatcctcagtaggctctggtctcttccttggaacttcgatctgtttgggccaaaaaaaaaaaaaaaacgctccacactttcagtcttcgtt

SEQ ID NO: 157920 - DNA, 296 bp, Zea mays
  Clone ID: MRT4577_75601C.1
gccggtgctggaccggggcgggggtcgatttcgagctagaggagcttacttgctggaggacttcggctcgcgggcgcgggcctgcgacctgataagttttcaatattggcacctaatgtgaatgtactgggcgcaggggagcaaggtcacgactgctacaaacccgaggcggcacaaatcggttgtctggcgaaacataccccataggctagctggggccacagagaacaggcctgcatacagcgtagaaaaaatgacagacctagtctgtgtgggggatggggctctcagtgacg

SEQ ID NO: 157921 - DNA, 691 bp, Zea mays
  Clone ID: MRT4577_75602C.1
aacgccaccgaagcggctgtatatcctcaccacactaccgtaccatgctcacccggaccagatagatctttccctagaactcccatcgacttccccttaaccggcaggagatttccaccaccaccgctctaagcacccctaccctcctcccctctccttgtatgttccacactgctgcgctcaaggacgccatgccctgtcgtacggatgagctgaagctgtccagcgaatcctcatcaacatcgaaaaggaaccagtcctacaaggtacacatcatgaaacactaaagtcaactctgctgaagggtagaagtgacacctggacgccgtcctgacaaactgattctcagactgataacaatacttcacccggttacgttgtaggccgtgactagtgaatccgacactactggcggtgccacctcctgacagaatcgatgaactgtaagagcacaacaaagagaaaaagaaaaaaaatgtgaatgtatttaatttgcatctggtacaaataaatgcagacatgctacctcggactgtacattatacagtccgctattcgggtactgtgatgctctcagactctaggattgataatatcccaatatttgtctgataagatgccgacaaagctagcgccctgcaagatacagctgttgatcacctttaaagaggatgaatcgatcgcttgtcct

SEQ ID NO: 157922 - DNA, 356 bp, Zea mays
  Clone ID: MRT4577_75603C.1
ctgccattaaaatcggaacgtttgaacacacggggggtcaatcaacggggtgttcttaaagttttttgattttccacctcctcttgttgatgctatctaatgcatgcatgcatgccaacctctatcctttgttttggcttggtacttataaatcgtcacattaaaccatctttatatagagagatagagatacatagacaaaaacaattcctttctatagcatgtgtgtcctccaaccgagtcataccacgacctacgggatacgaggatcccaacaccttaactacagaaaccaagttttctgtcaacaaaatcaaagccctctaccaactgtacaacaggctaacctattccat

SEQ ID NO: 157923 - DNA, 186 bp, Zea mays
  Clone ID: MRT4577_75604C.1
cggatctctcgcgaacgcggctgtcctgtcgctcatccgcgaagcgttcgctgtatgtaccgtcaacagcgctgatcatcagataccgactgacgtagcttgtgtccatgtcctggtataggccgcaggtcatcaggcggaattcgtcgcaccctcctcggtgttgcggtcgccgtcactctttgg

SEQ ID NO: 157924 - DNA, 227 bp, Zea mays
  Clone ID: MRT4577_75605C.1
ctagatcgccacatccttctacctgttccatctacagacagcggcttacctcttaaccatccacctccagatcgctcagcagaacctccaaacactgcacttgctgtcactgatctctctaaggagaacacgcgcatactggttcatcacccaattaacgccatgcacgctcctgatcgcactaacataggacatgtacctgcgctaccaggctgagatcttcaaat

SEQ ID NO: 157925 - DNA, 347 bp, Zea mays
  unsure (1)..(347): unsure at all n locations
  Clone ID: MRT4577_75606C.1
gcggcctgtttgggtttttttttttttttttttttttgggggggttttttttgcggccttaaaatcatagatttacttggtgcagtggcatacagcatcagaggctaggaaaacgaacaaagggggccaaattcaagcatcnaccaaataccatttgggggaaagatcggggggtctcaacatctacaaatttattcctagaaaaacaacatttactctctttgctaaataccacattattcctttccggcggcggaatgtgtccctccggggtggggggtttttgggcgtgggcgggccccggtccggggcggtttggggggggctttttgggggggggggggtgg

SEQ ID NO: 157926 - DNA, 773 bp, Zea mays
  Clone ID: MRT4577_75607C.1
gctcccgcccgccccagagtcatcgctggaaaacacaaacagagcagctacacagccgcaaccttgaccagtgactgcccctccgccgcggtcgtcacatacccactgaagccgccgctcagtcccccaagcagatgatggcttccccactgaagccgccgctcagtcccctccaagcggtagcgctcgcgctcctcgtcctcctcctcgccggcgcggcgccggcgcgcccgcagcaggagtacgaggccaacaagcagaacgcttgctatgccaccaacgccagctccgtcctcggctacacctgcaacgctaccaccgcctccactccagcctgcgactcctacctcatcttccgctcctccccgacctactacaacacgccggtctccatctcctacctcctcaactcctccgtctccgccacggccgccgccaacgccgtcccgtcggtgtccccgctcgcgccctccagcctcgtcctggtccccgtcccctgcgcctgcacgcccggcggctactaccagcacaactcctcctataccatccagttccgcggcgagacctacttcatcatcgccaacatcacctaccagggcctcactacctgtcaggcgctcatcgcgcacaacccgctccacgacagccgcggcctggtcgccgggaacaacctcaccgtgccgctccgctgcgcgtgcccctcgcccgcgcaggccgccaagggggttcaagtacctgctctcctacctcatcatgggggggcgacgacgtga

SEQ ID NO: 157927 - DNA, 276 bp, Zea mays
  Clone ID: MRT4577_75608C.1
cgcgttcgcccagccaagctccctcgccaaaccgcgcccccgctactcgccgcgcgcgccatctctctgttcgcctctgcgcacagctttccaagctccatggccggttccctgctcgtgtcgtggtctcccagctcgtcagcacttgttcagtagtctcggctcgctcggcctcaaattccagcgcctcgccctgctctcgtggttcagcaacggccggcgcgaacctgaccgtggtggtgttgtggcatggcgacgtcgtgcgcgtcgcgacag

SEQ ID NO: 157928 - DNA, 355 bp, Zea mays
  Clone ID: MRT4577_75609C.1
aagcccatggggcaaaaacagaagggaaattaaatgcctcaagcttggcaacataacttttactggtatacatggataaaaaatgcacaaattattaaaacataagtaatgaaaaaaatgttcaccatacacttgccctagtttggaacttgaattttaaaatttatatacaacaaggtatcaattattactctttccatccacaaaaaagagcgattgtcacttttcggggagtcaaacgatttaagtttggccaaagttatataaaaaggtctagcaattatgatacaaaataagtttaaaaagaggataccatattttttatggatctgggttctttatattgggaggaaaa

SEQ ID NO: 157929 - DNA, 519 bp, Zea mays
  Clone ID: MRT4577_7560C.1
gccggccgggtcgcgcactctcctatatccgccgccattgtctcgggctctcatatctcaattctcatcttcgggttcgcgtcgcagcgtcttccgcccgggctaccacaatgccgaagcagatccacgagatcaaggacttcctgctgacggcacggcggaaggacgcgcggtcggtgcggatcaagcgggccaaggacgccgtcaagttcaaggtgcgctgctccaggtacctctacaccctctgcgtccacgactccgacaaggccaacaagctcaagcagtcgctcccgccaggtctgactgtccaggagatttaaggtatcaagccgcaaactgtgcccttttttgcggtgtcagggacgtttgctccagtgtttactttagtatgtaggtgggctccattgctgtgtcgaacctatgagcatgtggtgtaatggtaccccagaacgcaaaagatggcaatctatcataagttaaactgatttctgagaaaaaaaaaaaaaaaaaaggccccta

SEQ ID NO: 157930 - DNA, 2630 bp, Zea mays
  Clone ID: MRT4577_75610C.1
atggccaccgccaccgccgctccagcatctgtggcgcgacgacggatctggggacacgctcgcgacggcggatccctgaggcgcgacggcggatctggggacacgctcgcgatggcggattcctgtggcgcgacggcgaatctagggacacgctgcggcatcggatcccgagggcacgcacgcggcggcggccccatgaggcgtccactggtgcacgttctgccgcgaccgcggttcgctcccctctcccccgcggcaatctcggcgagcccccagccgccattcatggcgccttccaatctcgcttctagaaaccccgcccgccaatctcggggcgccctcgctcgctcgctccgcgggccccccaagctcgccatcccccgcgcgtcgcgtccgcgccgatccactttccatcgagttctaggctctcgcggcaatctgcctcccccggaaaggtgccatcccgagcccgccccagccgccattgtcgcttcggggcgccgcgctgatccactttccatcgagttccagaaaccccgaccgccaataccctcgcgtgtcgaggcggagcggttccttcgagcggtggacgacctctgccgcctggcgccggcgtcaccggcctctgtcggtagcccgcgccgcgcctcgtccgcgggcggtgcctgcaccgtcgtggaggtcgccatgactcggctcgaggacgagttttgccacgtgctgtcggcgcgcgcgctcgacctcgagatcgaggcgctgtccagcctcagctcgctttcgatggccagcgactggagtaactctgacgccacagaagcggccgctggggaggaagacgacggctccgtgtcgtcctccgtcggcaggcgcagcagctaccgctccctgcagagcatccgcgagattgacctcttccccgtggatgcaatctccgacctccatacaaaagtccgatctgctcgtgcatgtcacccatcgccgataatgagaactgacattattttgtttctgaaggaaggatcacagttgaaagcatggtggcttcatcattgcattcacgagaggatggctcctggcccttgtcatgctttcaagcgtccctccgattgccattgccggttgtttcattccacatctggaggaacaatttcacagaaagcaaacaaagacatcatacatcatacatcatacatgctatggtcacttatcactcctgtaaatcctgcaaatacctggggtccacttatatttatctttgctgtttctgcaaccaaagaggcatgggatgactacaacaggtatatttcagataaacaagtgaatgctaaggaagtgtggattgttaagaatggtacccggaaacacattcaagctcaagatatccgtgtcggtaacatagtttggattcgagagaatgaagaagtaccatgtgatcttgttttgttgggaacttctgaaccacaaggcatctgtcatgttgagggaggattaccaccagaggcagtatacaatatcataattgatccaaagaataaaagggtgttcatgatcagtaagtttccatctgaaaaggaagagatggccagcaagtattgttccacagagcaagttccagatgagtgggtttttgcattgtatctttgtgcctcaacaaatatcctatcggaagactcgatccacacgacgtggacgtttgcggcatccaccgccccaccaccatcccacgaccaccactctagcgccatacctggacgcgacgactgcggtattgagctcacaccagatggcgcgcagtcgcccaaggttccacacggatgtccaccccaggcctccgaccaagttgtgttcctccccgttggatgtcgcatgccatcgtgcgatggggaggcgaagcaccgaaccgaaggacgtgaaagggctcctcggcatcgcaatcgctacctcccgcgatgcgcccttggatccacttctcatgcgacgcctctgatcgacaagcacgtcgtgcgtccgcaccgcctccctgaccggcaagcacgtcatggctccaggcacttgcagcctccacgcttcttcggccagcgagcacgcgaccacgcctcccactgttcagtcgtggtggctccaggtgcttcttgcctctgtgtctccctgactggcaagtgtctacgccagaagctgatggttgtgggtaaaacatttttgttctgtaatccccaggctagcaagtttcacttaaacaaaggttcaggctttcgttgtttgcaagatgatacaatgacatgcctttttagttgctgctgttatcgggttgggtggcgcaggagaaaacagtgatcccactgctcaatctatcgatctatgagccaaacaagacacaaaccatggaacaagtggattgtctgcatcttaccattaatgttgaagaatggttggatgacaaaggccaaggagaatgctgcagctatgttattcagattatatgtggtccatgacaataaaaaagataatgaatgatccagagaatgtgaatgtatgcatagccttttattcgagtcagctattaaacaggctaaactattgttcaagtgagtagaggtattttgcaacacttaaataatgggtagtgcctt

SEQ ID NO: 157931 - DNA, 982 bp, Zea mays
  Clone ID: MRT4577_75611C.1
gcacgagcctatttttctagcattccatttgatgaaaagatagaggagtgtgttgtgtgtgatagggggtgtatagaggagaaaaatctcaaatgcacgactcaacagctcttgtcatgtgcctcttatcttcttgccttatagaatgcagattctagaggcgatcactgcacacaaaaccttcccctctgtatagctaatccaatcgacaaatccagtgtgtgcgctctctctttctcaaaactattgtctcttttttggattctaattttcacccaatcattgtttttgttttgtcccatgtaaatttcagaacatcgaatcctatgtttttgtaattttactcttgcgagctcaaattatttgcataataatcagccggccgggacggagctttagccatacgttcctcttatatgttcagctatgtcgtgtgactgaatgaaaacgatctgagctctactaaaaattatgttcaccatgctatcatgcttagtaacagcgatatggcattgttagaagtacaaaaatttagacaatagagagtaatcatgtgaggtcctagattttattttccagtataaccagttagtgcactccgtgtccataaaaatgacgcaaggacagatggggcaaggcaaacatgtatcactccaaagtacaaatagaccaatggaactatttgtattaataatattaattatataagtggtaattctattggtctattgacaatatatcttatccatggaaacagttggctggaccttgagttttttctctttcatagacaggactggacgcgacttgtggctattttctctctgtttataatattttgcagggctagaattattcctccaattcattgtttcgattaaaaaaagatacctaacaatcttttctgtggcacctcttcagcacaaccgttatattcgttcttgcacttgtcagagtattatacccttacaaccatggtgca

SEQ ID NO: 157932 - DNA, 1473 bp, Zea mays
  Clone ID: MRT4577_75612C.1
gggggtacccccgagtcctggccgggtctcttatctccccatcgcacgaggtttccgggcctccccgctcgccatcggcccgtctcaacgcgcacgcaccctaccctctccacaaccaaccccagtaccccacgagatctgctcccatctcttcttctcccccatcgcacgaggtttgcgcccctccccgctcgccgtcggcctgtctcagcccctgaccctccaccgccaccgactccctctcttgccaccgagggaatttggatctaggagcccatgccactacagctctcccccgcccacgattagccctcggctcgggagatgctgacgcccatcgcgaccacgatttgctccctcgtgtcctcggcctcttcctccactctcatcctccctcctccccccgtcctcggttattctcgtcgcctccgccgcgcgttccgctctccccacagcctttgtccgccacatcatcctcggctgttgtcggcgcctcgctccacgcccgccctcgcccaacgaccctcgccgcacccctccctgtcctcgacaacttcccctctggccccgtccttgccggcatcggcgcctgctctctccgtcatgggggaggggaaagtgaaggaggaagaagagccaagcggctaagccagctcggccggtcgcctcccaccaaaatcccccgagacatcatcgacgaggagatggagatggagtctagccccgcagctcctcggcatcacaatcgttgcctcccgtgttgtgcccttggatccacttctcgtgcgacgcccctgatcgacaagcacgtcgtgcgtccgcaccgcctccctgaccgacaagcatgtcatggctccaggcacttgcagcctccgcgcttcttcggccagcaagcacgcgaccacgcctcccactattcagtcgtggtggttccaggtgcttcttgcctccgtgtctccctgactagcgactatgtaaggagggacctcccctgccctggctccaaacagaatcagggaatacggtcagcctcccatggttgctgccatgtaggcgatctgatagtccacaaaaacctaagattcgacaccaagtcactaaccaaaggaagatcgagatgaggaaggatgtgatttgatctcaaatatcaactacatctgtctagcgtcgagacacatgtgtggtagtgctaagttggttctgtcattcagtttctttctgtatcctatttctgtgaaaatatgttatgtgagtgatgtaaactgattgccagaattaatggatgttttgcagctacgccagaagctgatggttgtgggtaaaacatttttttgttgtaatccccaggctagcaagattcacttaaacaaacgttcaggctttcgtgcggtactgctaactatgttctgtctttcagtttctttctatatcctatttctgtgaaaatattttatgtgagtgatgtaaactgat

SEQ ID NO: 157933 - DNA, 3292 bp, Zea mays
  Clone ID: MRT4577_75613C.1
cactccatagggcgattgggttcctcgaggccggccgggaatgcatgggaagtgggttggtgcatcggagcctgctctctccgtcatgggggaggggaaagcaaaggaggaacaagagccaagcagttaagctagcccggtcgcttgccttccaccaagatcccccgagacctcatcgacgaggagatggagatggagtccagccccgccgcatcgcccttttcgtagagccgtcgccctgcgcctacgcttttgcagctcctcggcatcgcaatcgctacctcccgcgatgcgcccttggatccacttctcatgcgacgcctctgatcgacaagcacgtcgtgcgtccgcaccgcctccctgaccggcaagcacgtcatggctccaggcacttgcagcctccacgcttcttcgaccagcgagcacgcgaccacgcctcccactgttcagtcgtggtggctccaggtgcttcttgcctctgtgtctccctgactggcaagtgtgtaaggagggacctcccctgccctagctccaaacagaatcagggaatacggtcaacctcccatggctgctgccgtgtaggcgatctgatagtccacaaaaacctaagattcggcaccaagtcactaaccgaaggaagatcgagatgaggaaggatgtgatttgatctcaaatatcaactacatctgtctagcgtcgagacacatgtgtggtagtgctaagttggttctgtcattcagtttctttctatatcctatttccgtgaaaatattttatgtgagtgatgtaaactgattgccagaattaatggatgttttgcagctacgccagaagctgatggttgtgggtaaaacatttttgttgctgtaatccccagcctagcaagtttcacttaaacaaaggttcaggcttttgttgcttgcaaggtactataggctgtagcacaacttatactattttgtactgactcatgcggagggcccgtgatcagaggtgctgctgaatttttagttacacaaagtctactatttagcatccacatgttagtaatttttttagcaagcatgcaatatcggtacttagtatgccatgaatctttttacctatctttctagcattccatttgatgaaaagagagagtaggagtgtgttgtgtgtgtgatagggggtgtacagaggataaaaatctcaaatgcacggctcaacagctcttgtcatgtgcctcttgtcttcttgccttatagaatgcagattctagaggcgatcactgcacactgcacacacaaccttcccctctgtatagctaatccaatcgacaaatccagtgtgtgcgctctctctttctctttttggattctaatattcacccaatcattgtttttgttttgtctcatgtaaattttagaacatcaaatcctatgtttttgtaattttactcttgcgagctcaaattatttgcataataatcagccgactgggacggagctttagccatacgttcctcttatatgttcagctatgtcgtgtgaactgaatgaaaacgatctgagttctactaaaaatatatgttcaccatgctatcatgcttagtaacagtgatatggcattgttagaagtacaaaaatctaggacctcacatgattactccctattgtctaaattttattttccagtacaaacagttagtgcactccctgtccataaaaatggcgcaaggacagatggggcaaggcaaacatgtatcactccaaagtataaatagaccaatgaaactatttgtattaataatattaattatataagtggtaattctattggtctattgacaatatatcttatccatggaaacggtaggctggaccttgagtttctttctctttcatagaaaggactggacacgacttgtggctattttctctctgtttataatattttgcagggctagaattattcctccaactcattgtttcgattaaaaaaatatacctaacaatcttttctgtggcacctcttcagcataacctttatattcattcttgcacttgtcagagtattctacccttacaaccatggtgcaaaattaatgacattctttaaatgtttgtgttgagcttcattgttcagttgctccatcacaaatgtagatttgatatctacattatgctttcacatacctataaaggagttatttttcatattttggtatgttgttgttttcacttaacttcaagagattttaacaatctcataggttggaaagcagatggttctaggcacacttgaacaatggttgtcactgaacttaaggggttttaattgttactgaactttattgatgcatagtgaatttaccattctaattgttgtgaatgcatgatatcacaacaatgacatgcctttttagttgctgctgttatcgggttgggtggcgcaggagaaaacagtgatcccactgctcaatctatcgatctatgagccaaacaagacacaaaccatggaacaagttggattgtcctgcatccttaccaatcagtgtgttgaagaatggttggatgacaaaggccaaggagaatgctgcagctatgttattcagtttatatctggtccatgacaataaaaaagataatgaatgatacagagaatgtggaatgtatcatgtatgcatagccttttattcgagtcagctattaaacaagcaaaatggctggagtgattaaacatactaaactattgttcaagtgagtagagatattttgcaacacttaaataatggatagtatcttatcgttatagtttcctatcatatttttatgtaccatgcataatttctgatctaagctgtcacctgtaagtttctcagcagcttatcctcttcatcattgtgttaaccttgtacattatgcagaaaatggttgtctttatcatgcattgaggatgtctggaatgctatcacaaataattagtgtttttatatcagtgtatattataaatatattatcaatgtatttttaatgatgaagaggaacaacatggaatacccaaggtggacaaggctagcaccccgaggtcaagtttatcctccaggaccaaccatggaagtgaatcttctgatgatatttgcctatcattaagaattatatattgactcttttgaaataatttgtgcaatattgataatgtttgttcaacatcagttcaatctatttgggcctacgtatttatagttgtattacatatttatattatcaacataatgttagtgttgcggggatattttgcatcccgaattttc

SEQ ID NO: 157934 - DNA, 591 bp, Zea mays
  Clone ID: MRT4577_75614C.1
gttcgcccagcccagccgcctcctcccgtcctccgcctgtccatggaccgccgccatcgagccgtaccttactccgcgcgccagcagcagcagcggttcctccggcccggcgcgctcgcgcggctccgggactcgaggatcgtcgcccgctccgtccggtcgtcggcgtgcctcttgctcccgcggtccgcccctccgtctccgtcccccgcgccgccggtcgtcgccgcggacgagctggccgccgcgccgcgcttcctggggaccacgagcggctcggggcggtacccgctacgcaggagggtcgccgccgccaggggcgtggcgttcccgccgtcgtcgccgtagcctggcacggacggaggcgccgcgtctcgtctcctggagccgcgattagttgagaacttgtgactagatttgtgtttagttcagtgttgctgtgcagatgtttttgcactttcttggtttacttaaaaaaagactagagatttgagaaggaataatcactccgttttttttttgcttggttcctgattcaactgttcaatcttcacctcgctggcaagatgcgatctggaagcagttgctgac

SEQ ID NO: 157935 - DNA, 226 bp, Zea mays
  Clone ID: MRT4577_75615C.1
caccgtttctttagtaccctgcgcattccaacgacaagaggttttaatatatttgcggtcacctacaacacaaccacacatttgctagattcaaacaagagcactgctgctccacttaacatagagatcccttaattgagtaaccattgacacagcacgcttatacaaacacttcaacaacatttctcatatccacagctgaaatgcccgctggaaacccaaccta

SEQ ID NO: 157936 - DNA, 713 bp, Zea mays
  unsure (1)..(713): unsure at all n locations
  Clone ID: MRT4577_75616C.1
ggacgcctgcggttccggtccggaattcccgggtcgacccacgcgtccgcgcacatcccctctggccatcaaggaggagctggctgacatctccctgacaggatggcgtcctggaggatccactgaagaaagaaaatacagcctttagtgactggtctgatgaggatgtgcctgaccgcacagaggggctggaagccgagcacaccgcagccactgccactcctggtagcaccccttcccccctgtcttctcttctccctcctccaccccctgtggctgctgccagtactgcagccactgctcttgcctcctcagctgtttctgctaccacctctgacacctcttcaagctctgctgccacctccaataccaatggcagtgaatactcacatagaaagtgccacagggcacgaggggagaatgtagaggtgtcccatgtgaccctagaagacacaccacatcgcaagctggaggatcaaaaaagaagcagcagcctcggaagcaatcgaagtcaccgtagccacacctctggtcggctacgctccccatataatgattctgctcatcgaagtgcagatgaccagcgtagtcagaagagagtgctccatagtggctccagagatagagagaanacagacagcctagatgtctcaggagaagagaaatctangattgatcaggtaaagcgtggagaaccagtcgaagtacttctt

SEQ ID NO: 157937 - DNA, 369 bp, Zea mays
  Clone ID: MRT4577_75617C.1
agggattaccgcggtttttcttctcataagagcgggaaagaaaaaaagctctttaaggggcttagggggcaaacaaaacaaaaaaggggccacttgaatctctaaagggcaaggggttcacaaggttcttagggaaaagacactgggggaaaaaaaaaatcttaccacccccccaaagggctggacacccaaaggggggggcctaaaatcacccccaggggggggccccccctaggggataaaacactccgtcgggcaggccatccatttggcggagcgctaaaaggcaactctggccagtgcatggagggcctactcccaccactgcaaggggcttcagcgacagcgggtagcctacacataccccga

SEQ ID NO: 157938 - DNA, 116 bp, Zea mays
  Clone ID: MRT4577_75618C.1
tttctaattactgtcaagcctcaaacatgcaacacacaaacggtgttatttcactatacctcatcagacactctccaatatggcaccacctattatcgtctgtctggttgaccgct

SEQ ID NO: 157939 - DNA, 544 bp, Zea mays
  Clone ID: MRT4577_75619C.1
ggagaaatggcggagcgagaccgggtcttggagagagagcgaaggcagatggagcagatcctagagctggatatggaggagctccaggtagaggaggtcgacgacgacggctcatcctcctcctccgacgtcgacaccttccttagaaatactcatggagatggagggattaacacttatgaggagctttcaatcgatacatctactgtttccttgcaggatcacacctatcttggggcaaaggttgatggtgcccgaggcaaatttgctttcctgcatggagacagagtcctcaatctgccaatgttttatctccaaggagttggtttggttcctgaagcttccctacatcttcgagtattccagcctagattagtggaagctattgacaaggctattaatcatgttgatgctccatgcctgataggtgtgggttatgtttatcgacacacaaatgatgggcattatactattgcttctgtcgggacaatggccgagatacctgaaattcaacagctgtatgatgggtcatcatgtattttct

SEQ ID NO: 157940 - DNA, 219 bp, Zea mays
  unsure (1)..(219): unsure at all n locations
  Clone ID: MRT4577_7561C.1
actaggctcaccaccttggcagcacaacctttgccacgcttcatctcgaattcattcagtgggaacgacccgattcatacacaacgacgaccccatgaatggaagagcattttgtcacacttagatgagcgaggcccactgcgatacctgcgcgagccgcaagctggactgacttgagcatggcattgggggggggggtcttatncccgttgacttgac

SEQ ID NO: 157941 - DNA, 716 bp, Zea mays
  Clone ID: MRT4577_75620C.1
gcgtgccttacacactcctcctccgcctctgccgcgccgcgcgtcgcctccgtcgccgtccctggggttcgaggatgcaacagcctacaggcgagatggagatgaagaaggcgcctctgccagcgcctgctttccacaaagagtacactcttcctagagcacgacactaccttgatcaacactattcactccgccctcctctctccaaggatgattactccaaaaaggatcctacaagcgagatggagaagaagaagaaggcgccgctgccaacacctcatttccacaaagagcggcctcttcctagagcagagcggtcccccgatcgacgctactcgccttaccctcctccgtccatggatggttgctctggaaagaatgctggatcttggcctcttcccccgatttactatgggcctccatctgaagcctttcatgtcgactggcgcaataaagacggggttgtggacatggagcattacagcacagagctgtttgcagcgatggacaaacatagtattttgtcggtgcaccgttgtacacgcccacagtttggaccaaacgtcagcgctgagtatgtgcttgatcctatatttgaggatacgttccttgccaatccccgttttagctacctgcttcccttgatcggccacaaagtatcttctgcagctgaggctcccaattcaaccacgcaggttggcacaactactggatac

SEQ ID NO: 157942 - DNA, 1129 bp, Zea mays
  Clone ID: MRT4577_75621C.1
taaaaagtagagttaaaaagtataggtaaaatagaaaagataaaaaggaaaggtaaaaagtaaaggtaaatagtaacggtaaaaaatacggtaaaaagtaacggtaaagagtaacggtaaatagtaacagtaaaaagtaacggtaaaaagtaacggtaaatagtaacggtaaaaagtaaaggtaaaaagtaacggtaaatagtaacggtaaatagtaacggtaaaaagtaacggtagaaagtataggtaaaaagtagcggtaaatagtagcggtaaatagtaagggtaaatagtgatggtgaatagttggtatgccttaccgatgaaggatggataggtgatcagctcgactcatgagtgataaggcgaaaaacccttcatcatacacatttcataacgcatgtactttgattatctcaacgattttcttaaatcatgagtgataaatataacaaggattgattgcggcaagcggttgggtggccatataacttgtctcaaaatcatatcatgcataaaataacaggctgggggttgtggttgaaaaatcataggtaatttatgcatcaaagggatccagtgagcttgtcgtgcttatccggcgaaggggaaggggagctcgcggaactggcttctagctccactacctggcgtagacttgcagatctggcctccatgagacgccacgaacgctctgataacttcaacgagctcctgctcagcagtctccagctgctgaaccttgggatcctcagtggattgctcatagagattcggtttgcgcagtcctcggcccactgtagttccggcacccgcgacggagtttgaacgtctgcgagaaattggtggtgctccgttggattatcccgccaggaagtgtcacggtcagcttcggtggttgcccgcgaccaccccggatgctttactatggtcggccacccccgtggtatggttctagtcggcggcggtggaagtcttccccaaggtggctctcggcgagaaatttgggacgggcgcaggcggtatgggtgagggagttgcgggaggagagaaggtccgcttttagcatcgtgcatgcggagtcggtggggtgctccagttagcgcttcccaaacacccccttatattg

SEQ ID NO: 157943 - DNA, 470 bp, Zea mays
  Clone ID: MRT4577_75622C.1
ctctgccatctcatcatcctcatcttcattcatcatgtcttggcaatcatacgttgacaccaacctcgtttccaccggcaaggtctccaaggcctccatctttggtctggacggttctctttgggccaccagccctgatttcaaaattggaggcgaggaagtcaagaagctgattgccgctttcaccgacatttccgatatcgctgctaatggtctctacttggagggtgccaaatacgtgttcttgagaaacccggacaatagcatttatgcccgcaacggtgccaccggtgtctgctgcaccaaaaccagccaagctatcattgttggctactacagcgagaacatgcagggcggcgattgcaaccaagtcgttgagactttggcccaatatcttgtgggcgctggttattaaacatgttcaggccccaagtcccagggtcgaacaggtccatgttctcaatcatata

SEQ ID NO: 157944 - DNA, 530 bp, Zea mays
  Clone ID: MRT4577_75623C.1
gccggccgggtcgggaagcaagagcacagctgctatacatagcgcgcgctcatcaccatacccggagagccgatcactcacccatgcagccaaagtgcaatggccctctgcgctaccacaaccgcatgtctccatcgtgctcacactgctctccctctccgcggaggtcatcttgcccacctccctgtgccatgaagcccgcgtccgacgcatgcttacgtatcgagtttggaccctaaccatcctgcatgcatcggcgcatgcccagctcctgagaactcctacactcaccttcccccctatcgcggtggtggccctgtgcaaccgcttcccccaccgaacggagggaacccctgatgccggctgcctactatggaacgatgcaccactgacaactgcatcttaactgtgcttatatactatatgatgatctcataacactggagtaatactcgaatgctgagaatttcttctgctgcatggcatgaacatgtcattgaatctttttttttagaagaactatgacatgt

SEQ ID NO: 157945 - DNA, 229 bp, Zea mays
  Clone ID: MRT4577_75624C.1
gcacgagcacgagcggctggcgcggtgggcgcgccggatggaggccgccgggatggagcgcgtcgggcttagctacgacggcatgatggaggcgcggaagctgctgcagagctgctggtagtgcggcggcggggacgactccgcgtaccaggtggcgcacgacgccagcgggaaggccttcttcttctgctggcaccgcaagccgctctactccgtctccgcctggagg

SEQ ID NO: 157946 - DNA, 346 bp, Zea mays
  unsure (1)..(346): unsure at all n locations
  Clone ID: MRT4577_75625C.1
gcgccgtgcgggtatttacaaatgctttagnaatggacgcggtttgatgagctgcctacctaaaaagaaaaacaaaaaactgataaacaaaaaaaccaacttaaaaaatggaatacaaaagctcgataaggcatgagattcaccatcataacagatgtggtaaagaaaggggaattcccctcncatttaaaactactataaactcccaaaacacacatacgcatgcagaannagaactcccaaaaccccttcaaatttagggagacgatcggatagaactttaagtgccaattttcccaaaaaatggttcttctttatcctacggggatacctttaccaacaccga

SEQ ID NO: 157947 - DNA, 266 bp, Zea mays
  Clone ID: MRT4577_75626C.1
accgccgccaccatcacagctgatcaccggcgcggacttccaacatattctgcgtctgctgaacaccaacgtagatcggatgcacacgctcatcgtcgccatgacctccataaacggtgttaggcgccgcttctccaacatcgtctgcatgccagccgtcatcgacatgaacaagacggtcggtgagctgacacctgtagagctggagcgcctgatgacggtcgttgccaaccctatgcagttcaaggtgccgtactggttcctca

SEQ ID NO: 157948 - DNA, 477 bp, Zea mays
  Clone ID: MRT4577_75627C.1
cgttgctgtcgggcgaccgtaacctgctcctttgcgaccgcgagcttcacatcttctgcctcctcccatcgccgccaaggtccccatccgcggatctacccggttctgccccgtctgcgcctcacccgccaaggcactcaagagtacacttctgtgtggtttcagacttattttttcagagtataatcttcactattgttgcattgtgtcttactttcttggcagagttgttggacaatgtgatagaaactggtggtgctacaacaatattgttggacaaagtataagacaaatggggacaaagtcattgacaaatggaatggaacaccagctttactaattcaaggtggtctatggcttctcctaaggtcgggtgatgagtacaagtaacaagtgcatagttcagatgatcagccctgctggattattctccttcgggcttacatcaaatgtgcaggggaaaatctctgggggaaa

SEQ ID NO: 157949 - DNA, 1430 bp, Zea mays
  Clone ID: MRT4577_75628C.1
cgctattttactttctgtggtagctaccacccttatagtgagaaggcgttcaagacacagaactgtctcaaaacgttcattgtcaaggttttctgtcaaagttgatggcgttagatgtttcacatttgaagaaatggctatagcaacaaataattttgatctatcagcccaagttggccaaggaggttacggcaaagtctacaagggaattctaggcgatggagcatttgtagcaatcaaacgagcacacgaggattcccttcaaggttcaagggagttctgcacggagatagagctactatcaagattgcatcatcgcaatttggtttcattggttggctattgcgatgaagaggatgagcagatgctggtttatgaattcatgtcaaatggcactttacgtgatcatctttctgccaagtccaagagacctctaagttttggtttgaggttgaaaatcgcattgggtgctgcaaagggaattttgtatctacatactgaagcagatccacctatattccaccgtgatgttaaggccagcaacattctgttggactccaaattcgttgcaaaggtagccgattttggtctctcgaggcttgctccagtgccagatgtcgaagggacattgccagctcacgtatccactgttgtcaagggcaccccaggctatcttgatccggaatacttcctaactcacaaactgaccgacaagagtgatgtttacagcctgggtgtcgtgttccttgaaatgttaactggtatgaaaccaattgagcatggtaaaaacatagtgagagaggtaaactcagcttgccagtcgggcgcagtttctggaataatcgatggccggatgggcttataccccccagaatgcatcaagaggttcttatcactagcaaccaagtgttgccaggatgaaactgatgacaggccttccatgtgggagattgtcagagaacttgagctcatcttgaggatgatgcctgaagaggacctgattctgctggaaacctcagaaacagactcgaccgatgtcagtaagtcgttgtcatcttcagcgaccaggaccctcttcgtctcgtcacaggcctctgggagtcttgatgcgagcagcggcatgatctctggaagagtaactccccggtaggcatggtgtaatacttgtgaatatgcaagtttgttctgtaacattataggcttaccactcctaggacctgtcttttatgaattattcatattcagccgaacgtacagtagataatagcttatgatacactggaacatagctggcattgcattctttacctttctaatatgttaatctgctttctgtaaggtagcgtttggttccagacccagtttgggatggaacagctccatagctccatctccgggagtggctccatactaaagattttggagagcca

SEQ ID NO: 157950 - DNA, 390 bp, Zea mays
  Clone ID: MRT4577_75629C.1
gcatcttggggaatacattgaagacgaccttgacacggggagaagctcagatgcgacagtagctgggaggatctgaacaagaactatatctactttcttttatgatctttatggggtggcatgaaggtcaaggatggctgatgccaggacctaatggatgaagctgattctctaagaccactcagggaagcggggatattgtggcatatgggtatcagaaaagcaaccgggggagctacgtgtccgaagaaatttgcggctctctctgcttctatgagcctcgcagaaagggaagaagtcgggctgtccgtggactccagaatgggtggaatatcgaaatttgttttggggatcaggaaactcggttcgtccgagatatcttggtctatg

SEQ ID NO: 157951 - DNA, 441 bp, Zea mays
  Clone ID: MRT4577_7562C.1
ccggccgggctctaatcttcgggttcgcgtcgcagtgtcttccgcccgggctaccaccatgccgaagcagatccacgagatcaaggacttcctgctgactgcgcggcggaaggacgcacggtcggtgcggatcaagcgggccaaggacgccgtcaagttcaaggtgcgctgctccaggtacctctacaccctctgcgtccacgacgccgacaaggccaacaagctcaagcagtcgctcccgccaggtctgactgtccaggagatttaagtttgtaggtgggctccattgctgtgtttgaatgaattatgaagtttgagtttgggatgcgaatgatgtgtcgaacctatgagcctgtgttgtaatggttaccccagaccgcaaaggatggcaatctatcataagttaaactgatttacgtaaaaaaaaaaaaaaaagcggcc

SEQ ID NO: 157952 - DNA, 1020 bp, Zea mays
  Clone ID: MRT4577_75630C.1
cccctattagagaaatgaaggtatcttgcgtgagaggaacctgaatctcccgtcagtacaggaaataagcgctttccgtgtgaatctattctctggtatccggcgtgagagtgcgattgcggactacgacgctttttggcgctccttactcgaggagattcacacacctcagggacgtagttgttttggtcagagaatacaagatctgcacgcccgaatgtctgccgagggcaactgggactacttgattgcccaacaaggcagagggtattttggtaacctacctaatctcaacagcccgttggatcaatatcaatttggaattcacccaattctggatctgaatattggtgagtactatgtctcattcacaaatctatccttgtctatgtctatgctactcactctcggtttggtcttacttctgaccaaagtatttatggaatcgtccggccagaaacggggaagagcccatgctgtcgtagaggcctcgtcgagtgcttccgctacgcctaattctgaggatgatgataagcggaaaaaagtgtcccgccaagacgccaatggcaaagagtcagagccgcccataaatggggcgcaacctgaagtaccatccattgcgttcttaaagaaaagaattaaaacagttctaaggtcctgtcgagataggaaccctagggagagcacattacgctctacttacgaggatcttcaccttgaaacggcgagcgccgagaagcgggtaaaaatcgcccaggccctagaaaatctgtacaggcgaagccaatatttccggagtaacaaaaggcagcagccccataccgacttgattattcaaatctgcgattgggagcgtacgaagaggtaaagaaattcactggtgtaggcataggaaaccgaggccccccaaacccatctactatacggttgaggtgagggggggaaagaagagtgggcatgtgggcttctttcactgtgtaaaaaaaaaaaaaaaaaaaaagcccccagggccccagggcc

SEQ ID NO: 157953 - DNA, 272 bp, Zea mays
  Clone ID: MRT4577_75631C.1
acactttctgtttttcattcttcacgctaccggaggactttaggcaaattgcaactgctaccaccaagggaacacttgtcagaatctacattgcacctgaaggcattctcttgcacaaagtaaggagaggtgctactagagcaactacatttagcttgcctatagcgtatattgtgctgtatttagctgcgtccattgatgaatgaacaattcatgtgttcaatctaaagataaatgtgtaatcgacagcatatgataaacttatacctgct

SEQ ID NO: 157954 - DNA, 275 bp, Zea mays
  Clone ID: MRT4577_75632C.1
ggccgctttttttttttttgttttctttttttttttttttttttttttttttttttttcttatgaattatcttatcacacctatcatcgtttcaaaggaaaggccacgagagatgactagccaaaccctctacttactcagacaatatgccacactacaaacaccggcgcacacaaacaaccatggggggcgggttaacttggccttcgccacatgataataccacaacgaagtatgatcacattaacactataggcagctatatccccgggcgg

SEQ ID NO: 157955 - DNA, 378 bp, Zea mays
  Clone ID: MRT4577_75633C.1
tagcggctcgttcaagtagcaacgactaccagcgccgccggtattcagcccctccggtaggccacagcgaccaacatgtcacaagtcgcctcccagaaccggttcgcctatctcggcaacgactccgacggcgaggagaagcccgtcgtccccgtcaagaccgtcgacaaggccaccgctcgcaccaccaagcgcaatgtcgagcctcaggcccctgcggcccctgtgaggactggcggcaaccgccgtggtaacctcggcggcaacgagggcgctttccgtgatcgcgccgctggccgggaacgcaaccagggccgttccactgaggagacccctagagatggtccccgtggtggtcagggtgctcgcgtccgtgga

SEQ ID NO: 157956 - DNA, 161 bp, Zea mays
  Clone ID: MRT4577_75634C.1
aaaaaagaagtcccgttttagttttttttttgtttcaaatcatatcatcgggggccaattaatatttggttaccgcagatgcaatcggatcaacccacatgcaggtagacccccgtcccttcctgagcccaaagactgaccccaaacatgccgagagagat

SEQ ID NO: 157957 - DNA, 328 bp, Zea mays
  Clone ID: MRT4577_75635C.1
aaaattaaaaaaaaaaacttatttatgatttggcaaaattttggggaggacgcaaaaaaaaaaaaaccggtttatttttaaaccaaaactgacacgatttatgaaacgaaaaggaaattttttgacaaccttcatttggagagaggggaccaaacgacgcaagcacattggggggttaaacgacccatgatttattgaccaccacggaaacggggcccaagggggagggggcttttcttttgagaagttgaatctgctaaggggcggccattctccaactgtttggcggaaaaaaaaaaaacctttttgttccgggggaagcccctct

SEQ ID NO: 157958 - DNA, 117 bp, Zea mays
  Clone ID: MRT4577_75636C.1
tccacacgtacgatccgatgtaccagacggacgaggtttggtacgccggctcgtacaccagggtgtgatcactgtccgaacaagagacgataagtcggtccttcaagccaccgaagg

SEQ ID NO: 157959 - DNA, 459 bp, Zea mays
  Clone ID: MRT4577_75637C.1
attgggtacctcgaggccggccgggaattgactacatcaatctttgattgacgtatgaggggttctgatcgaagcgtctgattgaagctgccgaccttgggagatttccagtccctcttgaaggcatcaaatgcggcgcctacttacttggtgcgactggctggagagactctagagacaaacaatgatcctcgctggcacctgcctaatctaggtcacctcccttccatcactgctcttgcgagctgcaatctaccaaatctaggtcttgaagaaatgaaagaccaagactactcgcgggtgcaacgcaccagggtctcgcagcctctcctcaggttcagctccgttaggtatccacatggaccgctcatcgacccacttcagacaagacgccaacatgaggcacgacgggttggctacgccacccggggtctctagctcggcaacgctgactatccc

SEQ ID NO: 157960 - DNA, 913 bp, Zea mays
  Clone ID: MRT4577_75638C.1
atcgcaggtgtgggaaacatggttgctgtcggcgaacggcgttaacagccgcacctccgttcctccgggcgtgcctccgttcctccggctgcgcccccgctcctccgaccgcccccggtacctctggttgacctcgcccccattcctccggctccgcttcgtgttctccggcctcgcccctgttcatccaaccttcggttctagcccctcgtgaaggtcgaccgttgtatctaatggtcgttgatccggtgacctcccccacaacaactctacccaaagactacgatggctctagggaagaggtccacatggacctcacggaaacccgaagaacttgtgccaactgattacgagaaaataagggctatgaatatgatgaagaacaatcaattgtttcaacggctaggccttggacaattgaaatcactggtgactgctacagctgcaaacaacaaagaagactgtcctcagcaatcagagagtttatatgatggtgaaaacactgacaattctaatgaagaggaatcccaatgtactaacggtggttgtgccaacatctccaatgatggtgatcagatctcaacaaaagtaacaagaggaaataaaataattgtggcacctacggaggagcgaacaattagagtcactaggcaaagaattgctaaagtaaaccaagaaaatagccacaacctgtctattcataaacaactcagttcatgtcctgctacaaaccatgattcgatagaaactcttgttgttcctacacaacctagttcaaatgccaccataaacaacaacacaacacatagcgtagataatgctatagagcctaattctctgatataggaggagagggataaccacaatgcagttgaaggtaactaaacattttaactggttagacattgaacta

SEQ ID NO: 157961 - DNA, 668 bp, Zea mays
  Clone ID: MRT4577_75639C.1
taagttacccctttaaagactgcacttttaaaggacttctatgtaatggatgggagtaatcttcagattttattttatttcatgtttatattatgttagttattttgcatgatggcttattgttcagtacaatttgttcttgtttcattgttttcaacaagactgggcttttattctggctattgaactgtgagggtactggtagattgcttgaaccttttattgttttgttatttgactacatgtcaacatcaatcatagaaatgcatactatgcattgttgggaaggatcagaattaacagagagtgaatgtaagcataaactgaaaagtaaatataaatgcttcaagtgcagatcataatacatgagagtgctatattctggagttaatgggatcagcatactagaaaaactgtttatgtttttgtgattctgtatatgttaattccagtatgattttacatctgcacatatatgaatttttagatgattcatgtgcttatatgcactgctcgctcatgaacttgggacaatgagaagcaattgcttgttagcgttggaaagttttgtatgtggggctcttgcctaaaaacagagaggggacacaataagagggctatattaggtcatgcttgacatataagtagtaaaattgactgatgtttag

SEQ ID NO: 157962 - DNA, 704 bp, Zea mays
  Clone ID: MRT4577_7563C.1
gattcgactctcggcaacggatatctcggctctcgcatcgatgaagaacgtagcaaaatgcgatacctggtgtgaattgcagaatcccgcgaaccatcgagtttttgaacgcaagttgcgcccgaagccttctggcggagggcacgtctgcctgggcgtcacgcatctcaattctcatcttcgggttcgcgtcgcagcgtcttccgcccgggctaccacaatgccgaagcagatccacgagatcaaggacttcctgctgacggcacggcggaaggacgcgcggtcggtgcggatcaagcgggccaaggacgccgtcaagttcaaggtgcgctgctccaggtacctctacaccctctgcgtccacgactccgacaaggccaacaagctcaagcagtcgctcccgccaggtccgtgctccatagtctgactgtccaggagatttaaggtatcaagccgcaaactgtgcctttttttgcggtgtcagggacgtttgctccagtgtttactttagtatgtaggtgggctccattgctgtgtttgaatgaattatgaagtttgagtttgggatgtgaatgatgtgtcgaacctatgagcatgtggtgtaatggtaccccagaacgcaaaagatggcaatctatcataagttaaactgatttctgtgattttcgcttcccccctttttgtctggttcctgtgttgttttg

SEQ ID NO: 157963 - DNA, 599 bp, Zea mays
  unsure (1)..(599): unsure at all n locations
  Clone ID: MRT4577_75640C.1
gtaccaacaagnaacaccttgtgccggttgccctgatgactgtgacaaaggactatgcaccaatagttgccagtatcaagatctcctaagtaactgtgattccttgaagaatacagctggctgtgaacatgagttactcaaggaaaagtgcaaggctacttgcctatgtgagaacaaaatttactgatttacctagtgagcattgtgcaagactgcatggataagggctgcatcatttaattgcgacataccaggggaaattgtatgtatgttagtgacaaatttgatttcaaagagcaatgcatcttctcccccagatcatcacagaaatcactttcaggcaatgatttacaaaagtagcatagtagatgatgacaactgtgaactctgacataaatttagtgctttataacgaactgaatcaggttgaggattttgaaaactgtataaccataggatttaggtcactaggactntggatcaaaatggtgcattacgtatttcctgaaacatgctaaagaagaagactgtaacatcattgccattcctactacctgaggttttacttgcataaacaataaattcaaagctttacatct

SEQ ID NO: 157964 - DNA, 206 bp, Zea mays
  Clone ID: MRT4577_75641C.1
ttttttttttttttttttttttttttaaagagtgcagtaatgaaccgagtccatattagaaacttattttggaaatacatattccttcacaaaatgtggctgttcatctttaaaaaaaaatagtaacctcacaatgtatcatgcttataaaagcaccatgtacaagattagacagtaccacttcaactaagcttgccccctcactt

SEQ ID NO: 157965 - DNA, 457 bp, Zea mays
  Clone ID: MRT4577_75642C.1
ggccgcttttttttttttttttttgggggttttttttttttttttttttttttttttttttttttttttttttttttttttttttttttgggaaacacaaagcctctctgttcttgcggaaccgaaaaaacccttatttcaaaagcccctccgtggggatttccgcagggggtaagtacttggcttttggcacacccccgcccaagggaaacccaaccttgacggaacggaacggggaaacccaaacaactagggggacaaccgaacgccctcacgtcaaacagacaaaactcaaatggaaacgcctgcgggaaggcccttggcggaaaacccggcgggctcgccctttgcgccagagggggtggggtacatcatcctgatgggaaactcggccgggccgtcggggtttttgaggccaggctccgggttcttgggctacaacgccttttttaatctg

SEQ ID NO: 157966 - DNA, 287 bp, Zea mays
  Clone ID: MRT4577_75643C.1
aacccttaaccatccttgtaaaaccaactagcgattgggggaaggaattgttaaggaaaaacttaaaccgggtggcgctcataaaagttttattcataggacgtttcccggggggcatattccggacctgagggggggtattgaaaacatggacgcgaactacaggcttggggccatcaaacaagtgagggtgaggattttctggattgtaaaacagggtccttggcaccacaaagtgaaatgggggcttagaggcctttttttggttcaaaccctgtttaaaaggg

SEQ ID NO: 157967 - DNA, 377 bp, Zea mays
  Clone ID: MRT4577_75644C.1
ggatggacagggctagacggattcaagaggttcatacgctaaccatgcaaagaaaaaaaaaaaaataaacggggcacctagagtaaaattaattagaacgccactggcacaacgttggaaaaggggtaaaaccggggaaatccccgaactaaaccaaacttaaaggccattccccttatccccacttggggtaatagcgaaaaggcccgcacaggaccgccctgcccaaccattccacaacctgaatggccaaagaggacgaacggtacacccccgcgtcaagcgcattaagcgtggaggttacggacattaagaccattacaatcgctacacctctaaaacccgcaccttccgcttttttcctttccttccttgcc

SEQ ID NO: 157968 - DNA, 314 bp, Zea mays
  Clone ID: MRT4577_75645C.1
gagatcaataatccgagttgttcgaaaaacaagggaaagtctatttctttggcagtccaagcaaagaacaatgtccagaagagggaaggtgtaactggttctgggaggaattcaggagtacaaaaagagcatgatgagcaaagagcaaaccaaccatttaggactcagtctaatctccagagaaagaagccatcgtcgtctggcacttcttcccctgtccttcggcaaaataatcagaaacaggattcgttggtgaccaaaggcaaagtgccagcaaacaagaccggtttaacacaacaagggagaaaacttat

SEQ ID NO: 157969 - DNA, 828 bp, Zea mays
  Clone ID: MRT4577_75646C.1
ggacagtaaacttgcatcgtcgtccatctccctcgcagcatctttccttatctccctgtaacttccctaaacagcggcggcgggagggaattccccaaacggcggcggcgggagggacttccccaaacggcggcttcacggctccagggagacaccacctgcacgggcgacttcacctgtacgggcgacttcacctgcacgggcgcatccttcagccgatccgaagacaccatgcctccagggaggaagggaatacgaagcacaagggaacccccaccagaaatcacttctactgagtatgagaaacaaagggcagcaaatgtgatgaggaacaatcagatgttccaacggcttgggattaatcagttacgcacaatgatgactgctacaagagtaaagagcaaatatgatggtccagaggaatcagggtctttgtttgatggcgaggatagtgaaggctctgagccagaggaggattcccatgttgcacaaggtgtacgtagccacaacccaactcatgttgctgacaaacctacacaacaaacacgaggttctaaaagggttgtggcccctgatgttcatggacaacagattagattcactaggcaaaggagtgctgccataaatcaacaatcctccctaagcctaactactactacacaagctggttcaagagccaccacaaaccaagaatccacccaaaacttggctgctgcaacacaatttacttcaagtgttgccactgagcaagattacaccgcagcctgactactactggacaacctacttctcccacacaagctgaggtcactgaccacaatagagatg

SEQ ID NO: 157970 - DNA, 351 bp, Zea mays
  Clone ID: MRT4577_75647C.1
aatccctcatagatttgattctcctgatacctcttgccaaccaacggcggcttttaaaaaggtcggccgaccaatcaacttctctcttttcccttaccccttttcatgcctttttcatccaatctctaattaaagtcctcaaccttcctttcccccaaattttcatttacttcattgtctttaccatactttcctactacttctctgccatcaccatcaatattgttataatccccctcctcaatatattatatcacatcctcattcacttcaacaccattcctttcttcatttacataacatccaatccctactactcaacctttattaatatctccacttattctttca

SEQ ID NO: 157971 - DNA, 439 bp, Zea mays
  Clone ID: MRT4577_75648C.1
cacgcggccgcggacgcgtccgcgaggtgtcagaatttcattacaggaaaaaaacctcagctcgcgagacgcttttcttctgatacgccgaacactaatcttactcatccaaccctttaacactcgacacccggtaccgcgagctaccattccataggtgacaacagcgatatcagggcgcatgctgaaccactgctgaagtgcatgcggcaagttatgccgagctagcaattaaagatgctgctccgcttaataactttcaagacggacgacacgtgtaaggacatagttgtggaccaggtcagggatcgcgctaccagctacgatgacttgacaaacagccttcctgagaatgactgccgatacgcgatctatgatttcgactttgttactgcaaaggatgttcagaagagcaggatcttctatatcctatggtccc

SEQ ID NO: 157972 - DNA, 463 bp, Zea mays
  Clone ID: MRT4577_75649C.1
cgacaacgacggtagcctagatgactaggcattcagaattggggcttatatatgacactggaatattgtgcatggtggacatatagtgcagcaccatattggctatgggatgatatcagatgcacgaccctgtctagatgatgcaaccacgacatgagacatggctttaggaacctcctccatgcagggaagaggaatcaccatctccattgattgaggatcactcggtattagtactgggggccacctgtgaagaggagtcaccaaagcctaaaatgttgttattccactggaggatggggaacccaatggtcatgcgctaaggaggggacctaagaagactctaggggtggtgattaatgtgttgttgttcatgatctcagtagggttcaatgttgccgcaacgtaggttcacaactcaactactataactgacaggtttaatttcttactggttttctgt

SEQ ID NO: 157973 - DNA, 706 bp, Zea mays
  Clone ID: MRT4577_7564C.1
tttcaaattcattctctcttcggacgcgtgggcggacgcgtgggcgcccaggctaccaccatgccgaagcagatccacgagatcaaggacttcctgctgacggcgcggcggaaggacgcgcggtcggtgcggatcaagcgtgccaaggacgccgtcaagttcaaggtgcgctgctccaagtacctctacaccctctgcgtccacgacgccgacaaggccaacaagctcaagcagtcgctcccgccaggtctgactgttcaggagatttaagtatcaagccacaaattgtgctgtttgtggtatcgaggatgtttgctccagtattactctagtatgtaggtgatttcatgctatgtttgaatggattatgaagttgtgtttgggagatgtaatattggaagtgatgtgttgaacctatgagcctgtggtgtaatgctactccccaccaaaaagatggctatcaatcataagttaaactgaattcggattttttctgaatcgtgaacagccgttgtcatttcatgtgtacccaaacctcccgtcccgcgtgggcccgtaagctgcgcctagatttcagggctaatcgtgtgcctgaaccctcatcataagtcgtctctgtacccagcttctcgtttcgtttgcacccgtgatggtatggtttgcccgttgcccgctggaactatctattctttgcatttttcctttg

SEQ ID NO: 157974 - DNA, 113 bp, Zea mays
  Clone ID: MRT4577_75650C.1
caatgataacaccagcagtaatagggctaagtctcacacataaacacacagcaggggcattgttctccaactcccgcatccacccacacgtacgacttacgcgccactaaaca

SEQ ID NO: 157975 - DNA, 233 bp, Zea mays
  Clone ID: MRT4577_75651C.1
cccacgcgtccgctttaacatcgtttgagagaaacgagctgtacagccagctacgcccatgaaatcagctgcgttcggcagtagactcgccggcattgcggtgcttggcttgagctttgcgcttcccgcgatagctgccaatggccgccgccatgggggcgagatggagatggacgacgctccgccagacgacaccgaatatcctcccacctactttgcgcatccggagcacc

SEQ ID NO: 157976 - DNA, 860 bp, Zea mays
  Clone ID: MRT4577_75652C.1
atctgcacacacaggctccccattctttcttattgctccccattcttcttattaattcccgcgtgcgcggacgtacggcagcgagcctctcccggactccgattccttccttccttccggcggaggtgtcggctctcctctcccctcccagagagaggaaacccggaggaagcagagacggccggacagatggattttggggcagagcagcacggctgcgagcattacacgaggaggtgcaggatacgggcgccctgctgcggcgaggtcttcggctgccggcattgccacaaccaagctaagaattcgctggaggtggacctcctcgaccggcacgagatcccccgccacgaaatcagcaaggttatctgctctctctgcaacaaagaacaggatgtgcaacagaactgctccggttgcggggcatgcatgggaaaatacttctgtgaaaaatgcaacttctttgacgacgatatctcaaagaagcagtatcactgcgatggatgcggcatctgcagaactggcggcatagacaacttcttccactgcgaaaaatgcgggtgttgctacagcaatgttttgaaggactctcatcattgtgtggaacgagcaatgcatcacaactgccctgtctgcttcgagtacctatttgactcgaccatggacatcagcgtactgcactgcgggcacacgatccatttggaatgcctgaacgagatgagggttcatcaccacttctcgtgcccggtctgctcacggtcggcctgcgacatgacggatgcgtggcagaagctcgaccaggaggtcgccgccacgccgatgccagagttctaccagaagaagatggtatggatcctctg

SEQ ID NO: 157977 - DNA, 337 bp, Zea mays
  unsure (1)..(337): unsure at all n locations
  Clone ID: MRT4577_75653C.1
ccggaaccaaaatgccgggtccgactagcatcactattactacntccccccctcttcctttttttttttttttataaaactatttatttgtttgttcatataaaagcttgtctgatanaacatcaccnaacattattaatataaaaatcttccatatcttgcaaaccttaaactaaaaatttcccctttttttccataaaccctccaaaatctattctcttataaactttcctcttttttttcccattacacccgctattatttcttctaatccaaataatatcatttaaagaatcaatcctattccattcctatcaacccattatttcaaaccaaa

SEQ ID NO: 157978 - DNA, 493 bp, Zea mays
  unsure (1)..(493): unsure at all n locations
  Clone ID: MRT4577_75654C.1
cagcttagtagctcatatcaaaanaaaaaacagtgctgtacctgtacctaaacgactgaactgaggagctatgtatttcctttaaaaggttataacatttcaatgaatgttgggaacaataaataatgcaattctatgtatttttgttaagagcttaatagtgttcttcacgatgctagacatctagcaatcatcatcacccctgcctcctctagttccaataagaactgaatctgagatatgcgctactgttaaatgttaatgcattgtatgctaagattgtcaatgaaagtatttgtaaaaagaaaggttttttgtggtattggaaatgatcctgtgtgtatgcatgttggtgtctaggttcatagcctttacttaagctaaatttcagcatgaagtaataagtaatatgctaattatttgggtaatattcngcattgattaggagactatcacaggctggctctcagcactgtatccaggtctgaggaaa

SEQ ID NO: 157979 - DNA, 367 bp, Zea mays
  Clone ID: MRT4577_75655C.1
aggaaaaaaacgccggttttagtatatatatagtataaaatcattttttgggggaccaaataatatatgggtaccggagatgccatgggataaaccaacatggggggggacccccctcccttcatgagcacaaaaactggcgccaaacatgcgggggggggtttccaaccgaagaactttgttttttttttttttacacacaccaaacgattcctttggtgggcagccaactcgggcttgtttttttttgttcaaccgccaccccaagctagagagaaaataatcatatcccggggcgcccatcgaagggaacaacccctgcagggggtgcatttgcaaatggcaccggagctgcaaacgggggggg

SEQ ID NO: 157980 - DNA, 246 bp, Zea mays
  Clone ID: MRT4577_75656C.1
ctggtcaggggaaactgggaaaagtaatgattttgtccccattttctctgtaatatttttttttggcacgagatatgatgcgatcgagcgcgggagcgagttttgagtatggaataaggccctgttccaagaatgcgaagtagacgccggcactgttggttttggggggtggtgatgtatttcttattatgagattagatgtgaatagtgtctagtcagtatcgtaatctgaacgtttcatgctcc

SEQ ID NO: 157981 - DNA, 759 bp, Zea mays
  unsure (1)..(759): unsure at all n locations
  Clone ID: MRT4577_75657C.1
cgggaagcttctctccccgctaccgctccgagtcccaagttccacccggccagcctccatcgctagtaccactcctagtcccaagtcccagccttccatcgacggcgagggagggagaggcgacctccatccgggctggttccctttggtggcgccgcctttttcccagggcgtttaatacacacaaatgaactcttggtgcttctgggtgaggggtactatgcagagaggtcggctaagcagacgactaatatattgcacaggagggggcaggaattggaagctcaagtcgaagcaatgaaggcaactatcgctgaccttgaagctgaggccaaattctttgaattcacggccaccgaggcttcagagggtcttgttgaaatcagggaagagtatgatgaggacttagagacgaattcatcaagatcagaggcttcagttgctactgtggttatgtccgataaagacagggaacatgctcgaatcatggcaaggttagatgaacttgaaagggaagaaaaggatgctggaagtgcctgtgaagatgataatgatggcgacgatgatgatggagatgctggaacaagtgatgatggcgaggaaaataaggaatctggaaatgctntaagtgatgtcaatgaagactacagttctggttntggcgcttcattntctggaagtggcnggcatgataggagtcatgggaatattaagagtgcactgaagaagcctggaggagatgaaatgctgataggcatt

SEQ ID NO: 157982 - DNA, 2265 bp, Zea mays
  unsure (1)..(2265): unsure at all n locations
  Clone ID: MRT4577_75658C.1
ctctctcaagcttctctccccgctaccgctccgagtcccaagtcccacccggccagcctccatcgctagtaccactcctagtcccaagtcccagccttccatcgacggcgagggagggagaggcgacctccatccgggctggttagattcatcgcttttcttgtcgctgtccctcggcctttccccctactgtgctccgagtctgggagaagcgactcgcgcacgcgctcggccaaaccaattaagcacagagcggggctctcgggcgagaacgcgctgaggcagtgctgggtttgcagttcgtgccgtagcgtttttttttgtgtgtgtgccgaagcggagaggcgatggctgcgccgaggaaggggacggcgacgccgctgggcaccgtgttctcgccggaggagacgaagagggccgtggcgagggtggccgagtccgtcgctgggcgccgcgccgagctcgcccgcctccagggtttcgccgccgacaacgccgccctcgtctccctcgtcaacaggctccccgacgaactctctcacgatatcatggttccctttggtggcgccgcctttttcccagggcgtttaatacacacaaatgaactcttggtgcttctgggtgaggggtactatgcagagaggtcggctaagcagacgactaatatattgcacaggagggggcaggaattggaagctcaagtcgaagcaatgaaggcaactatcgctgaccttgaagctgaggccaaattctttgaattcacggccaccgaggcttcagagggtcttgttgaaatcagggaagagtatgatgaggacttagagacgaattcatcaagatcagaggcttcagttgctactgtggttatgtccgataaagacagggaacatgctcgaatcatggcaaggttagatgaacttgaaagggaagaaaaggatgctggaagtgcctgtgaagatgataatgatggcgacgatgatgatggagatgctggaacaagtgatgatggcgaggaaaataaggaatctggaaatgctttaagtgatgtcaatgaagactacagttctggttttggcgcttcattttctggaagtggcggcaatgataggagtcatgggaatattaagagtgcactgaagaagcctggaggagatgaaatgctgataggcatttctcataagccatcatcccatacatctcatctagcatttcctggccaaacctctgcaacaaattctgatgtccgagttcacactaaagctgttacttttgaagacgacaaatatgtagttagttcgtcaaagtctcctcccttgctactggattctatacagtctgatcctgtgctcaagaattcttcagaccccgctctatctcgtgacagaaagataatatcaagtggacgaaaggcctttacaggatctatcattgagcacgacgacaatgtttccaccattgaaccttctgtggctagttcgttggcaaaacctggtacttgtgcttcttcaaggcccgtgtcaaggttcaagatgcagaaaggagggcggtgagtctggacactcgggtggacctttggtgtctgatagattgcatcttgaacacgttcaaattgtctgtgctgtctgaactcctggacgctagacatgttgtggatcctggacgctagacatgttgtggatcctggacgctagacatgttctggagtgattgtcttctgccgactgtagagtgaaaccgggacgtccaagcgaagaagggaattaaaaacgaggttttttttggtcggttaattattagtatcacaggacgtccaagcatcgcattagttagccactgcacacagagcctgtcggccaataaggtcagttaattacagatttagtggtgctagcttgctgttcctacttgtgctgtagcagagtgtcatgacatggtcagtagcagccgatgagcgccgcgaagtcagcagggcggctgctggtggtgtctcttctcgttccctgggcggcgccgtggagcaccagattgtctctctcacgtatttcagcggcagcaagggacgaagaacctgccctctgcatgtcagctccacctgccattatatgtgtatattatttcattcattaattcagtgggtaatcgtcacaaacagctatataagatccagtaaaatgttgaataatctgatacacacgcacacacacgagtataaaacacaagtatttgtaagcaacctaanaaaaaaaaaaaaaagcccctagggcc

SEQ ID NO: 157983 - DNA, 244 bp, Zea mays
  Clone ID: MRT4577_75659C.1
ttcacgcgtccgtctccactacctggtatatgtataacaaagcaggcgttcacacgcctcgcgcgcgcatctccaagtataatacagggctagcagtttacaccagggacaacaaaccctggcaatcttctactgaagagaggctattacacatagcatcgccgtatcacactgccatttacatccgtgatctccaagtgtttcaaagggcacgattggctgacaccaaatgccaggatgctga

SEQ ID NO: 157984 - DNA, 184 bp, Zea mays
  Clone ID: MRT4577_7565C.1
gtcaaggctcatgttagtgctgggagtgatgagatgcaagcgctacgctgcgattttttccaggggataatccctgtaccattcgatcgacttgaatgccaaaacagtgtactccatcgggaacaaagttgatcctcttgaaactcacttgacccttacaccagtaatataaggatattcaaca

SEQ ID NO: 157985 - DNA, 344 bp, Zea mays
  Clone ID: MRT4577_75660C.1
aattcctgggtcgtcgagctcattttttgtcggccgcccttcctttttttttctgaggggaaatcaaaaagagtttgggggactaaccttttacaaagatttgtacaactggctacttaacaacatttaacacatcttatatcagctcataccaaacctgaatctacttagaatgttcctgttaacttgcatatctcatttcaataacttattcttgtctcaacgctcttccctcaatatgattcctgggcaacctatcattggtttaaaaaaatttattatagtccccaaggagaccactactatcttcttagatcattggcaagcattgaacactttttact

SEQ ID NO: 157986 - DNA, 563 bp, Zea mays
  Clone ID: MRT4577_75662C.1
aattcggcacgagggtttctttacccagcgaaggcactgcatctcccatcttcgtcttccacgcagcgccggcgctccatctcccgcaggcgacggcggcggtgctcaggcgcgggctcttagccgcggcggcggtgctcaggctcgggctcgtagaggcggcgtcagcgtcttcccctcccgcctctcatcagtcacctcgcgccttcgcctccggtcctccgcacaccggccggtgttctgcgtgcgtgcttctctctctcctcccgcctccggtggatcgtcaacggcgcccgacccctcaggctgcgccgcgcgcggcctgagggcagcgggagccagcagccgctgctccaacaaaggggttgcgccgctttgggagcgcttatgccccaaagcgaagcgttacacgtcctcttagcgcttcagcttgctgaagcgtgcgcttagtgccgctttttggaacctggcagtaactatgtggacgaacattttcaaaataggggagctccaaacagtttcttggtttcagtttcttcctatcgaacccgatgcaagtgcag

SEQ ID NO: 157987 - DNA, 499 bp, Zea mays
  Clone ID: MRT4577_75663C.1
cggaccctggttcctttttcccgtctagcgcttcaagtgcagcgaaacaagcagttgatcgctgactgtgggtctaatccggatagtgtatatacctcgttctgttgggatccaccgcgttacgctaattcccttcaaacgggcggtagccttcgatcttccaccatgcctgtactgggtagttgtatccgacacaactggcatggattccaccctattcatcatcggcacaataagcaacatcatctaacgtatcatgttcatataaactatcaacactttctgaaagatcgtgcagggcgaggacgatcggagaattcaagccggtgcctgacgatgagacgctgttcaacgcgctgctatggctctactacgggctgaccaagcccgacggcttcctagaggacaccggcaatgaatttggggctgtaatggcagtccatctacgtccaactattcatcggctactccgccaaccatgccacaaggttaagaccgc

SEQ ID NO: 157988 - DNA, 365 bp, Zea mays
  Clone ID: MRT4577_75664C.1
caaggatcgacatgatggatccacactctttattggaccgtcgattcagtgtctgcgacaggagtagcttctggagcaggccgagtgatgttgacactagcatgaggtgtggtgggtcgtctgatgatgagaacattgacgaggaatcacctagcggtatattcttcccaccgatgccatgtgcatatggtgctccactgtgcactggttctaggtattgcttagttgccagcaagcaaatggttggaattttcctcatggtgtgggtgcgaagcgatataagggagcatgtgaagaacttgaaggtttcatgtgtcggtagaggtctgatgggctaccttgggaacaagggatccatatcaatc

SEQ ID NO: 157989 - DNA, 235 bp, Zea mays
  Clone ID: MRT4577_75665C.1
ccgatccgtcctactccacaatccacatttaccctccacttcttcctacacactccgggacactgctcactatcaacttgtgactaacatgcccagctaaacttcctcttataagagacctcaatttccaccttctccctctcactcactacccaaaccttaaacactatcccccacatgttgtatcacatttacctgactaactacacctaccacataaacctcaacagcttca

SEQ ID NO: 157990 - DNA, 326 bp, Zea mays
  Clone ID: MRT4577_75666C.1
tggggggcggaaaaacccctttttttgggtggcacaaactttggcccctgggccaaaaggggccgaccgttccaggtccaagaattggcacaaattggccccggtcccggggggggtcccttccaagggggaacattaccttacaaaattggggtacaagggcccccacccttgggcagagaaatgggggggatcttttttggcgaaggaccccttttatttggatgggttcccccacacgggtcgggcccgggtggttttgggcccgggggttggaaatttaaaaccttgtcggaaccggtgcccgttttttttggggggggctt

SEQ ID NO: 157991 - DNA, 426 bp, Zea mays
  Clone ID: MRT4577_75667C.1
ggacctttgggctgatttatgtgcttgtttatgtgcttggcttagctaagtaaagcgccagcgtaagcgtcaagactatcgatttacgtgaggccggcgataggggcaatagcggaagacgtaggttcagtataagtagcgatactagtgatgagagcctacgtagcagtacgagtagtatgaagttctataaggtgaatgacctgtggcgggaggtgacttagatggttagagtcagagatgggacttccggattgagctaccctaggtcgtcgaagagatcaggtcttagtgacaccggtagtgcgcactctctggaatcgagcgggattgtgagtcaccctgtgacgaaggctacggataaggtactatccgtaggttggaaaaagtcgtcctgggtctaaatagagaaggagaccccgtaac

SEQ ID NO: 157992 - DNA, 427 bp, Zea mays
  Clone ID: MRT4577_75668C.1
cacacgcatcggactatctttttctgttttttgcttaagtgttctattctctatggtggctaccgactgggaaaactcaaatcgaacgcgagggtcaagttcgagactattgctgcttcatgaacaataggcgggtgggctatcgacgctgacgacatactgtccagggcaagaataacaggtgcggtgatcaagcttataccaatcacactatcggtggagcttgctattatgactctagggaggacaaccaacccaacgctgactgacaaggaaaggtgacatacatgcgatccgtacaaagatctgcatgactactgtataataaatcatttcaaggctatatgcaccaagtgaaacgatagcgacactctttgaacctatgccctatattatcaaactgacgagggtggctgttatgccacaa

SEQ ID NO: 157993 - DNA, 357 bp, Zea mays
  Clone ID: MRT4577_75669C.1
cccacgcgtccgcccacgcgttcgcccacgcgtccgcccacgcgtccgcccacgcgtccgcggacgcgtggggaagaacaatcagacaaaatgatccagtcattgacaaccatcaacaaattctttttctggaaccgttgtagtgtacaagagatcaagctttggttttgtacataatggtgccctggttagacctatttcctgactgtagttattggcttgaagtctagtttggggaaggttcttgttgccagctaccttgcagttgcggtatttgagcagatagtgtattctaactatgcatactaatagatgaccggcttcggtgtttttggatattttatggtttggatcaat

SEQ ID NO: 157994 - DNA, 921 bp, Zea mays
  Clone ID: MRT4577_7566C.1
gtctgactcgtctccacctctccgccggaagaacccggcgagggccagcgccgtacatatatcccgacctcagcggaaccctacctttgagaaaccccttctccgtcactatccaagctctgcctgcaccgccgccattactactagaggaagcttcaactgttgtgctcttgctctctagctaatagtggttgctatcggtgctactaccgccgccgtccaaaccctagccctgatgccgcagcaggaggtgcccgaccagatcgccgtagggtggttcgcggtggaggcgccggagcgaacggggagtctccagaggagcggctccaacagccgcctcaacgcgcaggcgccggaattcgtgccgcgggtcgcggcggtggttccaccgccacagccaccgccggcagtgattcgtgtgtttgcggtgccctcgcctccacctcgcgcggctttctttgcggctcccctgcctccctcgtcgttcgagttcttcgcgccggtgagggttggcggtgcatttgtggccgaggagccagagccggagatggagcgcgcgacgccacctgttgctgagccggcggtggacgggcttactgatgaggtggtgcagaagatcaccaagcaggtggagtactatttcagtgatataaacctggccactacggaacatctgatgagatttattagcaaggatcctcagggatatgtgccaatatcagttattgctggcttcaagaaaataaaagctttagtgcataataacccaatgcttgctgcagctctccgtacctcgtcaaaacttgttgttagtggtgatggaaaaagagtaaaacgccgacatccatttactgaatctgatatgcaggagttccagtccccgattgtagtggcagaaaatcttcctggtgatccttctta

SEQ ID NO: 157995 - DNA, 336 bp, Zea mays
  unsure (1)..(336): unsure at all n locations
  Clone ID: MRT4577_75670C.1
tagatttttccaagcgatataacgttcgggacaganacagaggagagcggccggataccaagcccaatgaccgcagtaccatatttcctatcactttaattgaacaacattagaagtctattctaatctgtaatgtctaaagatcaatcatatctgtttattgctttaggtccacattatactgcaatctaatccatttgatttctgttttcctttaaccacatcatacaatatacacattggacagtcatatgtacctgtatctcttgcgccacactgacataattttctttgtaaattaataaagccattcacccagccaatgcttgttttctc

SEQ ID NO: 157996 - DNA, 113 bp, Zea mays
  Clone ID: MRT4577_75671C.1
atcgactaaaatagtgatttgtgatgacatatgaaccgtgtagcgatatgtacaccttacctggcaggcacacaactgtttctgacgtgtggtattactctgccggggaataa

SEQ ID NO: 157997 - DNA, 305 bp, Zea mays
  unsure (1)..(305): unsure at all n locations
  Clone ID: MRT4577_75672C.1
gaaattcccgnaacaaccccgcggggggccggccaatgaaaccaatcttcataaacacttccaactgggagcatttcttcctatgggggtaacccacccatggtgacttttccaaccgggataggcaccctacacacattcaatgtctataccgcgactgccaccattcaagacggcagcnaaaaataaaatagtcacaccaaaactctgaagtatgtcagttttcgcacgaactttggtgctcttgtattttaggaactttcttacacactgaaataagtatcacatgaccctggattcttcct

SEQ ID NO: 157998 - DNA, 235 bp, Zea mays
  Clone ID: MRT4577_75673C.1
tcgcgtgaccaatgtcaccgagtacatcgcgggcgccaaggtgaggctggagtgcaagcgctgtggcaccggcaagctggagcgctccatcgactgggtgaccgacgcgaacggcacgtacacgatcgagctcaaggacagccacgaggaggacatctgcgaggtggtctaggtggatagccctgacaaggactgttactaggttcatgcggacagggaccgcgccggcgttctg

SEQ ID NO: 157999 - DNA, 158 bp, Zea mays
  unsure (1)..(158): unsure at all n locations
  Clone ID: MRT4577_75674C.1
accggtccttaccggctctcctacgcgtccggccgcacaaagggaaggatactttnttgcntcttttttatcttagtccaaactagtgggaggttgagttctggttattgatcggtgaacactatacaagctggattgttgatgctctgactgcattt

SEQ ID NO: 158000 - DNA, 234 bp, Zea mays
  Clone ID: MRT4577_75675C.1
gtactcttgcatagaataacattggcttcttcgggccaaaatcacggaagtggaaaaaaaacttccgggtgacaaaaaggaaactttttttggggaggtggcctgatccctggggtattccggaaacagatcccttttttttaccaatatttgggcccaaaaagggcaccctaaaaagacttttttatgtgcccaggggtgaatccttgggtggcgttaaaaaaaaattcgttt

SEQ ID NO: 158001 - DNA, 390 bp, Zea mays
  unsure (1)..(390): unsure at all n locations
  Clone ID: MRT4577_75676C.1
gccatcgaagcaccaacctggtacgcttctccgcttggatctccccttccntgcgtgcggagccgtgccgagcaaaccttaacgtagtccgtagagcaaacagagcaaggaaatagtttatagattttttgcgcggagcagttctatggttggggggggggactacnagacggatcagaagaagcaagctgctgcaggtggtgtgtttcactattcacaattggttatggtttgcattggtggggatgttcgccctactgctctctggttgcctttgagggggggggcttgggggttgtccatcttcctgagagtgcgtcgtgcggttgttggctgctttcttccgagggggtttctctcttttttgtgggggggtcctcgtgttcgctt

SEQ ID NO: 158002 - DNA, 228 bp, Zea mays
  unsure (1)..(228): unsure at all n locations
  Clone ID: MRT4577_75677C.1
gganacctaagtgatggttaccacggcaacgcgaatgctcgattgttctagaaaaccatgagcctgcgctagcccatcgccgtggtgctcaacaatggccacaacgtgacgtatgacgtcagcaagtcgagacacagccgttgccgcgggcgactcatggatcacagcaagttcgtgcgacatatgatccggcgacgtgtgcggcttcgcgccctacgagcggcgtgc

SEQ ID NO: 158003 - DNA, 968 bp, Zea mays
  Clone ID: MRT4577_75678C.1
gtacaccctcgaggccgtgcggggctagaagttcgggacactcctcgacgccgagaccccattggtcatctccaaaaccccaaaccctcgttcaacatagccattatccgaagttccgaacccacgccaagccccagggtccgaccgcagaaccgacccaaaatgtcgcccgcctcttccatgctcaccgccgtgtcgctctcctccccgctcccagccccgcgcctccgcgccgccgccgccgcctcctccttcgctccgccgcgccgcgcggcagtcgcactcgtcgtgcgcgcggcgtccgcatcttccaagtcccctgccacggcggaggcggccccgaagaagaagagggcgaccggcatcacccagccgaagtccgtgtcgccggcgctgcaggcaatcgtgggcgacccggttattccccgcaccgaggtcctcaagcgcctctgggcctatatcaaggagcataacctccaggatccctctgataaaaaggtggtggtttgtgatgagaagctgaaggtcctgttcgcggggcgggagcgagtcggattccttgagatcgccaagcttctcaaccctcacttcgtgaagtgatgaggaggagccaggccacttccaggaatcgagttagcttatatggttggttggttacttgtggctggcctagagggtgcgcgtgcgttgggttttggtagcctgagttggctcgctcgactttgtagaatgctgttgttagcttttattagtagccttcagctcgtagcctggtatgcagccagttagcgtgtgtggtgttctgctatggtttaagtttaaccactgtccatagtcagtcaatgttagcttccttgtccttgcaatggatgttgctgtgtgaattatggtccaacatggattggttgctctgctatggtttagtcactgcccagtcagtctatatatattttttgatggtaacagtc

SEQ ID NO: 158004 - DNA, 365 bp, Zea mays
  Clone ID: MRT4577_75679C.1
cttcaaaaaaaatctttgaactattgcaacctttattttgattacaccgcagttcaataagataaaaatcaagcaaaccccaacattggcagccttgcgggtctcagcacgcgtggcctttcgtttcaggtgtacattattcagtttgactcaatttactacaatgtttttgtaactcgtttgccaacatctagctaactgattgatgggcatttatacatgtgcagaaaaaacatccccatgttaattatcgggagaaaagaaccaaagcatttgattcatctcagttcgcaatctacgcagcacaagccatagcttatgggttagctgtttcctcaagtttctcaataccttttccaactttc

SEQ ID NO: 158005 - DNA, 797 bp, Zea mays
  Clone ID: MRT4577_7567C.1
cattgggtacctccggcggccgggaacgcactctcctatatccgccgccatcgtctcgggctctcatctctaatcttcgggttcgcgtcgcagtgtcttccgcccgggctaccaccatgccgaagcagatccacgagatcaaggacttcctgctgactgcgcggcggaaggacgcacggtcggtgcggatcaagcgggccaaggacgccgtcaagttcaaggtgcgctgctccaggtacctctacaccctctgcgtccacgacgccgacaaggccaacaagctcaagcagtcgctcccgccaggtctgactgtccaggagatttaaggtatcaagccacaaactgtgctttttttgcggtgtcagggacgtttgctccagtgttactttagtttgtaggtgggctccattgctgtgtttgaatgaattatgaagtttgagtttgggatgcgaatgatgtgtcgaacctatgagcctgtgttgtaatggttaccccagaccgcaaaggatggcaatctatcataagttaaactgattccaaaaaaaaaaaaaaaaaaaaaaaaaaaaaaaaaaaaaaaaaaaaaaaaaaaaaaaaaaaaaaaaaaaaaaaaaaaaaaaaaaaaaaaaggaaaaaaacaaaaaagggggggagtcctgaaaaatttaagggcaatggcggttttggaaaaatgcattgggggggggcgatcgtttcgttaaaggtgccaagtacacctatctcctttgggggtaacaacgccggggcggggaaaacccggggggacccaggaaaacccc

SEQ ID NO: 158006 - DNA, 356 bp, Zea mays
  Clone ID: MRT4577_75680C.1
ccacgcgtccgtccactcctccttccacacttccgctttcttttattccacacgagatttctcttctggttgagctcattggaggacaccttcggtatcttttaacaaattttcccccccaatcaaactccccaccttacaatttcttctctcctgatcttcccatctagtcctttccttttatcctaaatgattttctttaccctcatttctaccctttttttattttaaatctcttttataatatttttttccactttcttccttatctttcctattaattctacaatcttttatctcatattcaatattctattttctttcttctttcctttcttttttttttttcttctttt

SEQ ID NO: 158007 - DNA, 210 bp, Zea mays
  Clone ID: MRT4577_75681C.1
atggctcgaattgggagcttgattggtttaaactatcttaaggaattttcggtggttgtagtcattagagatccaaacttcgatggggagttgggtagcacctacagtgtgatcttcaacacattcttagataaagctctcatgcactaccagaaggtaatatggacttctcgcttttatgcctttgagagaatctccaccattttgtaa

SEQ ID NO: 158008 - DNA, 468 bp, Zea mays
  Clone ID: MRT4577_75682C.1
tttttttttttttttttttttttttttttttttttttttttttttttttttttttttttccacccccgaaaggggggccggttaatttgcccccaaaccagtgcaaggacaattcccgggcttttttccaagaggattaaacccaacccaaccgccgtgtttttttaagcaagtaagcccatttcccggggggttttaagggggttttaaacacacaaaaacccaaaaaattttttccaaaaaaaactgacaacttaaattttcccccaaacactttttacaaaacccgtttgaatggaagctgtgtttttttcccaccccccaaaggaattcccttccttgaaaaaacccaaaagcaagcctcctttatttgttttaaaaaaattaatgacccccctcccccccaattgggcccaaaaataaaaaaatctaacaccgggatccgaaaaaatttaacttttttttttt

SEQ ID NO: 158009 - DNA, 323 bp, Zea mays
  Clone ID: MRT4577_75683C.1
aggggttgggttttttttttttttaaacattattttttatttattttttaaaaagggccccagggattggttgaagcagtacaaaatttgaaaatttttgtcaaacccttttaaggtttaggcacacttcccacctaaattttcattaaaaggacttgtatggggaatttcccaaaccccccacgggaagggggtgggaggaaaatttttttccactttaaattcaaggacagggggtttgggggcaaaataaatggaaaaaattttgggaaggaaattttttaaaggagggtggcccaaaggggggggtgcaactttggaaa

SEQ ID NO: 158010 - DNA, 599 bp, Zea mays
  Clone ID: MRT4577_75684C.1
cggccgcgtgggcatcgattttgtagtgattgatgatatattgtaagataaattggtgttcaactatatctctaaagacttcctcagatcctaacatgcctacaaaagacaaacagaggtagtggtttacaagagagaatgaaaaaaacatttgtgcatacattcataaaaccctgagtgtgtttgtgaagctttcataagagaatttggtacgtggatatagctcttgggaatcaccattccatcaagcagcataaaccataagcacacgtccagcaatgtcaatgaagaagaaaaaaacagctgtttctatacccccaatgttcatctattgatgtttcaatataaataaatctgggactggaaactgttatacaaagttacaaactgatgaagcaaacatttccacaagatatcaaattcaaataaattaggttctagttgctcctttttgccttactgtacataactttgttagtttgcttccacttattcattataaatatatagtaatcaatagacttgccacccctgactattaagaaaatagggtcacatagttcagtggtatagcaaggaacagtactgtagttcactgg

SEQ ID NO: 158011 - DNA, 340 bp, Zea mays
  Clone ID: MRT4577_75685C.1
aaaaaaaaaacaaacaaacaaatcaaaaaaaaaaaaaaccaacaattaaaaaaagagggggaaaaaaaaaaagaaaaaaacaacaaccaaaaaacatactactaaaaataaacaaaccacatactaaacatctacgccctcctttatgactcctttcttacaaagtctgacatctatcttaacaatgctattctaactgattagaaacacttgcctatgtatgactaatcgcctagcatgatcaaagttgaatatattgccagacgagccacccagaactctatcacggttgcccaatggatgcttcaaactcctggtgcaacaagctacatgagatgca

SEQ ID NO: 158012 - DNA, 335 bp, Zea mays
  Clone ID: MRT4577_75686C.1
gcgtcagcccacgcgtccgcccacacgtacaccacctctcatttcctctgctcaggatccactataccgttaggttccacctatcgaaggtttgaaccctgctcaagaagatcatctgccccatctacaatcagctattgctgacgcactcacgtctatcccagaaccaatacctgatgcccttgcaaaactttctcatgaaatacttgatgcaacaccaccaccattagctgaactgatgaaacctcttgcacaactgatgccaccaaacaataatcgcaatgctccatctgatgtgcatgctgacgggtcatctagctctcccacttcacaaa

SEQ ID NO: 158013 - DNA, 988 bp, Zea mays
  Clone ID: MRT4577_75687C.1
gacccccgaggctggccggggaacaataactggcaccgacatgcggaagagaatgaacaggatccgatccgtcctatataatccctcttctcccacctccgtctgggtctccgtccgtatataagaagccagatttcgaattccctcctcctccgcctctcccgcagtccctctcctcctttccctcccccgtcgcgatcgctctgtgctccgcctccgtccgtcaaggcctgctcttgcgccgttcctcctcgcccaatccgccaggggatggccacattcgagctctaccggaggtccaccattggcacctgcctcaccgagacgctggacgagctcgtctccagcggggccgtcagcccggagctcgccatccaggtccttgtgcagttcgacaagtccatgactgaggcgctggagatgcaggtcaagagcaaggtcagcgtcaagggccacctgcacacctacaggttctgcgacaatgtctggaccttcattctaacagatgcaaccttcaagagcgaggagattcaagaaacactgggaagggtgaagatcgtggcctgcgattccaagttgctgcagcctcagcatccataaaacaagagtcgcctgctccatacatgttcagctcacggtttcatgcttattactggcgccacccaaaccttcctagttcatgtgaatttttgctccctatgaactttttcctagagtaccatggctgtcaacatgttatccgtactgaaatatggaatacatggttttgctttttctttcttttctgttctcgaatacgcaaaaagatctgcacgtcattgtaactaaggtagtcctcttcccttcacttcctgcagaggtcacaaatctatctcatagtcgatcgataaaaaaaaaaaaaaaaaaacggccatggagcatcagcgagcaggtcactctctgtgatagtttgtctcgataaatataactataacagtctacacagcca

SEQ ID NO: 158014 - DNA, 474 bp, Zea mays
  Clone ID: MRT4577_75688C.1
tctttttttcctcgcccgcccggaggcgtcacaccagcactctgtgtaagcctgaaggcctgtatagtgcggaaagcaccacacagacacccgatggcactcctgctgatgagcggatgcgctgtgcctccagtcgtccacgcagtcccggtgggattctgggtgctccctacggcgctgcctgggaagctggtcgaggccgtagcctgttccgtctcctccgatccatccggatagaggaactgcggaggtccagacacatggcgtatactgaacatgtgggctgttttcgaacatcataacatgtagcactattacgaggccctgccccacttggtgattgcgctcgtcaagagaggggatgctcatccacttatggcgatcctttaatgcgcacattgaggacaggttccagccctgttagggcacggtcggattcaagaggaacaccgacgggagctttaattttgaaga

SEQ ID NO: 158015 - DNA, 716 bp, Zea mays
  Clone ID: MRT4577_75689C.1
ccgccgcgccccctcgtccacacccccgactgttctacaccatgtacgtacgtctagtactggacaccgtcagccacaggatcctgaaacctgaaggaacctgaatgctgctgggacgtgttctgttttgtgcaaccaaattttcaggtttgggacgccagcatcatccagaccgctgaagacgacttctacggtgacagcggagccgtgtatatcgaccccctgaagaaaaacataacgcagggagaatggtcggagcaagtgtctagctgggaagcgtgcggcaagaaccagactgcatgtccagacatatatgcgtctgagagcgtcgctgcagcatgcgactgggcgtacaagggagtcgaggaagactcaaccctagaagatccctatttctccagcaggctgccggtagtcagcctgaggctagcgcaaggcggcgtcagattagccgccactttgaataggacgtctgggtgcggcgcggctgcatgcgcctggccgggcacgggtgtcgaggtagacgctaccccagatgacccctggttccccagcaggctgccggtagtcagcctgaggctagcgcaaggcggcgtcagattagccgccactttgaataggatttttggataatggtggagtacatttactatacatggaactattatggaattaaatgatagtacatataactattggtttctccgacagcaacg

SEQ ID NO: 158016 - DNA, 581 bp, Zea mays
  Clone ID: MRT4577_7568C.1
ttctgatccttgttcgcttccggcttcgctggttctctgcgtccgcccctgccgggccttgtcttctcccccaaatcaatccctcgcccacggacccaaccaaatcctcctccacctcctccatctccagccccgtccctacccagctcgtgtaacctcccgatgtccgggggcggaggcggcgcaggcgcgggctcgtcgtccggcggcggcggcggaggtggagggggcggcagggagggcgactgggactgcggcagctgcggcaaccggaactacgccttccgctcgctctgcaaccgttgcaagcagccgcgcctcctcgtcgaccctaacaccccgcgcgactccaagtggctaccccgtgccggggactggatctgcaccgaaagaactgcaaaaagtgtggcctatccaaggaggaagcagcaatgccagcattgcaaatggcagggatggctatgccagcttatgcaacttatatcgcaagactacagagccttgctgcttctgcttctgcatataagatgaactttgggatggctgccaactcacctttgcagcagcaactacttgcaaat

SEQ ID NO: 158017 - DNA, 403 bp, Zea mays
  Clone ID: MRT4577_75690C.1
gggacgggtacaagtcctccaaaacttttttatttttattattttgtatttaacataaaagctgaaaaactacacatccttgctgggggcggtaccaaactataaaacaccttcttttttccccttaaataaattgcctaacaacaactttagttgctcgggagtgtgcttaacgtatttcccaagggccttgctattctcaatgaaaggcccaaaaccttttattaattaacggtaggcatgcaacaagatttcaaccacccccaatcttatttactcccccaactcattgttttgaaccgaccaaccccattgcttggggtagatctctttgaacaacacattgaaagaccttaatttctccttcacaactgttctttaaactccactgttttttccacca

SEQ ID NO: 158018 - DNA, 588 bp, Zea mays
  Clone ID: MRT4577_75691C.1
gacgtggctgaaatggtcctcaaccaatgcgattgtctatcgaccccgcccgcattgccaaacatgtagggatgaatcaagctcgtgccgtgcgtttgagacagtaggaggtgctatgactgagtacacatcaacgatctatcatgggcaggacgagcaccatctggctccacaacacctgcgcaggtacttggtgctgtccgagcctataatccttcatctggtgctcatggtttagctaaagaccagagatccaattaaaacctgactgaacagacgagctacaatgcttccaccactttggcactatgcttaggttcataactaaggataccactgttactgcacacaacaccgtaggtgaatgcttttgtaaaaagcaggcgatgcttgacaacagcatgagggcctgcaatctgcctgtgcccagaaaacaacaggatcttgaatgtgcagtgaggcaagctgaactgcactggagagtagactatggaggaggctgtacgaagggaactagcaaggctagtattagttgagggatagtgttggcttgtagtattaggatattgacttcttttatgatcaccg

SEQ ID NO: 158019 - DNA, 273 bp, Zea mays
  Clone ID: MRT4577_75692C.1
ccgagacccagctctccatggaaggcgtcaacatgccctcgtccccgctcgcccacgcatgcgcgcgcccacgtggctgggcagctcccgcaccctagcctgtgccttcgccacgccctcgcccacgccaacccctgcctctctcccgccgcgtccgcgttccggatctgtcgcctcccgccgcgccctgcctccctctcccaaccttgccagcaggaccatcgtcggcgatgcctccctcctgtcgcaccttacctcctcatcccgacctct

SEQ ID NO: 158020 - DNA, 545 bp, Zea mays
  Clone ID: MRT4577_75693C.1
gaacacaaagtaacttcattattgaggaactgagatagagccttattacaacagtcctcacgtagcgacttgtgtaaggagtacttggctatttgcacaataccgtgcaagagagaaccacacttgacggaacggaacggggaaacgcaaacaactagagcgacaaccgtacgttctcacctgagacagacagaactcaaatggagatgctgtttggaatgcccttggcggtgatgcggctgtagcggtacttggactgcggatagatccatgagttggcgacaaactactatggtgccggggccggggacgttaatgagggtgatggtcttgaggaagaactcagaggcgtggttgttcttgacgatgatggcgcccgggatgccctgcttatacacctcccagtcgaaggtgacgcggaactggttctcgctggacagaagcggcggcgggttcagcagccactgctccaggctcgcctccgtgcccaacttcccgaggttgccgttgttagggtcgacgacggtggagctgataagctggca

SEQ ID NO: 158021 - DNA, 777 bp, Zea mays
  Clone ID: MRT4577_75694C.1
ggtaccgggcatctatcgagttttttttttttttttttttttttttttttttttttttttttttttttttttttttttttttttttttttttttttttggggaaaagggcccaacttttattaagggggaagggaaaggggtttttaaagaaaaggggatggacaaatgtaaaagccccggaggaccggggacccaaaaaaaagcttccccaaaggcaggggcatcttcagggaggcccacgggaacgggcccccaaacttgccttccttgacaagggaattcggccccggaaaaccccggcccctgaagaccccctttaacagggccttcaccccggccggaaacccaaacgggccaaaaagggggggccccgaaatgggaggagccatggcgttgttggccctgtacccccccggggggcccctgggccccggctggggggcccccacatcgcccccggatccaccgatggggccgggggcccaagccccccccccggtttgcgggcccctgacccccccccgagcggggtcccccaggaccaccccttttttcttccccgggaccccccccttgcgaaacacccccttggtttcccgggggggcggaggtggggcccccccccccggcccttggggccgggggcgggggggggcccgccggcgctgggggcggaggccccgccgcgggggcgccctcctccccccccggcggcggcgcgcgcggcggcgcccccccggcgcccctcgccccccccgcccccgcccccccccccc

SEQ ID NO: 158022 - DNA, 679 bp, Zea mays
  Clone ID: MRT4577_75695C.1
cggggactacactcagtctgcaaataccccacaaggcctctccaaagagctagtagttgcagttagctctgccggtagtggaaccgaagatgttcgggaacatcggaaagatccccatcattggcgacctgacgggcagcaacaagaatgcgcacctcaagggcaacgtggtgctcgtgcgcaagaccgtgctcggcttggacgtcaccagcatcgccggctccctcctcgacggcgtcggcgagttcctcggccgcggcgtcacctgccagcttatcagctccaccgtcgtggaccctaccgcgacgacgagctccggaacctgaggggcgacgaccagcagggcccgtaccaggagcacgaccgcgtctaccgctacgacgtctacaacgacctcggcctgcctgacagcgggaacccgcgccccgtcctcggcggcaccaaggagctcccctacccgcgccgctgccgcaccgggcggaagcccaccaagagcgaccccaacagcgagagcaggctcacgctggtcgacggcgacgtctacgtgccgcgcgacgagcgcttcggccacatcaagaagtcggacttctacggctacgccatcaaggcgctggtgaacgccgtcatcccggcaatccgcacctacgtcgacctgtcgcccggcgagttcgactccttc

SEQ ID NO: 158023 - DNA, 288 bp, Zea mays
  Clone ID: MRT4577_75696C.1
gcgtgccatcaccatacactaggctttaaggatgccccgccttcctaactaagtgcattagcgtacgacggatggggaagcagggtagcatgagccgagcagcaggagtggctagcagcatgtggagcctcagctcgctcatgcaatggcagccagtcgcggttgcggtctgtctggacttgcggcagggcagggcagggcttgtgcgcgcggcggtggtggtagttgtagaatattcggtctaggcttcctcgcacctagctacggtcgagactccgcctgacgcta

SEQ ID NO: 158024 - DNA, 682 bp, Zea mays
  Clone ID: MRT4577_75697C.1
gtttttcttatctaaccgtctcggctctcgagagatcgcatacgcctgactgcccacccactctcccctgtttccttcctctcttcgctcccagtcgacgcgtctcgcccggtataccgacgcgagggaggcaacctcgaccaccgatgaggcatggacatggatcatgaagtcggacgttaacatgttgctcttgttcagcggcgatgagacggtaccgcttcttcggctgcctcagtgccggcgccgacctctgcttctgatgcctgctctgcgcgcacgggaccgcgaatagcgtgtgtctgtgtgtcgtcatatgggatgtgatgcgtgcggagctctccatgaataccatcgtgccccgttggctagtggttcggtgtgctctcatatctaccgagtcataatcaccgtcatcatcatctcggggatcaaccgcaaagctaagtgctactacctctttgatggatgcgcccacctttcgtccgagattgactgtgctctcgctgggcttgctgctgctatgtccttcggtattgttctctgatgctggactcatggccaatgcgtctcatgctgagctttctcgtcgagatggatcctcatcctcattttcgcataagcggttgctctctatgctctagatggtgaaattatcctttcgtctcgcgctgatccatcc

SEQ ID NO: 158025 - DNA, 880 bp, Zea mays
  unsure (1)..(880): unsure at all n locations
  Clone ID: MRT4577_75698C.1
aattcggcacgaggctcactcactcactcacacagcaaatacccacagtccacactccacagcaagaaccgaagatgttcggaaacatcggaaagatcccgatcatcggcgacctgacgggcagcaacaagaatgcgcacctcaagggcaacctggtgctcatgcgcaagaccgtgctcggcttcgacgtcaccagcatcgccggctccctcatggacggcctcggcgagttcctcggccgcggcgtcacctgccaactcgtcagctccaccgtcgtcgaccccagtaagagaaaccgacaaaaacaaaactagtagaactacggctacgggtgctgaccctgagacaaccatcgcgacgaaaacgatgacccatcgagacaacgagcggatctagctagagtctggacaaattaagaacggataattacttttatttacactaatatgtacagtatgcagtagtaggtactagtagcaaggagtacattttacacgccgctctgaatgatgatattgacgctgaccctgacgttgaccggcgccggcgtgtgcagacaacgggaaccgcgggaaggtgggtcaggaggcgagcctggagcagtggctgctgcacccgccgccgcttctggccggcgaggaccagttccgcgtcaccttcgactgggaggtggagaagcacggcgtcccgggcgccatcatcgtgaagaaaaccacgcctccgagttcttcctcaagaccatcaccatcgacgacgtccccggccacggncccatcgtcttcgtcgccaactcatgggtgtacccgcagtacaagtaccgctacaaccgcgtcttcttctccacgacgtgagtaccagaaaaaaaaaaaaaaggccccta

SEQ ID NO: 158026 - DNA, 785 bp, Zea mays
  Clone ID: MRT4577_75699C.1
aattcggcacgaggcttcactcatcacttcacacagcaactacccacagtccaccctccacagcaagaaccgaagatgttcggaaacatcggaaagatcccgatcattggcgacctgacgggcagcaacaagaatgcgcacctcaagggcaacctggtgctcatgcgcaagaccgtgctcggcttcgacgtcaccagcatcgccggctccctcatggacggcctcggcgagttcctcggccgcggcgtcacctgccaactcgtcagctccaccgtcgtcgaccccaacaacgggaaccgcgggaaggtgggtcaggaggcgagcctggagcagtggctgctgcacccgccgccgcttctggccggcgaggaccagttccgcgtcaccttcgactgggaggtggagaagcacggcgtcccgggcgccatcatcgtgaagaacaaccacgcctccgagttcttcctcaagaccatcaccatcgacgacgtccccggccacggccccatcgtcttcgtcgccaactcatggggtgtacccgcagtacaagtaccgctacaaccgcgtcttcttctccaacgacacgtacctccccagccagatgccggcggcgctgaagccttaccgcgacgacgagctccgcaacctgaggggcgacgaccagcagggcccgtaccaggagcacgaccgcgtctaccgctacgacgtctacaacgacctcggcaaccccgacgccaaaaacccgcgccccgtcctcggcggctccaagcaccacccctacccgcgcc

SEQ ID NO: 158027 - DNA, 767 bp, Zea mays
  Clone ID: MRT4577_7569C.1
ccggctcagaggagctggcaaacgactgtgataataaaaggctaaatccaggaaatgacaattatccactttcaacagcaggtgcaaataatttgtttttgggtattgagcaaggagctggaagcagcaatggccaggctgctttttcgaaatttgactatgggagctcaatgtcattaccatctgggcagggaatgtctggtcttatcgtaaaaggggcaaaatggcgcgacggggactggttgtgcaacaactgcaacaaccacaactacgcatctcgtgcgttttgcaacaggtgcaaaactcagaaagaatctgcagttcaccctggtgtgctatagcttgcttttgctggttcatattgttggactcgtttgttgcagggtatgttgctgcctgttctagctgcttcctcaagactgcagtttgagttttttcggttctgctgggtttttgctgctctcaaatgtttgtctcgatattccattagtgcttgttgaagttcccgatttatttatggtataagcgcttgaataaaatatctctggaaagtactggcctaccgcctaccatctgtttttttccaaatatttttattagttgttgtacaatgaggcaaatggtgatatacttatgttgtactttatgaactctgtaggattagtgcaccaaattaaggttttgtggccatgtttcagtcgtcgggttgaaaaagggaactataccatgtaatttcattacagattattattttttcctagaactcc

SEQ ID NO: 158028 - DNA, 417 bp, Zea mays
  Clone ID: MRT4577_756C.1
cctgtgcggcgctcgaggcggccggtccggatagctaagttgacatgctgatgtcgcaattgaactagaaggaagatccctcatcagcctatcaaacacgcatagatggcctctctccgtaggtgactttagttcctgtgtggatgtcaatctctcatcacctcttgtcattgtggactgtctagggatttgccctccatattagtgtgtcgcagtgtctattttttttgtcaccttctctgccgattaccggcttccttggccccaccctagatttgctgtaggtaaccctcgcttctgtatgtatcgatgtacgctacaccgactaccacatgattactgcccggcccccactatttttttcaatgtgatttgcataaacaaaaaaacaacaggcccaatgctcggggatcgttg

SEQ ID NO: 158029 - DNA, 407 bp, Zea mays
  Clone ID: MRT4577_75700C.1
aatcgaccgatgcataggcgcataactccgttgactaagctttcctgctgtacggataatcatacgacgttatggcctaggtaaacgggaagtacttgacgtgatggcaatcatggtttctggaaaaagcactgtgctgaagatcatctctgaactcttaccttatcccctctttgatattgacaaatctgtggtgacagctacacacatgcacttgagccgatgatatattctacgcctacagataagccctctgtaatgatactcttagaatcttcttcacttatctgcatttcatgctacaattagcagttgccaccagatgcactcatgacatgctaactgctaacttcttatatatgaccattggcctatacgattatgtcgatgataccttgtatactctt

SEQ ID NO: 158030 - DNA, 404 bp, Zea mays
  Clone ID: MRT4577_75701C.1
aatagtgacaagtccaatcaaggaggaccaattaatatatagttgcagcagatgcattacaggcaaccaacatgcatgaagacacacctaccttcatgagcacaaaggctgtccccaaaccatcatagggggatatctgactagaagaactcttgtcttctttctataacacacaccacacaatacctatgtatgggatccagttagacctacctttttattggttaaccaccaacacaagctggatggataatagtaatcaccacagcgcccgataagggggctcaccagatgaagggggggcacttgcagcatgcaccgcagttgaaatcacgggggggcccacgggactcccccgggggctgcacgaacccgggagcgggcttgttgtccgggggcacacc

SEQ ID NO: 158031 - DNA, 856 bp, Zea mays
  Clone ID: MRT4577_75702C.1
ggccccctttttttttttttttttaatttttttttttttttttttttttttttttttttttttttttttttttttccgcttttttttttttttttttggtcgttgtaaacgtaatttctgtaagagtggtgtaaaaagttatataatactgactctattctcgaatacttatcgcatgctagtttattttaaactaaaatacgacaaataaaaaagaacggagggaatacgttactactacacgtacgtgtacgcatatattgttgcagctagcagtgtagcagctttgatttggacgtatatatgcgtagcacttctacagcgttaatgtagttaattgagcttgtatacacgcgaactatactgcatgcacattgccatgtccacgctttatttatttcttgcatgtatactagatcattcatctctgttcgttcgcgcgcacaactgcagcagctgcaggctttatggcggcgacggaacgtaaggctgaggatgctgcggatgcaggtgggcggtcactgggtcgacgccgacggtcactggcatcttcaccggcaccgcggctcgtgagttgcttggtatctccgggtggtggatgatcactggcatattcctcacggttcgtcctgcaaccgtctccctcgtctcccttctcgattcaaaggttggagtacgggcagcaaatgacgaggccacgagaagggcggaggcgacaacgaagcaaagcacaaccacgctggttctggccgccattgtgatgcgctagctttcctacttgcagtggcagtgtgctctcgatatgattgtcttctaatttaatttggtgtcccggcccggccgggagctacccaat

SEQ ID NO: 158032 - DNA, 3354 bp, Zea mays
  Clone ID: MRT4577_75703C.1
gccggccaggcttgccccgctctataaatagctggcctgctcgctcagccatcaccgactcacactcacacagcaaataccccacaaggccactccaaagagctagtagttgcagttagctctgccggtagtggaaccgaagatgttcgggaacatcggaaagatccccatcattggcgacctgacgggcagcaacaagaatgcgcacctcaagggcaacgtggtgctcgtgcgcaagaccgtgctcggcttggacgtcaccagcatcgcaggctccctcctcgacggcgtcggcgagttcctcggccgcggcgtcacctgccagcttatcagctccaccgtcgtcgaccctagtgagcagagcaccctcccttcctgcctcctccttgctctctcagctctcttacatgcatcagtaatgaagaggggaaaaatgtcgttttcaagaaaagaaaaatacagaaagcgacaaaattaaattatctacggatggatgcttgagacgaacaatgacgaaaacgacggcagatgaatccactttaaatctactagcacagtaaaccggatccagacaaagaacggacagtgctttttagcatagcagtagtgcatttcacacgttggtcgtctgacggcgacgctgaccggcgcacgcgtgcaccgtgcagacaacggcaaccgcgggaagttgggcgccgaggcgagcctggagcagtggctgctgaacccgccgccgcttctgtccagcgagaaccagttccgcgtcaccttcgactgggaggtggagaagcagggcatcccgggcgccatcatcgtcaagaacaaccacgcctccgagttcttcctcaagaccatcaccctcaacgacgtccccggccacggcaccatcgtcttcgtcgccaactcatggatctacccgcagtccaagtaccgctacaaccgcgtcttcttctccaacgacacgtacctccccagccagatgccggcggcgctgaagccctaccgcgacgacgagctccggaacctgaggggcgacgaccagcagggcccgtaccaggagcacgaccgcgtctaccgctacgacgtctacaacgacctcggcctgcctgacagcgggaacccgcgccccgtcctcggcggcaccaaggagctcccctacccgcgccgctgccgcaccgggcggaagcccaccaagagcgaccccaacagcgagagcaggctcacgctggtcgacggcgacgtctacgtgccgcgcgacgagcgcttcggccacatcaagaagtcggacttctacggctacgccatcaaggcgctggtgaacgccgtcatcccggcaatccgcacctacgtcgacctgtcgcccggcgagttcgactccttcaaggacatcatgaagctctacgagggcgggatccagctgcccaaaataccagccctcgaggacctgcggaagcagttcccactcgagctcgtcaaggatgtcctcccggtcggcggcgactacctcctcaagctccccatgccgcagatcatcaaagaggacaagacaggttggatgacagatgaggagtttggacgggagattctcgccggcgtgaaccccttgctcgtcaagcgtctcacggagttccctccgaggagcagtcttgacccgagcaagtacggcgaccacaccagcaccatcagggaggcggacctcgagaacaagctcgagggcctgacggtgcagcaggcgctgcacggcaaccggctctacatcctggaccaccacgacaacttcatgccgttcctggtcagggtgaacagcctggagggcaacttcatctacgccaccaggaccgtgctgttcctgcgcggcgacggcacgctggtgccggtggccatcgagctgagcctgcccgagctccgggacggcctgatcaccgccaagagctccgtgtacacgcccaagtcgaccaccggcgcggaggcgtgggtgtggcacctggccaaggcctacgccaacgtgaacgactactgctggcaccagctcatcagccactggctcaacacccacgccgtgatggagccgttcgtgatcgccaccaaccggcagctcagcgtgacgcaccccgtgcacaagctcctcctgccgcactaccgtgacaccatgaacatcaactccaacgcgcgccagatgctcgtcaacgccggcggcatcttcgagaccaccgtcttcccgcgccagtacgcgttcgagatgtcctccgtcatctacaaggactggaacttcacagagcaggctctccctgacgacctaatcaagagaggcatggcggttgccgacccgtcgagcccgtacaaggtacggctgctggtggaggactacccgtacgcgtcggacgggctggccatctggcacgccatcgagcagtgggtgacggagtacctcgccgtctactaccccaacgacggcgtgctgcgggcggacgtggagctgcaggcgtggtggaaggaggcgcgcgaggtcgggcacgccgacctcaaggacgcgccctggtggcccaagatgcagaccgtggccgagctggtcaaggcctgcaccaccatcatctggatcgcgtcggcgctccacgcggccgtcaacttcgggcagtacccgtacgccgggtacctcccgaaccgcccgtccgtcagccggaagccgatgccggcgccgggcagcgacgagtacgcggagctggagcgcaagccggagaaggtgttcgtgcgcaccatcaccagccagttccaggccctcgtcggcatctcgctgctggagatcctgtccagccactcctccgacgaggtgtacctcggccagcgcgacaccaaggagtggacgtcggacgccaaggcgcaggaggcgttcaagcggttcggcgcgcggctgaccgagatcgagaaacgcgtcgtcaccatgaacgcggaccctcgcctcaagaaccgaaacggcccggccgagttcccctacacgctgctctaccccaacacctccgacacgaagggcgacgccgccggcatcaccgccaagggcattccaaacagcatctccatttgagttctgtctgtctgagatgaggacgtacggtcgtcgcactagttgtttgcgtttccccgttccgtcgttccgtgaagtgtggttctcacttgcgcggtattgtgcaaatagccaagtactccttacggaagtcgctacgtgaggactgttgtaataaggctctattcagttcctcaataatgaagttactttgtgtttcaaaaaaaaaaaaaaaaaaaaaaaaaaaaaaaaaaaaaaaaaaaaaaaaaaaaaaaaaaaaaaaaaaaaggccccta

SEQ ID NO: 158033 - DNA, 1022 bp, Zea mays
  Clone ID: MRT4577_75704C.1
acgatacgttgcagtggtttgcagatctcgctgtattaaacatcaacgaccttgctgagcaagctgaactccaagcttgtacgaatgattccagtaactacgagtcggattcattcgagtccttgacactgaagctggaagagaccaagatcgacgatctctggagcaggccactggaacctgaaaccgcaaccgatgaacagacagtttcagctgctcaccttctcaccaagcccagaaggggccagcaaaggagacggcggcagaagcgagatttccagagagatgtcttgcctggcctttcgtcgctttcccggcctgagatcacagaggacgtccagttgctcgaggggttagtccaggcttccgggggatcctgggagtcgagcttgactaggcgaggacgttgtggtgggcgtgctagaggcaggaaacctcggaaaactgtagtaaccgtaattgtagaggaggaggaagaggaggaggtagaggttagcccaccgccaaaacctgctggcactggggaattggaagccgatggcaggggtatgatcgggtggggcagaacaacaaggcggtgtcgcagagcgagatgtccgtcaggtaacagcatggctactgcgtcttgagtgggagggtatttcttggcagcaagcattggacctgattaggtactgggtggttcacaattgttgtattgactccgatggatgggctggtggtataaggtgatcacactcatatgagtgtcggcctactggtctcagcacaactttcgtgcttttgggtcgaaacatggtttacgttcttataataagttcggtaaattagctggcgagacatttctgcgacagcattgtactaagctgttccaggttatgaggcccggtgccccggtatatattcattgtgagaaaaactgcaatgcatgtaaaccaccttgatctctgaagaatagctcatcacatgtgtaacaaaagggtgtgaatgaggctctgagcctgtattctttttgtagctgt

SEQ ID NO: 158034 - DNA, 3050 bp, Zea mays
  Clone ID: MRT4577_75705C.1
gagatacaagtgcccccctagatcctcaagcacaaggaacatgacaccgtacagctcctttgatatataaaatgacctgaccgactcacactcacacagcaaataccccacaaggccactccaaagacctagtagtggaaccgaagatgttcgggaacatcggaaagatccccatcatcggcgacctgacgggcagcaacaagaatgcgcacctcaagggcaacgtggtgctcgtgcgcaagaccgtgctcggcttggacgtcaccagcatcgccggctccctcctcgacggcatcggcgagttcctcggccgcggcgtcacctgccagcttatcagctccaccgtcgtcgaccctaacaacggcaaccgcgggaagttgggcgcggaggcgagcctggagcagtggctgctgaacccgccgccgcttctgtccagcgagaaccagttccgcgtcaccttcgactgggaggtggagaagcagggcatcccgggcgccatcatcgtcaagaacaaccacgcctccgagttcttcctcaaggccatcaccctcaacgacgtccccggccacggcaccatcgtcttcgtcgccaactcatggatctacccgcagtccaagtaccgctacaaccgcgtcttcttctccaacgacacgtacctccccagccagatgccggcggcgctgaagccctaccgcgacgacgagctccggaacctgaggggcgacgaccagcagggcccgtaccaggagcacgaccgcgtctaccgctacgacgtctacaacgacctcggcctgcctgacagcgggaacccgcgccccgtcctcggcggcaccaaggagctcccctacccgcgccgctgccgcaccgggcggaagcccaccaagagcgaccccaacagcgagagcaggctcacgctggtcgacggcgacgtctacgtgccgcgcgacgagcgcttcggccacatcaagaagtcggacttctacggctacgccatcaaggcgctggtgaacgccgtcatcccggcaatccgcacctacgtcgacctgtcgcccggcgagttcgactccttcaaggacatcatgaagctgtacgagggcgggatccagctgcccaaaataccagccctcgaggacctgcggaagcagttcccactcgagctcgtcaaggatgtcctcccggtcggcggcgactacctcctcaagctccccatgccgcagatcatcaaagaggacaagacaggttggatgacagatgaggagtttggacgggagattctcgccggcgtgaaccccatgctcgtcaagcgtctcacggagttccctccgaggagcagtcttgacccgagcaagtacggcgaccacaccagcaccatcagggaggcggacctcgagaacaagctcgagggcctgacggtgcagcaggcgctgcacggcaaccggctctacatcctggaccaccacgacaacttcatgccgttcctggtcagggtgaacagcctggagggcaacttcatctacgccaccaggaccgtgctgttcctgcgcggcgacggcacgctggtgccggtggccatcgagctgagcctgcccgagctccgggacggcctgaccaccgccaagagcaccgtgtacacgcccaagtcgaccaccggcgcggaggcgtgggtgtggcacctggccaaggcctacgccaacgtgaacgactactgctggcaccagctcatcagccactggctcaacacccacgccgtgatggagccgttcgtgatcgccaccaaccggcagctcagcgtgacgcaccccgtgcacaagctcctcctgccgcactaccgtgacaccatgaacatcaactccaacgcgcgccagatgctcgtcaacgccggcggcatcttcgagaccaccgtcttcccgcgccagtacgcgttcgagatgtcctccgtcatctacaaggactggaacttcacagagcaggctctccctgacgacctaatcaagagaggcatggcggtcgcagacccgtcgagcccgtacaaggtacggctgctggtggaggactacccgtacgcgtcggacgggctggccatctggcacgccatcgagcagtgggtgacggagtacctcgccgtctactaccccaacgacggcgtgctgcgggcggacgtggagctgcaggcgtggtggaaggaggcgcgcgaggtcgggcacgccgacctcaaggacgcgccctggtggcccaagatgcagacggtggccgagctggtcaaggcctgcaccaccatcatctggatcgcgtcggcgctccacgcggccgtcaacttcgggcagtacccgtacgccgggtacctcccgaaccgcccgtccgtcagccggaagccgatgccggcgccgggcagcgacgagtacgcggagctggagcgcaagccggagaaggtgttcgtgcgcaccatcaccagccagttccaggccctcgtcggcatctcgctgctggagatcctgtccagccactcctccgacgaggtgtacctcggccagcgcgacaccaaggagtggacgtcggacgccaaggcgcaggaggcgttcaagcggttcggcgcgcggctgaccgagatcgagaaacgcgtcgtcaccatgaacgcggaccctcgcctcaagaaccgcaacggcccggccgagttcccctacacgctgctctaccccaacacctccgacacgaagggcgacgccgccggcatcaccgccaagggcattccaaacagcatctccatttgagttctgtctgtctgagctgaggacgtacggtcgtcgcactagttgtttgcgtttccccgttccgttccgtgaagtgtggttctcacttgcgcggtattgtgcaaatagccaagtacttactccttacggaagtcgctacgtgaggactgttgtaataaggctctattcagttcctcaataatgaagttactttgtgttccaaaaaaaaaaaaaaaaaaaaaaaaaaaaaaaaaaaaaaaaaaaaaaaaaaaaaaaaaaaaaaaaaaaaaaactcgaaggggg

SEQ ID NO: 158035 - DNA, 227 bp, Zea mays
  Clone ID: MRT4577_75706C.1
attcggctcgaggccagtttcacctcccagttttaacacatacaccttggataaggtgtcgtgagggctttatgccacagcgagagctaaagacgaagcggactaccgtagctatctaattacagattgaatggcccaccagccacgatccgctcgaaactgtcatagcctcatacagcaagatccgcatccccacggcaatcaccgaccgggataccaggagagta

SEQ ID NO: 158036 - DNA, 699 bp, Zea mays
  Clone ID: MRT4577_75707C.1
ggtaccggcgcctaccctcgagtttttttttttttttttttttttttttttttttttttttttttttttttttttttttttttttggggggtaaaaataagccctacctcaatcagtttttttcattttaaacataccccgtataaccgggatctggacattttaacaataacataacgggaatttgaaaccgggatctgtaccctttaacagaaacataacgggaatttgaaaagggcgaagaacaagggccccaatcctaatctgatggggcaaagcaaaattcatcctcaccaggggggggtgcaatcatcacctaaatgccctggattggaacaaatccaaccgagccttggtttccgggagcaatgcctaaacgcgcaggtcctgccccatgggggcctgtttcgacccccacaggaaaacggggagcaccccggcctgggcgagttccttgttttccgggacatgcagggggatgtaacaaagcaatatgagcgcctcgatctggagctggtctccgagggacactaactggacaaggggccgcgcccccccggcgtccacaatggccctggaggggttcacgggcagggggttctcggggcaggcaaacttggtcagggcaaccacggcctccttaatgaccggaacgtcgggggtcgtccaaaaattgcaccagggggccgatcacgcggg

SEQ ID NO: 158037 - DNA, 305 bp, Zea mays
  Clone ID: MRT4577_75708C.1
attcggctcgaggtcaaaggcggcttttgcgggggccgtgggttccctgcggtggcgtgggtatgtgttgagggggcacttgtctaagaagctgtccttggacttgaggctgatgaacctcatggtgcccaaggaggaggccgtcgtcatttacgtccgactcctacaaatcctctgcgaccatgggcccctgaccgacgtgaccacctactaccacgcgaatgatgctgggatccctggtctgaacacgatgacgcacatgaagattctgctgaaatggatgacagcgagaaatgtccagaagc

SEQ ID NO: 158038 - DNA, 239 bp, Zea mays
  Clone ID: MRT4577_75709C.1
aagcagtggtgaacaacgcggataacccggggcccacccgtgccgtcttcagctacccaccgagcgggacctcacctagtctgcctctgtgcctgccacgctgctgtcaaatggtgtgctggcgagaagatctctccccaacaccttccagacttcgccgtgtgctctggatccagatggcagctcgtcagagtccctctctgaccgtgccatgcaactcgctcgggcgccaccacgct

SEQ ID NO: 158039 - DNA, 1052 bp, Zea mays
  Clone ID: MRT4577_7570C.1
ggagtagaactgtttgatcggctcttcataccagttctgttttatagccatcaattcatgaagactaatgtcacgacttgctttctcaacaaattgaccttctggatggtttgcggcgcggaggccggctgcggggttccggggcagcgcgtctcgcggaggtgcgtagacgacggcggagcggcgtcctcacctccatggcgtcgctgtcgagcaagcaccacgtcctaatccaggtgctgctcgcccgcggcccgctctctgagcgcgacttccacgctttcatcgatggcgcctttggcaagaacaccgcattaggaactaagcggttggcttcagaggacctggccaatgactgggataataaaaggctaaatccaggaaatgacaattatccactttcaacaggagctgcaaataatttatttttgggtattgagcaaggagctggaagcagcaatggccagtctgcctttcccaagtttgacaatgggagctcaatggcattaccatctgggcagggaatgtctggtcttatgggaaaaggggcaaaatggcgtgacggggactggttgtgcaacaactgcaacaatcacaactatgcatctcgtgcgttttgcaacaggtgcaaaactcagaaagaatctgcagttcaccctggtgtgttatagcttgctgttggattattttgttccaggatatgttgctgcctgttctagctccttcctcaaggctgcggtttgagtttttttcgattctgcagtgtttttgctgctctcaaatgtttgtctcgatatttcattagtgcttgttgaagttcccccatttgtttatggtataagcgcttgaataaaatgtttctggaaagtaccggcctacaatctggattttggcaaaataattgaattagttgttgtacaatgaggcaaattgtcttacgttgtactttatgaactctggagtattatcactcgtcgggttgaaaaggggaactatacaatgtaatttcagtacagattattattttttcctgaaaaaaaaaaaaaaaaaaa

SEQ ID NO: 158040 - DNA, 303 bp, Zea mays
  unsure (1)..(303): unsure at all n locations
  Clone ID: MRT4577_75710C.1
gatggatctcccagtcatatgctatccgcaaacagcgagacacatactataatgaaaggggtaagatggggcctgtattatatggaaagccagacgcctcgaacagcttangccatatggacacatgtggtgtagaacagtagattgatccaaggaacaacatcacagtgacagtgatgatgttgtcagaagttgccatctgagatggtatataggtgagaaggttggagaaacccgcctaatgatgtattaaagaaaaacaaaaagactgccgatggtgctgatgaggataacgtaaaaaca

SEQ ID NO: 158041 - DNA, 348 bp, Zea mays
  Clone ID: MRT4577_75711C.1
cggacgcgtgggaaaaaaaaaaaaaaaaaataaaaaaaaaaaaaaaaaaaaaaaagaaaagggatataaaaaaactcaaaattaaaaaaaaaaaaatacaaaaaataaaaatataaataaaaataacaaaaaaaaaggtttaccgttttacagtttccaagtttacgactggaaaaacccaggtgttacctattttattgggcacccaaaaaaaaatccttttgccagttttttaaaaaactcaaaagggcaaaacctttggcttttccaaataattcgctattctgaatattcatttttaccccccttttaaagtaccataaaagccccaagcaatggcttttccaa

SEQ ID NO: 158042 - DNA, 664 bp, Zea mays
  Clone ID: MRT4577_75712C.1
aatgaatctcctgacatggcacatggtcattagatcacataaaatccctcctagttttgacaaacagaaggctgaaaaatatagaacaagaaacacatggactcccatgccatcatggtggtaaaaaacaaatagaagaaactccccacatgagggcagcgaagattaaaatggacccccccctcccacatacacacacacacacaaacagtcagttcaggagaatgtagcatctgaatttgactaaatggaggctttaaatggtgaacatgaaaaaagaagtgcattgggactatgatgggttgttcaaccaccccctccccactccccaccaacaatgagtaagtacaagtagcccacagagaagtttaagaaaatcattactgaaccacccttgcgctatcaagagttcaagactgcgtcaatgcttactcgtttcctcgaaccttattatctttaaaatcgacatcacattgagtctgttcaaaccgctagcgaatttttttaatggtggcgtgagatatcggggccctaactgataacgatccaggctcagtcagatatattggtgcttaaataatacacccccaaacggataagcaagagcgacagggagcaataccagtctcgggaacagttgatgcacatggcatggttgcaattc

SEQ ID NO: 158043 - DNA, 245 bp, Zea mays
  Clone ID: MRT4577_75713C.1
cgcagttgttggtgtcctcggagctaaaaaaaaggccccccgccttttggctcattgtcagactttgcgacctgctccaagaaagctgtctggagatggtgcgcgccgagaagcgcgccggcgatggctgctccggcggcggcgaaggccaagtggaggtggaggtcggcatggggatggacgggaagggggtcacagagtgccggatatgccaggaggagggccaggaggccgctatggactca

SEQ ID NO: 158044 - DNA, 351 bp, Zea mays
  Clone ID: MRT4577_75714C.1
cccacgcgtccgcccacgcgtccgacgacgcgtactatcgattcgcaagcggatggtcggcgtcttactatccaacaccgcgccggtccggattaattccttctcgaccggacagcgcaatgctgtgcctagatcgatcggtgcgaaggcaagtgatgccgctatatatatatatatatatatatatctatgtatgtatatgtatataggagattcttgtagcgagctcttaacgcgatgggtttacccgtcctctactactgcatttgcattggcggcgacgttgaattggcgacatgcaaggtcagcgttaggtacgtcgctacatgggaaacccccaaggtcattttg

SEQ ID NO: 158045 - DNA, 531 bp, Zea mays
  Clone ID: MRT4577_75715C.1
atcgtccacctcatcaaaccttcgtccacgcttcgactcctgcagggagtgagggagagtgatggagaggtgcgggagctgggactgcgacgcggcggcagcgcagaaggcggtaccggcgccgttcctgaccaagacgtaccagctggtggacgacccggccacggaccacatcgtctcctggggggacgaccgggtctccaccttcgtggtctggcgcccgccggagttcgcgcgcgacatcctccccaactacttcaagcacaacaacttctcctccttcgttcgacagctaaacacctacgggttccggaaggtcgtcccggagcggtgggagttcgggaacgagttcttccggaagggggagaagcagctgctgtgcgagatccaccggcggaagacgtcgacgtccgcggctccgccgtcgcccccgccattcttcgcggcgcctcacttcccgctcttccacccggacgccccgcaccaccaccaccaccaccagttcgtggggggaggagacgacggggctgt

SEQ ID NO: 158046 - DNA, 312 bp, Zea mays
  unsure (1)..(312): unsure at all n locations
  Clone ID: MRT4577_75716C.1
tgaccaataccacatagcaaatctagctaattacccaccctctccctgcgagccctccaccacaactacagctaactcggtcgagatggctcgcactgcagcaacaaagctcgtgctggtcgccctggtggcggcaatgctcctggtagcctccgacgcggcgatctcctgcggtcaggtgaactctgccctggcctcctgcgtctcctacgcaaaaggcanngcggggccagcccgcctggggcctgctgttccggagttaggagattggccggcttagcgcggagcaccgccgacaagcaagcggcatgc

SEQ ID NO: 158047 - DNA, 652 bp, Zea mays
  Clone ID: MRT4577_75717C.1
cggcgtccacctcaacaaaccttcgtccacgcttcgactcctgcagggagtgagggagagtgatggagaggtgcgggagctgggactgcgacgcggcggcagcgcagaaggcggtaccggcgccgttcctgaccaagacgtaccagctggtggacgacccggccacggaccacatcgtctcctggggggacgaccgggtctccaccttcgtggtctggcgcccgccggagttcgcgcgcgacatcctccccaactacttcaagcacaacaacttctcctccttcgttcgacagctaaacacctacgtgagtcgccttcgcacttggccttggtttagctaagccttggaggccgcgcggagcgcggacggatggtgaccgccggtgacggcaatgctgcaacgggcaataatgcaggggttccggaaggtcgtcccggagcggtgggagttcgggaacgagttcttccggaagggggagaagcagctgctgtgcgagatccaccggcggaagacgtcgacgtccgcggctccgccgtcgcctccgccattcttcgcggcgcctcacttcccgctcttccacccggacgccccgcaccaccaccaccaccaccagttcgtggggggaggagacgacggggctgtggcggccgc

SEQ ID NO: 158048 - DNA, 347 bp, Zea mays
  Clone ID: MRT4577_75718C.1
ggcaaaacaaaaaagccaaaccaggggggcccccgattccaaaatcagttaatttaagggccaaaaaatgggggcgggcccccagggggggggggggaaatttttaggggggaaaaaggcccccccccgggggcgggactttttgggccctgcccggccctggtggaacacaaacccaacgggaaccggcggggactcaacaaagggcccccaaaattgggtaaccccgcccccctcccggtaacaactggcccgggccccccttggggggggggcccccttggttctccccccctggccccccaaggggcccccccccccccccagggccccccgggggatggggg

SEQ ID NO: 158049 - DNA, 1203 bp, Zea mays
  Clone ID: MRT4577_75719C.1
atgaccgcgtacttacccattgtcatcgagcaagacgcgctgcaatggctgcgacatctaccccgacactgcatcgacgactggggcgatttcagtcgacgcttcaccgccaattttcagtccctctccgacaaaccagcgcaaccgtgggacctcaaatccatcaagcgccggggggacgaaactctccggtcatacctcaaaaggttccagaccatgagaaatcgtatccctgagggaggacctcgcggaggcgagcgcacgctggacgacatcctcgacgcccagtgcccgtaccacaaggacatgtgccacactcttcggaactgccgagacttcaagcactccgtcgggcacggccgacccttccaacctctacctcctccgccaaggggagggccagaagaaccacgacaaccccagcagcaggaggagggaggaggaggagctttcccgcgtgttgacagggagatattggtggcaaccaccggtcctcccgccccataccggtggtcggagcacccgatcactttcactcgggcagatcaatggctcaacttcgaccacccaggcaaatacccgctcctcgtcgatccggtgatccgagagagcagggtgaagaaggtgttagtggacggggggagcagcatcaacgtcaccttcccctggacactccaaggcttgggagttcacctcaaagagctccacgagtccgacactcctttctttggcatcgtgccgactgaaggagaatacccgctgggccacatctacatgcccgtcaccttcggaactccggataactacagaaccgagttcctgaggttcgaagtggcgaacttcgactgcgggtacaacgccatcatcgggaggccgggattggcaaaattcatggccattccgcattacacgtacatgatactgaagatgccaggaccacaaggaatcataactgtgcgcgctgacctccaaggcgccgcagagtgtttccgagtggccatccaagcggccctcaccaccaagccgtcgacgacttcttcaacacaggtgaactctaagcctgaggaggaccttgcagcaccggcgaatgaagctcaggccacgacctctatgcggccgactgaagaaactaaaaggatcaacctggggttcgctgatgaacgcaagactgccatcatcagctccagcctggacgacaaatag

SEQ ID NO: 158050 - DNA, 385 bp, Zea mays
  Clone ID: MRT4577_7571C.1
aatccctcgcccacggacccaaccaaagccgggtgcacctgctccatggtccagccccgtccctacccagctcgtgtaacctcccgatgtccgggggcggaggcggcgcaggcgcgggctcgtcgtccggcggcggcggcggaggtggagggggcggccgggagggcgactgggactgcggcagctgcggcaaccggaactacgccttccgctcgctctgcaaccgttgcaagcagccgcgcctactcgtcgaccctaacaccccgcgcgactccaagtggctaccccgtgccggggactggatctgcaccggtaacaccttttctgccgcgctaccctttattattaccccagctctgaatcacctacactcctcatgtttcta

SEQ ID NO: 158051 - DNA, 1860 bp, Zea mays
  Clone ID: MRT4577_75720C.1
atggccgtcaccttccaccgcaagatcaccctccgccccggatccgtgttctgcttcggaactatctcatccgtagcagatgaagaaggaactcaacatcgcatcgcagacccgcccaggaagaagtctcctccaacaacctctgaaaatgtcggagccggagaacgggacccggagcagcctgtctcgcgagacgaggtctcagagataggagaaactccggaggaacgtgtcttcagagaacagaggaattcccgacagcgtgatcgccgacgggctcaggaacaagccaagcaggaggcaaggcagcgtcgagaaaatccactcttcgggcgcaacctgaaccccgacttcgcccgagccatgaacacgccgagtgaagtcggaggggatccagaaggctggctggccgtctacaccaccgccgctcgagctgctggggcgtccgaagacgtaatgaccgcatacttgcccattgtcctcgggcaagacgcactgcaatggctgcgacatctaccccgacactgcatcgacgactggagcgacttcagtcgatgcttcaccgccaactttcagtccctctccgacaaaccagcgcaaccatgggacctcaaatccatcaagcgttggagggacgaaactctccagtcgtacctcaaaaggttccagaccatgagaaatcgtatccccgaggtcacagaggcggccgtgatcgaggatttctacagaggatccaacgactcggccttcgtccgagccatattacagaaaacgtcgactacctctgagcaactgtttcgggaagccaacctctacatcaccgccgacgagcgagctcaggacctcatcgaaggagcgaaacctgtgccggcagcaccacgacgcgatacgaaccagcaacccgacaaacgatgggagaagaggcctcgcgaagaagttcacgccgccggaccacccgcctctcgcgcccgaggaggacctcgtggaggcgaacgcacgctggatgatatcctcgacgcccagtgcccgtaccacaaggacatgcgccacacccttcgaaactgcagagacttcaagcacttcgtcgggcacggccgacccttccaacctctacatcctcctccgccgcggggaggactaggagaaccgcgacaaccccagcaacaggaggagggaggaggtggagccttcccgcgcgtcgacagagaggtcaatgtcatcttcggcggcaaatacccgctcctcgtcgatccggtgatccgagagagcacggtgaagaaggtattagtggacggggggagcagcatcaacgtcaccttcccccggacactccaaggcttgggagttcacctcaaagagctccacgggtcagatactctcttcttcgccatcgtgccgactgaaggagaatacccgctgggccacatctacatgccagtcaccttcagaactccggagaactacagaaccgagttcctaaggttcgaagtggcgaacttcgactgcgggtacaacgccatcatcaggaggctgggattggcaaaattcatggccattccacattacacatacatgatattgaagatgccaggaccgcaaggaatcataactgtgcgcgctgacttccaaggcaccgcagaatgtttccgagtggccatccaggcggccctctccaccaaaccgtcgacaacctcttcggtacaggcaaactctaagcctgaggaagaccttgcagcacctgcaaatgaagctcaagtcgcgacctctatgcggccgactgaagaaactaagaggatcaacctcgggttcgctgatgaacgcaaaaccgctatcatcagttccagcctggatgacaaatag

SEQ ID NO: 158052 - DNA, 2058 bp, Zea mays
  Clone ID: MRT4577_75721C.1
atggccgtcaccttccacagcaagatcaccctccgccctggatccgtattctgcttcggaacaatctcatccgtggcagatgaagagggaactctacaccgcattgcagatccgtcgaaaaagaagcctcctccaacaaactccgaaaatgttggagaagcgcaacctccagctctccggaaaaagatcgccttcagaaagtcaggggccgagagcccgctgacccggagaactccactgtctacttccccgacaaaagaatggacacagatcgcgaggaagaaggagaccaaggggaagcaagttgttcttttcgttcctccgccctcaaaggagaacggaaagaaggtcgccacaacagcagcaccattctatcccgacgtcctcttcatcgggagagtggagtcgcctcccgtctccgacgacgagccaaccgcacccggagaagaaccacctcaacgagaatcccgccgacggagaaatcggcgccggaacgttcggcgacatcacgaggccgaagaacgggatccagagcaacctgtctcgcgggatgaggtctcggagataggagaaactccggaagaacgcgtcttcagggaacgaaggaactcccgacgacgtgatcgccgccgagctcaagaacaagctgagcaagacgcaaggcaacgccgggagaatccactcttcgggcgcaacctgaatcccgacttcgcccgagccatgaacacgccgagcgaagttgggggagtactagctcggatagctgatggactccctcggactcccgacgccgagggctatcgacgactgttcactcaggcagccaaccatcttctaccactcgctcacccgccgaacgatctacgacacgctatcaacagccgtcgggacgcacgaagctccatcaatgcttcgcgtgaacgacggcacgagaacgagattcgccgccgggaggagtacgacagggatcatggcatcccagctcggagccaggccaccagaactgagtcggcaacggcctcaactggcggaccccgcggaggcgagcgcacgctggacgacatcctcgacacccagtgcccataccacaaggacatgcgccacactcttcgtaactgccgggacttcaagcactccgtcgggcacggccgacccttccaacctctacctcctcctccgccgaggggaggaccagaagaaccacgacaaccccatcagcaggaggagggaggagctttcccgctcgttgacagggaggtcaacgtcatcttcggcagacacgggtcgcaggagaacaaaagacaacaaaagctcaacgatcgccagatactggtggcgaccaccggtcctcctgccccataccggtggtcggagcacccgatcactttcactcgggcgaatcaatggctcaacttcgaccacccaggcaaatacccgctcctcgtcgatccggtgatccgagagagccgggtgaagaaggtgctagtggacggggggagcagcatcaacgtcaccttcccccggacactccaaggcttgggagttcacctcaaagagctccacgagtcggacactcccttcttcggcatcgtgccgactgaaggggaatacccgctgggccacatctacatgcccgtcacctttggaactccggagaactacagaaccgagttccttaggttcgaagtggcgaacttcgactgcgggtacaacgccatcatcaggaggccaggattggccaaattcatggccattcctcattacacgtacatgatactgaagatgccaggaccacaaggaatcataactgtgcgcgccgacttccaaggcgccgtagagtgtttccgagtggccatccaagcggccctcaccaccaagccgtcgacgatttcttcaacacaggcgaactctaagcctgaggaggaccttgcagtaccggcaaacgaagctcaggccgcgacctctatgcgaccgactgaagaaactaaaaggatcaacctggggttcgctgatgaacgcaagactgccatcatcagctccagcctagacgacaaatag
